United States Patent Application Publication US 2011/0183924 A1 - sequence listing, part 116

SEQ ID NO: 334081 - DNA, 5717 bp, Homo sapiens
tttttttacactttaaatgtgtggtttattgtatgccagttataacgcaatatagctgttaaacacaaacacaataaagttgaaaaaccagcaggcattccctgattaatcagtattctggggaggtaaggggctcacaggaacgcaaaagaaattcaggctgtaaatccagttggacgccccgctgccccatcccctccatccgggaccgcccgactcctctcccacctccttccccaggcctcccccaggcctccagtccggaagatgcgacgaggttagcggggcccgaccactccttggcttcccaggggtgagcctcgcgagttaggagttgggtagagagtcagcccggggcccggcatccgctttttcgttgaagcaacgactttggccggatgactccccagggtcggcatcagcgtgggactgggaacaggtgaagggaaacagaagagagcctgagaagaccgctctcctccgatcctaattgactgagccaatgagagccaaagaggtcacatgctcaactgggcggggagcgggtttccacctgcggcatctttcgcgagcggggagatgagtggggcggaatatgggagaaagggagggcccgccacgctctggctggacacggccttaatcggcccgttcactcgacgtttttggttctacgttgaccccgagaaaccgaaaccgcagggcctagggcgggtggaacgagagggaactacatttcccagcaggctgcggaaacgggactgcggccactacttccggcgtgtaccgagagactggcgtccggcgtgtaccgagagactggcgtccggtgtgcaggtggccacatggatcctggcagccggtggcggaacctgcccagcgggcctagcctaaagcacttgactgacccctcttatggaatcccgcgggaacagcaaaaggcagcgttgcaggagctgacgcgggcgcacgtggagtccttcaactacgctgtgcacgagggtctcggcctcgcggtgcagagacggggtctccctatgtggcccagcctggtctcaaactcctgagctcaagtagtcctcctctctcggtctcccaaatattgggattacaggctatacctccctttgaatttgctttcaaagatgagcgtatctcttttactattctggatgctgttatcagtccacctacagttccaaaagggaccatctgcaaagaggccaatgtttatccagcagaatgccggggccgaaggagtacctaccgtgggaagttgacagctgatatcaactgggcagtgaatggaatctcaaaaggaatcattaagcagtttcttggctatgttcccatcatggtgaaatccaagctttgcaacttacgtaaccttcccccacaagccctcattgagcaccatgaggaggcagaggaaatggggggctattttataatcaatggcattgaaaaagtcatccgaatgttgattatgcctcggagaaattttcccattgcaatgataagaccaaaatggaaaaccagagggcctggttatactcagtatggagtttcaatgcactgtgtgagggaagaacattccgctgtcaatatgaacctccactacttggaaaatggcacagttatgttgaactttatttaccgaaaagaactgttctttcttcctttgggatttgcacttaaggcacttgtcagcttttctgattatcagatctttcaggagctcatcaaaggaaaagaggatgattctttccttaggaactctgtttctcagatgttaaggattgtaatggaagagggttgtttgacacaaaaacaggtccttaactacctaggtgaatgcttcagagtaaaactcaatgttcctgactggtacccaaatgagcaagctgcggagttcctgtttaaccagtgcatctgtatccacttgaaatccaatactgaaaagttttatatgctttgtctcatgacgcgaaagctctttgctttagccaaaggagagtgcatggaggacaatcctgatagtttggtgaaccaggaagtcctcacaccgggtcagctcttccttatgttcctgaaggaaaaactggaaggttggttagtgtctattaaaatagcttttgataagaaggctcagaagaccagtgtttccatgaacactgacaatttgatgaggatttttacaatgggcatagaccttacaaaaccatttgaatacctttttgctactgggaatctgcgttctaaaacaggtcttggcctcctacaagattctggactttgtgttgtggctgacaagctgaacttcatacgctacctctcccatttccgctgcgtgcacagaggggctgattttgccaagatgaggaccaccacagtacgcaggctgctgccagagtcctggggcttcctttgtcccgtgcataccccagacggggagccctgtggcctgatgaaccacctaactgccgtatgtgaggttgtcacacagtttgtgtatacggcatctattccagctttactgtgcaacttgggggtcactcccattgatggagctccccaccgatcatacagtgagtgctaccctgtcctgctggacggtgtcatggttggctgggtggataaggatcttgctccaggcatcgcagattctcttcgtcattttaaggtgttgagagagaaaagaattcctccctggatggaagtggtccttatacccatgacaggaaaaccaagtctgtacccaggattgttcctttttaccactccttgtagactggtacggcctgtgcagaacttagcattgggcaaagaagagctaattggaactatggaacagatcttcatgaatgtcgctatctttgaggatgaagtttttgctggagttaccacacaccaggaactctttccacacagcctgctgagtgtgattgccaacttcatccctttctctgatcacaaccagagtccacggaacatgtaccaatgccagatgggtaagcaaactatgggctttccacttctcacttatcaagaccgatcggataacaaactgtatcgtcttcagactcctcagagtcccttggtgagaccctccatgtatgattattatgacatggataactatccaattgggaccaatgccatcgttgctgtgatttcttacactggctatgatatggaagatgccatgattgtgaataaggcctcttgggaacgaggctttgcccatggaagtgtctacaagtctgagttcatagacctctctgaaaaaattaaacaaggagatagtagcctggtgtttggcatcaaacctggtgacccacgcgttctgcagaagttagatgacgatggattgccgtttataggagcaaaactgcagtacggagatccgtattacagctacctcaacctcaacaccggggaaagttttgtgatgtactataagagtaaagaaaattgtgttgtggataacatcaaagtgtgcagtaatgacactgggagtggaaaattcaagtgtgtttgcatcactatgagagtgcctcggaacccaactatcggagataaatttgccagtcgccatgggcagaagggcattttaagcagattgtggccggctgaggacatgccttttactgagagtgggatggtcccagacattctgttcaatccccatggttttccatcccgcatgaccattgggatgttaattgagagtatggccgggaagtctgcagctttgcatggtctctgccatgatgctacacccttcatcttctcagaggagaactcggccttagaatactttggtgagatgttaaaggctgctggctacaatttctatggcaccgagaggttatatagtggcatcagtgggctagaactggaagcagacatcttcataggagtggtttattatcagcgcttacgccatatggtctcagacaaatttcaagtaaggacaactggagcccgagacagagtcaccaaccagcctattgggggaagaaatgtccagggtggaatccgttttggggagatggaacgggatgcgcttttagctcatggtacatcttttctccttcatgaccgcctcttcaactgctcagatcggtcggtagcccatgtgtgtgtgaagtgtggcagtttactctctccactgttggagaagccacccccttcttggtctgccatgcgcaacagaaaatacaactgtactctgtgtagtcgcagtgacactatcgatactgtttctgtgccttatgtttttcggtattttgtagctgaactggcagctatgaacatcaaagtgaaactggatgttgtttaacttgatgttgaccttttggattaagaggactatcagattaaagcaaaatgtaattttaattcaatgaagatatcattaccaggttactcttgagatttttcaacggtgttagaactctcaaccaagacctgaaaaccaagtatgcaaggtttctgaatctctctggtagattaactattgacaatgattttctgttatctttgttcaaaaagttcatgtcttctcaaaatatgaaatattgataaatggaagagcatacggtgacaagtctcctttccaaccccaggttccctacaccctgctctcagcaggcagtgagtgtcacacacctgttaatccatcttgagcaggacagtactatacaaatagaatgcaagctgtaatgtaattttatattttcttatagccacgttgaagtaaaaacaaacaggtacagtgttttttaccagctttatagaagtacagttgttacatatttaatgaatacaatttgatgggtctgactatatgcacacacctttgataccatcaccacaatcagggtaataaacatacctgtcatctccacaagtttcctcctgcccctttgttttttgctttttggttgctgttgagtttttgttttgtcttctgtggtaagaacacttaactcaagacctaccctcttaacaaatctttaagtgcacgatatagtattgttaattccaggcaccatgttgtacaacagatctttagaccttacttgtcttgcataactgaagctttatacctgttgaacaactctccatttccctggcccctagcaaccacccttctaccctgtttctatgagtttgactattacagatatctcatatagtgggatcatgcaatatttgtcctgtgactggcttatttcacttagcatagtgaaataagattcatccattttggaagccaggcatggtgctgtgcatctatagtccctgctatttgagaggctgaggtgggaggatcatttgagtgcaggagttcaaggacagcctgggtaatataggaagaccctgtcttgaagaccctgacctcaagtgatccacccacctcggcctccgaaagtgctaggattacaggtgtgagccactgtgcctggcctccggtgagtattttatatttagtctacacttccatacttggcttttttctgcttttatattgatctgctttcatagcagtgtgtagagtgccacttatgttttctttcttgtgtacagtattttattgtatggatttaccatcccctgtgtatttaagttgttccattctttggccattataacttttttctgcaaatattctggtgacttatctttggccattataaactgttgataat

SEQ ID NO: 334082 - DNA, 4019 bp, Homo sapiens
  misc_feature (87)..(87): n is a, c, g, or t
agcggatagagcgagtgctctcccgtcctgctgaacggggtcgtgatctggctgcggtaggcatagaaggagtgcgtggttgcacanggctatctgggacgagtgtgtctggcggtcagtaatgagcgagtagtctgagcatgtaggacaccggtaattgcctctctgtgtgcactgggaagctcgggtacgtgtggtagctgcagtggacacggaaggagatcgacatgttctggtgagcccctggcagttcgttccatctgttatcaccgattgccctgtgtgtaggaagtggctacgcgcgcgtactgtcttcacacgttaaccacttgcgcgcgactcgcaatgatgctgacaatcgggcatacctaagttgggagagaggagtgcttcctgaaatgtccgagatcttcatgaatgtcgctatctttgaggatgaagtttttgctggagttaccacacaccaggaactctttccacacagcctgctgagtgtgattgccaacttcatccctttctctgatcacaaccagagtccacggaacatgtaccaatgccagatgggtaagcaaactatgggctttccacttctcacttatcaagaccgatcggataacaaactgtatcgtcttcagactcctcagagtcccttggtgagaccctccatgtatgattattatgacatggataactatccaattgggaccaatgccatcgttgctgtgatttcttacactggctatgatatggaagatgccatgattgtgaataaggcctcttgggaacgaggctttgcccatggaagtgtctacaagtctgagttcatagacctctctgaaaaaattaaacaaggagatagtagcctggtgtttggcatcaaacctggtgacccacgcgttctgcagaagttagatgacgatggattgccgtttataggagcaaaactgcagtacggagatccgtattacagctacctcaacctcaacaccggggaaagttttgtgatgtactataagagtaaagaaaattgtgttgtggataacatcaaagtgtgcagtaatgacactgggagtggaaaattcaagtgtgtttgcatcactatgagagtgcctcggaacccaactatcggagataaatttgccagtcgccatgggcagaagggcattttaagcagattgtggccggctgaggacatgccttttactgagagtgggatggtcccagacattctgttcaatccccatggttttccatcccgcatgaccattgggatgttaattgagagtatggccgggaagtctgcagctttgcatggtctctgccatgatgctacacccttcatcttctcagaggagaactcggccttagaatactttggtgagatgttaaaggctgctggctacaatttctatggcaccgagaggttatatagtggcatcagtgggctagaactggaagcagacatcttcataggagtggtttattatcagcgcttacgccatatggtctcagacaaatttcaagtaaggacaactggagcccgagacagagtcaccaaccagcctattgggggaagaaatgtccagggtggaatccgttttggggagatggaacgggatgcgcttttagctcatggtacatcttttctccttcatgaccgcctcttcaactgctcagatcggtcggtagcccatgtgtgtgtgaagtgtggcagtttactctctccactgttggagaagccacccccttcttggtctgccatgcgcaacagaaaatacaactgtactctgtgtagtcgcagtgacactatcgatactgtttctgtgccttatgtttttcggtattttgtagctgaactggcagctatgaacatcaaagtgaaactggatgttgtttaacttgatgttgaccttttggattaagaggactatcagattaaagcaaaatgtaattttaattcaatgaagatatcattaccaggttactcttgagatttttcaacggtgttagaactctcaaccaagacctgaaaaccaagtatgcaaggtttctgaatctctctggtagattaactattgacaatgattttctgttatctttgttcaaaaagttcatgtcttctcaaaatatgaaatattgataaatggaagagcatacggtgacaagtctcctttccaaccccaggttccctacaccctgctctcagcaggcagtgagtgtcacacacctgttaatccatcttgagcaggacagtactatacaaatagaatgcaagctgtaatgtaattttatattttcttatagccacgttgaagtaaaaacaaacaggtacagtgttttttaccagctttatagaagtacagttgttacatatttaatgaatacaatttgatgggtctgactatatgcacacacctttgataccatcaccacaatcagggtaataaacatacctgtcatctccacaagtttcctcctgcccctttgttttttgctttttggttgctgttgagtttttgttttgtcttctgtggtaagaacacttaactcaagacctaccctcttaacaaatctttaagtgcacgatatagtattgttaattccaggcaccatgttgtacaacagatctttagaccttacttgtcttgcataactgaagctttatacctgttgaacaactctccatttccctggcccctagcaaccacccttctaccctgtttctatgagtttgactattacagatatctcatatagtgggatcatgcaatatttgtcctgtgactggcttatttcacttagcatagtgaaataagattcatccattttggaagccaggcatggtgctgtgcatctatagtccctgctatttgagaggctgaggtgggaggatcatttgagtgcaggagttcaaggacagcctgggtaatataggaagaccctgtcttgaagaccctgacctcaagtgatccacccacctcggcctccgaaagtgctaggattacaggtgtgagccactgtgcctggcctccggtgagtattttatatttagtctacacttccatacttggcttttttctgcttttatattgatctgctttcatagcagtgtgtagagtgccacttatgttttctttcttgtgtacagtattttattgtatggatttaccatcccctgtgtatttaagttgttccattctttggccattataacttttttctgcaaatattctggtgacttatctttggccattataaactgttgataatagatcatcttgtatatacttctgcaattataagatgttttttgatgaaagctttcctaaggtaattctttcctgagtttggttcagatggtctgtcactaattataaggcagataggaacagacagaaaaatctatcatttcaagataggcttagcaggatgggcgcagtggctcacgccactaatcccaacattttaggaggcctaggcaggagcaatcacttgtgcctgggagttctagactagcctgggcgagacttcatctctacaaaaaaagcaacaacgacaaaaaaaattagccaagcatagtggcacacccctgtagtcccagctacttgggaggctgaggtgggaggattgcttgaacccaagaggtcgaggctgcagtgagccaagattgtgccactgcactccagcctgggtgacagagcaggaccctgtctctattttataaattaaaaaaggctgggtgtggtggctcacacccataatcccaacactttggctcagcagattgcttgaacccaggaattcaagtccaatctgggcaacatggggaaaccccagctctacaaaaaaaattagcctggtgtggtggcacatgcctgtagttccagctactcaggaggctgaggtgggagaatctcctgagcctggaaggtccaggcagtgagccaagattgtgccaccacactccagcctgggcgacagaatgagaccctgtctcaaaaaaaaaaaaaaaaaaaaag

SEQ ID NO: 334083 - DNA, 423 bp, Homo sapiens
  misc_feature (27)..(27): n is a, c, g, or t
  misc_feature (75)..(75): n is a, c, g, or t
  misc_feature (85)..(85): n is a, c, g, or t
gggaaattgtgaaacggaataaacaantttccacaacaggaaaaacaacctatgacccatgaatttaaccccaancttggccacnaggtgaaaaacgcgtcgttgggttttggaggccgtgaaacagccgtttgagtttggctgcgggtggagaacgtttgtcaggggcccggccaagaaggaggcccgcctgttacgatggtgtccatgagtttcaagcggaaccgcagtgaccggttctacagcacccggtgctgcggctgttgccatgtccgcaccgggacgatcatcctggggacctggtacatggtagtaaacctattgatggcaattttgctgactagatgatggttgcatgtttctagtttgtatatgtttccatctttgtgataagatgatttaataaatctctttaaatactta

SEQ ID NO: 334084 - DNA, 1615 bp, Homo sapiens
caactatcctaggcccgagaaccagcccttgccttcgcgtaacaggcggagactcgctgaggcgagttgcacttctaattgggcgtgaggtcttgtcaatccccaagttcttccaatcagaagtccggtccatccagccttccgctccccattggcctgtgtggaggaagaggggtgggtaagccgaagtcgctgcgctcagtgcgcaggcgcgaagaagctggcaggggcacgagccgggggcgggtttgaagacgcgtcgttgggttttggaggccgtgaaacagccgtttgagtttggctgcgggtggagaacgtttgtcaggggcccggccaagaaggaggcccgcctgttacgatggtgtccatgagtttcaagcggaaccgcagtgaccggttctacagcacccggtgctgcggctgttgccatgtccgcaccgggacgatcatcctggggacctggtacatggtagtaaacctattgatggcaattttgctgactgtggaagtgactcatccaaactccatgccagctgtcaacattcagtatgaagtcatcggtaattactattcgtctgagagaatggctgataatgcctgtgttctttttgccgtctctgttcttatgtttataatcagttcaatgctggtttatggagcaatttcttatcaagtgggttggctgattccattcttctgttaccgactttttgacttcgtcctcagttgcctggttgctattagttctctcacctatttgccaagaatcaaagaatatctggatcaactacctgattttccctacaaagatgacctcctggccttggactccagctgcctcctgttcattgttcttgtgttctttgccttattcatcatttttaaggcttatctaattaactgtgtttggaactgctataaatacatcaacaaccgaaacgtgccggagattgctgtgtaccctgcctttgaagcacctcctcagtacgttttgccaacctatgaaatggccgtgaaaatgcctgaaaaagaaccaccacctccttacttacctgcctgaagaaattctgcctttgacaataaatcctataccagctttttgtttgtttatgttacagaatgctgcaattcagggctcttcaaacttgtttgatataaaatatgttgtcttttgtttaagcatttattttcaaacactaaggagctttttgacatctgttaaacgtctttttgtttttttgttaagtcttttacattttaatagtttttgaagacaatctaggttaagcaagagcaaagtgccattgtttgcctttaattggggggtgggaagggaaagagggtacttgccacatagtttcctttttaactgcactttctttatataatcgtttgcattttgttacttgctaccctgagtactttcaggaagactgacttaaatattcggggtgagtaagtagttgggtataagatctgaacttttcatctgcagaggcaagaaaaatatttgacattgtgacttgactgtggaagatgatggttgcatgtttctagtttgtatatgtttccatctttgtgataagatgatttaataaatctctttaaatactta

SEQ ID NO: 334085 - DNA, 1094 bp, Homo sapiens
  misc_feature (30)..(30): n is a, c, g, or t
  misc_feature (523)..(523): n is a, c, g, or t
  misc_feature (525)..(525): n is a, c, g, or t
  misc_feature (527)..(527): n is a, c, g, or t
  misc_feature (530)..(530): n is a, c, g, or t
cgaacaaaagacaacatattttatatcaancaagtttgaagagccctggaattgcagcatttattttcaaacactaaggagctttttgacatctgttaaacgtctttttgtttttttgttaagtcttttacattttaatagtttttgaagacaatctaggttaagcaagagcaaagtgccattgtttgcctttaattggggggtgggaagggaaagagggtacttgccacatagtttcctttttaactgcactttctttatataatcgtttgcattttgttacttgctaccctgagtactttcaggaagactgacttaaatattcggggtgagtaagtagttgggtataagatctgaacttttcatctgcagaggcaagaaaaatatttgacattgtgacttgactgtggaagatgatggttgcatgtttctagtttgtatatgtttccatctttgtgataagatgatttaataaatctctttaaatacttaaaaaaaaaaaaaaaaaaaaaaaaaaaaaaanananaanaaaaaaaaaaaaaaaaaaaaaaaaaaaaaaaaaaaaaaaaaaaaaaaaaaaattaaagaggagaaacagagaagctaatcatacaacaaaaaatatacctctattaaacagaagcagacgacatccataactacacagcgcagtccttgcagcacctgacacgagacctctccccacatgacaaacatctctcgaccgaacactccgcatcagcaaccctctgcgtaggagaggccaaccttagggagacgacacatgtgacaaaccccaccacccagggggggactacaaacccaaccgagccaccgacccaatcacaaccgacgcaagccacacacccaccagctagggcgacaccagcaacaaccagcacaatgacggggagcgacccacgaggaggagaaagaaacacaacacaacgagacgcccgcactcatgacacgcggaagaccaaaaaaaccaccaacgacagcgaacggtccagcaaacacaacacaacaccacaaacacacgccaagcacacacacccagcacaccaagcaagaccaagcctaacagcccgca

SEQ ID NO: 334086 - DNA, 327 bp, Homo sapiens
agtttgcggtgatctagaggatcccgaggtaatcgaggacctggtacatggtagtaaacctattgatggcaattttgctgactgtggaagtgactcatccaaactccatgccagctgtcaacattcagtatgaagtcatcggtaattactattcgtctgagagaatggctgataatgcctgtgttctttttgccgtctctgttcttatgtttataatcagttcaatgctggtttatggagcaatttcttatcaagtgggttggctgattccattcttctgttaccgactttttgacttcgtcctcaagccaatatgggtaagagctc

SEQ ID NO: 334087 - DNA, 1439 bp, Homo sapiens
  misc_feature (30)..(30): n is a, c, g, or t
gggttttggcttcctgccccccgggtgtangatatcgtcgaccacgcgccggggcacgagccgggggcgggtttgaagacgcgtcgttgggttttggaggccgtgaaacagccgtttgagtttggctgcgggtggagaacgtttgtcaggggcccggccaagaaggaggcccgcctgttacgatggtgtccatgagtttcaagcggaaccgcagtgaccggttctacagcacccggtgctgcggctgttgccatgtccgcaccgggacgatcatcctggggacctggtacatggtagtaaacctattgatggcaattttgctgactgtggaagtgactcatccaaactccatgccagctgtcaacattcagtatgaagtcatcggtaattactattcgtctgagagaatggctgataatgcctgtgttctttttgccgtctctgttcttatgtttataatcagttcaatgctggtttatggagcaatttcttatcaagtgggttggctgattccattcttctgttaccgactttttgacttcgtcctcagttgcctggttgctattagttctctcacctatttgccaagaatcaaagaatatctggatcaactacctgattttccctacaaagatgacctcctggccttggactccagctgcctcctgttcattgttcttgtgttctttgccttattcatcatttttaaggcttatctaattaactgtgtttggaactgctataaatacatcaacaaccgaaacgtgccggagattgctgtgtaccctgcctttgaagcacctcctcagtacgttttgccaacctatgaaatggccgtgaaaatgcctgaaaaagaaccaccacctccttacttacctgcctgaagaaattctgcctttgacaataaatcctataccagctttttgtttgtttatgttacagaatgctgcaattcagggctcttcaaacttgtttgatataaaatatgttgtcttttgtttaagcatttattttcaaacactaaggagctttttgacatctgttaaacgtctttttgtttttttgttaagtcttttacattttaatagtttttgaagacaatctaggttaagcaagagcaaagtgccattgtttgcctttaattggggggtgggaagggaaagagggtacttgccacatagtttcctttttaactgcactttctttatataatcgtttgcattttgttacttgctaccctgagtactttcaggaagactgacttaaatattcggggtgagtaagtagttgggtataagatctgaacttttcatctgcagaggcaagaaaaatatttgacattgtgacttgactgtggaagatgatggttgcatgtttctagtttgtatatgtttccatctttgtgataagatgatttaataaatctctttaaatactta

SEQ ID NO: 334088 - DNA, 2217 bp, Homo sapiens
  misc_feature (1646)..(1646): n is a, c, g, or t
  misc_feature (1648)..(1648): n is a, c, g, or t
  misc_feature (1650)..(1650): n is a, c, g, or t
  misc_feature (1653)..(1653): n is a, c, g, or t
caactatcctaggcccgagaaccagcccttgccttcgcgtaacaggcggagactcgctgaggcgagttgcacttctaattgggcgtgaggtcttgtcaatccccaagttcttccaatcagaagtccggtccatccagccttccgctccccattggcctgtgtggaggaagaggggtgggtaagccgaagtcgctgcgctcagtgcgcaggcgcgaagaagctggcaggggcacgagccgggggcgggtttgaagacgcgtcgttgggttttggaggccgtgaaacagccgtttgagtttggctgcgggtggagaacgtttgtcaggggcccggccaagaaggaggcccgcctgttacgatggtgtccatgagtttcaagcggaaccgcagtgaccggttctacagcacccggtgctgcggctgttgccatgtccgcaccgggacgatcatcctggggacctggtacatggtagtaaacctattgatggcaattttgctgactgtggaagtgactcatccaaactccatgccagctgtcaacattcagtatgaagtcatcggtaattactattcgtctgagagaatggctgataatgcctgtgttctttttgccgtctctgttcttatgtttataatcagttcaatgctggtttatggagcaatttcttatcaagtgggttggctgattccattcttctgttaccgactttttgacttcgtcctcagttgcctggttgctattagttctctcacctatttgccaagaatcaaagaatatctggatcaactacctgattttccctacaaagatgacctcctggccttggactccagctgcctcctgttcattgttcttgtgttctttgccttattcatcatttttaaggcttatctaattaactgtgtttggaactgctataaatacatcaacaaccgaaacgtgccggagattgctgtgtaccctgcctttgaagcacctcctcagtacgttttgccaacctatgaaatggccgtgaaaatgcctgaaaaagaaccaccacctccttacttacctgcctgaagaaattctgcctttgacaataaatcctataccagctttttgtttgtttatgttacagaatgctgcaattcagggctcttcaaacttgtttgatataaaatatgttgtcttttgtttaagcatttattttcaaacactaaggagctttttgacatctgttaaacgtctttttgtttttttgttaagtcttttacattttaatagtttttgaagacaatctaggttaagcaagagcaaagtgccattgtttgcctttaattggggggtgggaagggaaagagggtacttgccacatagtttcctttttaactgcactttctttatataatcgtttgcattttgttacttgctaccctgagtactttcaggaagactgacttaaatattcggggtgagtaagtagttgggtataagatctgaacttttcatctgcagaggcaagaaaaatatttgacattgtgacttgactgtggaagatgatggttgcatgtttctagtttgtatatgtttccatctttgtgataagatgatttaataaatctctttaaatacttaaaaaaaaaaaaaaaaaaaaaaaaaaaaaaanananaanaaaaaaaaaaaaaaaaaaaaaaaaaaaaaaaaaaaaaaaaaaaaaaaaaaaattaaagaggagaaacagagaagctaatcatacaacaaaaaatatacctctattaaacagaagcagacgacatccataactacacagcgcagtccttgcagcacctgacacgagacctctccccacatgacaaacatctctcgaccgaacactccgcatcagcaaccctctgcgtaggagaggccaaccttagggagacgacacatgtgacaaaccccaccacccagggggggactacaaacccaaccgagccaccgacccaatcacaaccgacgcaagccacacacccaccagctagggcgacaccagcaacaaccagcacaatgacggggagcgacccacgaggaggagaaagaaacacaacacaacgagacgcccgcactcatgacacgcggaagaccaaaaaaaccaccaacgacagcgaacggtccagcaaacacaacacaacaccacaaacacacgccaagcacacacacccagcacaccaagcaagaccaagcctaacagcccgca

SEQ ID NO: 334089 - DNA, 1551 bp, Homo sapiens
caactatcctaggcccgagaaccagcccttgccttcgcgtaacaggcggagactcgctgaggcgagttgcacttctaattgggcgtgaggtcttgtcaatccccaagttcttccaatcagaagtccggtccatccagccttccgctccccattggcctgtgtggaggaagaggggtgggtaagccgaagtcgctgcgctcagtgcgcaggcgcgaagaagctggcaggggcacgagccgggggcgggtttgaagacgcgtcgttgggttttggaggccgtgaaacagccgtttgagtttggctgcgggtggagaacgtttgtcaggggcccggccaagaaggaggcccgcctgttacgatggtgtccatgagtttcaagcggaaccgcagtgaccggttctacagcacccggtgctgcggctgttgccatgtccgcaccgggacgatcatcctggggacctggtacatggtagtaaacctattgatggcaattttgctgactgtggaagtgactcatccaaactccatgccagctgtcaacattcagtatgaagtcatcggtaattactattcgtctgagagaatggctgataatgcctgtgttctttttgccgtctctgttcttatgtttataatcagttcaatgctggtttatggagcaatttcttatcaagtgggttggctgattccattcttctgttaccgactttttgacttcgtcctcagttgcctggttgctattagttctctcacctatttgccaagaatcaaagaatatctggatcaactacctgattttccctacaaagatgacctcctggccttggactccagctgcctcctgttcattgttcttgtgttctttgccttattcatcatttttaaggcttatctaattaactgtgtttggaactgctataaatacatcaacaaccgaaacgtgccggagattgctgtgtaccctgcctttgaagcacctcctcagtacgttttgccaacctatgaaatggccgtgaaaatgcctgaaaaagaaccaccacctccttacttacctgcctgaagaaattctgcctttgacaataaatcctataccagctttttgtttgtttatgttacagaatgctgcaattcagggctcttcaaacttgtttgatataaaatatgttgtcttttgtttaagcatttattttcaaacactaaggagctttttgacatctgttaaacgtctttttgtttttttgttaagtcttttacattttaatagtttttgaagacaatctaggttaagcaagagcaaagtgccattgtttgcctttaattggggggtgggaagggaaagagggtacttgccacatagtttcctttttaactgcactttctttatataatcgtttgcattttgttacttgctaccctgagtactttcaggaagactgacttaaatattcggggtgagtaagtagttgggtataagatctgaacttttcatctgcccgagccgataatatttgcccatccgactttcccgtcaggatccccacaaacatgtcc

SEQ ID NO: 334090 - DNA, 1578 bp, Homo sapiens
caactatcctaggcccgagaaccagcccttgccttcgcgtaacaggcggagactcgctgaggcgagttgcacttctaattgggcgtgaggtcttgtcaatccccaagttcttccaatcagaagtccggtccatccagccttccgctccccattggcctgtgtggaggaagaggggtgggtaagccgaagtcgctgcgctcagtgcgcaggcgcgaagaagctggcaggggcacgagccgggggcgggtttgaagacgcgtcgttgggttttggaggccgtgaaacagccgtttgagtttggctgcgggtggagaacgtttgtcaggggcccggccaagaaggaggcccgcctgttacgatggtgtccatgagtttcaagcggaaccgcagtgaccggttctacagcacccggtgctgcggctgttgccatgtccgcaccgggacgatcatcctggggacctggtacatggtagtaaacctattgatggcaattttgctgactgtggaagtgactcatccaaactccatgccagctgtcaacattcagtatgaagtcatcggtaattactattcgtctgagagaatggctgataatgcctgtgttctttttgccgtctctgttcttatgtttataatcagttcaatgctggtttatggagcaatttcttatcaagtgggttggctgattccattcttctgttaccgactttttgacttcgtcctcagttgcctggttgctattagttctctcacctatttgccaagaatcaaagaatatctggatcaactacctgattttccctacaaagatgacctcctggccttggactccagctgcctcctgttcattgttcttgtgttctttgccttattcatcatttttaaggcttatctaattaactgtgtttggaactgctataaatacatcaacaaccgaaacgtgccggagattgctgtgtaccctgcctttgaagcacctcctcagtacgttttgccaacctatgaaatggccgtgaaaatgcctgaaaaagaaccaccacctccttacttacctgcctgaagaaattctgcctttgacaataaatcctataccagctttttgtttgtttatgttacagaatgctgcaattcagggctcttcaaacttgtttgatataaaatatgttgtcttttgtttaagcatttattttcaaacactaaggagctttttgacatctgttaaacgtctttttgtttttttgttaagtcttttacattttaatagtttttgaagacaatctaggttaagcaagagcaaagtgccattgtttgcctttaattggggggtgggaagggaaagagggtacttgccacatagtttcctttttaactgcactttctttatataatcgtttgcattttgttacttgctaccctgagtactttcaggaagactgacttaaatattcgggccgcatacagtactgttgcagatcagatcctgactggtgcactctctcacagcgccagtcctaaccatgggcatcatctatgagcgcttgctgctcacacatgataacgtgctcgtgtgtacagctt

SEQ ID NO: 334091 - DNA, 1594 bp, Homo sapiens
caactatcctaggcccgagaaccagcccttgccttcgcgtaacaggcggagactcgctgaggcgagttgcacttctaattgggcgtgaggtcttgtcaatccccaagttcttccaatcagaagtccggtccatccagccttccgctccccattggcctgtgtggaggaagaggggtgggtaagccgaagtcgctgcgctcagtgcgcaggcgcgaagaagctggcaggggcacgagccgggggcgggtttgaagacgcgtcgttgggttttggaggccgtgaaacagccgtttgagtttggctgcgggtggagaacgtttgtcaggggcccggccaagaaggaggcccgcctgttacgatggtgtccatgagtttcaagcggaaccgcagtgaccggttctacagcacccggtgctgcggctgttgccatgtccgcaccgggacgatcatcctggggacctggtacatggtagtaaacctattgatggcaattttgctgactgtggaagtgactcatccaaactccatgccagctgtcaacattcagtatgaagtcatcggtaattactattcgtctgagagaatggctgataatgcctgtgttctttttgccgtctctgttcttatgtttataatcagttcaatgctggtttatggagcaatttcttatcaagtgggttggctgattccattcttctgttaccgactttttgacttcgtcctcagttgcctggttgctattagttctctcacctatttgccaagaatcaaagaatatctggatcaactacctgattttccctacaaagatgacctcctggccttggactccagctgcctcctgttcattgttcttgtgttctttgccttattcatcatttttaaggcttatctaattaactgtgtttggaactgctataaatacatcaacaaccgaaacgtgccggagattgctgtgtaccctgcctttgaagcacctcctcagtacgttttgccaacctatgaaatggccgtgaaaatgcctgaaaaagaaccaccacctccttacttacctgcctgaagaaattctgcctttgacaataaatcctataccagctttttgtttgtttatgttacagaatgctgcaattcagggctcttcaaacttgtttgatataaaatatgttgtcttttgtttaagcatttattttcaaacactaaggagctttttgacatctgttaaacgtctttttgtttttttgttaagtcttttacattttaatagtttttgaagacaatctaggttaagcaagagcaaagtgccattgggaagggaaagagggtacttgccacatagtttcctttttaactgcactttctttatataatcgtttgcattttgttacttgctaccctgagtactttcaggaagactgacttaaatattcggggtgagtaagtagttgggtataagatctgaacttttcatctgcagaggcaagaaaaatatttgacattgtgacttgactgtggaagatgatggttgcatgtttctagtttgtatatgtttccatctttgtgataagatgatttaataaatctctttaaatactta

SEQ ID NO: 334092 - DNA, 1178 bp, Homo sapiens
caactatcctaggcccgagaaccagcccttgccttcgcgtaacaggcggagactcgctgaggcgagttgcacttctaattgggcgtgaggtcttgtcaatccccaagttcttccaatcagaagtccggtccatccagccttccgctccccattggcctgtgtggaggaagaggggtgggtaagccgaagtcgctgcgctcagtgcgcaggcgcgaagaagctggcaggggcacgagccgggggcgggtttgaagacgcgtcgttgggttttggaggccgtgaaacagccgtttgagtttggctgcgggtggagaacgtttgtcaggggcccggccaagaaggaggcccgcctgttacgatggtgtccatgagtttcaagcggaaccgcagtgaccggttctacagcacccggtgctgcggctgttgccatgtccgcaccgggacgatcatcctggggacctggtacatggtagtaaacctattgatggcaattttgctgactgtggaagtgactcatccaaactccatgccagctgtcaacattcagtatgaagtcatcggtaattactattcgtctgagagaatggctgataatgcctgtgttctttttgccgtctctgttcttatgtttataatcagttcaatgctggtttatggagcaatttcttatcaagtgggttggctgattccattcttctgttaccgactttttgacttcgtcctcagttgcctggttgctattagttctctcacctatttgccaagaatcaaagaatatctggatcaactacctgattttccctacaaagatgacctcctggccttggactccagctgcctcctgttcattgttcttgtgttctttgccttattcatcatttttaaggcttatctaattaactgtgtttggaactgctataaatacatcaacaaccgaaacgtgccggagattgctgtgtaccctgcctttgaagcacctcctcagtacgttttgccaacctatgaaatggccgtgaaaatgcctgaaaaagaaccaccacctccttacttacctgcctgaagaaattctgcctttgacaataaatcctataccagctttgggttctgtaccgatgtgcatcgggcctccctgtggtaccttctggcccggtcctcttttcaccccagggcctgcccgt

SEQ ID NO: 334093 - DNA, 1417 bp, Homo sapiens
  misc_feature (70)..(70): n is a, c, g, or t
ggacgatctgatgtggtgtgtgggtacagtgcgcttgaataacatgccaggtttagactgtttggagctngtcagagggtgagacgaaacagttatgttcaagagcagtcgccgaggactaggaagtgagcggccgacctcgtataactacttggtcgatctcatcagatgttatcactggcggaaccgcagtgaccggttctacagcacccggtgctgcggctgttgccatgtccgcaccgggacgatcatcctggggacctggtacatggtagtaaacctattgatggcaattttgctgactgtggaagtgactcatccaaactccatgccagctgtcaacattcagtatgaagtcatcggtaattactattcgtctgagagaatggctgataatgcctgtgttctttttgccgtctctgttcttatgtttataatcagttcaatgctggtttatggagcaatttcttatcaagtgggttggctgattccattcttctgttaccgactttttgacttcgtcctcagttgcctggttgctattagttctctcacctatttgccaagaatcaaagaatatctggatcaactacctgattttccctacaaagatgacctcctggccttggactccagctgcctcctgttcattgttcttgtgttctttgccttattcatcatttttaaggcttatctaattaactgtgtttggaactgctataaatacatcaacaaccgaaacgtgccggagattgctgtgtaccctgcctttgaagcacctcctcagtacgttttgccaacctatgaaatggccgtgaaaatgcctgaaaaagaaccaccacctccttacttacctgcctgaagaaattctgcctttgacaataaatcctataccagctttttgtttgtttatgttacagaatgctgcaattcagggctcttcaaacttgtttgatataaaatatgttgtcttttgtttaagcatttattttcaaacactaaggagctttttgacatctgttaaacgtctttttgtttttttgttaagtcttttacattttaatagtttttgaagacaatctaggttaagcaagagcaaagtgccattgtttgcctttaattggggggtgggaagggaaagagggtacttgccacatagtttcctttttaactgcactttctttatataatcgtttgcattttgttacttgctaccctgagtactttcaggaagactgacttaaatattcggggtgagtaagtagttgggtataagatctgaacttttcatctgcagaggcaagaaaaatatttgacattgtgacttgactgtggaagatgatggttgcatgtttctagtttgtatatgtttccatctttgtgataagatgatttaataaatctctttaaatactta

SEQ ID NO: 334094 - DNA, 1419 bp, Homo sapiens
caactatcctaggcccgagaaccagcccttgccttcgcgtaacaggcggagactcgctgaggcgagttgcacttctaattgggcgtgaggtcttgtcaatccccaagttcttccaatcagaagtccggtccatccagccttccgctccccattggcctgtgtggaggaagaggggtgggtaagccgaagtcgctgcgctcagtgcgcaggcgcgaagaagctggcaggggcacgagccgggggcgggtttgaagacgcgtcgttgggttttggaggccgtgaaacagccgtttgagtttggctgcgggtggagaacgtttgtcaggggcccggccaagaaggaggcccgcctgttacgatggtgtccatgagtttcaagcggaaccgcagtgaccggttctacagcacccggtgctgcggctgttgccatgtccgcaccgggacgatcatcctggggacctggtacatggtagtaaacctattgatggcaattttgctgactgtggaagtgactcatccaaactccatgccagctgtcaacattcagtatgaagtcatcggtaattactattcgtctgagagaatggctgataatgcctgtgttctttttgccgtctctgttcttatgtttataatcagttcaatgctggtttatggagcaatttcttatcaagtgggttggctgattccattcttctgttaccgactttttgacttcgtcctcagttgcctggttgctattagttctctcacctatttgccaagaatcaaagaatatctggatcaactacctgattttccctacaaagatgacctcctggccttggactccagctgcctcctgttcattgttcttgtgttctttgccttattcatcatttttaaggcttatctaattaactgtgtttggaactgctataaatacatcaacaaccgaaacgtgccggagattgctgtgtaccctgcctttgaagcacctcctcagtacgttttgccaacctatgaaatggccgtgaaaatgcctgaaaaagaaccaccacctccttacttacctgcctatttcacaatcgaagaatgatctaatattaaaaacatgaaatgaatccaagccagacagtactgagtttttacacaagcctcttttgtattcaatgttgtttattgaggagtgaatgagagactactgccagacatgccaatgacacttcacattcaagggctggaagctggaaagcttcccgactgagtcactgtataagccttctgggaaaaagaaccaacgtgacatcaaatatgccatcttcatgcttgttgtctgtcatcagtttttttcaacttttgggtctactggtttgctgggtaggaggcttcttctaccctacagaaagactcacctacctattcacaatcggtaccgag

SEQ ID NO: 334095 - DNA, 1542 bp, Homo sapiens
caactatcctaggcccgagaaccagcccttgccttcgcgtaacaggcggagactcgctgaggcgagttgcacttctaattgggcgtgaggtcttgtcaatccccaagttcttccaatcagaagtccggtccatccagccttccgctccccattggcctgtgtggaggaagaggggtgggtaagccgaagtcgctgcgctcagtgcgcaggcgcgaagaagctggcaggggcacgagccgggggcgggtttgaagacgcgtcgttgggttttggaggccgtgaaacagccgtttgagtttggctgcgggtggagaacgtttgtcaggggcccggccaagaaggaggcccgcctgttacgatggtgtccatgagtttcaagcggaaccgcagtgaccggttctacagcacccggtgctgcggctgttgccatgtccgcaccgggacgatcatcctggggacctggtacatgttcagtatgaagtcatcggtaattactattcgtctgagagaatggctgataatgcctgtgttctttttgccgtctctgttcttatgtttataatcagttcaatgctggtttatggagcaatttcttatcaagtgggttggctgattccattcttctgttaccgactttttgacttcgtcctcagttgcctggttgctattagttctctcacctatttgccaagaatcaaagaatatctggatcaactacctgattttccctacaaagatgacctcctggccttggactccagctgcctcctgttcattgttcttgtgttctttgccttattcatcatttttaaggcttatctaattaactgtgtttggaactgctataaatacatcaacaaccgaaacgtgccggagattgctgtgtaccctgcctttgaagcacctcctcagtacgttttgccaacctatgaaatggccgtgaaaatgcctgaaaaagaaccaccacctccttacttacctgcctgaagaaattctgcctttgacaataaatcctataccagctttttgtttgtttatgttacagaatgctgcaattcagggctcttcaaacttgtttgatataaaatatgttgtcttttgtttaagcatttattttcaaacactaaggagctttttgacatctgttaaacgtctttttgtttttttgttaagtcttttacattttaatagtttttgaagacaatctaggttaagcaagagcaaagtgccattgtttgcctttaattggggggtgggaagggaaagagggtacttgccacatagtttcctttttaactgcactttctttatataatcgtttgcattttgttacttgctaccctgagtactttcaggaagactgacttaaatattcggggtgagtaagtagttgggtataagatctgaacttttcatctgcagaggcaagaaaaatatttgacattgtgacttgactgtggaagatgatggttgcatgtttctagtttgtatatgtttccatctttgtgataagatgatttaataaatctctttaaatactta

SEQ ID NO: 334096 - DNA, 1423 bp, Homo sapiens
caactatcctaggcccgagaaccagcccttgccttcgcgtaacaggcggagactcgctgaggcgagttgcacttctaattgggcgtgaggtcttgtcaatccccaagttcttccaatcagaagtccggtccatccagccttccgctccccattggcctgtgtggaggaagaggggtgggtaagccgaagtcgctgcgctcagtgcgcaggcgcgaagaagctggcaggggcacgagccgggggcgggtttgaagacgcgtcgttgggttttggaggccgtgaaacagccgtttgagtttggctgcgggtggagaacgtttgtcaggggcccggccaagaaggaggcccgcttcagtatgaagtcatcggtaattactattcgtctgagagaatggctgataatgcctgtgttctttttgccgtctctgttcttatgtttataatcagttcaatgctggtttatggagcaatttcttatcaagtgggttggctgattccattcttctgttaccgactttttgacttcgtcctcagttgcctggttgctattagttctctcacctatttgccaagaatcaaagaatatctggatcaactacctgattttccctacaaagatgacctcctggccttggactccagctgcctcctgttcattgttcttgtgttctttgccttattcatcatttttaaggcttatctaattaactgtgtttggaactgctataaatacatcaacaaccgaaacgtgccggagattgctgtgtaccctgcctttgaagcacctcctcagtacgttttgccaacctatgaaatggccgtgaaaatgcctgaaaaagaaccaccacctccttacttacctgcctgaagaaattctgcctttgacaataaatcctataccagctttttgtttgtttatgttacagaatgctgcaattcagggctcttcaaacttgtttgatataaaatatgttgtcttttgtttaagcatttattttcaaacactaaggagctttttgacatctgttaaacgtctttttgtttttttgttaagtcttttacattttaatagtttttgaagacaatctaggttaagcaagagcaaagtgccattgtttgcctttaattggggggtgggaagggaaagagggtacttgccacatagtttcctttttaactgcactttctttatataatcgtttgcattttgttacttgctaccctgagtactttcaggaagactgacttaaatattcggggtgagtaagtagttgggtataagatctgaacttttcatctgcagaggcaagaaaaatatttgacattgtgacttgactgtggaagatgatggttgcatgtttctagtttgtatatgtttccatctttgtgataagatgatttaataaatctctttaaatactta

SEQ ID NO: 334097 - DNA, 1567 bp, Homo sapiens
caactatcctaggcccgagaaccagcccttgccttcgcgtaacaggcggagactcgctgaggcgagttgcacttctaattgggcgtgaggtcttgtcaatccccaagttcttccaatcagaagtccggtccatccagccttccgctccccattggcctgtgtggaggaagaggggtgggtaagccgaagtcgctgcgctcagtgcgcaggcgcgaagaagctggcaggggcacgagccgggggcgggtttgaagacgcgtcgttgggttttggaggccgtgaaacagccgtttgagtttggctgcgggtggagaacgtttgtcaggggcccggccaagaaggaggcccgcctgttacgatggtgtccatgagtttcaagcggaaccgcagtgaccggttctacagcacccggtgctgcggctgttgccatgtccgcaccgggacgatcatcctggggacctggtacatggtagtaaacctattgatggcaattttgctgactgtggaagtgactcatccaaactccatgccagctgtcaacaataatgcctgtgttctttttgccgtctctgttcttatgtttataatcagttcaatgctggtttatggagcaatttcttatcaagtgggttggctgattccattcttctgttaccgactttttgacttcgtcctcagttgcctggttgctattagttctctcacctatttgccaagaatcaaagaatatctggatcaactacctgattttccctacaaagatgacctcctggccttggactccagctgcctcctgttcattgttcttgtgttctttgccttattcatcatttttaaggcttatctaattaactgtgtttggaactgctataaatacatcaacaaccgaaacgtgccggagattgctgtgtaccctgcctttgaagcacctcctcagtacgttttgccaacctatgaaatggccgtgaaaatgcctgaaaaagaaccaccacctccttacttacctgcctgaagaaattctgcctttgacaataaatcctataccagctttttgtttgtttatgttacagaatgctgcaattcagggctcttcaaacttgtttgatataaaatatgttgtcttttgtttaagcatttattttcaaacactaaggagctttttgacatctgttaaacgtctttttgtttttttgttaagtcttttacattttaatagtttttgaagacaatctaggttaagcaagagcaaagtgccattgtttgcctttaattggggggtgggaagggaaagagggtacttgccacatagtttcctttttaactgcactttctttatataatcgtttgcattttgttacttgctaccctgagtactttcaggaagactgacttaaatattcggggtgagtaagtagttgggtataagatctgaacttttcatctgcagaggcaagaaaaatatttgacattgtgacttgactgtggaagatgatggttgcatgtttctagtttgtatatgtttccatctttgtgataagatgatttaataaatctctttaaatactta

SEQ ID NO: 334098 - DNA, 1538 bp, Homo sapiens
caactatcctaggcccgagaaccagcccttgccttcgcgtaacaggcggagactcgctgaggcgagttgcacttctaattgggcgtgaggtcttgtcaatccccaagttcttccaatcagaagtccggtccatccagccttccgctccccattggcctgtgtggaggaagaggggtgggtaagccgaagtcgctgcgctcagtgcgcaggcgcgaagaagctggcaggggcacgagccgggggcgggtttgaagacgcgtcgttgggttttggaggccgtgaaacagccgtttgagtttggctgcgggtggagaacgtttgtcaggggcccggccaagaaggaggcccgcctgttacgatggtgtccatgagtttcaagcggaaccgcagtgaccggttctacagcacccggtgctgcggctgttgccatgtccgcaccgggacgatcatcctggggacctggtacatggtagtaaacctattgatggcaattttgctgactgtggaagtgactcatccaaactccatgccagctgtcaacattcagtatgaagtcatcggtaattactattcgtctgagagaatggctgtatcaagtgggttggctgattccattcttctgttaccgactttttgacttcgtcctcagttgcctggttgctattagttctctcacctatttgccaagaatcaaagaatatctggatcaactacctgattttccctacaaagatgacctcctggccttggactccagctgcctcctgttcattgttcttgtgttctttgccttattcatcatttttaaggcttatctaattaactgtgtttggaactgctataaatacatcaacaaccgaaacgtgccggagattgctgtgtaccctgcctttgaagcacctcctcagtacgttttgccaacctatgaaatggccgtgaaaatgcctgaaaaagaaccaccacctccttacttacctgcctgaagaaattctgcctttgacaataaatcctataccagctttttgtttgtttatgttacagaatgctgcaattcagggctcttcaaacttgtttgatataaaatatgttgtcttttgtttaagcatttattttcaaacactaaggagctttttgacatctgttaaacgtctttttgtttttttgttaagtcttttacattttaatagtttttgaagacaatctaggttaagcaagagcaaagtgccattgtttgcctttaattggggggtgggaagggaaagagggtacttgccacatagtttcctttttaactgcactttctttatataatcgtttgcattttgttacttgctaccctgagtactttcaggaagactgacttaaatattcggggtgagtaagtagttgggtataagatctgaacttttcatctgcagaggcaagaaaaatatttgacattgtgacttgactgtggaagatgatggttgcatgtttctagtttgtatatgtttccatctttgtgataagatgatttaataaatctctttaaatactta

SEQ ID NO: 334099 - DNA, 1048 bp, Homo sapiens
caactatcctaggcccgagaaccagcccttgccttcgcgtaacaggcggagactcgctgaggcgagttgcacttctaattgggcgtgaggtcttgtcaatccccaagttcttccaatcagaagtccggtccatccagccttccgctccccattggcctgtgtggaggaagaggggtgggtaagccgaagtcgctgcgctcagtgcgcaggcgcgaagaagctggcaggggcacgagccgggggcgggtttgaagacgcgtcgttgggttttggaggccgtgaaacagccgtttgagtttggctgcgggtggagaacgtttgtcaggggcccggccaagaaggaggcccgcctgttacgatggtgtccatgagtttcaagcggaaccgcagtgaccggttctacagcacccggtgctgcggctgttgccatgtccgcaccgggacgatcatcctggggacctggtacatggtagtaaacctattgatggcaattttgctgactgtggaagtgactcatccaaactccatgccagctgtcaacattcagtatgaagtcatcggtaattactattcgtctgagagaatggctgataatgcctgtgttctttttgccgtctctgttcttatgtttataatcagttcaatgctggtttatggagcaatttcttatcaagtgggttggctgattccattcttctgttaccgactttttgacttcgtcctcagttgcctggttgctattagttctctcacctatttgccaagaatcaaagaatatctggatcaactacctgattttccctacaaagatgacctcctggccttggactccagctgcctcctgttcattgttcttgtgttctttgccttattcatcatttttaaggcttatctaattaactgtgtttggaactgctataaatacatcaacaaccgaaacgtgccggagattgctgtgtaccctgcctttgaagcacctcctcagtacgtttgccaactatgaatgccgtgaaatgcttgaaaaccgcaggcttttcctaatgtagag

SEQ ID NO: 334100 - DNA, 1033 bp, Homo sapiens
caactatcctaggcccgagaaccagcccttgccttcgcgtaacaggcggagactcgctgaggcgagttgcacttctaattgggcgtgaggtcttgtcaatccccaagttcttccaatcagaagtccggtccatccagccttccgctccccattggcctgtgtggaggaagaggggtgggtaagccgaagtcgctgcgctcagtgcgcaggcgcgaagaagctggcaggggcacgagccgggggcgggtttgaagacgcgtcgttgggttttggaggccgtgaaacagccgtttgagtttggctgcgggtggagaacgtttgtcaggggcccggccaagaaggaggcccgcctgttacgatggtgtccatgagtttcaagcggaaccgcagtgaccggttctacagcacccggtgctgcggctgttgccatgtccgcaccgggacgatcatcctggggacctggtacatggtagtaaacctattgatggcaattttgctgactgtggaagtgactcatccaaactccatgccagctgtcaacattcagtatgaagtcatcggtaattactattcgtctgagagaatggctgataatgcctgtgttctttttgccgtctctgttcttatgtttataatcagttcaatgctggtttatggagcaatttcttatcaagtgggttggctgattccattcttctgttaccgactttttgacttcgtcctcagttgcctggttgctattagttctctcacctatttgccaagaatcaaagaatatctggatcaactacctgattttccctacaaagatgacctcctggccttggactccagctgcctcctgttcattgttcttgtgttctttgccttattcatcatttttaagggtcacctccttacgtgggttggaccgggaaaattcatcacacccgaatgtgccggaattgcggttcctgtcttaagccctcccagcgttggcactatgatgcggaatccgaccacccattccccctctgccgaactcccctttggg

SEQ ID NO: 334101 - DNA, 835 bp, Homo sapiens
  misc_feature (808)..(808): n is a, c, g, or t
caactatcctaggcccgagaaccagcccttgccttcgcgtaacaggcggagactcgctgaggcgagttgcacttctaattgggcgtgaggtcttgtcaatccccaagttcttccaatcagaagtccggtccatccagccttccgctccccattggcctgtgtggaggaagaggggtgggtaagccgaagtcgctgcgctcagtgcgcaggcgcgaagaagctggcaggggcacgagccgggggcgggtttgaagacgcgtcgttgggttttggaggccgtgaaacagccgtttgagtttggctgcgggtggagaacgtttgtcaggggcccggccaagaaggaggcccgcctgttacgatggtgtccatgagtttcaagcggaaccgcagtgaccggttctacagcacccggtgctgcggctgttgccatgtccgcaccgggacgatcatcctggggacctggtacatggtagtaaacctattgatggcaattttgctgactgtggaagtgactcatccaaactccatgccagctgtcaacattcagtatgaagtcatcggtaattactattcgtctgagagaatggctgataatgcctgtgttctttttgccgtctctgttcttatgtttataatcagttcaatgctggtttatggagcaatttcttatcaagtgggttggctgattccattcttctgttaccgactttttgacttcgtcctcagttgcctggttgctattagttctctcacctatttgccaagaatcaaagaatatctggatcaactattggacttcaggtgcctnctgttcattggtcttgggttccttgct

SEQ ID NO: 334102 - DNA, 619 bp, Homo sapiens
caactatcctaggcccgagaaccagcccttgccttcgcgtaacaggcggagactcgctgaggcgagttgcacttctaattgggcgtgaggtcttgtcaatccccaagttcttccaatcagaagtccggtccatccagccttccgctccccattggcctgtgtggaggaagaggggtgggtaagccgaagtcgctgcgctcagtgcgcaggcgcgaagaagctggcaggggcacgagccgggggcgggtttgaagacgcgtcgttgggttttggaggccgtgaaacagccgtttgagtttggctgcgggtggagaacgtttgtcaggggcccggccaagaaggaggcccgcctgttacgatggtgtccatgagtttcaagcggaaccgcagtgaccggttctacagcacccggtgctgcggctgttgccatgtccgcaccgggacgatcatcctggggacctggtacatggtagtaaacctattgatggcaattttgctgactgtggaagtgactcatccaaactccatgccagctgtcaacattcagtatgaagtcatcggtaattactattcgtctgagagaatggctggtatgtgtttaatagaaaaacaaaaaaat

SEQ ID NO: 334103 - DNA, 1133 bp, Homo sapiens
caactatcctaggcccgagaaccagcccttgccttcgcgtaacaggcggagactcgctgaggcgagttgcacttctaattgggcgtgaggtcttgtcaatccccaagttcttccaatcagaagtccggtccatccagccttccgctccccattggcctgtgtggaggaagaggggtgggtaagccgaagtcgctgcgctcagtgcgcaggcgcgaagaagctggcaggggcacgagccgggggcgggtttgaagacgcgtcgttgggttttggaggccgtgaaacagccgtttgagtttggctgcgggtggagaacgtttgtcaggggcccggccaagaaggaggcccgcctgttacgatggtgtccatgagtttcaagcggaaccgcagtgaccggttctacagcacccggtgctgcggctgttgccatgtccgcaccgggacgatcatcctggggacctggtacatggtagtaaacctattgatggcaattttgctgactgtggaagtgactcatccaaactccatgccagctgtcaacagttgcctggttgctattagttctctcacctatttgccaagaatcaaagaatatctggatcaactacctgattttccctacaaagatgacctcctggccttggactccagctgcctcctgttcattgttcttgtgttctttgccttattcatcatttttaaggcttatctaattaactgtgtttggaactgctataaatacatcaacattcagtatgaagtcatcggtaattactattcgtctgagagaatggtgataatgctatgaaatggcgtgaaaatgctgaaaaagaagcacactcttacttactgctgaagaaattctggctttgaccagtaattctatacagttggagggtatgttacagaatgctgactcagggtcttcaacgtgtttgatataaattatgtgtttgtagcattttttcacacataagagcttttgctttgtaacgcttggcggtaaggcttactttaaaatttgggaccttagtagcaacaaggctgtggtctaaggggtggggaaggtggcactttaagggtaaaagggagggacggcccaagaaaagggagggtacattgagaattttgtt

SEQ ID NO: 334104 - DNA, 890 bp, Homo sapiens
caactatcctaggcccgagaaccagcccttgccttcgcgtaacaggcggagactcgctgaggcgagttgcacttctaattgggcgtgaggtcttgtcaatccccaagttcttccaatcagaagtccggtccatccagccttccgctccccattggcctgtgtggaggaagaggggtgggtaagccgaagtcgctgcgctcagtgcgcaggcgcgaagaagctggcaggggcacgagccgggggcgggtttgaagacgcgtcgttgggttttggaggccgtgaaacagccgtttgagtttggctgcgggtggagaacgtttgtcaggggcccggccaagaaggaggcccgcctgttacgatggtgtccatgagtttcaagcggaaccgcagtgaccggttctacagcacccggtgctgcggctgttgccatgtccgcaccgggacgatcatcctggggacctggtacatggtagtaaacctattgatggcaattttgctgactgtggaagtgactcatccaaactccatgccagctgtcaacagattctgtaactcttcctccattatcttttcttttgttattattgggttataaatgccttgtttcttttttcttatttttttttttttgtttctttcgccgttcgccacctttttttttgagtatcttttttcttaattttgttttttcgtggttcctatcttatcgtttcctgaccttttttctttcttcttctatctcccttgtttgtcccttctttttactatctacttttccccttcttcatttattttttttctctattttttattttccttgaacacttttcactttctttctgtttttatttttctcttttctctcctcttctgcttcttttctttcctcg

SEQ ID NO: 334105 - DNA, 583 bp, Homo sapiens
caactatcctaggcccgagaaccagcccttgccttcgcgtaacaggcggagactcgctgaggcgagttgcacttctaattgggcgtgaggtcttgtcaatccccaagttcttccaatcagaagtccggtccatccagccttccgctccccattggcctgtgtggaggaagaggggtgggtaagccgaagtcgctgcgctcagtgcgcaggcgcgaagaagctggcaggggcacgagccgggggcgggtttgaagacgcgtcgttgggttttggaggccgtgaaacagccgtttgagtttggctgcgggtggagaacgtttgtcaggggcccggccaagaaggaggcccgcctgttacgatggtgtccatgagtttcaagcggaaccgcagtgaccggttctacagcacccggtgctgcggctgttgccatgtccgcaccgggacgatcatcctggggacctggtacatggtagtaaacctattgatggcaattttgctgactagatgatggttgcatgtttctagtttgtatatgtttccatctttgtgataagatgatttaataaatctctttaaatactta

SEQ ID NO: 334106 - DNA, 1877 bp, Homo sapiens
caactatcctaggcccgagaaccagcccttgccttcgcgtaacaggcggagactcgctgaggcgagttgcacttctaattgggcgtgaggtcttgtcaatccccaagttcttccaatcagaagtccggtccatccagccttccgctccccattggcctgtgtggaggaagaggggtgggtaagccgaagtcgctgcgctcagtgcgcaggcgcgaagaagctggcaggggcacgagccgggggcgggtttgaagacgcgtcgttgggttttggaggccgtgaaacagccgtttgagtttggctgcgggtggagaacgtttgtcaggggcccggccaagaaggaggcccgcctgttacgatggtgtccatgagtttcaagcggaaccgcagtgaccggttctacagcacccggtgctgcggctgttgccatgtccgcaccgggacgatcatcctggggacctggtacatggtagtaaacctattgatggcaattttgctgactgtggaagtgactcatccaaactccatgccagctgtcaacattcagtatgaagtcatcggtaattactattcgtctgagagaatggctgataatgcctgtgttctttttgccgtctctgttcttatgtttataatcagttcaatgctggtttatggagcaatttcttatcaagtgggttggctgattccattcttctgttaccgactttttgacttcgtcctcagttgcctggttgctattagttctctcacctatttgccaagaatcaaagaatatctggatcaactacctgattttccctacaaagatgacctcctggccttggactccagctgcctcctgttcattgttcttgtgttctttgccttattcatcatttttaaggcttatctaattaactgtgtttggaactgctataaatacatcaacaaccgaaacgtgccggagattgctgtgtaccctgcctttgaagcacctcctcagtacgttttgccaacctatgaaatggccgtgaaaatgcctgaaaaagaaccaccacctccttacttacctgcctgaagaaattctgcctttgacaataaatcctataccagctttttgtttgtttatgttacagaatgctgcaattcagggctcttcaaacttgtttgatataaaatatgttgtcttttgtttaagcatttattttcaaacactaaggagctttttgacatctgttaaacgtctttttgtttttttgttaagtcttttacattttaatagtttttgaagacaatctaggttaagcaagagcaaagtgccattgtttgcctttaattggggggtgggaagggaaagagggtacttgccacatagtttcctttttaactgcactttctttatataatcgtttgcattttgttacttgctaccctgagtactttcaggaagactgacttaaatattcggggtgagtaagtagttgggtataagatctgaacttttcatctgcagaggcaagaaaaatatttgacattgtgacttgactgtggaagatgatggttgcatgtttctagtttgtatatgtttccatctttgtgataagatgatttaataaatctctttaaatacttaaaaaaaaaaaaaaaaaaaaaaaaaaaaatttggggggggctgggcccggaaaaacttttcaaaaccttcggtgggggccgggcccctttggttacgtaacacgggccaaggctgtcccaaggagaccgggccaagacaaggcgggggattccccccaataaaaaaacgccgcgggaaacaggaaggttcgcggggaaagcccaaggggacccgaagggacaaagggggcctcccaggggggcccaaggagccgaataataca

SEQ ID NO: 334107 - DNA, 1463 bp, Homo sapiens
caactatcctaggcccgagaaccagcccttgccttcgcgtaacaggcggagactcgctgaggcgagttgcacttctaattgggcgtgaggtcttgtcaatccccaagttcttccaatcagaagtccggtccatccagccttccgctccccattggcctgtgtggaggaagaggggtgggtaagccgaagtcgctgcgctcagtgcgcaggcgcgaagaagctggcaggggcacgagccgggggcgggtttgaagacgcgtcgttgggttttggaggccgtgaaacagccgtttgagtttggctgcgggtggagaacgtttgtcaggggcccggccaagaaggaggcccgcctgttacgatggtgtccatgagtttcaagcggaaccgcagtgaccggttctacagcacccggtgctgcggctgttgccatgtccgcaccgggacgatcatcctggggacctggtacatggtagtaaacctattgatggcaattttgctgactgtggaagtgactcatccaaactccatgccagctgtcaacattcagtatgaagtcatcggtaattactattcgtctgagagaatggctgataatgcctgtgttctttttgccgtctctgttcttatgtttataatcagttcaatgctggtttatggagcaatttcttatcaagtgggttggctgattccattcttctgttaccgactttttgacttcgtcctcagttgcctggttgctattagttctctcacctatttgccaagaatcaaagaatatctggatcaactacctgattttccctacaaagatgacctcctggccttggactccagctgcctcctgttcattgttcttgtgttctttgccttattcatcatttttaaggcttatctaattaactgtgtttggaactgctataaatacatcaacaaccgaaacgtgccggagattgctgtgtaccctgcctttgaagcacctcctcagtacgttttgccaacctatgaaatggccgtgaaaatgcctgaaaaagaaccaccacctccttacttacctgcctgaagaaattctgcctttgacaataaatcctataccagctttttgtttgtttatgttacagaatgctgcaattcagggctcttcaaacttgtttgatataaaatatgttgtcttttgtttaagcatttattttcaaacactaaggagctttttgacatctgttaaacgtctttttgtttttttgttaagtcttttacattttaatagtttttgaagacaatctaggttaagcaagagcaaagtgccattgtttgcctttaattggggggtgggaagggaaagagggtacttgccacatagtttcctttttaactgcactttctttagatgatggttgcatgtttctagtttgtatatgtttccatctttgtgataagatgatttaataaatctctttaaatactta

SEQ ID NO: 334108 - DNA, 1561 bp, Homo sapiens
caactatcctaggcccgagaaccagcccttgccttcgcgtaacaggcggagactcgctgaggcgagttgcacttctaattgggcgtgaggtcttgtcaatccccaagttcttccaatcagaagtccggtccatccagccttccgctccccattggcctgtgtggaggaagaggggtgggtaagccgaagtcgctgcgctcagtgcgcaggcgcgaagaagctggcaggggcacgagccgggggcgggtttgaagacgcgtcgttgggttttggaggccgtgaaacagccgtttgagtttggctgcgggtggagaacgtttgtcaggggcccggccaagaaggaggcccgcctgttacgatggtgtccatgagtttcaagcggaaccgcagtgaccggttctacagcacccggtgctgcggctgttgccatgtccgcaccgggacgatcatcctggggacctggtacatggtagtaaacctattgatggcaattttgctgactgtggaagtgactcatccaaactccatgccagctgtcaacattcagtatgaagtcatcggtaattactattcgtctgagagaatggctgataatgcctgtgttctttttgccgtctctgttcttatgtttataatcagttcaatgctggtttatggagcaatttcttatcaagtgggttggctgattccattcttctgttaccgactttttgacttcgtcctcagttgcctggttgctattagttctctcacctatttgccaagaatcaaagaatatctggatcaactacctgattttccctacaaagatgacctcctggccttggactccagctgcctcctgttcattgttcttgtgttctttgccttattcatcatttttaaggcttatctaattaactgtgtttggaactgctataaatacatcaacaaccgaaacgtgccggagattgctgtgtaccctgcctttgaagcacctcctcagtacgttttgccaacctatgaaatggccgtgaaaatgcctgaaaaagaaccaccacctccttacttacctgcctgaagaaattctgcctttgacaataaatcctataccagctttttgtttgtttatgttacagaatgctgcaattcagggctcttcaaacttgtttgatatgacatctgttaaacgtctttttgtttttttgttaagtcttttacattttaatagtttttgaagacaatctaggttaagcaagagcaaagtgccattgtttgcctttaattggggggtgggaagggaaagagggtacttgccacatagtttcctttttaactgcactttctttatataatcgtttgcattttgttacttgctaccctgagtactttcaggaagactgacttaaatattcggggtgagtaagtagttgggtataagatctgaacttttcatctgcagaggcaagaaaaatatttgacattgtgacttgactgtggaagatgatggttgcatgtttctagtttgtatatgtttccatctttgtgataagatgatttaataaatctctttaaatactta

SEQ ID NO: 334109 - DNA, 1196 bp, Homo sapiens
agtttgcggtgatctagaggatcccgaggtaatcgaggacctggtacatggtagtaaacctattgatggcaattttgctgactgtggaagtgactcatccaaactccatgccagctgtcaacattcagtatgaagtcatcggtaattactattcgtctgagagaatggctgataatgcctgtgttctttttgccgtctctgttcttatgtttataatcagttcaatgctggtttatggagcaatttcttatcaagtgggttggctgattccattcttctgttaccgactttttgacttcgtcctcagttgcctggttgctattagttctctcacctatttgccaagaatcaaagaatatctggatcaactacctgattttccctacaaagatgacctcctggccttggactccagctgcctcctgttcattgttcttgtgttctttgccttattcatcatttttaaggcttatctaattaactgtgtttggaactgctataaatacatcaacaaccgaaacgtgccggagattgctgtgtaccctgcctttgaagcacctcctcagtacgttttgccaacctatgaaatggccgtgaaaatgcctgaaaaagaaccaccacctccttacttacctgcctgaagaaattctgcctttgacaataaatcctataccagctttttgtttgtttatgttacagaatgctgcaattcagggctcttcaaacttgtttgatataaaatatgttgtcttttgtttaagcatttattttcaaacactaaggagctttttgacatctgttaaacgtctttttgtttttttgttaagtcttttacattttaatagtttttgaagacaatctaggttaagcaagagcaaagtgccattgtttgcctttaattggggggtgggaagggaaagagggtacttgccacatagtttcctttttaactgcactttctttatataatcgtttgcattttgttacttgctaccctgagtactttcaggaagactgacttaaatattcggggtgagtaagtagttgggtataagatctgaacttttcatctgcagaggcaagaaaaatatttgacattgtgacttgactgtggaagatgatggttgcatgtttctagtttgtatatgtttccatctttgtgataagatgatttaataaatctctttaaatactta

SEQ ID NO: 334110 - DNA, 1301 bp, Homo sapiens
tctcagcgagcagatcttgcttgttgaggaacaggatcacagagatggtgcgcagccatctgttgttccagatgctcttgaagaggttcagagcctcctgcaggcggttggtctggttgtcctcccggatgaccatgttgtagctgctgctggccaccacgaagatgatggcagtcacatcgttgaagcactggatccacttgcggcgttcatcgcgctggccacccattcagtatgaagtcatcggtaattactattcgtctgagagaatggctgataatgcctgtgttctttttgccgtctctgttcttatgtttataatcagttcaatgctggtttatggagcaatttcttatcaagtgggttggctgattccattcttctgttaccgactttttgacttcgtcctcagttgcctggttgctattagttctctcacctatttgccaagaatcaaagaatatctggatcaactacctgattttccctacaaagatgacctcctggccttggactccagctgcctcctgttcattgttcttgtgttctttgccttattcatcatttttaaggcttatctaattaactgtgtttggaactgctataaatacatcaacaaccgaaacgtgccggagattgctgtgtaccctgcctttgaagcacctcctcagtacgttttgccaacctatgaaatggccgtgaaaatgcctgaaaaagaaccaccacctccttacttacctgcctgaagaaattctgcctttgacaataaatcctataccagctttttgtttgtttatgttacagaatgctgcaattcagggctcttcaaacttgtttgatataaaatatgttgtcttttgtttaagcatttattttcaaacactaaggagctttttgacatctgttaaacgtctttttgtttttttgttaagtcttttacattttaatagtttttgaagacaatctaggttaagcaagagcaaagtgccattgtttgcctttaattggggggtgggaagggaaagagggtacttgccacatagtttcctttttaactgcactttctttatataatcgtttgcattttgttacttgctaccctgagtactttcaggaagactgacttaaatattcggggtgagtaagtagttgggtataagatctgaacttttcatctgcagaggcaagaaaaatatttgacattgtgacttgactgtggaagatgatggttgcatgtttctagtttgtatatgtttccatctttgtgataagatgatttaataaatctctttaaatactta

SEQ ID NO: 334111 - DNA, 1623 bp, Homo sapiens
  misc_feature (998)..(998): n is a, c, g, or t
  misc_feature (1009)..(1009): n is a, c, g, or t
  misc_feature (1015)..(1015): n is a, c, g, or t
  misc_feature (1017)..(1017): n is a, c, g, or t
  misc_feature (1019)..(1019): n is a, c, g, or t
  misc_feature (1025)..(1025): n is a, c, g, or t
  misc_feature (1039)..(1039): n is a, c, g, or t
  misc_feature (1047)..(1047): n is a, c, g, or t
  misc_feature (1059)..(1059): n is a, c, g, or t
  misc_feature (1063)..(1063): n is a, c, g, or t
  misc_feature (1094)..(1095): n is a, c, g, or t
  misc_feature (1097)..(1099): n is a, c, g, or t
  misc_feature (1102)..(1102): n is a, c, g, or t
  misc_feature (1112)..(1112): n is a, c, g, or t
  misc_feature (1136)..(1136): n is a, c, g, or t
  misc_feature (1148)..(1148): n is a, c, g, or t
  misc_feature (1157)..(1157): n is a, c, g, or t
  misc_feature (1159)..(1159): n is a, c, g, or t
  misc_feature (1178)..(1178): n is a, c, g, or t
caactatcctaggcccgagaaccagcccttgccttcgcgtaacaggcggagactcgctgaggcgagttgcacttctaattgggcgtgaggtcttgtcaatccccaagttcttccaatcagaagtccggtccatccagccttccgctccccattggcctgtgtggaggaagaggggtgggtaagccgaagtcgctgcgctcagtgcgcaggcgcgaagaagctggcaggggcacgagccgggggcgggtttgaagacgcgtcgttgggttttggaggccgtgaaacagccgtttgagtttggctgcgggtggagaacgtttgtcaggggcccggccaagaaggaggcccgcctgttacgatggtgtccatgagtttcaagcggaaccgcagtgaccggttctacagcacccggtgctgcggctgttgccatgtccgcaccgggacgatcatcctggggacctggtacatggtagtaaacctattgatggcaattttgctgactgtggaagtgactcatccaaactccatgccagctgtcaacattcagtatgaagtcatcggtaattactattcgtctgagagaatggctgataatgcctgtgttctttttgccgtctctgttcttatgtttataatcagttcaatgctggtttatggagcaatttcttatcaagtgggttggctgattccattcttctgttaccgactttttgacttcgtcctcagttgcctggttgctattagttctctcacctatttgccaagaatcaaagaatatctggatcaactacctgattttccctacaaagatgacctcctggccttggactccagctgcctcctgttcattgttcttgtgttctttgccttattcatcatttttaaggcttatctaattaactgtgtttggaactgctataaatacatcaacaaccgaaacgtgccggagattgctgtgtaccctgcctttgaagcacctcctcagtacgttttgcccncccaccccacncccccncnancccccnaaacagaccccccncccccccncccccccccccnaagnaacccccccccccacaatcaaccccacaccnncnnntcncccccccccncccacacaacgccgcaacccagcnccccccaccacntctcctcanancaaataccgcttctctttngctcccaagccatttattttcaaacactaaggagctttttgacatctgttaaacgtctttttgtttttttgttaagtcttttacattttaatagtttttgaagacaatctaggttaagcaagagcaaagtgccattgtttgcctttaattggggggtgggaagggaaagagggtacttgccacatagtttcctttttaactgcactttctttatataatcgtttgcattttgttacttgctaccctgagtactttcaggaagactgacttaaatattcggggtgagtaagtagttgggtataagatctgaacttttcatctgcagaggcaagaaaaatatttgacattgtgacttgactgtggaagatgatggttgcatgtttctagtttgtatatgtttccatctttgtgataagatgatttaataaatctctttaaatactta

SEQ ID NO: 334112 - DNA, 1038 bp, Homo sapiens
caactatcctaggcccgagaaccagcccttgccttcgcgtaacaggcggagactcgctgaggcgagttgcacttctaattgggcgtgaggtcttgtcaatccccaagttcttccaatcagaagtccggtccatccagccttccgctccccattggcctgtgtggaggaagaggggtgggtaagccgaagtcgctgcgctcagtgcgcaggcgcgaagaagctggcaggggcacgagccgggggcgggtttgaagacgcgtcgttgggttttggaggccgtgaaacagccgtttgagtttggctgcgggtggagaacgtttgtcaggggcccggccaagaaggaggcccgcctgttacgatggtgtccatgagtttcaagcggaaccgcagtgaccggttctacagcacccggtgctgcggctgttgccatgtccgcaccgggacgatcatcctggggacctggtacatggtagtaaacctattgatggcaattttgctgactgtggaagtgactcatccaaactccatgccagctgtcaacattcagtatgaagtcatcggtaattactattcgtctgagagaatggctgataatgcctgtgttctttttgccgtctctgttcttatgtttataatcagttcaatgctggtttatggagcaatttcttatcaagtgggttggctgattccattcttctgttaccgactttttgacttcgtcctcagttgcctggttgctattagttctctcacctatttgccaagaatcaaagaatatctggatcaactacctgattttccctacaaagatgacctcctggccttggactccagctgcctcctgttcattgttcttgtgttctttgccttattcatcatttttaaggcttatctaattaactgtgtttggaactgctataaatacatcaacaaccgaaacgtgccggagattgctgtgtaccctgcctttgaagcacctcctcagtacggtacgccctacctgttcgagtgccgctgcgaatgcctgggtcgatccag

SEQ ID NO: 334113 - DNA, 958 bp, Homo sapiens
caactatcctaggcccgagaaccagcccttgccttcgcgtaacaggcggagactcgctgaggcgagttgcacttctaattgggcgtgaggtcttgtcaatccccaagttcttccaatcagaagtccggtccatccagccttccgctccccattggcctgtgtggaggaagaggggtgggtaagccgaagtcgctgcgctcagtgcgcaggcgcgaagaagctggcaggggcacgagccgggggcgggtttgaagacgcgtcgttgggttttggaggccgtgaaacagccgtttgagtttggctgcgggtggagaacgtttgtcaggggcccggccaagaaggaggcccgcctgttacgatggtgtccatgagtttcaagcggaaccgcagtgaccggttctacagcacccggtgctgcggctgttgccatgtccgcaccgggacgatcatcctggggacctggtacatggtagtaaacctattgatggcaattttgctgactgtggaagtgactcatccaaactccatgccagctgtcaacattcagtatgaagtcatcggtaattactattcgtctgagagaatggctgataatgcctgtgttctttttgccgtctctgttcttatgtttataatcagttcaatgctggtttatggagcaatttcttatcaagtgggttggctgattccattcttctgttaccgactttttgacttcgtcctcagttgcctggttgctattagttctctcacctatttgccaagaatcaaagaatatctggatcaactaaaatcccgggttttcctttacagattaaccttggggcttggctttaaatgtctcctggtcaaaaggggttgggggttttgccctattacaatttttaagggggtttttaaaaaacccgttttggaactctttaaaacttattacccacttcccttgtgttcccccctt

SEQ ID NO: 334114 - DNA, 1174 bp, Homo sapiens
caactatcctaggcccgagaaccagcccttgccttcgcgtaacaggcggagactcgctgaggcgagttgcacttctaattgggcgtgaggtcttgtcaatccccaagttcttccaatcagaagtccggtccatccagccttccgctccccattggcctgtgtggaggaagaggggtgggtaagccgaagtcgctgcgctcagtgcgcaggcgcgaagaagctggcaggggcacgagccgggggcgggtttgaagacgcgtcgttgggttttggaggccgtgaaacagccgtttgagtttggctgcgggtggagaacgtttgtcaggggcccggccaagaaggaggcccgcctgttacgatggtgtccatgagtttcaagcggaaccgcagtgaccggttctacagcacccggtgctgcggctgttgccatgtccgcaccgggacgatcatcctggggacctggtacatggtagtaaacctattgatggcaattttgctgactgtggaagtgactcatccaaactccatgccagctgtcaacattcagtatgaagtcatcggtaattactattcgtctgagagaatggctgataatgcctgtgttctttttgccgtctctgttcttatgtttataatcagttcaatgctggtttatggagcaatttctctttattcaagtggggttgggctgattcccatttctttctggttaaccggacttttttgaccttccgctccttcaaggttggccttgttttggctaattaagttcttcttcaccctatgtttggccaaggaattccacgaataattctgtgcgagtcacactttactctggatttttccccttataccaaaggatttgaccttcctgtgggcgcttgggaattccaaggtttggccttccttggtctcatgggtcccttgggtggtctcttggcgccttttaattgtccagatcagcatttttcgtaaaggggcggcttaaattcgaaaattttcaaacacgggcggtgtctcggggagcaccccggggctttatatgacagcttcgcgcttttcaacacaagaaagcccgggaaaaacttgttgtcccccgggagagaaaatattgcgcgtgtgtgtagataccccccttgtggcccttgtttggagaagacccaccactctacag

SEQ ID NO: 334115 - DNA, 287 bp, Homo sapiens
caattagcaaaatgtgactacggactttatgttagataatagcactgtatcagtgttaaattctccgaatttcttttttttttttttttttttttttttttttttttttttttttttgtggggcccccccgggggggcccccggggggggggccccccggggggggggggcggggggacaaagcggggggactccacacacatatgccgcggggggggggagcgggggccaccgggggggggatcaccatcccccccgacaggcggagaggcaggggccccgggaaa

SEQ ID NO: 334116 - DNA, 162 bp, Homo sapiens
cctgacctcttacccctcccagaggaaccttctcatagtagcccaggaaaacccattccattcaaacatgaaaaagaaaaagggatatgatcgaacactttatgaagttattaaaaggcataaaaagttgaaaatctcataatgtttcacaaggcaataaga

SEQ ID NO: 334117 - DNA, 891 bp, Homo sapiens
  misc_feature (843)..(843): n is a, c, g, or t
gcctactactactaccactaaattcgcggccgcgtcgaccagggcggcgcgtggtctacgccgagtgacagagacgctcaggctgtgttctcaggatgaccgagtgggagacagcagcaccagcggtggcagagaccccagacatcaagctctttgggaagtggagcaccgatgatgtgcagatcaatgacatttccctgcaggattacattgcagtgaaggagaagtatgccaagtacctgcctcacagtgcagggcggtatgccgccaaacgcttccgcaaagctcagtgtcccattgtggagcgcctcactaactccatgatgatgcacggccgcaacaacggcaagaagctcatgactgtgcgcatcgtcaagcatgccttcgagatcatacacctgctcacaggcgagaaccctctgcaggtcctggtgaacgccatcatcaacagtggtccccgggaggactccacacgcattgggcgcgccgggactgtgagacgacaggctgtggatgtgtcccccctgcgccgtgtgaaccaggccatctggctgctgtgcacaggcgctcgtgaggctgccttccggaacattaagaccattgctgagtgcctggcagatgagctcatcaatgctgccaagggctcctcgaactcctatgccattaagaagaaggacgagctggagcgtgtggccaagtccaaccgctgattttcccagctgctgcccaataaacctgtctgccctttggggcagtcccagccaaaaaaaaaaaaaaaaaaaaaaaacaaaacaaacaaacaaaaaaacaaaaaaaaaggggggggggggcaaaaaaaacccncagggggagaatacacaccccttgttataaagggcccccatgggggaa

SEQ ID NO: 334118 - DNA, 1090 bp, Homo sapiens
  misc_feature (1042)..(1042): n is a, c, g, or t
agggcaactacggggtagcggacatccgccaggcacgcttctagggccgcttctgcaactgcgcatgcgcttgggctgcacccattccgtctagcccaaaaggttcctctacaaccttcctccggattggtctatagggacacgatggccttttacgcaagcgtcacccgtgctgacccggaagttttcttcccagttaaaagtgttgggccgcggcgcgcggctcttcctgtctgtaccaggcggcgcgtggtctacgccgagtgacagagacgctcaggctgtgttctcaggatgaccgagtgggagacagcagcaccagcggtggcagagaccccagacatcaagctctttgggaagtggagcaccgatgatgtgcagatcaatgacatttccctgcaggattacattgcagtgaaggagaagtatgccaagtacctgcctcacagtgcagggcggtatgccgccaaacgcttccgcaaagctcagtgtcccattgtggagcgcctcactaactccatgatgatgcacggccgcaacaacggcaagaagctcatgactgtgcgcatcgtcaagcatgccttcgagatcatacacctgctcacaggcgagaaccctctgcaggtcctggtgaacgccatcatcaacagtggtccccgggaggactccacacgcattgggcgcgccgggactgtgagacgacaggctgtggatgtgtcccccctgcgccgtgtgaaccaggccatctggctgctgtgcacaggcgctcgtgaggctgccttccggaacattaagaccattgctgagtgcctggcagatgagctcatcaatgctgccaagggctcctcgaactcctatgccattaagaagaaggacgagctggagcgtgtggccaagtccaaccgctgattttcccagctgctgcccaataaacctgtctgccctttggggcagtcccagccaaaaaaaaaaaaaaaaaaaaaaaacaaaacaaacaaacaaaaaaacaaaaaaaaaggggggggggggcaaaaaaaacccncagggggagaatacacaccccttgttataaagggcccccatgggggaa

SEQ ID NO: 334119 - DNA, 1134 bp, Homo sapiens
agggcaactacggggtagcggacatccgccaggcacgcttctagggccgcttctgcaactgcgcatgcgcttgggctgcacccattccgtctagcccaaaaggttcctctacaaccttcctccggattggtctatagggacacgatggccttttacgcaagcgtcacccgtgctgacccggaagttttcttcccagttaaaagtgttgggccgcggcgcgcggctcttcctgtctgtaccaggcggcgcgtggtctacgccgagtgacagagacgctcaggctgtgttctcaggatgaccgagtgggagacagcagcaccagcggtggcagagaccccagacatcaagctctttgggaagtggagcaccgatgatgtgcagatcaatgacatttccctgcaggattacattgcagtgaaggagaagtatgccaagtacctgcctcacagtgcagggcggtatgccgccaaacgcttccgcaaagctcagtgtcccattgtggagcgcctcactaactccatgatgatgcacggccgcaacaacggcaagaagctcatgactgtgcgcatcgtcaagcatgccttcgagatcatacacctgctcacaggcgagaaccctctgcaggtcctggtgaacgccatcatcaacagtggtccccgggaggactccacacgcattgggcgcgccgggactgtgagacgacaggctgtggatgtgtcccccctgcgccgtgtgaaccaggccatctggctgctgtgcacaggcgctcgtgaggctgccttccggaacattaagaccattgctgagtgcctggcagatgagctcatcaatgctgccaagggctcctcgaactcctatgccattaagaagaaggacgagctggagcgtgtggccaagtccaaccgctgattttcccagctgctgcccaataaacctgtctgccctttggggcagtcccagctttggggcagtcccagccaaaaaaaaaaaaaaaaaacaaaaaaaaaaaaccgggggttttttggggggggaaaaaggggttaaaaggggctgggtttgttttcgcgacccctttttgaaggggggaaacgcgggccccccaaaggggggataattaaaaccgggtccctatat

SEQ ID NO: 334120 - DNA, 846 bp, Homo sapiens
  misc_feature (22)..(22): n is a, c, g, or t
  misc_feature (29)..(29): n is a, c, g, or t
  misc_feature (35)..(35): n is a, c, g, or t
taaactacggctaggaggaggncggtgtnatcggncgaggccaggcggcgcgtggtctacgccgagtgacagagacgctcaggctgtgttctcaggatgaccgagtgggagacagcagcaccagcggtggcagagaccccagacatcaagctctttgggaagtggagcaccgatgatgtgcagatcaatgacatttccctgcaggattacattgcagtgaaggagaagtatgccaagtacctgcctcacagtgcagggcggtatgccgccaaacgcttccgcaaagctcagtgtcccattgtggagcgcctcactaactccatgatgatgcacggccgcaacaacggcaagaagctcatgactgtgcgcatcgtcaagcatgccttcgagatcatacacctgctcacaggcgagaaccctctgcaggtcctggtgaacgccatcatcaacagtggtccccgggaggactccacacgcattgggcgcgccgggactgtgagacgacaggctgtggatgtgtcccccctgcgccgtgtgaaccaggccatctggctgctgtgcacaggcgctcgtgaggctgccttccggaacattaagaccattgctgagtgcctggcagatgagctcatcaatgctgccaagggctcctcgaactcctatgccattaagaagaaggacgagctggagcgtgtggccaagtccaaccgctgattttcccagctgctgcccaataaacctgtctgccctttggggcagtcccagcaaaaaaaaaaaaaaaaaaaaaaaaaaaaaaaaaaaaaaaaaaaaaaaaaaagaaaaaaaaaaaaaaaaaaaaggggggggggg

SEQ ID NO: 334121 - DNA, 848 bp, Homo sapiens
ggacgcgtgggtcgacccacgcgtcgcggacgcgtgggtaccaggcggcgcgtggtctacgccgagtgacagagacgctcaggctgtgttctcaggatgaccgagtgggagacagcagcaccagcggtggcagagaccccagacatcaagctctttgggaagtggagcaccgatgatgtgcagatcaatgacatttccctgcaggattacattgcagtgaaggagaagtatgccaagtacctgcctcacagtgcagggcggtatgccgccaaacgcttccgcaaagctcagtgtcccattgtggagcgcctcactaactccatgatgatgcacggccgcaacaacggcaagaagctcatgactgtgcgcatcgtcaagcatgccttcgagatcatacacctgctcacaggcgagaaccctctgcaggtcctggtgaacgccatcatcaacagtggtccccgggaggactccacacgcattgggcgcgccgggactgtgagacgacaggctgtggatgtgtcccccctgcgccgtgtgaaccaggccatctggctgctgtgcacaggcgctcgtgaggctgccttccggaacattaagaccattgctgagtgcctggcagatgagctcatcaatgctgccaagggctcctcgaactcctatgccattaagaagaaggacgagctggagcgtgtggccagtccaacgtgatttcccagctgtgccaataaactgttgccttggggagtccagcaaaaaaaaaaaatccggggtttgggggggaaaaggctacagggccggcaggttccgacctttttccccggcaacccggccaagggcaaataaacgct

SEQ ID NO: 334122 - DNA, 915 bp, Homo sapiens
gggacttggagcccattcctagtcgcacctcctcagaattcaggaccaacaaaatcctctttagcaaggagaaataatcctgctaatgtggcatttcgtggatcagcaggggcggcgcgtggtctacgccgagtgacagagacgctcaggctgtgttctcaggatgaccgagtgggagacagcagcaccagcggtggcagagaccccagacatcaagctctttgggaagtggagcaccgatgatgtgcagatcaatgacatttccctgcaggattacattgcagtgaaggagaagtatgccaagtacctgcctcacagtgcagggcggtatgccgccaaacgcttccgcaaagctcagtgtcccattgtggagcgcctcactaactccatgatgatgcacggccgcaacaacggcaagaagctcatgactgtgcgcatcgtcaagcatgccttcgagatcatacacctgctcacaggcgagaaccctctgcaggtcctggtgaacgccatcatcaacagtggtccccgggaggactccacacgcattgggcgcgccgggactgtgagacgacaggctgtggatgtgtcccccctgcgccgtgtgaaccaggccatctggctgctgtgcacaggcgctcgtgaggctgccttccggaacattaagaccattgctgagtgcctggcagatgagctcatcaatgctgccaagggctcctcgaactcctatgccattaagaagaaggacgagctggagcgtgtggccagtccaacgtgatttcccagctgtgccaataaactgttgccttggggagtccagcaaaaaaaaaaaatccggggtttgggggggaaaaggctacagggccggcaggttccgacctttttccccggcaacccggccaagggcaaataaacgct

SEQ ID NO: 334123 - DNA, 1007 bp, Homo sapiens
  misc_feature (777)..(777): n is a, c, g, or t
ggctggtgctcaagctaccatggcagacgatgatgctagctgctgttcctcagacagtggatggcgctgtacagacgaaggacctgggcgcggactaaaaacctctccacagtgatatgccatctgggaacagtgtcacgctaccacgttcaattctgacgaggatcgacactaacacgactactgcctgtcgtggcagagtgcacagagctggccagtgtgagatcgcaatcaatcatgccatcatcacactagctccctggtcgtgagccacggcagttgcagcgtgcagggagggctagggcctgtgtgtcccattgtggagcgcctcactaactccatgatgatgcacggccgcaacaacggcaagaagctcatgactgtgcgcatcgtcaagcatgccttcgagatcatacacctgctcacaggcgagaaccctctgcaggtcctggtgaacgccatcatcaacagtggtccccgggaggactccacacgcattgggcgcgccgggactgtgagacgacaggctgtggatgtgtcccccctgcgccgtgtgaaccaggccatctggctgctgtgcacaggcgctcgtgaggctgccttccggaacattaagaccattgctgagtgcctggcagatgagctcatcaatgctgccaagggctcctcgaactcctatgccattaagaagaaggacgagctggagcgtgtggccaagtccaaccgctgattttcccagctgctgcccaataaaccgctgtcttcctttggggcagncccagccaaaaaaacaaaaaaaaaacaaacaacaaaaaaacaaaagaaacaaacaaaaaagggggggggcgccgcccaaaaaaaatcccccaggagggggcaccagtaccgggccccacgtttctttgagaaaagggggccaaaaaggggcgcgataaacacagcaggcaggggccggtaaacacgccggagcgcgaaacggcgccggagttcggagagaccacaccggg

SEQ ID NO: 334124 - DNA, 1392 bp, Homo sapiens
agggcaactacggggtagcggacatccgccaggcacgcttctagggccgcttctgcaactgcgcatgcgcttgggctgcacccattccgtctagcccaaaaggttcctctacaaccttcctccggattggtctatagggacacgatggccttttacgcaagcgtcacccgtgctgacccggaagttttcttcccagttaaaagtgttgggccgcggcgcgcggctcttcctgtctgtaccaggcggcgcgtggtctacgccgagtgacagagacgctcaggctgtgttctcaggatgaccgagtgggagacagcagcaccagcggtggcagagaccccagacatcaagctctttgggaagtggagcaccgatgatgtgcagatcaatgacatttccctgcaggattaccattgcagtgaaaggacgaacgttattgcccaagttacctgccttcacaagtggcagggccgggtaatgcacggccaaaacagctttcccggcaaaagcctccaggttggtccccatttgtggggagcaggcccttcacttagaccttccatggattgaattgccccgggccggcaacaaaccgagccaaggaaaggctccatggacttggttgccggcaattcggttcaaaggcattggccctttccgacaggactccattacaccctggcttcaaccagggcggaagaaaccccttcttgcaagggttccctgggtggaaaacggcccatcattcaaagcaaggttggtgttcccccggggggaaggggaacttcccatctagcggccattgttggcggcggccgccctcggggaactcggtcggaggaccctgaaccagggcttggctggcggaatcgctgttcaccccccacttgtcggcccgttggtggcaacccaggggccagttccttgcggcttggcgtggttgtccacccagggcgggctacgttggcagcgggcttcggccccttttcccggggtgacaccacttttcaaggaaaccccagctgtcggggcgatgagaacgcttgggccgcttgggggcacgagcgagttgcactgccttcaagttcataataggccttggccccaacggggcgtgtcccctttcgggaaaacgctttcccttaacttgcccccagctcgtcacgaaaccgcacaggggaaccgaacgcgacttgggcaaggacgtttgagtggtcgcccaaagtttccacaaagccaggacctggtattgtgctcacccccaggacttcgccttgggcaccctcgagttacacgacccctggtagtcttcgggccccctcatcggagggcccagacgtcccccgctttaagaaccagcatcatgaccaagacacaacgtcatcagacgaagca

SEQ ID NO: 334125 - DNA, 1128 bp, Homo sapiens
  misc_feature (1028)..(1028): n is a, c, g, or t
  misc_feature (1038)..(1038): n is a, c, g, or t
  misc_feature (1041)..(1041): n is a, c, g, or t
agggcaactacggggtagcggacatccgccaggcacgcttctagggccgcttctgcaactgcgcatgcgcttgggctgcacccattccgtctagcccaaaaggttcctctacaaccttcctccggattggtctatagggacacgatggccttttacgcaagcgtcacccgtgctgacccggaagttttcttcccagttaaaagtgttgggccgcggcgcgcggctcttcctgtctgtaccaggcggcgcgtggtctacgccgagtgacagagacgctcaggctgtgttctcaggatgaccgagtgggagacagcagcaccagcggtggcagagaccccagacatcaagctctttgggaagtggagcaccgatgatgtgcagatcaatgacatttccctgcaggattacattgcagtgaaggagaagtatgccaagtacctgcctcacagtgcagggcggtatgccgccaaacgcttccgcaaagctcagtgtcccattgtggagcgcctcactaactccatgatgatgcacggccgcaacaacggcaagaagctcatgactgtgcgcatcgtcaagcatgccttcgagatcatacacctgctcacaggcgagaaccctctgcaggtcctggtgaacgccatcatcaacagtggtccccgggaggactccacacgcattgggcgcgccgggactgtgagacgacaggctgtggatgtgtcccccctgcgccgtgtgaaccaggccatctggctgctgtgcacaggcgctcgtgaggctgccttccggaacattaagaccattgctgagtgcctggcagatgagctcatcaatgctgccaagggctcctcgaactcctatgccattaagaagaaggacgagctggagcgtgtggccaagtccaaccgctgattttcccagctgctgcccaataaacctgtctgccctttggggcagtcccagcaaaaaaaaacacaacaaaaaaccacaccaacaaacaccaaacaacaaaaaaaagggggggggcgaanataccggggnccnaacgcccccttttggaggggccagagggcaaaacagcagcggggaaaggggggacgcgtggttggggacctcggggcgggcacccag

SEQ ID NO: 334126 - DNA, 930 bp, Homo sapiens
  misc_feature (830)..(830): n is a, c, g, or t
  misc_feature (840)..(840): n is a, c, g, or t
  misc_feature (843)..(843): n is a, c, g, or t
ggacgcgtgggtcgacccacgcgtcgcggacgcgtgggtaccaggcggcgcgtggtctacgccgagtgacagagacgctcaggctgtgttctcaggatgaccgagtgggagacagcagcaccagcggtggcagagaccccagacatcaagctctttgggaagtggagcaccgatgatgtgcagatcaatgacatttccctgcaggattacattgcagtgaaggagaagtatgccaagtacctgcctcacagtgcagggcggtatgccgccaaacgcttccgcaaagctcagtgtcccattgtggagcgcctcactaactccatgatgatgcacggccgcaacaacggcaagaagctcatgactgtgcgcatcgtcaagcatgccttcgagatcatacacctgctcacaggcgagaaccctctgcaggtcctggtgaacgccatcatcaacagtggtccccgggaggactccacacgcattgggcgcgccgggactgtgagacgacaggctgtggatgtgtcccccctgcgccgtgtgaaccaggccatctggctgctgtgcacaggcgctcgtgaggctgccttccggaacattaagaccattgctgagtgcctggcagatgagctcatcaatgctgccaagggctcctcgaactcctatgccattaagaagaaggacgagctggagcgtgtggccaagtccaaccgctgattttcccagctgctgcccaataaacctgtctgccctttggggcagtcccagcaaaaaaaaacacaacaaaaaaccacaccaacaaacaccaaacaacaaaaaaaagggggggggcgaanataccggggnccnaacgcccccttttggaggggccagagggcaaaacagcagcggggaaaggggggacgcgtggttggggacctcggggcgggcacccag

SEQ ID NO: 334127 - DNA, 935 bp, Homo sapiens
gcctactactactaccactaaattcgcggccgcgtcgaccagggcggcgcgtggtctacgccgagtgacagagacgctcaggctgtgttctcaggatgaccgagtgggagacagcagcaccagcggtggcagagaccccagacatcaagctctttgggaagtggagcaccgatgatgtgcagatcaatgacatttccctgcaggattacattgcagtgaaggagaagtatgccaagtacctgcctcacagtgcagggcggtatgccgccaaacgcttccgcaaagctcagtgtcccattgtggagcgcctcactaactccatgatgatgcacggccgcaacaacggcaagaagctcatgactgtgcgcatcgtcaagcatgccttcgagatcatacacctgctcacaggcgagaaccctctgcaggtcctggtgaacgccatcatcaacagtggtccccgggaggactccacacgcattgggcgcgccgggactgtgagacgacaggctgtggatgtgtcccccctgcgccgtgtgaaccaggccatctggctgctgtgcacaggcgctcgtgaggctgccttccggaacattaagaccattgctgagtgcctggcagatgagctcatcaatgctgccaagggctcctcgaactcctatgccattaagaagaaggacgagctggagcgtgtggccaagtccaaccgctgattttcccagctgctgcccaataaacctgtctgccctttggggcagtcccagctttggggcagtcccagccaaaaaaaaaaaaaaaaaacaaaaaaaaaaaaccgggggttttttggggggggaaaaaggggttaaaaggggctgggtttgttttcgcgacccctttttgaaggggggaaacgcgggccccccaaaggggggataattaaaaccgggtccctatat

SEQ ID NO: 334128 - DNA, 918 bp, Homo sapiens
gcctactactactaccactaaattcgcggccgcgtcgaccagggcggcgcgtggtctacgccgagtgacagagacgctcaggctgtgttctcaggatgaccgagtgggagacagcagcaccagcggtggcagagaccccagacatcaagctctttgggaagtggagcaccgatgatgtgcagatcaatgacatttccctgcaggattacattgcagtgaaggagaagtatgccaagtacctgcctcacagtgcagggcggtatgccgccaaacgcttccgcaaagctcagtgtcccattgtggagcgcctcactaactccatgatgatgcacggccgcaacaacggcaagaagctcatgactgtgcgcatcgtcaagcatgccttcgagatcatacacctgctcacaggcgagaaccctctgcaggtcctggtgaacgccatcatcaacagtggtccccgggaggactccacacgcattgggcgcgccgggactgtgagacgacaggctgtggatgtgtcccccctgcgccgtgtgaaccaggccatctggctgctgtgcacaggcgctcgtgaggctgccttccggaacattaagaccattgctgagtgcctggcagatgagctcatcaatgctgccaagggctcctcgaactcctatgccattaagaagaaggacgagctggagcgtgtggccaagtccaaccgctgattttcccagctgctgcccaataaacctgtctgccctttggggcagtcccagcggggcagcccagcaaaaaaaaaaaaaaaaaaaaaaaacaaaaaaaaaaaaaaaaaaaaaaaaaaaaaaaaaaaaaaaaaaaaaaaaaaaaaaaaaaaaaaaaaaaaaaaaaaaaaaaaaaaaaagaaaaaaaaaaaaaaaaaaaaggggggggggg

SEQ ID NO: 334129 - DNA, 845 bp, Homo sapiens
gcctactactactaccactaaattcgcggccgcgtcgaccagggcggcgcgtggtctacgccgagtgacagagacgctcaggctgtgttctcaggatgaccgagtgggagacagcagcaccagcggtggcagagaccccagacatcaagctctttgggaagtggagcaccgatgatgtgcagatcaatgacatttccctgcaggattacattgcagtgaaggagaagtatgccaagtacctgcctcacagtgcagggcggtatgccgccaaacgcttccgcaaagctcagtgtcccattgtggagcgcctcactaactccatgatgatgcacggccgcaacaacggcaagaagctcatgactgtgcgcatcgtcaagcatgccttcgagatcatacacctgctcacaggcgagaaccctctgcaggtcctggtgaacgccatcatcaacagtggtccccgggaggactccacacgcattgggcgcgccgggactgtgagacgacaggctgtggatgtgtcccccctgcgccgtgtgaaccaggccatctggctgctgtgcacaggcgctcgtgaggctgccttccggaacattaagaccattgctgagtgcctggcagatgagctcatcaatgctgccaagggctcctcgaactcctatgccattaagaagaaggacgagctggagcgtgtggccaagtccaaccgctgattttcccagctgctgcccaataaacctgtctgccctttggggcagtcccagcaaaaaaaaaaaaaaaaaaaaaaaaaaaaaaaaaaaaaaaaaaaaaaaaaaagaaaaaaaaaaaaaaaaaaaaggggggggggg

SEQ ID NO: 334130 - DNA, 987 bp, Homo sapiens
gcctactactactaccactaaattcgcggccgcgtcgaccagggcggcgcgtggtctacgccgagtgacagagacgctcaggctgtgttctcaggatgaccgagtgggagacagcagcaccagcggtggcagagaccccagacatcaagctctttgggaagtggagcaccgatgatgtgcagatcaatgacatttccctgcaggattacattgcagtgaaggagaagtatgccaagtacctgcctcacagtgcagggcggtatgccgccaaacgcttccgcaaagctcagtgtcccattgtggagcgcctcactaactccatgatgatgcacggccgcaacaacggcaagaagctcatgactgtgcgcatcgtcaagcatgccttcgagatcatacacctgctcacaggcgagaaccctctgcaggtcctggtgaacgccatcatcaacagtggtccccgggaggactccacacgcattgggcgcgccgggactgtgagacgacaggctgtggatgtgtcccccctgcgccgtgtgaaccaggccatctggctgctgtgcacaggcgctcgtgaggctgccttccggaacattaagaccattgctgagtgcctggcagatgagctcatcaatgctgccaagggctcctcgaactcctatgccattaagaagaaggacgagctggagcgtgtggccaagtccaaccgctgattttcccagctgctgcccaataaacctgtctgccctttggggcagtcccagcgcaagcacagcaaaaaaaaaaaaaaaagaaaaaaaaaaaggaggggggggctaaaatattcggaggggccaattgagcgccccgttttttacaaggggccaaagggggaataaaaagaggggggggtacaagcgggtggacaggctggcttggaggcccctcgcgtggcatgacaccccagtagccgataatacgtggaccgttgggtgtaattattacacacgg

SEQ ID NO: 334131 - DNA, 1228 bp, Homo sapiens
gcctactactactaccactaaattcgcggccgcgtcgaccagggcggcgcgtggtctacgccgagtgacagagacgctcaggctgtgttctcaggatgaccgagtgggagacagcagcaccagcggtggcagagaccccagacatcaagctctttgggaagtggagcaccgatgatgtgcagatcaatgacatttccctgcaggattacattgcagtgaaggagaagtatgccaagtacctgcctcacagtgcagggcggtatgccgccaaacgcttccgcaaagctcagtgtcccattgtggagcgcctcactaactccatgatgatgcacggccgcaacaacggcaagaagctcatgactgtgcgcatcgtcaagcatgccttcgagatcatacacctgctcacaggcgagaaccctctgcaggtcctggtgaacgccatcatcaacagtggtccccgggaggactccacacgcattgggcgcgccgggactgtgagacgacaggctgtggatgtgtcccccctgcgccgtgtgaaccaggccatctggctgctgtgcacaggcgctcgtgaggctgccttccggaacattaagaccattgctgagtgcctggcagatgagctcatcaatgctgccaagggctcctcgaactcctatgccattaagaagaaggacgagctggagcgtgtggccaagtccaaccgctgattttcccagctgctgcccaataaacctgtctgccctttggggcagtcccagcaaaaaaacaaaaaaaaaacccttcacaatctgggcaagccaaaggccatttatccggggaaccattatcaggaaaaaaattctacctcttttatacttaatcttccctacatatttccccttttaatactaattagttcttatagaaagaacaaaccaacacaaacagccacaaaaaaaatcgacacaacaacacaacacaagaagtcaacccgaaaaacaaaacgcgaccagccaaaacagagaggaggggggcggcggcagataaaaaaagcaccaacgcggcgggggacacccaagagagcatacaccacaccagattgatgtaagcagaggaaggggccccacaaagggagcgggcacttaaataaaccaccacacgacggcgggagataaaaaaagaggcggcgtgagacacacacaacgtcacggagacatctgtaaaaagaacactctggcggggggaa

SEQ ID NO: 334132 - DNA, 1245 bp, Homo sapiens
gcctactactactaccactaaattcgcggccgcgtcgaccagggcggcgcgtggtctacgccgagtgacagagacgctcaggctgtgttctcaggatgaccgagtgggagacagcagcaccagcggtggcagagaccccagacatcaagctctttgggaagtggagcaccgatgatgtgcagatcaatgacatttccctgcaggattacattgcagtgaaggagaagtatgccaagtacctgcctcacagtgcagggcggtatgccgccaaacgcttccgcaaagctcagtgtcccattgtggagcgcctcactaactccatgatgatgcacggccgcaacaacggcaagaagctcatgactgtgcgcatcgtcaagcatgccttcgagatcatacacctgctcacaggcgagaaccctctgcaggtcctggtgaacgccatcatcaacagtggtccccgggaggactccacacgcattgggcgcgccgggactgtgagacgacaggctgtggatgtgtcccccctgcgccgtgtgaaccaggccatctggctgctgtgcacaggcgctcgtgaggctgccttccggaacattaagaccattgctgagtgcctggcagatgagctcatcaatgctgccaagggctcctcgaactcctatgccattaagaagaaggacgagctggagcgtgtggccaagtccaaccgctgattttcccagctgctgcccaataaacctgtctgccctttggggcagtcccagcaaaaaaaaaaaaaaaaaaaaaaaaaaaccccgggggccccaaaggcggggggggggaaaaaaggggaaagagaaggggcccagggcgcccaacgcggggcccggagcccccagtttcctcggggcccaggggggaaacccgcggggcccccaaaagggagcgcccataacttcgaaacccaggtaacccggggatagacccgcgccacacccccccccaccaccccgccgccacccccccccccaccaccccccccccaccacccccccccacccccccacccccccccccccccgcaacagagacaaccagcgcagacccaaccgacaacccgccaaccacgacgccgaaaccccggcccccccccccgcacaagcgccagccccaccgacagagcggcagacacgagcaaagcagccgaccccgcgacacacaaacgcacgcgcaggccgaccacaccaacagcaccgcgacctcacgaca

SEQ ID NO: 334133 - DNA, 958 bp, Homo sapiens
  misc_feature (801)..(801): n is a, c, g, or t
gcctactactactaccactaaattcgcggccgcgtcgaccagggcggcgcgtggtctacgccgagtgacagagacgctcaggctgtgttctcaggatgaccgagtgggagacagcagcaccagcggtggcagagaccccagacatcaagctctttgggaagtggagcaccgatgatgtgcagatcaatgacatttccctgcaggattacattgcagtgaaggagaagtatgccaagtacctgcctcacagtgcagggcggtatgccgccaaacgcttccgcaaagctcagtgtcccattgtggagcgcctcactaactccatgatgatgcacggccgcaacaacggcaagaagctcatgactgtgcgcatcgtcaagcatgccttcgagatcatacacctgctcacaggcgagaaccctctgcaggtcctggtgaacgccatcatcaacagtggtccccgggaggactccacacgcattgggcgcgccgggactgtgagacgacaggctgtggatgtgtcccccctgcgccgtgtgaaccaggccatctggctgctgtgcacaggcgctcgtgaggctgccttccggaacattaagaccattgctgagtgcctggcagatgagctcatcaatgctgccaagggctcctcgaactcctatgccattaagaagaaggacgagctggagcgtgtggccaagtccaaccgctgattttcccagctgctgcccaataaacctgtctgccctttggggcagtcccagctttgggcagccccagcaaaaaaaaaacattaggaaatcngcactttggggcccccatccccctttcgccggggaaaaaagaaaacttttttcaattagatttggaaactatttacccggatgagttaaaaattatttaaggtctaggcttaacaaaccttttttgaagttaaaaggagggattgccctcttaaagg

SEQ ID NO: 334134 - DNA, 822 bp, Homo sapiens
  misc_feature (783)..(783): n is a, c, g, or t
  misc_feature (818)..(818): n is a, c, g, or t
gcctactactactaccactaaattcgcggccgcgtcgaccagggcggcgcgtggtctacgccgagtgacagagacgctcaggctgtgttctcaggatgaccgagtgggagacagcagcaccagcggtggcagagaccccagacatcaagctctttgggaagtggagcaccgatgatgtgcagatcaatgacatttccctgcaggattacattgcagtgaaggagaagtatgccaagtacctgcctcacagtgcagggcggtatgccgccaaacgcttccgcaaagctcagtgtcccattgtggagcgcctcactaactccatgatgatgcacggccgcaacaacggcaagaagctcatgactgtgcgcatcgtcaagcatgccttcgagatcatacacctgctcacaggcgagaaccctctgcaggtcctggtgaacgccatcatcaacagtggtccccgggaggactccacacgcattgggcgcgccgggactgtgagacgacaggctgtggatgtgtcccccctgcgccgtgtgaaccaggccatctggctgctgtgcacaggcgctcgtgaggctgccttccggaacattaagaccattgctgagtgcctggcagatgagctcatcaatgctgccaagggctcctcgaactcctatgccattaagaagaaggacgagctggagcgtgtggccaagtccaaccgctgattttcccagctgctgcccaataaacctgtctgccctttggggcagtcccagccagcaaaaaaaaaaaaaaaanaaaaaacaaaaaaaacaaaaaaaaaaaagaaaaanaaaa

SEQ ID NO: 334135 - DNA, 866 bp, Homo sapiens
gcctactactactaccactaaattcgcggccgcgtcgaccagggcggcgcgtggtctacgccgagtgacagagacgctcaggctgtgttctcaggatgaccgagtgggagacagcagcaccagcggtggcagagaccccagacatcaagctctttgggaagtggagcaccgatgatgtgcagatcaatgacatttccctgcaggattacattgcagtgaaggagaagtatgccaagtacctgcctcacagtgcagggcggtatgccgccaaacgcttccgcaaagctcagtgtcccattgtggagcgcctcactaactccatgatgatgcacggccgcaacaacggcaagaagctcatgactgtgcgcatcgtcaagcatgccttcgagatcatacacctgctcacaggcgagaaccctctgcaggtcctggtgaacgccatcatcaacagtggtccccgggaggactccacacgcattgggcgcgccgggactgtgagacgacaggctgtggatgtgtcccccctgcgccgtgtgaaccaggccatctggctgctgtgcacaggcgctcgtgaggctgccttccggaacattaagaccattgctgagtgcctggcagatgagctcatcaatgctgccaagggctcctcgaactcctatgccattaagaagaaggacgagctggagcgtgtggccaagtccaaccgctgattttcccagctgctgcccaataaacctgtctgccctttggggcagtcccagcaaaaaaaaaaaaaaaaaaaaaaaaaaaaaaaaaaaaaaaaaaaaaaaaaaaaaaaaaaaaaaaaaaaaaaaagaaaaaaaaaaaaaaaaaaaaggggggggggg

SEQ ID NO: 334136 - DNA, 926 bp, Homo sapiens
aaaaccttacggctaggtacgaggcctgggtgttactacgccgagtgacaggcggcgcgtggtctacgccgagtgacagagacgctcaggctgtgttctcaggatgaccgagtgggagacagcagcaccagcggtggcagagaccccagacatcaagctctttgggaagtggagcaccgatgatgtgcagatcaatgacatttccctgcaggattacattgcagtgaaggagaagtatgccaagtacctgcctcacagtgcagggcggtatgccgccaaacgcttccgcaaagctcagtgtcccattgtggagcgcctcactaactccatgatgatgcacggccgcaacaacggcaagaagctcatgactgtgcgcatcgtcaagcatgccttcgagatcatacacctgctcacaggcgagaaccctctgcaggtcctggtgaacgccatcatcaacagtggtccccgggaggactccacacgcattgggcgcgccgggactgtgagacgacaggctgtggatgtgtcccccctgcgccgtgtgaaccaggccatctggctgctgtgcacaggcgctcgtgaggctgccttccggaacattaagaccattgctgagtgcctggcagatgagctcatcaatgctgccaagggctcctcgaactcctatgccattaagaagaaggacgagctggagcgtgtggccaagtccaaccgctgattttcccagctgctgcccaataaacctgtctgccctttggggcagtcccagcggggcagcccagcaaaaaaaaaaaaaaaaaaaaaaaacaaaaaaaaaaaaaaaaaaaaaaaaaaaaaaaaaaaaaaaaaaaaaaaaaaaaaaaaaaaaaaaaaaaaaaaaaaaaaaaaaaaaaagaaaaaaaaaaaaaaaaaaaaggggggggggg

SEQ ID NO: 334137 - DNA, 871 bp, Homo sapiens
  misc_feature (823)..(823): n is a, c, g, or t
aaaaccttacggctaggtacgaggcctgggtgttactacgccgagtgacagagacgctcaggctgtgttctcaggatgaccgagtgggagacagcagcaccagcggtggcagagaccccagacatcaagctctttgggaagtggagcaccgatgatgtgcagatcaatgacatttccctgcaggattacattgcagtgaaggagaagtatgccaagtacctgcctcacagtgcagggcggtatgccgccaaacgcttccgcaaagctcagtgtcccattgtggagcgcctcactaactccatgatgatgcacggccgcaacaacggcaagaagctcatgactgtgcgcatcgtcaagcatgccttcgagatcatacacctgctcacaggcgagaaccctctgcaggtcctggtgaacgccatcatcaacagtggtccccgggaggactccacacgcattgggcgcgccgggactgtgagacgacaggctgtggatgtgtcccccctgcgccgtgtgaaccaggccatctggctgctgtgcacaggcgctcgtgaggctgccttccggaacattaagaccattgctgagtgcctggcagatgagctcatcaatgctgccaagggctcctcgaactcctatgccattaagaagaaggacgagctggagcgtgtggccaagtccaaccgctgattttcccagctgctgcccaataaacctgtctgccctttggggcagtcccagccaaaaaaaaaaaaaaaaaaaaaaaacaaaacaaacaaacaaaaaaacaaaaaaaaaggggggggggggcaaaaaaaacccncagggggagaatacacaccccttgttataaagggcccccatgggggaa

SEQ ID NO: 334138 - DNA, 1228 bp, Homo sapiens
  misc_feature (737)..(737): n is a, c, g, or t
gcctactactactaccactaaattcgcggccgcgtcgaccagggcggcgcgtggtctacgccgagtgacagagacgctcaggctgtgttctcaggatgaccgagtgggagacagcagcaccagcggtggcagagaccccagacatcaagctctttgggaagtggagcaccgatgatgtgcagatcaatgacatttccctgcaggattacattgcagtgaaggagaagtatgccaagtacctgcctcacagtgcagggcggtatgccgccaaacgcttccgcaaagctcagtgtcccattgtggagcgcctcactaactccatgatgatgcacggccgcaacaacggcaagaagctcatgactgtgcgcatcgtcaagcatgccttcgagatcatacacctgctcacaggcgagaaccctctgcaggtcctggtgaacgccatcatcaacagtggtccccgggaggactccacacgcattgggcgcgccgggactgtgagacgacaggctgtggatgtgtcccccctgcgccgtgtgaaccaggccatctggctgctgtgcacaggcgctcgtgaggctgccttccggaacattaagaccattgctgagtgcctggcagatgagctcatcaatgctgccaagggctcctcgaactcctatgccattaagaagaaggacgagctggagcgtgtggccaagtccaaccgctgattttcccagctgctgcccaataaaccntggggccagcccccagctaaccaaacacacaacgcacacaccccacacacacaccacctggggggccgcgcacccccgccccgcagaacacaactcccaccaaaacccacgttggggcgaccagcgcgcccacccacgaccacccgcacaccaccgcccaacgacgtccccaagagaaaccgcggccaaacaaggcggcatctccccaataaaacacccccggaggaccacgcggttgtcacaccccgaaaggggccgaggccaccaaggaccccacacgggatccacagcccgttacatcgcgcccgcggtccacgacccacatcacactcgccgcacatcacgcgcaggccgccacacaaccgcaacccacccaccacacacccgccagacacgagcacactcacgacacccacaccaacacagcaccagcagcaccaccccccacacccccaccccccgccaacacccccccacaccccacagcccca

SEQ ID NO: 334139 - DNA, 1297 bp, Homo sapiens
  misc_feature (746)..(746): n is a, c, g, or t
  misc_feature (1288)..(1288): n is a, c, g, or t
gcctactactactaccactaaattcgcggccgcgtcgaccagggcggcgcgtggtctacgccgagtgacagagacgctcaggctgtgttctcaggatgaccgagtgggagacagcagcaccagcggtggcagagaccccagacatcaagctctttgggaagtggagcaccgatgatgtgcagatcaatgacatttccctgcaggattacattgcagtgaaggagaagtatgccaagtacctgcctcacagtgcagggcggtatgccgccaaacgcttccgcaaagctcagtgtcccattgtggagcgcctcactaactccatgatgatgcacggccgcaacaacggcaagaagctcatgactgtgcgcatcgtcaagcatgccttcgagatcatacacctgctcacaggcgagaaccctctgcaggtcctggtgaacgccatcatcaacagtggtccccgggaggactccacacgcattgggcgcgccgggactgtgagacgacaggctgtggatgtgtcccccctgcgccgtgtgaaccaggccatctggctgctgtgcacaggcgctcgtgaggctgccttccggaacattaagaccattgctgagtgcctggcagatgagctcatcaatgctgccaagggctcctcgaactcctatgccattaagaagaaggacgagctggagcgtgtggccaagtccaaccgctgattttcccagctgctgcccaataaaccttggggcagncccagaaaaaaaaaagaaaaaaagaaaaacaaagaaacaaaaacgaacaacaaaaagataagacaaaagaaaaaaaaaaaaacaagagggggcgcgccgcgggcgcatgaagaagttcccccacgagggggggccccatacttttcgcgcgccccccggctttttttgtagaccaggcggggccccataaggaggggcgatataaaaaaggcacgcgagcgggcgcagtgtttaaacccggctcggtgggggggcagccggcggcgcgggggacctctgtggggagaggcccccaaccctgcgcggggggcacacttttccggaccccccccccagagagaatataagggcccggggaaaaaaacccaagcggttttggtgttgaacccccgagcgaatttcctggggcaagaaatttggtccggctttttttaaacgtcgcgagccctcaataatcacctacgcatcgaaaaaacgagacgagccaaaagaggaaatagctcacaaactagcaagacaacataacatacaacacgtcaganagaaaaagt

SEQ ID NO: 334140 - DNA, 1032 bp, Homo sapiens
gcctactactactaccactaaattcgcggccgcgtcgaccagggcggcgcgtggtctacgccgagtgacagagacgctcaggctgtgttctcaggatgaccgagtgggagacagcagcaccagcggtggcagagaccccagacatcaagctctttgggaagtggagcaccgatgatgtgcagatcaatgacatttccctgcaggattacattgcagtgaaggagaagtatgccaagtacctgcctcacagtgcagggcggtatgccgccaaacgcttccgcaaagctcagtgtcccattgtggagcgcctcactaactccatgatgatgcacggccgcaacaacggcaagaagctcatgactgtgcgcatcgtcaagcatgccttcgagatcatacacctgctcacaggcgagaaccctctgcaggtcctggtgaacgccatcatcaacagtggtccccgggaggactccacacgcattgggcgcgccgggactgtgagacgacaggctgtggatgtgtcccccctgcgccgtgtgaaccaggccatctggctgctgtgcacaggcgctcgtgaggctgccttccggaacattaagaccattgctgagtgcctggcagatgagctcatcaatgctgccaagggctcctcgaactcctatgccattaagaagaaggacgagctggagcgtgtggccaagtccaaccgctgattttcccagctgctgcccaataaaccggggcagcccagcaaaaaaaaaaaaaaaaaaaaaaaacaaaaaaaaaaaaaaaaacaaaacaaaaacccccgggcccctttttgggggggggggaaaaggggttaaaaaaggggcacaggggccaacgggtacccgaacccaaaaaaggaaacaggggggaaaaaacgggggcccccaaaaggggaggaggtcttaaaatccgcaaaaccgccgggtaaccggcgtatatggcagcctcccacacaaaccacacccacaaacaccaagcaaacacaacagcgcacactaagacaac

SEQ ID NO: 334141 - DNA, 987 bp, Homo sapiens
  misc_feature (757)..(757): n is a, c, g, or t
gcctactactactaccactaaattcgcggccgcgtcgaccagggcggcgcgtggtctacgccgagtgacagagacgctcaggctgtgttctcaggatgaccgagtgggagacagcagcaccagcggtggcagagaccccagacatcaagctctttgggaagtggagcaccgatgatgtgcagatcaatgacatttccctgcaggattacattgcagtgaaggagaagtatgccaagtacctgcctcacagtgcagggcggtatgccgccaaacgcttccgcaaagctcagtgtcccattgtggagcgcctcactaactccatgatgatgcacggccgcaacaacggcaagaagctcatgactgtgcgcatcgtcaagcatgccttcgagatcatacacctgctcacaggcgagaaccctctgcaggtcctggtgaacgccatcatcaacagtggtccccgggaggactccacacgcattgggcgcgccgggactgtgagacgacaggctgtggatgtgtcccccctgcgccgtgtgaaccaggccatctggctgctgtgcacaggcgctcgtgaggctgccttccggaacattaagaccattgctgagtgcctggcagatgagctcatcaatgctgccaagggctcctcgaactcctatgccattaagaagaaggacgagctggagcgtgtggccaagtccaaccgctgattttcccagctgctgcccaataaaccgctgtcttcctttggggcagncccagccaaaaaaacaaaaaaaaaacaaacaacaaaaaaacaaaagaaacaaacaaaaaagggggggggcgccgcccaaaaaaaatcccccaggagggggcaccagtaccgggccccacgtttctttgagaaaagggggccaaaaaggggcgcgataaacacagcaggcaggggccggtaaacacgccggagcgcgaaacggcgccggagttcggagagaccacaccggg

SEQ ID NO: 334142 - DNA, 848 bp, Homo sapiens
  misc_feature (809)..(809): n is a, c, g, or t
  misc_feature (844)..(844): n is a, c, g, or t
gcctactactactaccactaaattcgcggccgcgtcgaccagggcggcgcgtggtctacgccgagtgacagagacgctcaggctgtgttctcaggatgaccgagtgggagacagcagcaccagcggtggcagagaccccagacatcaagctctttgggaagtggagcaccgatgatgtgcagatcaatgacatttccctgcaggattacattgcagtgaaggagaagtatgccaagtacctgcctcacagtgcagggcggtatgccgccaaacgcttccgcaaagctcagtgtcccattgtggagcgcctcactaactccatgatgatgcacggccgcaacaacggcaagaagctcatgactgtgcgcatcgtcaagcatgccttcgagatcatacacctgctcacaggcgagaaccctctgcaggtcctggtgaacgccatcatcaacagtggtccccgggaggactccacacgcattgggcgcgccgggactgtgagacgacaggctgtggatgtgtcccccctgcgccgtgtgaaccaggccatctggctgctgtgcacaggcgctcgtgaggctgccttccggaacattaagaccattgctgagtgcctggcagatgagctcatcaatgctgccaagggctcctcgaactcctatgccattaagaagaaggacgagctggagcgtgtggccaagtccaaccgctgattttcccagctgctgcccaataaaccggggcagcccagcaaaaaaaaaaaaaaaaaaaaaaaacaaaaaaaaaaaaaacagcaaaaaaaaaaaaaaaanaaaaaacaaaaaaaacaaaaaaaaaaaagaaaaanaaaa

SEQ ID NO: 334143 - DNA, 871 bp, Homo sapiens
gcctactactactaccactaaattcgcggccgcgtcgaccagggcggcgcgtggtctacgccgagtgacagagacgctcaggctgtgttctcaggatgaccgagtgggagacagcagcaccagcggtggcagagaccccagacatcaagctctttgggaagtggagcaccgatgatgtgcagatcaatgacatttccctgcaggattacattgcagtgaaggagaagtatgccaagtacctgcctcacagtgcagggcggtatgccgccaaacgcttccgcaaagctcagtgtcccattgtggagcgcctcactaactccatgatgatgcacggccgcaacaacggcaagaagctcatgactgtgcgcatcgtcaagcatgccttcgagatcatacacctgctcacaggcgagaaccctctgcaggtcctggtgaacgccatcatcaacagtggtccccgggaggactccacacgcattgggcgcgccgggactgtgagacgacaggctgtggatgtgtcccccctgcgccgtgtgaaccaggccatctggctgctgtgcacaggcgctcgtgaggctgccttccggaacattaagaccattgctgagtgcctggcagatgagctcatcaatgctgccaagggctcctcgaactcctatgccattaagaagaaggacgagctggagcgtgtggccaagtccaaccgctgattttcccagctgctgcccaataaaccggggcagcccagcaaaaaaaaaaaaaaaaaaaaaaaacaaaaaaaaaaaaaaaaaaaaaaaaaaaaaaaaaaaaaaaaaaaaaaaaaaaaaaaaaaaaaaaaagaaaaaaaaaaaaaaaaaaaaggggggggggg

SEQ ID NO: 334144 - DNA, 982 bp, Homo sapiens
gcctactactactaccactaaattcgcggccgcgtcgaccagggcggcgcgtggtctacgccgagtgacagagacgctcaggctgtgttctcaggatgaccgagtgggagacagcagcaccagcggtggcagagaccccagacatcaagctctttgggaagtggagcaccgatgatgtgcagatcaatgacatttccctgcaggattacattgcagtgaaggagaagtatgccaagtacctgcctcacagtgcagggcggtatgccgccaaacgcttccgcaaagctcagtgtcccattgtggagcgcctcactaactccatgatgatgcacggccgcaacaacggcaagaagctcatgactgtgcgcatcgtcaagcatgccttcgagatcatacacctgctcacaggcgagaaccctctgcaggtcctggtgaacgccatcatcaacagtggtccccgggaggactccacacgcattgggcgcgccgggactgtgagacgacaggctgtggatgtgtcccccctgcgccgtgtgaaccaggccatctggctgctgtgcacaggcgctcgtgaggctgccttccggaacattaagaccattgctgagtgcctggcagatgagctcatcaatgctgccaagggctcctcgaactcctatgccattaagaagaaggacgagctggagcgtgtggccaagtccaaccgctgattttcccagctgctgcccaataaaccttggggcagtcccaggcccaagaaaaaaaacaaaacaaaaagaaaacaaaaaaaacttgtgtgggggccgcgactgcggcgccccgggaaaaagcttttcaaaaaccacttgcgtggggggccggggggcccccgagtggtcagcgggacccggggcctagaggggtcccgaggaaacccggggccggaaaagggcgggttccccccataaaaaggccggggcaacggaggttggacaaccaaggg

SEQ ID NO: 334145 - DNA, 1093 bp, Homo sapiens
  misc_feature (1045)..(1045): n is a, c, g, or t
agtgtgaggacgtatggcatctgctgagccattataccttggtcccagtgcagcagctgttgactggtggctgccaagtcttgggcccaggggttctaggtgaaagacagatgcttcttgctgacagctgagtaatttttctagtgcttgaaaacacgttcacggcctttcttggtcctttgcgaccccccagttcatcactagatggcggctagcctcagagttgggaatgagtgcgcctttgctccatgctagctgagctctgacgtttttttcctgtcatcaccctgtcccaggatgaccgagtgggagacagcagcaccagcggtggcagagaccccagacatcaagctctttgggaagtggagcaccgatgatgtgcagatcaatgacatttccctgcaggattacattgcagtgaaggagaagtatgccaagtacctgcctcacagtgcagggcggtatgccgccaaacgcttccgcaaagctcagtgtcccattgtggagcgcctcactaactccatgatgatgcacggccgcaacaacggcaagaagctcatgactgtgcgcatcgtcaagcatgccttcgagatcatacacctgctcacaggcgagaaccctctgcaggtcctggtgaacgccatcatcaacagtggtccccgggaggactccacacgcattgggcgcgccgggactgtgagacgacaggctgtggatgtgtcccccctgcgccgtgtgaaccaggccatctggctgctgtgcacaggcgctcgtgaggctgccttccggaacattaagaccattgctgagtgcctggcagatgagctcatcaatgctgccaagggctcctcgaactcctatgccattaagaagaaggacgagctggagcgtgtggccaagtccaaccgctgattttcccagctgctgcccaataaacctgtctgccctttggggcagtcccagccaaaaaaaaaaaaaaaaaaaaaaaacaaaacaaacaaacaaaaaaacaaaaaaaaaggggggggggggcaaaaaaaacccncagggggagaatacacaccccttgttataaagggcccccatgggggaa

SEQ ID NO: 334146 - DNA, 836 bp, Homo sapiens
  misc_feature (54)..(54): n is a, c, g, or t
  misc_feature (86)..(86): n is a, c, g, or t
  misc_feature (788)..(788): n is a, c, g, or t
gcaccgatgatgtgcagatcaatggtgctccacttcccaaagagcttgatgtcnggggtctctgccaccgctggtgctgctgtctnccatcaagctctttgggaagtggagcaccgatgatgtgcagatcaatgacatttccctgcaggattacattgcagtgaaggagaagtatgccaagtacctgcctcacagtgcagggcggtatgccgccaaacgcttccgcaaagctcagtgtcccattgtggagcgcctcactaactccatgatgatgcacggccgcaacaacggcaagaagctcatgactgtgcgcatcgtcaagcatgccttcgagatcatacacctgctcacaggcgagaaccctctgcaggtcctggtgaacgccatcatcaacagtggtccccgggaggactccacacgcattgggcgcgccgggactgtgagacgacaggctgtggatgtgtcccccctgcgccgtgtgaaccaggccatctggctgctgtgcacaggcgctcgtgaggctgccttccggaacattaagaccattgctgagtgcctggcagatgagctcatcaatgctgccaagggctcctcgaactcctatgccattaagaagaaggacgagctggagcgtgtggccaagtccaaccgctgattttcccagctgctgcccaataaacctgtctgccctttggggcagtcccagccaaaaaaaaaaaaaaaaaaaaaaaacaaaacaaacaaacaaaaaaacaaaaaaaaaggggggggggggcaaaaaaaacccncagggggagaatacacaccccttgttataaagggcccccatgggggaa

SEQ ID NO: 334147 - DNA, 847 bp, Homo sapiens
gcctactactactaccactaaattcgcggccgcgtcgaccagggcggcgcgtggtctacgccgagtgacagagacgctcaggctgtgttctcaggatgaccgagtgggagacagcagcaccagcggtggcagagaccccagacatcaagctctttgggaagtggagcaccgatgatgtgcagatcaatgacatttccctgcaggattacattgcagtgaaggagaagtatgccaagtacctgcctcacagtgcagggcggtatgccgccaaacgcttccgcaaagctcagtgtcccattgtggagcgcctcactaactccatgatgatgcacggccgcaacaacggcaagaagctcatgactgtgcgcatcgtcaagcatgccttcgagatcatacacctgctcacaggcgagaaccctctgcaggtcctggtgaacgccatcatcaacagtggtccccgggaggactccacacgcattgggcgcgccgggactgtgagacgacaggctgtggatgtgtcccccctgcgccgtgtgaaccaggccatctggctgctgtgcacaggcgctcgtgaggctgccttccggaacattaagaccattgctgagtgcctggcagatgagctcatcaatgctgccaagggctcctcgaactcctatgccattaagaagaaggacgagctggagcgtgtggccagtccaacgtgatttcccagctgtgccaataaactgttgccttggggagtccagcaaaaaaaaaaaatccggggtttgggggggaaaaggctacagggccggcaggttccgacctttttccccggcaacccggccaagggcaaataaacgct

SEQ ID NO: 334148 - DNA, 762 bp, Homo sapiens
gcctactactactaccactaaattcgcggccgcgtcgaccagggcggcgcgtggtctacgccgagtgacagagacgctcaggctgtgttctcaggatgaccgagtgggagacagcagcaccagcggtggcagagaccccagacatcaagctctttgggaagtggagcaccgatgatgtgcagatcaatgacatttccctgcaggattacattgcagtgaaggagaagtatgccaagtacctgcctcacagtgcagggcggtatgccgccaaacgcttccgcaaagctcagtgtcccattgtggagcgcctcactaactccatgatgatgcacggccgcaacaacggcaagaagctcatgactgtgcgcatcgtcaagcatgccttcgagatcatacacctgctcacaggcgagaaccctctgcaggtcctggtgaacgccatcatcaacagtggtccccgggaggactccacacgcattgggcgcgccgggactgtgagacgacaggctgtggatgtgtcccccctgcgccgtgtgaaccaggccatctggctgctgtgcacaggcgctcgtgaggctgccttccggaacattaagaccattgctgagtgcctggcagatgagctcatcaatgctgccaagggctcctcgaactcctatgccattaagaagaaggacgagctggagcgtgtggccaagatcctaaaccgcatgctatttatccctaagactgctgcaccaataaacctgtctgccctttggg

SEQ ID NO: 334149 - DNA, 1096 bp, Homo sapiens
  misc_feature (1048)..(1048): n is a, c, g, or t
agggcaactacggggtagcggacatccgccaggcacgcttctagggccgcttctgcaactgcgcatgcgcttgggctgcacccattccgtctagcccaaaaggttcctctacaaccttcctccggattggtctatagggacacgatggccttttacgcaagcgtcacccgtgctgacccggaagttttcttcccagttaaaagtgttgggccgcggcgcgcggctcttcctgtctgtaccaggcggcgcgtggtctacgccgagtgacagagacgctcaggctgtgttctcaggatgaccgagtgggagacagcagcaccagcggtggcagagaccccagacccagacatcaagctctttgggaagtggagcaccgatgatgtgcagatcaatgacatttccctgcaggattacattgcagtgaaggagaagtatgccaagtacctgcctcacagtgcagggcggtatgccgccaaacgcttccgcaaagctcagtgtcccattgtggagcgcctcactaactccatgatgatgcacggccgcaacaacggcaagaagctcatgactgtgcgcatcgtcaagcatgccttcgagatcatacacctgctcacaggcgagaaccctctgcaggtcctggtgaacgccatcatcaacagtggtccccgggaggactccacacgcattgggcgcgccgggactgtgagacgacaggctgtggatgtgtcccccctgcgccgtgtgaaccaggccatctggctgctgtgcacaggcgctcgtgaggctgccttccggaacattaagaccattgctgagtgcctggcagatgagctcatcaatgctgccaagggctcctcgaactcctatgccattaagaagaaggacgagctggagcgtgtggccaagtccaaccgctgattttcccagctgctgcccaataaacctgtctgccctttggggcagtcccagccaaaaaaaaaaaaaaaaaaaaaaaacaaaacaaacaaacaaaaaaacaaaaaaaaaggggggggggggcaaaaaaaacccncagggggagaatacacaccccttgttataaagggcccccatgggggaa

SEQ ID NO: 334150 - DNA, 845 bp, Homo sapiens
  misc_feature (10)..(10): n is a, c, g, or t
  misc_feature (15)..(15): n is a, c, g, or t
  misc_feature (797)..(797): n is a, c, g, or t
tccgcacaancatanggctaggtacgaggctgggtgttacaggatgaccgagtgggagacagcagcaccagcggtggcagagaccccagacccagacatcaagctctttgggaagtggagcaccgatgatgtgcagatcaatgacatttccctgcaggattacattgcagtgaaggagaagtatgccaagtacctgcctcacagtgcagggcggtatgccgccaaacgcttccgcaaagctcagtgtcccattgtggagcgcctcactaactccatgatgatgcacggccgcaacaacggcaagaagctcatgactgtgcgcatcgtcaagcatgccttcgagatcatacacctgctcacaggcgagaaccctctgcaggtcctggtgaacgccatcatcaacagtggtccccgggaggactccacacgcattgggcgcgccgggactgtgagacgacaggctgtggatgtgtcccccctgcgccgtgtgaaccaggccatctggctgctgtgcacaggcgctcgtgaggctgccttccggaacattaagaccattgctgagtgcctggcagatgagctcatcaatgctgccaagggctcctcgaactcctatgccattaagaagaaggacgagctggagcgtgtggccaagtccaaccgctgattttcccagctgctgcccaataaacctgtctgccctttggggcagtcccagccaaaaaaaaaaaaaaaaaaaaaaaacaaaacaaacaaacaaaaaaacaaaaaaaaaggggggggggggcaaaaaaaacccncagggggagaatacacaccccttgttataaagggcccccatgggggaa

SEQ ID NO: 334151 - DNA, 884 bp, Homo sapiens
  misc_feature (836)..(836): n is a, c, g, or t
tcagctcggtacctgtataactgagggtgtgctcgtgtaatgacggttatgatatcactggctgggttgatcatgagatcacactagtgtgatagtaacatatgtagagggagtatagagcgcgcgatactttagacgccatgctgacagtgcatgcacacgcttgagtgtgggactgcacgtatataacgtccaggattacattgcagtgaaggagaagtatgccaagtacctgcctcacagtgcagggcggtatgccgccaaacgcttccgcaaagctcagtgtcccattgtggagcgcctcactaactccatgatgatgcacggccgcaacaacggcaagaagctcatgactgtgcgcatcgtcaagcatgccttcgagatcatacacctgctcacaggcgagaaccctctgcaggtcctggtgaacgccatcatcaacagtggtccccgggaggactccacacgcattgggcgcgccgggactgtgagacgacaggctgtggatgtgtcccccctgcgccgtgtgaaccaggccatctggctgctgtgcacaggcgctcgtgaggctgccttccggaacattaagaccattgctgagtgcctggcagatgagctcatcaatgctgccaagggctcctcgaactcctatgccattaagaagaaggacgagctggagcgtgtggccaagtccaaccgctgattttcccagctgctgcccaataaacctgtctgccctttggggcagtcccagccaaaaaaaaaaaaaaaaaaaaaaaacaaaacaaacaaacaaaaaaacaaaaaaaaaggggggggggggcaaaaaaaacccncagggggagaatacacaccccttgttataaagggcccccatgggggaa

SEQ ID NO: 334152 - DNA, 618 bp, Homo sapiens
  misc_feature (577)..(577): n is a, c, g, or t
  misc_feature (589)..(589): n is a, c, g, or t
gcctactactactaccactaaattcgcggccgcgtcgaccagggcggcgcgtggtctacgccgagtgacagagacgctcaggctgtgttctcaggatgaccgagtgggagacagcagcaccagcggtggcagagaccccagacatcaagctctttgggaagtggagcaccgatgatgtgcagatcaatgacatttccctgcaggattacattgcagtgaaggagaagtatgccaagtacctgcctcacagtgcagggcggtatgccgccaaacgcttccgcaaagctcagtgtcccattgtggagcgcctcactaactccatgatgatgcacggccgcaacaacggcaagaagctcatgactgtgcgcatcgtcaagcatgccttcgagatcatacacctgctcacaggcgagaaccctctgcaggtcctggtgaacgccatcatcaacagtggtccccgggaggactccacacgcattgggcgcgccgggactgtgagacgacaggctgtggatgtgtcccccctgcgccgtgtgaaccaggccatctggctgctgtgcacaggcgctcgtgagcncttccgcaactngtacagcacgggggatcctcaagatcagc

SEQ ID NO: 334153 - DNA, 794 bp, Homo sapiens
gcctactactactaccactaaattcgcggccgcgtcgaccagggcggcgcgtggtctacgccgagtgacagagacgctcaggctgtgttctcaggatgaccgagtgggagacagcagcaccagcggtggcagagaccccagacatcaagctctttgggaagtggagcaccgatgatgtgcagatcaatgacatttccctgcaggattacattgcagtgaaggagaagtatgccaagtacctgcctcacagtgcagggcggtatgccgccaaacgcttccgcaaagctcagtgtcccattgtggagcgcctcactaactccatgatgatgcacggccgcaacaacggcaagaagctcatgactgtgcgcatcgtcaagcatgccttcgagatcatacacctgctcacaggcgagaaccctctgcaggtcctggtgaacgccatcatcaacagtggtccccgggaggactccacacgcattgggcgcgccgggactgtgagacgacaggctgtggatgtgtcccccctgcgccgtgtgaaccaggtgagcctggggcttatgcacgtggcagggtggacacagccacgggagtgggtggggtcttgcctggggcaggaaggctcctctctgtctgcatgttttacctgcagcatcacttcctctaggaagccttcctggattcccaccctgcataggggctgatccaggctctgggtcctcttcgggaacacatttggcagaggtcttctttctttcctttgggtgtatatttttacactgtgtgtatatgtactt

SEQ ID NO: 334154 - DNA, 592 bp, Homo sapiens
gcctactactactaccactaaattcgcggccgcgtcgaccagggcggcgcgtggtctacgccgagtgacagagacgctcaggctgtgttctcaggatgaccgagtgggagacagcagcaccagcggtggcagagaccccagacatcaagctctttgggaagtggagcaccgatgatgtgcagatcaatgacatttccctgcaggattacattgcagtgaaggagaagtatgccaagtacctgcctcacagtgcagggcggtatgccgccaaacgcttccgcaaagctcagtgtcccattgtggagcgcctcactaactccatgatgatgcacggccgcaacaacggcaagaagctcatgactgtgcgcatcgtcaagcatgccttcgagatcatacacctgctcacaggcgagaaccctctgcaggtcctggtgaacgccatcatcaacagtggtccccgggaggactccacacgcattgggcgcgccgggactgtgagacgacaggctgtggatgtgtcccccctgcgccgtgtgaaccaggccatctggctgctgcacttacgcgcgtaaggaccgggatcctctagatc

SEQ ID NO: 334155 - DNA, 631 bp, Homo sapiens
  misc_feature (10)..(10): n is a, c, g, or t
  misc_feature (15)..(15): n is a, c, g, or t
  misc_feature (583)..(583): n is a, c, g, or t
tccgcacaancatanggctaggtacgaggctgggtgttagtggagcgcctcactaactccatgatgatgcacggccgcaacaacggcaagaagctcatgactgtgcgcatcgtcaagcatgccttcgagatcatacacctgctcacaggcgagaaccctctgcaggtcctggtgaacgccatcatcaacagtggtccccgggaggactccacacgcattgggcgcgccgggactgtgagacgacaggctgtggatgtgtcccccctgcgccgtgtgaaccaggccatctggctgctgtgcacaggcgctcgtgaggctgccttccggaacattaagaccattgctgagtgcctggcagatgagctcatcaatgctgccaagggctcctcgaactcctatgccattaagaagaaggacgagctggagcgtgtggccaagtccaaccgctgattttcccagctgctgcccaataaacctgtctgccctttggggcagtcccagccaaaaaaaaaaaaaaaaaaaaaaaacaaaacaaacaaacaaaaaaacaaaaaaaaaggggggggggggcaaaaaaaacccncagggggagaatacacaccccttgttataaagggcccccatgggggaa

SEQ ID NO: 334156 - DNA, 827 bp, Homo sapiens
  misc_feature (779)..(779): n is a, c, g, or t
gcctactactactaccactaaattcgcggccgcgtcgaccagggcggcgcgtggtctacgccgagtgacagagacgctcaggctgtgttctcaggatgaccgagtgggagacagcagcaccagcggtggcagagaccccagacatcaagctctttgggaagtggagcaccgatgatgtgcagatcaatgacatttccctgcaggattacattgcagtgaaggagaagtatgccaagtacctgcctcacagtgcagggcggtatgccgccaaacgcttccgcaaagctcagtgtcccattgtggagcgcctcactaactccatgatgatgcacggccgcaacaacggcaagaagctcatgactgtgcgcatcgtcaagcatgccttcgagatcatacacctgctcacaggcgagaaccctctgcaggtcctggtgaacgccatcatcaacatgtgtcccccctgcgccgtgtgaaccaggccatctggctgctgtgcacaggcgctcgtgaggctgccttccggaacattaagaccattgctgagtgcctggcagatgagctcatcaatgctgccaagggctcctcgaactcctatgccattaagaagaaggacgagctggagcgtgtggccaagtccaaccgctgattttcccagctgctgcccaataaacctgtctgccctttggggcagtcccagccaaaaaaaaaaaaaaaaaaaaaaaacaaaacaaacaaacaaaaaaacaaaaaaaaaggggggggggggcaaaaaaaacccncagggggagaatacacaccccttgttataaagggcccccatgggggaa

SEQ ID NO: 334157 - DNA, 879 bp, Homo sapiens
gcctactactactaccactaaattcgcggccgcgtcgaccagggcggcgcgtggtctacgccgagtgacagagacgctcaggctgtgttctcaggatgaccgagtgggagacagcagcaccagcggtggcagagaccccagacatcaagctctttgggaagtggagcaccgatgatgtgcagatcaatgacatttccctgcaggattacattgcagtgaaggagaagtatgccaagtacctgcctcacagtgcagggcggtatgccgccaaacgcttccgcaaagctcagtgtcccattgtggagcgcctcactaactccatgatgatgcacggccgcaacaacggcaagaagctcatgactgtgcgcatcgtcaagcatgccttcgagatcatacacctgctcacaggcgagaaccctctgcaggtcctggtgaacgccatcatcaacatgtgtcccccctgcgccgtgtgaaccaggccatctggctgctgtgcacaggcgctcgtgaggctgccttccggaacattaagaccattgctgagtgcctggcagatgagctcatcaatgctgccaagggctcctcgaactcctatgccattaagaagaaggacgagctggagcgtgtggccaagtccaaccgctgattttcccagctgctgcccaataaacctgtctgccctttggggcagaccagaccaaaaaaaaaaacaagaaaaacaaccacagcaacacccaagacacaaccagaagacaaaaaaaagagcaaacacgaagagagggacacaacggagaccaacacgagcacgcgacaaaggagcaaatgcagcgacaaaaaggcgaacacaaaagagacgcaggccggtaacgagcacgaaac

SEQ ID NO: 334158 - DNA, 818 bp, Homo sapiens
gcctactactactaccactaaattcgcggccgcgtcgaccagggcggcgcgtggtctacgccgagtgacagagacgctcaggctgtgttctagtggagcaccgatgatgtgcagatcaatgacatttccctgcaggattacattgcagtgaaggagaagtatgccaagtacctgcctcacagtgcagggcggtatgccgccaaacgcttccgcaaagctcagtgtcccattgtggagcgcctcactaactccatgatgatgcacggccgcaacaacggcaagaagctcatgactgtgcgcatcgtcaagcatgccttcgagatcatacacctgctcacaggcgagaaccctctgcaggtcctggtgaacgccatcatcaacagtggtccccgggaggactccacacgcattgggcgcgccgggactgtgagacgacaggctgtggatgtgtcccccctgcgccgtgtgaaccaggccatctggctgctgtgcacaggcgctcgtgaggctgccttccggaacattaagaccattgctgagtgcctggcagatgagctcatcaatgctgccaagggctcctcgaactcctatgccattaagaagaaggacgagctggagcgtgtggccaagtccaaccgctgattttcccagctgctgcccaataaaccttgggcagcccagaaaaaaaaaaaaaaaaaaaaaaaaccggggcactttgggggggggggaaaggggtaacgacgggactggctcagtgtcggacacttttggtcaagggggaaccggggcccccaaggggggagtacgaaaacggtacc

SEQ ID NO: 334159 - DNA, 880 bp, Homo sapiens
  misc_feature (832)..(832): n is a, c, g, or t
agggcaactacggggtagcggacatccgccaggcacgcttctagggccgcttctgcaactgcgcatgcgcttgggctgcacccattccgtctagcccaaaaggttcctctacaaccttcctccggattggtctatagggacacgatggccttttacgcaagcgtcacccgtgctgacccggaagttttcttcccagttaaaagtgttgggccgcggcgcgcggctcttcctgtctgtaccaggcggcgcgtggtctacgccgagtgacagagacgctcaggctgtgttctcaggatgaccgagtgggagacagcagcaccagcggtggcagagaccccagacatcaagctctttgggaagtggagcaccgatgatgtgcagatcaatgacatttccctgcagaaccctctgcaggtcctggtgaacgccatcatcaacagtggtccccgggaggactccacacgcattgggcgcgccgggactgtgagacgacaggctgtggatgtgtcccccctgcgccgtgtgaaccaggccatctggctgctgtgcacaggcgctcgtgaggctgccttccggaacattaagaccattgctgagtgcctggcagatgagctcatcaatgctgccaagggctcctcgaactcctatgccattaagaagaaggacgagctggagcgtgtggccaagtccaaccgctgattttcccagctgctgcccaataaacctgtctgccctttggggcagtcccagccaaaaaaaaaaaaaaaaaaaaaaaacaaaacaaacaaacaaaaaaacaaaaaaaaaggggggggggggcaaaaaaaacccncagggggagaatacacaccccttgttataaagggcccccatgggggaa

SEQ ID NO: 334160 - DNA, 1185 bp, Homo sapiens
agggcaactacggggtagcggacatccgccaggcacgcttctagggccgcttctgcaactgcgcatgcgcttgggctgcacccattccgtctagcccaaaaggttcctctacaaccttcctccggattggtctatagggacacgatggccttttacgcaagcgtcacccgtgctgacccggaagttttcttcccagttaaaagtgttgggccgcggcgcgcggctcttcctgtctgtaccaggcggcgcgtggtctacgccgagtgacagagacgctcaggctgtgttctcaggatgaccgagtgggagacagcagcaccagcggtggcagagaccccagacccagacatcaagctctttgggaagtggagcaccgatgatgtgcagatcaatgacatttccctgcaggattacattgcagtgaaggagaagtatgccaagtacctgcctcagtggagcgcctcactaactccatgatgatgcacggccgcaacaacggcaagaagctcatgactgtgcgcatcgtcaagcatgccttcgagatcatacacctgctcacaggcgagaaccctctgcaggtcctggtgaacgccatcatcaacagtggtccccgggaggactccacacgcattgggcgcgccgggactgtgagacgacaggctgtggatgtgtcccccctgcgccgtgtgaaccaggccatctggctgctgtgcacaggcgctcgtgaggctgccttccggaacattaagaccattgctgagtgcctggcagatgagctcatcaatgctgccaagggctcctcgaactcctatgccattaagaagaaggacgagctggagcgtgtggccaagtccaaccgctgattttcccagctgctgcccaataaaccggggcagcccagcaaaaaaaaaaaaaaaaaaaaaaaacaaaaaaaaaaaaaaaaacaaaacaaaaacccccgggcccctttttgggggggggggaaaaggggttaaaaaaggggcacaggggccaacgggtacccgaacccaaaaaaggaaacaggggggaaaaaacgggggcccccaaaaggggaggaggtcttaaaatccgcaaaaccgccgggtaaccggcgtatatggcagcctcccacacaaaccacacccacaaacaccaagcaaacacaacagcgcacactaagacaac

SEQ ID NO: 334161 - DNA, 981 bp, Homo sapiens
  misc_feature (941)..(941): n is a, c, g, or t
  misc_feature (967)..(967): n is a, c, g, or t
agggcaactacggggtagcggacatccgccaggcacgcttctagggccgcttctgcaactgcgcatgcgcttgggctgcacccattccgtctagcccaaaaggttcctctacaaccttcctccggattggtctatagggacacgatggccttttacgcaagcgtcacccgtgctgacccggaagttttcttcccagttaaaagtgttgggccgcggcgcgcggctcttcctgtctgtaccaggcggcgcgtggtctacgccgagtgacagagacgctcaggctgtgttctcaggatgaccgagtgggagacagcagcaccagcggtggcagagaccccagacccagacatcaagctctttgggaagtggagcaccgatgatgtgcagatcaatgacatttccctgcaggattacattgcagtgaaggagaagtatgccaagtacctgcctcacagtgcagggcggtatgccgccaaacgcttccgcaaagctcagtgtcccattgtggagcgcctcactaactccatgatgatgcacggccgcaacaacggcaagaagctcatgactgtgcgcatcgtcaagcatgccttcgagatcatacacctgctcacaggcgagaaccctctgcaggtcctggtgaacgccatcatcaacagtggtccccgggaggactccacacgcattgggcgcgccgggactgtgagacgacaggctgtggatgtgtcccccctgcgccgtgtgaaccaggccatctggctgctgtgcacaggcgctcgtgaggctgccttccggaacattaagaccattgctgagtgcctggcagatgagctcatcaatgctgccaagggctcctcgaactcctatgccattaagaagaaggacgagctggagcgtgtggccaagtccaaccgctgcatgttgttcccaggggcaaaattagncccgcccattagaactctggtcctgncctctcttggcagg

SEQ ID NO: 334162 - DNA, 751 bp, Homo sapiens
  misc_feature (703)..(703): n is a, c, g, or t
agggcaactacggggtagcggacatccgccaggcacgcttctagggccgcttctgcaactgcgcatgcgcttgggctgcacccattccgtctagcccaaaaggttcctctacaaccttcctccggattggtctatagggacacgatggccttttacgcaagcgtcacccgtgctgacccggaagttttcttcccagttaaaagtgttgggccgcggcgcgcggctcttcctgtctgtaccaggcggcgcgtggtctacgccgagtgacagagacgctcaggctgtgttctcaggatgaccgagtgggagacagcagcaccagcggtggcagagaccccagacatcaagctctttgggaagtggagcaccgatgatgtgcagatcaatgacatttccctgcaggccatctggctgctgtgcacaggcgctcgtgaggctgccttccggaacattaagaccattgctgagtgcctggcagatgagctcatcaatgctgccaagggctcctcgaactcctatgccattaagaagaaggacgagctggagcgtgtggccaagtccaaccgctgattttcccagctgctgcccaataaacctgtctgccctttggggcagtcccagccaaaaaaaaaaaaaaaaaaaaaaaacaaaacaaacaaacaaaaaaacaaaaaaaaaggggggggggggcaaaaaaaacccncagggggagaatacacaccccttgttataaagggcccccatgggggaa

SEQ ID NO: 334163 - DNA, 567 bp, Homo sapiens
  misc_feature (460)..(460): n is a, c, g, or t
agggcaactacggggtagcggacatccgccaggcacgcttctagggccgcttctgcaactgcgcatgcgcttgggctgcacccattccgtctagcccaaaaggttcctctacaaccttcctccggattggtctatagggacacgatggccttttacgcaagcgtcacccgtgctgacccggaagttttcttcccagttaaaagtgttgggccgcggcgcgcggctcttcctgtctgtaccaggcggcgcgtggtctacgccgagtgacagagacgctcaggctgtgttctcaggatgaccgagtgggagacagcagcaccagcggtggcagagaccccagacccagacatcaagctctttgggaagtggagcaccgatgatgtgcagatcaatgacatttccctgcaggattacattgcagtgaaggagaagtatgccaagtacctgcctcacgccaaangcttccgcaaagctcagtggggctttgtgccgcgcctaaagaaacgcccaatgatgcgcgttcgctgcccctaaaattagctcaagactcagcgatgagtatagctt

SEQ ID NO: 334164 - DNA, 1191 bp, Homo sapiens
aaaaccttacggctaggtacgaggcctgggtgtgagacgctcaggctgtgttctcaggatgaccgagtgggagacagcagcaccagcggtggcagagaccccagacatcaagctctttgggaagtggagcaccgatgatgtgcagatcaatgacatttccctgcaggattacattgcagtgaaggagaagtatgccaagtacctgcctcacagtgcagggcggtatgccgccaaacgcttccgcaaagctcagtgtcccattgtggagcgcctcactaactccatgatgatgcacggccgcaacaacggcaagaagctcatgactgtgcgcatcgtcaagcatgccttcgagatcatacacctgctcacaggcgagaaccctctgcaggtcctggtgaacgccatcatcaacagtggtccccgggaggactccacacgcattgggcgcgccgggactgtgagacgacaggctgtggatgtgtcccccctgcgccgtgtgaaccaggccatctggctgctgtgcacaggcgctcgtgaggctgccttccggaacattaagaccattgctgagtgcctggcagatgagctcatcaatgctgccaagggctcctcgaactcctatgccattaagaagaaggacgagctggagcgtgtggccaagtccaaccgctgattttcccagctgctgcccaataaacctgtctgccctttggggcagtcccagcaaaaaaacaaaaaaaaaacccttcacaatctgggcaagccaaaggccatttatccggggaaccattatcaggaaaaaaattctacctcttttatacttaatcttccctacatatttccccttttaatactaattagttcttatagaaagaacaaaccaacacaaacagccacaaaaaaaatcgacacaacaacacaacacaagaagtcaacccgaaaaacaaaacgcgaccagccaaaacagagaggaggggggcggcggcagataaaaaaagcaccaacgcggcgggggacacccaagagagcatacaccacaccagattgatgtaagcagaggaaggggccccacaaagggagcgggcacttaaataaaccaccacacgacggcgggagataaaaaaagaggcggcgtgagacacacacaacgtcacggagacatctgtaaaaagaacactctggcggggggaa

SEQ ID NO: 334165 - DNA, 404 bp, Homo sapiens
gcctactactactaccactaaattcgcggccgcgtcgaccagaggattacattgcagtgaaggagaagtatgccaagtacctgcctcacagtgcagggcggtatgccgccaaacgcttccgcaaagctcagtgtcccattgtggagcgcctcactaactccatgatgatgcacggccgcaacaacggcaagaagctcatgactgtgcgcatcgtcaagcatgccttcgagatcatacacctgctcacaggcgagaaccctctgcaggtcctggtgaacgccatcatcaacagtggtcccaggggggacacatccacagcctgtcgtctcacagtcccggcgcgcccaatgcgtgtggagtcctcccgggggtcgacgcggccgcgaatttagtagtagtagtat

SEQ ID NO: 334166 - DNA, 1262 bp, Homo sapiens
  misc_feature (1078)..(1079): n is a, c, g, or t
  misc_feature (1103)..(1103): n is a, c, g, or t
  misc_feature (1115)..(1115): n is a, c, g, or t
  misc_feature (1238)..(1238): n is a, c, g, or t
gcctactactactaccactaaattcgcggccgcgtcgaccagggcggcgcgtggtctacgccgagtgacagagacgctcaggctgtgttctcaggatgaccgagtgggagacagcagcaccagcggtggcagagaccccagacatcaagctctttgggaagtggagcaccgatgatgtgcagatcaatgacatttccctgcaggattacattgcagtgaaggagaagtatgccaagtacctgcctcacagtgcagggcggtatgccgccaaacgcttccgcaaagctcagtgtcccattgtggagcgcctcactaactccatgatgatgcacggccgcaacaacggcaagaagctcatgactgtgcgcatcgtcaagcatgccttcgagatcatacacctgctcacaggcgagaaccctctgcaggtcctggtgaacgccatcatcaacagtggtccccgggaggactccacacgcattgggcgcgccgggactgtgagacgacaggctgtggatgtgtcccccctgcgccgtgtgaaccaggccatctggctgctgtgcacaggcgctcgtgaggctgccttccggaacattaagaccattgctgagtgcctggcagatgagctcatcaatgctgccaagggctcctcgaactcctatgccattaagaagaaggacgagctggagcgtgtggccaagtccaaccgctgattttcccagctgctgcccaataaacctgtctgccctttggggcagtcccagcaaaaaaaaaaaaaaaaaaaaaagagaccgctaccggtgaaccagcgcgggtttttcggacttgggggtcgtgcagatctgctggatctaggtccagggagtctcagtgatggtctgagcctggccgcgccaggctggggtgtcccagaagagccaggaatcgaaatgcttcatggaacaaccaccctggccttcaagttccgccatggagtcatagttgcagctgactccagggctacagcgggtgcttacattgcctcccagacggtgaagaaggtgatagagatcaacccatacctgctaggcaccatggctgnnggcgcagcggattgcagctctggngaacgctgtttngctcgcattgtcgaatctatgagcttcgaaataggaacgcatctctgtagcagctgccttcaaactgcttgcaacattgtgtatcagtacaaggcatgggcttgccatggcaccatgatctgngctgggataagaaaggcctgcctc

SEQ ID NO: 334167 - DNA, 913 bp, Homo sapiens
  misc_feature (865)..(865): n is a, c, g, or t
taggctacctccgcgctccacccagagacgggtcgcgctgctcccgccgccgcaaccccgggccctcgtgccggcggtctcccctcttccacgggcgagattactgcatagcacaggatgaccgagtgggagacagcagcaccagcggtggcagagaccccagacatcaagctctttgggaagtggagcaccgatgatgtgcagatcaatgacatttccctgcaggattacattgcagtgaaggagaagtatgccaagtacctgcctcacagtgcagggcggtatgccgccaaacgcttccgcaaagctcagtgtcccattgtggagcgcctcactaactccatgatgatgcacggccgcaacaacggcaagaagctcatgactgtgcgcatcgtcaagcatgccttcgagatcatacacctgctcacaggcgagaaccctctgcaggtcctggtgaacgccatcatcaacagtggtccccgggaggactccacacgcattgggcgcgccgggactgtgagacgacaggctgtggatgtgtcccccctgcgccgtgtgaaccaggccatctggctgctgtgcacaggcgctcgtgaggctgccttccggaacattaagaccattgctgagtgcctggcagatgagctcatcaatgctgccaagggctcctcgaactcctatgccattaagaagaaggacgagctggagcgtgtggccaagtccaaccgctgattttcccagctgctgcccaataaacctgtctgccctttggggcagtcccagccaaaaaaaaaaaaaaaaaaaaaaaacaaaacaaacaaacaaaaaaacaaaaaaaaaggggggggggggcaaaaaaaacccncagggggagaatacacaccccttgttataaagggcccccatgggggaa

SEQ ID NO: 334168 - DNA, 777 bp, Homo sapiens
  misc_feature (54)..(54): n is a, c, g, or t
  misc_feature (86)..(86): n is a, c, g, or t
  misc_feature (729)..(729): n is a, c, g, or t
gcaccgatgatgtgcagatcaatggtgctccacttcccaaagagcttgatgtcnggggtctctgccaccgctggtgctgctgtctncaggattacattgcagtgaaggagaagtatgccaagtacctgcctcacagtgcagggcggtatgccgccaaacgcttccgcaaagctcagtgtcccattgtggagcgcctcactaactccatgatgatgcacggccgcaacaacggcaagaagctcatgactgtgcgcatcgtcaagcatgccttcgagatcatacacctgctcacaggcgagaaccctctgcaggtcctggtgaacgccatcatcaacagtggtccccgggaggactccacacgcattgggcgcgccgggactgtgagacgacaggctgtggatgtgtcccccctgcgccgtgtgaaccaggccatctggctgctgtgcacaggcgctcgtgaggctgccttccggaacattaagaccattgctgagtgcctggcagatgagctcatcaatgctgccaagggctcctcgaactcctatgccattaagaagaaggacgagctggagcgtgtggccaagtccaaccgctgattttcccagctgctgcccaataaacctgtctgccctttggggcagtcccagccaaaaaaaaaaaaaaaaaaaaaaaacaaaacaaacaaacaaaaaaacaaaaaaaaaggggggggggggcaaaaaaaacccncagggggagaatacacaccccttgttataaagggcccccatgggggaa

SEQ ID NO: 334169 - DNA, 600 bp, Homo sapiens
  misc_feature (584)..(584): n is a, c, g, or t
gcctactactactaccactaaattcgcggccgcgtcgaccagggcggcgcgtggtctacgccgagtgacagagacgctcaggctgtgttctcaggatgaccgagtgggagacagcagcaccagcggtggcagagaccccagacatcaagctctttgggaagtggagcaccgatgatgtgcagatcaatgacatttccctgcaggattacattgcagtgaaggagaagtatgccaagtacctgcctcacagtgcagggcggtatgccgccaaacgcttccgcaaagctcagtgtcccattgtggagcgcctcactaactccatgatgatgcacggccgcaacaacggcaagaagctcatgactgtgcgcatcgtcaagcatgccttcgagatcatacacctgctcacaggcgagaaccctctgcaggtcctggtgaacgccatcatcaacagtggtccccgggaggactccacacgcattgggcgcgccgggactgtgagacgacaggctgtggatgtgtcccccctgcgccgtgtgaaccaggccatctgctcctggcacagcgctcgtgagatgcacaaaccngaagggtcctctagat

SEQ ID NO: 334170 - DNA, 601 bp, Homo sapiens
  misc_feature (553)..(553): n is a, c, g, or t
agagagagagagagagagagagagagagagagagagagagagagagagagagacggcaagaagctcatgactgtgcgcatcgtcaagcatgccttcgagatcatacacctgctcacaggcgagaaccctctgcaggtcctggtgaacgccatcatcaacagtggtccccgggaggactccacacgcattgggcgcgccgggactgtgagacgacaggctgtggatgtgtcccccctgcgccgtgtgaaccaggccatctggctgctgtgcacaggcgctcgtgaggctgccttccggaacattaagaccattgctgagtgcctggcagatgagctcatcaatgctgccaagggctcctcgaactcctatgccattaagaagaaggacgagctggagcgtgtggccaagtccaaccgctgattttcccagctgctgcccaataaacctgtctgccctttggggcagtcccagccaaaaaaaaaaaaaaaaaaaaaaaacaaaacaaacaaacaaaaaaacaaaaaaaaaggggggggggggcaaaaaaaacccncagggggagaatacacaccccttgttataaagggcccccatgggggaa

SEQ ID NO: 334171 - DNA, 932 bp, Homo sapiens
agggcaactacggggtagcggacatccgccaggcacgcttctagggccgcttctgcaactgcgcatgcgcttgggctgcacccattccgtctagcccaaaaggttcctctacaaccttcctccggattggtctatagggacacgatggccttttacgcaagcgtcacccgtgctgacccggaagttttcttcccagttaaaagtgttgggccgcggcgcgcggctcttcctgtctgtaccaggcggcgcgtggtctacgccgagtgacagagacgctcaggctgtgttctcaggatgaccgagtgggagacagcagcaccagcggtggcagagaccccagacatcaagctctttgggaagtggagcaccgatgatgtgcagatcaatgacatttccctgcaggattacattgcagtgaaggagaagtatgccaagtacctgcagggaaatgtcattgatcagcagcaccagcggtgcccagacatcaagctctttgggaagtggagcaccgatgatgtgcagatcaatgacatttccctgcaggattacattgcagtgaaggagaagtatgccaagtacctgcctcacagtgcagggcggtatgccgccaaacgcttccgcaaagctcagtgtcccattgtggagcgcctcactaactccatgatgatgcacggccgcaacaacggcaagaagctcatgactgtgcgcatcgtcaagcatgccttcgagatcatacacctgctcacaggcgagaaccctctgcaggtcctggtgaacgccatcatcaacagtggtccccgggaggactccacacgcattgggcgcgccgggactgtgagacgacaggctgtggatgtgtcccccctgcgccgtgtgaaccaggccatctggctgctgcacttacgcgcgtaaggaccgggatcctctagatc

SEQ ID NO: 334172 - DNA, 912 bp, Homo sapiens
agggcaactacggggtagcggacatccgccaggcacgcttctagggccgcttctgcaactgcgcatgcgcttgggctgcacccattccgtctagcccaaaaggttcctctacaaccttcctccggattggtctatagggacacgatggccttttacgcaagcgtcacccgtgctgacccggaagttttcttcccagttaaaagtgttgggccgcggcgcgcggctcttcctgtctgtaccaggcggcgcgtggtctacgccgagtgacagagacgctcaggctgtgttctcaggatgaccgagtgggagacagcagcaccagcggtggcagagaccccagacatcaagctctttgggaagtggagcaccgatgatgtgcagatcaatgacatttccctgcaggtgaggggaacttggtgattggccttcctggctgggggcggacattattccaggaaggcacacatcaaacttgttgctgtgccattaagtcaagaatagagatcataacaggtaaagaagggatcccttgaccaccacatctaccacatctgctcttacgtcctgttcaaagatgactacaacttctgtcatgagaggactccttcaccagaaggagcatcacatctcacatatggtatttttgttactgtttttggcgcacacaccataccatccagcgtcactccttctccacgtcactaccctccttttccagtacccatttcctcaccgagggcctctttctccttacatagacacggcctccggcccacttgccatcccccctcccggtctcgcgctcctctcgcatcttctctcccccttgtcttcctgccctcatcctcctcgccgcctctcgtcccttcctcctcccctgcccctactctccccgcgccctgtcctcctccg

SEQ ID NO: 334173 - DNA, 930 bp, Homo sapiens
  misc_feature (22)..(22): n is a, c, g, or t
  misc_feature (29)..(29): n is a, c, g, or t
  misc_feature (35)..(35): n is a, c, g, or t
  misc_feature (830)..(830): n is a, c, g, or t
  misc_feature (840)..(840): n is a, c, g, or t
  misc_feature (843)..(843): n is a, c, g, or t
taaactacggctaggaggaggncggtgtnatcggncgaggccaggcggcgcgtggtctacgccgagtgacagagacgctcaggctgtgttctcaggatgaccgagtgggagacagcagcaccagcggtggcagagaccccagacatcaagctctttgggaagtggagcaccgatgatgtgcagatcaatgacatttccctgcaggattacattgcagtgaaggagaagtatgccaagtacctgcctcacagtgcagggcggtatgccgccaaacgcttccgcaaagctcagtgtcccattgtggagcgcctcactaactccatgatgatgcacggccgcaacaacggcaagaagctcatgactgtgcgcatcgtcaagcatgccttcgagatcatacacctgctcacaggcgagaaccctctgcaggtcctggtgaacgccatcatcaacagtggtccccgggaggactccacacgcattgggcgcgccgggactgtgagacgacaggctgtggatgtgtcccccctgcgccgtgtgaaccaggccatctggctgctgtgcacaggcgctcgtgaggctgccttccggaacattaagaccattgctgagtgcctggcagatgagctcatcaatgctgccaagggctcctcgaactcctatgccattaagaagaaggacgagctggagcgtgtggccaagtccaaccgctgattttcccagctgctgcccaataaacctgtctgccctttggggcagtcccagcaaaaaaaaacacaacaaaaaaccacaccaacaaacaccaaacaacaaaaaaaagggggggggcgaanataccggggnccnaacgcccccttttggaggggccagagggcaaaacagcagcggggaaaggggggacgcgtggttggggacctcggggcgggcacccag

SEQ ID NO: 334174 - DNA, 929 bp, Homo sapiens
  misc_feature (829)..(829): n is a, c, g, or t
  misc_feature (839)..(839): n is a, c, g, or t
  misc_feature (842)..(842): n is a, c, g, or t
gcctactactactaccactaaattcgcggccgcgtcgaccagggcggcgcgtggtctacgccgagtgacagagacgctcaggctgtgttctcaggatgaccgagtgggagacagcagcaccagcggtggcagagaccccagacatcaagctctttgggaagtggagcaccgatgatgtgcagatcaatgacatttccctgcaggattacattgcagtgaaggagaagtatgccaagtacctgcctcacagtgcagggcggtatgccgccaaacgcttccgcaaagctcagtgtcccattgtggagcgcctcactaactccatgatgatgcacggccgcaacaacggcaagaagctcatgactgtgcgcatcgtcaagcatgccttcgagatcatacacctgctcacaggcgagaaccctctgcaggtcctggtgaacgccatcatcaacagtggtccccgggaggactccacacgcattgggcgcgccgggactgtgagacgacaggctgtggatgtgtcccccctgcgccgtgtgaaccaggccatctggctgctgtgcacaggcgctcgtgaggctgccttccggaacattaagaccattgctgagtgcctggcagatgagctcatcaatgctgccaagggctcctcgaactcctatgccattaagaagaaggacgagctggagcgtgtggccaagtccaaccgctgattttcccagctgctgcccaataaacctgtctgccctttggggcagtcccagcaaaaaaaaacacaacaaaaaaccacaccaacaaacaccaaacaacaaaaaaaagggggggggcgaanataccggggnccnaacgcccccttttggaggggccagagggcaaaacagcagcggggaaaggggggacgcgtggttggggacctcggggcgggcacccag

SEQ ID NO: 334175 - DNA, 869 bp, Homo sapiens
tgtggatggtctggtcgggaaaataaaccgttcgttgcggcacggcgggggctttggtgtgtctaaatacaactgtaaatacagctatgatgtacctaaatgaagaagaagaagaagaggaagaagcagaaaaagaagcagaagcagcagcagcagcagcagcggcagaagaagaagaagaagaagaggaaagaggaagaaattttaccaaaaatttgaaatattttaaaatattttccctcctttgttttgtcacaggcaagtcctggaaatgtgaacctctcatattttatcacacacttttgattattgtactagccagtcaagaacattagaaaaggcattaagaaattgatagaatattatgttcctgaataagatgacataatataaaaatgttaatttcctataaaactccatacaaatttaaatttattcaatttaaaactttgatgggaaaattgaaacttggcaaaagtattctgacatcattttagagaataaatgaggagagctgaggagtttttaaaagaaaaataattagaggaagttgatctgcaagacaatgaaatgttttataggttaaaataaattaaagcagtgttttactggcccaaatatattaaagcagactggtagaataaagtaaaaaacaagaaatcagacttactatttcttcagtacatagctcttgcactcctaggaaaatgctaagctacaaataaaacttaactgagtatttacaggatactcaaatacactaggaacaagatgagatcccttctccctaatactattagtaaatgcttttataaaatatatttcgttcttcagtatcttgagcatgttttattttttaataaaatgat

SEQ ID NO: 334176 - DNA, 802 bp, Homo sapiens
tactaatcttattattaataggtgtgtctaaatacaactgtaaatacagctatgatgtacctaaatgaagaagaagaagaagaggaagaagcagaaaaagaagcagaagcagcagcagcagcagcagcggcagaagaagaagaagaagaagaggaaagaggaagaaattttaccaaaaatttgaaatattttaaaatattttccctcctttgttttgtcacaggcaagtcctggaaatgtgaacctctcatattttatcacacacttttgattattgtactagccagtcaagaacattagaaaaggcattaagaaattgatagaatattatgttcctgaataagatgacataatataaaaatgttaatttcctataaaactccatacaaatttaaatttattcaatttaaaactttgatgggaaaattgaaacttggcaaaagtattctgacatcattttagagaataaatgaggagagctgaggagtttttaaaagaaaaataattagaggaagttgatctgcaagacaatgaaatgttttataggttaaaataaattaaagcagtgttttactggcccaaatatattaaagcagactggtagaataaagtaaaaaacaagaaatcagacttactatttcttcagtacatagctcttgcactcctaggaaaatgctaagctacaaataaaacttaactgagtatttacaggatactcaaatacactaggaacaagatgagatcccttctccctaatactattagtaaatgcttttataaaatatatttcgttcttcagtat

SEQ ID NO: 334177 - DNA, 334 bp, Homo sapiens
gcccttctgagctctttctacccagctccctctgccgggtgactggaagtcctgggtggcctggagggctcctgggggagctgtggtttgctgctgagcctgttgtctgctcatctcctcaggtgtgtggttgtgttgttcaatccccggaaacacaaacagcaccacatcctcaacagttccaggaaaaccatcactgcccttgccttctcccctgatggcaagtacttggtcactggagaggtgagtgaggaagagggctggcagtactgtaaagagggcaggtgtcctggcctccgcagagagctgcggtcctaggcctgctgtcactttg

SEQ ID NO: 334178 - DNA, 6896 bp, Homo sapiens
cgcgtcggctccgcccacccagcccgcggcttggcccaggcggtagttcgcgttttgagccgatcgtgccaccatagctcctgctgctgcctctaccgctgcggctaccgcggcggagctgaaattgccgaacgcgatgcccgagggcgctgtgagcggggtggccttagctcgccgaggctggtcagtgagagggcatactgggaagccctctggagtgggaagacagtgccgctgttgagacaagacccaggactgggccggggactgtcccaaagggtttctcgtcataatggctgtggaagggtcaaccattaccagccggatcaagaatctgttgagatctccatccatcaaactgcgcaggagtaaggcaggaaaccgacgagaggacctcagctccaaggtgaccttggagaaggtgctgggaattacagtgtctggaggcagaggacttgcctgtgacccccgatcaggtttagttgcttacccagcagggtgtgtggttgtgttgttcaatccccggaaacacaaacagcaccacatcctcaacagttccaggaaaaccatcactgcccttgccttctcccctgatggcaagtacttggtcactggagagagtgggcacatgcctgccgtgcgggtatgggacgtggcagagcacagccaggtggcgagctgcaggagcacaagtatggtgtggcttgtgtggccttctctcctagcgccaagtacattgtctctgtgggctaccagcatgacatgatcgtcaacgtgtgggcctggaagaaaaacattgtggtggcctccaacaaggtgtccagtcgggtgacagcagtgtccttctctgaggattgcagctactttgtcactgcaggcaaccgacacatcaaattctggtatctcgatgacagcaagacctcaaaggtgaatgccactgtgcccttgctgggccgctcagggctgctgggagagctacggaacaacctattcactgatgtggcctgtggcagaggaaaaaaggcggacagtaccttctgcatcacgtcctcagggctgctgtgcgagttcagtgatcgaaggcttttggacaagtgggtggagctgagggtctaccccgaggtgaaggatagtaaccaggcctgcctgccccccagttcctttattacctgctcctcagacaacaccatccgcctgtggaacacagagagctccggggtgcatggctccaccctccaccgaaacatcctcagcagtgacctcattaaaatcatctatgtggatgggaacacccaggccctgctggacacagagctgcctggaggagacaaagctgatgcatccctgttggatccccgcgtgggcatccgctcggtgtgtgtcagccccaatggacagcatctagcatcaggggaccgtatgggcacacttagggtgcacgaacttcagtccctgagtgagatgctgaaggtggaggcccatgactctgagattctgtgcctggagtattctaagccagacacaggtctgaaactgctagcatcggcgagccgggaccggctgatccatgtgctggatgccgggcgggagtacagcctacagcagacgctggacgaacactcatcctccatcactgctgtcaagtttgcagccagtgatgggcaagtccgcatgatcagctgtggagcagacaagagcatctacttccgcactgcgcagaagtctggagatggagtgcagttcacacggacacaccacgtggtgcggaagacgaccctctatgacatggatgtggagcccagctggaagtacacggctatcggctgccaggaccgaaatattcggatatttaacatcagcagtggaaagcagaagaagctgtttaaagggtcacagggtgaggacggcacactcattaaggtgcagacagacccctcagggatctacattgccaccagctgttctgacaagaatctctccatttttgacttctcctcaggcgagtgcgtggccaccatgtttggccactcagagattgtcactggcatgaaatttagtaatgattgtaaacatctcatctctgtgtctggggacagctgcatatttgtgtggcgcctgagctctgagatgaccatcagcatgaggcagcgtctggccgagttgcgccagcgtcagcggggcggcaagcagcaaggaccatcctctccccaaagggcttctggacccaaccggcaccaggccccatcaatgctgtctcctggaccggctctctcatcagacagtgacaaggagggagaagatgaggggactgaagaagaacttccagcactgcccgtccttgccaagagtaccaagaaggcactggcctcggtccccagcccagctttgccccgaagcctgtcccactgggagatgagtcgggcacaggagtccgtggggttcctggacccagctcctgcagccaacccaggacccagaagaagagggcgctgggttcagccaggtgtggaactgagcgttagatccatgctggatctgcggcagctggaaacactggccccaagcctgcaggaccctagccaggactcgctggccatcatcccatctggtcccaggaagcatgggcaggaggcccttgagacttcactcactagccagaatgaaaagccccctcggcctcaggcttcccaaccttgttcctatccccatattatccgattattgtcacaagaggaaggggtctttgcccaagatctggaacctgcacccattgaagatggtattgtctacccggagccgagtgacaaccccaccatggataccagtgagttccaagtgcaggctccagcccggggaactctgggaagagtgtacccaggcagcaggagctcagaaaagcacagccctgacagtgcctgctctgtggattacagcagcagctgcctttccagcccggagcaccccactgaagactctgagagcacggagcccctcagtgtggatggcatctcctcagaccttgaagagccagctgagggtgatgaagaagaggaagaagaggagggaggcatgggcccctatgggctacaggagggcagcccccagactccagaccaggagcagtttctaaaacagcactttgagactctggccagtggagctgctccaggggccccagtgcaggtcccagagaggtcagagtctcggagtatctcttcacgattcctgttgcaagtacagacccgcccactcagggaaccatccccatcctcctcaagcctggcactgatgtcgagaccagcccaggtgccacaggcatctggtgagcagccgagaggcaatggtgccaatccccctggagcacccccggaggtggaaccgtcctctggcaaccccagcccccagcaggcagcctctgtgctgttgccacgatgccgtctcaaccctgacagcagctgggctcccaagagagtggccacagccagccccttttctggactccagaaggcccagtctgtgcacagtctggtgccacaggaaagacatgaggccagtctgcaggccccttcaccaggcgcactgctgtctcgggagatcgaagctcaggatggtctgggctccctgcccccagctgatggccgtccgtctcggcctcactcctatcagaaccccaccaccagttccatggccaagatatcccgcagtatctctgttggggagaacctgggcctggtggctgaacctcaagctcatgcccccatccgagtctcaccactcagcaagctggccctgcccagccgggctcacctggtcctggacatccccaaaccactgcctgaccgtcctaccctggctgcattctctcctgtcaccaaaggccgggcccctggcgaggcagaaaagcctggcttcccggtgggcctaggaaaagctcacagtacaactgagagatgggcctgtttgggggagggcaccactcccaagcctaggacagagtgccaggctcatcctgggcccagcagcccctgtgcccagcaactgccagtcagcagcctcttccaaggccctgaaaacttgcagcccccaccccctgagaagactcccaaccccatggaatgcaccaagccaggggcagccctgagccaggactcagagccagcggtgagcctggagcagtgtgagcagctggtggcagagctccgcggcagcgtgcgccaggcagtgcggctctaccactcggtggctggctgcaagatgccctcagcagagcaaagtcggattgcccagctcctcagagacaccttctcttcagtgcgacaggagctggaagctgtggctggggcagtgctgtccagcccaggcagcagccctggggctgtgggagccgagcagacacaggccctgctggagcaatactcagaactgttgcttcgagccgtggaacggcgtatggaacgcaaactctgagttctggaagcctgtcccaagtgaatgaatgctccagcgattccaaactgcagcccctctgcccctcaccaaaacctgcggggctgcttggagtggaaagcagggagcagtgttcagaggcaaagcagccttcccagccgctcctcgtggggggcctgtatttattaatttatttccctgactgttgcctcacttccttggaactcctgcctccacagcccctccagtggcagggacaggtcttgggtctttgtcatcttggtgctgtgagaggtaggagggcagcctgccccatctaggaatctgggaagggctggccctctcttagaagccatttgaaattactgcagggattagctccctgtggtggagcatacacagggtactctggggtcgaggtgagaggtgatgtggtattcagtgcccgtcagccaactgtgggccttcacctctacctgcacttcccctctcacaccagctgcactcccgtggctgccagagcagggtggttttccccaatacctggagctcagaaaggcagagccatctggccctccagggtgtccccagccatcaggagacttgagttggtatttggacctgagcccgcacattccactcccattctccctccaagaggggcccagcattgtatttccctgtgaccccttactctcctggccagaacttgagccagctgtgggatgttgctgcaggacagtaagccctcacctgggcaaacatgaagctctggcctcctttcctcagccccttgttcttccctgtcctccaccctggaccccagccggctgctggagcccagaggccaccttctccctgcatcctgaatgatgcttagtcagaagcctgtgttggaacatccctcgtttacggggcgctggcctacctcctgaggacctcagccacagatgagatcacacgcatgcacgtgcacacatgtacacacacacacctacctgcacagcacgctgttgagtgttggttgctagagtatccggctggctgctgtgtgcctggtttcctcacatcctgcctcagcttcaccaccctggcttatgtggaacacctatcagggagcagaaaaggggtgcagtacactaagtgaacccagattctggattcttggtgtccacagcctagctgatacgagatagcccataggacacctggtttaggtagaaggagcctcctcaaaggcagtgctgggcacccacgggtgtgctggatactggagtttgagaggagggaggtgctggggccaaaggagacactagaaaagtggtagatgggacaggtaagtggcagaggtgaggggataagttagaatgtaaaagggcagtaattaggggtgagggaaaggagataggggaccctaggaggtagagtgggaccatgtcgtgaggcagttgaagagttgaggaaaggtttttctgggccctactgctcccctctgctgcaggtaagtcagagcagctttaccacagcttcaggccacgagagccccttcacccgccctgctgcgccataggcagaggcttataaagaaatgggttctgggccaggtgtggtggctcaagcctgtaatcccagcactttgggaggccgaggcgggtggatcacctgaggttaggagttcgagatcagcctggccaacatggtgaaaccctgtctctactaaaaataaaaaaattagctgggcgtggtggtgggcgcctgtaatcccagctactcgggaggtttaggcaggagaatcgcttgaaccctggaggtggaggtggaggttgcagtgagccgagatcgcgccattgcactccaacctaggtgacaaagctacacgccatctcaaaaaaaaaaaagaaaaagggttacaaaaggttcccagctccggggcatcagcctgagtgcgcttgagctgctccaaacctggcccttccccactcctctagcatcgccacccgcatggccctggaactcccgcggcggcgggggcgggcccgtgcctgctgtgccccgacttcccacaccagccgcgcccaccgcaggtgggactcaggttcgccctctgggccaggtccttcacgaggagggagctacccttcgccagaagtttgtgagaatgtggccgcccttttcctgccctctgccccatgtgggtggggggcctcgtggcccggccggcgccccgtccccttctgcatgtctgaggccaccggcaaccgccgccccactccagatttgcccccgccctgttttgaaagccccttatttataacttttatactttgtgcaggtcgcggcgcttcctgcctcatcctcggctgcatggggcgggggcgctgtttttaacgtgcccgtttgtactgatgtatgaacttgtcaataaacacaattgtttgttaaccctggga

SEQ ID NO: 334179 - DNA, 6865 bp, Homo sapiens
cgcgtcggctccgcccacccagcccgcggcttggcccaggcggtagttcgcgttttgagccgatcgtgccaccatagctcctgctgctgcctctaccgctgcggctaccgcggcggagctgaaattgccgaacgcgatgcccgagggcgctgtgagcggggtggccttagctcgccgaggctggtcagtgagagggcatactgggaagccctctggagtgggaagacagtgccgctgttgagacaagacccaggactgggccggggactgtcccaaagggtttctcgtcataatggctgtggaagggtcaaccattaccagccggatcaagaatctgttgagatctccatccatcaaactgcgcaggagtaaggcaggaaaccgacgagaggacctcagctccaaggtgaccttggagaaggtgctgggaattacagtgtctggaggcagaggacttgcctgtgacccccgatcaggtttagttgcttacccagcagggtgtgtggttgtgttgttcaatccccggaaacacaaacagcaccacatcctcaacagttccaggaaaaccatcactgcccttgccttctcccctgatggcaagtacttggtcactggagagagtgggcacatgcctgccgtgcgggtatgggacgtggcagagcacagccaggtggcgagctgcaggagcacaagtatggtgtggcttgtgtggccttctctcctagcgccaagtacattgtctctgtgggctaccagcatgacatgatcgtcaacgtgtgggcctggaagaaaaacattgtggtggcctccaacaaggtgtccagtcgggtgacagcagtgtccttctctgaggattgcagctactttgtcactgcaggcaaccgacacatcaaattctggtatctcgatgacagcaagacctcaaaggtgaatgccactgtgcccttgctgggccgctcagggctgctgggagagctacggaacaacctattcactgatgtggcctgtggcagaggaaaaaaggcggacagtaccttctgcatcacgtcctcagggctgctgtgcgagttcagtgatcgaaggcttttggacaagtgggtggagctgagggtctaccccgaggtgaaggatagtaaccaggcctgcctgccccccagttcctttattacctgctcctcagacaacaccatccgcctgtggaacacagagagctccggggtgcatggctccaccctccaccgaaacatcctcagcagtgacctcattaaaatcatctatgtggatgggaacacccaggccctgctggacacagagctgcctggaggagacaaagctgatgcatccctgttggatccccgcgtgggcatccgctcggtgtgtgtcagccccaatggacagcatctagcatcaggggaccgtatgggcacacttagggtgcacgaacttcagtccctgagtgagatgctgaaggtggaggcccatgactctgagattctgtgcctggagtattctaagccagacacaggtctgaaactgctagcatcggcgagccgggaccggctgatccatgtgctggatgccgggcgggagtacagcctacagcagacgctggacgaacactcatcctccatcactgctgtcaagtttgcagccagtgatgggcaagtccgcatgatcagctgtggagcagacaagagcatctacttccgcactgcgcagaagtctggagatggagtgcagttcacacggacacaccacgtggtgcggaagacgaccctctatgacatggatgtggagcccagctggaagtacacggctatcggctgccaggaccgaaatattcggatatttaacatcagcagtggaaagcagaagaagctgtttaaagggtcacagggtgaggacggcacactcattaaggtgcagacagacccctcagggatctacattgccaccagctgttctgacaagaatctctccatttttgacttctcctcaggcgagtgcgtggccaccatgtttggccactcagagattgtcactggcatgaaatttagtaatgattgtaaacatctcatctctgtgtctggggacagctgcatatttgtgtggcgcctgagctctgagatgaccatcagcatgaggcagcgtctggccgagttgcgccagcgtcagcggggcggcaagcagcaaggaccatcctctccccaaagggcttctggacccaaccggcaccaggccccatcaatgctgtctcctggaccggctctctcatcagacagtgacaaggagggagaagatgaggggactgaagaagaacttccagcactgcccgtccttgccaagagtaccaagaaggcactggcctcggtccccagcccagctttgccccgaagcctgtcccactgggagatgagtcgggcacaggagtccgtggggttcctggacccagctcctgcagccaacccaggacccagaagaagagggcgctgggttcagccaggtgtggaactgagcgttagatccatgctggatctgcggcagctggaaacactggccccaagcctgcaggaccctagccaggactcgctggccatcatcccatctggtcccaggaagcatgggcaggaggcccttgagacttcactcactagccagaatgaaaagccccctcggcctcaggcttcccaaccttgttcctatccccatattatccgattattgtcacaagaggaaggggtctttgcccaagatctggaacctgcacccattgaagatggtattgtctacccggagccgagtgacaaccccaccatggataccagtgagttccaagtgcaggctccagcccggggaactctgggaagagtgtacccaggcagcaggagctcagaaaagcacagccctgacagtgcctgctctgtggattacagcagcagctgcctttccagcccggagcaccccactgaagactctgagagcacggagcccctcagtgtggatggcatctcctcagaccttgaagagccagctgagggtgatgaagaagaggaagaagaggagggaggcatgggcccctatgggctacaggagggcagcccccagactccagaccaggagcagtttctaaaacagcactttgagactctggccagtggagctgctccaggggccccagtgcaggtcccagagaggtcagagtctcggagtatctcttcacgattcctgttgcaagtacagacccgcccactcagggaaccatccccatcctcctcaagcctggcactgatgtcgagaccagcccaggtgccacaggcatctggtgagcagccgagaggcaatggtgccaatccccctggagcacccccggaggtggaaccgtcctctggcaaccccagcccccagcaggcagcctctgtgctgttgccacgatgccgtctcaaccctgacagcagctgggctcccaagagagtggccacagccagccccttttctggactccagaaggcccagtctgtgcacagtctggtgccacaggaaagacatgaggccagtctgcaggccccttcaccaggcgcactgctgtctcgggagatcgaagctcaggatggtctgggctccctgcccccagctgatggccgtccgtctcggcctcactcctatcagaaccccaccaccagttccatggccaagatatcccgcagtatctctgttggggagaacctgggcctggtggctgaacctcaagctcatgcccccatccgagtctcaccactcagcaagctggccctgcccagccgggctcacctggtcctggacatccccaaaccactgcctgaccgtcctaccctggctgcattctctcctgtcaccaaaggccgggcccctggcgaggcagaaaagcctggcttcccggtgggcctaggaaaagctcacagtacaactgagagatgggcctgtttgggggagggcaccactcccaagcctaggacagagtgccaggctcatcctgggcccagcagcccctgtgcccagcaactgccagtcagcagcctcttccaaggccctgaaaacttgcagcccccaccccctgagaagactcccaaccccatggaatgcaccaagccaggggcagccctgagccaggactcagagccagcggtgagcctggagcagtgtgagcagctggtggcagagctccgcggcagcgtgcgccaggcagtgcggctctaccactcggtggctggctgcaagatgccctcagcagagcaaagtcggattgcccagctcctcagagacaccttctcttcagtgcgacaggagctggaagctgtggctggggcagtgctgtccagcccaggcagcagccctggggctgtgggagccgagcagacacaggccctgctggagcaatactcagaactgttgcttcgagccgtggaacggcgtatggaacgcaaactctgagttctggaagcctgtcccaagtgaatgaatgctccagcgattccaaactgcagcccctctgcccctcaccaaaacctgcggggctgcttggagtggaaagcagggagcagtgttcagaggcaaagcagccttcccagccgctcctcgtggggggcctgtatttattaatttatttccctgactgttgcctcacttccttggaactcctgcctccacagcccctccagtggcagggacaggtcttgggtctttgtcatcttggtgctgtgagaggtaggagggcagcctgccccatctaggaatctgggaagggctggccctctcttagaagccatttgaaattactgcagggattagctccctgtggtggagcatacacagggtactctggggtcgaggtgagaggtgatgtggtattcagtgcccgtcagccaactgtgggccttcacctctacctgcacttcccctctcacaccagctgcactcccgtggctgccagagcagggtggttttccccaatacctggagctcagaaaggcagagccatctggccctccagggtgtccccagccatcaggagacttgagttggtatttggacctgagcccgcacattccactcccattctccctccaagaggggcccagcattgtatttccctgtgaccccttactctcctggccagaacttgagccagctgtgggatgttgctgcaggacagtaagccctcacctgggcaaacatgaagctctggcctcctttcctcagccccttgttcttccctgtcctccaccctggaccccagccggctgctggagcccagaggccaccttctccctgcatcctgaatgatgcttagtcagaagcctgtgttggaacatccctcgtttacggggcgctggcctacctcctgaggacctcagccacagatgagatcacacgcatgcacgtgcacacatgtacacacacacacctacctgcacagcacgctgttgagtgttggttgctagagtatccggctggctgctgtgtgcctggtttcctcacatcctgcctcagcttcaccaccctggcttatgtggaacacctatcagggagcagaaaaggggtgcagtacactaagtgaacccagattctggattcttggtgtccacagcctagctgatacgagatagcccataggacacctggtttaggtagaaggagcctcctcaaaggcagtgctgggcacccacgggtgtgctggatactggagtttgagaggagggaggtgctggggccaaaggagacactagaaaagtggtagatgggacaggtaagtggcagaggtgaggggataagttagaatgtaaaagggcagtaattaggggtgagggaaaggagataggggaccctaggaggtagagtgggaccatgtcgtgaggcagttgaagagttgaggaaaggtttttctgggccctactgctcccctctgctgcaggtaagtcagagcagctttaccacagcttcaggccacgagagccccttcacccgccctgctgcgccataggcagaggcttataaagaaatgggttctgggccaggtgtggtggctcaagcctgtaatcccagcactttgggaggccgaggcgggtggatcacctgaggttaggagttcgagatcagcctggccaacatggtgaaaccctgtctctactaaaaataaaaaaattagctgggcgtggtggtgggcgcctgtaaatcgcttgaaccctggaggtggaggtggaggttgcagtgagccgagatcgcgccattgcactccaacctaggtgacaaagctacacgccatctcaaaaaaaaaaaagaaaaagggttacaaaaggttcccagctccggggcatcagcctgagtgcgcttgagctgctccaaacctggcccttccccactcctctagcatcgccacccgcatggccctggaactcccgcggcggcgggggcgggcccgtgcctgctgtgccccgacttcccacaccagccgcgcccaccgcaggtgggactcaggttcgccctctgggccaggtccttcacgaggagggagctacccttcgccagaagtttgtgagaatgtggccgcccttttcctgccctctgccccatgtgggtggggggcctcgtggcccggccggcgccccgtccccttctgcatgtctgaggccaccggcaaccgccgccccactccagatttgcccccgccctgttttgaaagccccttatttataacttttatactttgtgcaggtcgcggcgcttcctgcctcatcctcggctgcatggggcgggggcgctgtttttaacgtgcccgtttgtactgatgtatgaacttgtcaataaacacaattgtttgttaaccctggga

SEQ ID NO: 334180 - DNA, 4603 bp, Homo sapiens
tcagctgcctggtgcctggaagtaaatatcatcagagaagagctcaaggtggagaggacaaaggacccctaagccagatagttagaactaaaatgcaggaaatcaaggatccaaagagcggagatctggagaaacagttctaaagatcccggttaggaggcacaggagtccgtggggttcctggacccagctcctgcagccaacccaggacccagaagaagagggcgctgggttcagccaggtgtggaactgagcgttagatccatgctggatctgcggcagctggaaacactggccccaagcctgcaggaccctagccaggactcgctggccatcatcccatctggtcccaggaagcatgggcaggaggcccttgagacttcactcactagccagaatgaaaagccccctcggcctcaggcttcccaaccttgttcctatccccatattatccgattattgtcacaagaggaaggggtctttgcccaagatctggaacctgcacccattgaagatggtattgtctacccggagccgagtgacaaccccaccatggataccagtgagttccaagtgcaggctccagcccggggaactctgggaagagtgtacccaggcagcaggagctcagaaaagcacagccctgacagtgcctgctctgtggattacagcagcagctgcctttccagcccggagcaccccactgaagactctgagagcacggagcccctcagtgtggatggcatctcctcagaccttgaagagccagctgagggtgatgaagaagaggaagaagaggagggaggcatgggcccctatgggctacaggagggcagcccccagactccagaccaggagcagtttctaaaacagcactttgagactctggccagtggagctgctccaggggccccagtgcaggtcccagagaggtcagagtctcggagtatctcttcacgattcctgttgcaagtacagacccgcccactcagggaaccatccccatcctcctcaagcctggcactgatgtcgagaccagcccaggtgccacaggcatctggtgagcagccgagaggcaatggtgccaatccccctggagcacccccggaggtggaaccgtcctctggcaaccccagcccccagcaggcagcctctgtgctgttgccacgatgccgtctcaaccctgacagcagctgggctcccaagagagtggccacagccagccccttttctggactccagaaggcccagtctgtgcacagtctggtgccacaggaaagacatgaggccagtctgcaggccccttcaccaggcgcactgctgtctcgggagatcgaagctcaggatggtctgggctccctgcccccagctgatggccgtccgtctcggcctcactcctatcagaaccccaccaccagttccatggccaagatatcccgcagtatctctgttggggagaacctgggcctggtggctgaacctcaagctcatgcccccatccgagtctcaccactcagcaagctggccctgcccagccgggctcacctggtcctggacatccccaaaccactgcctgaccgtcctaccctggctgcattctctcctgtcaccaaaggccgggcccctggcgaggcagaaaagcctggcttcccggtgggcctaggaaaagctcacagtacaactgagagatgggcctgtttgggggagggcaccactcccaagcctaggacagagtgccaggctcatcctgggcccagcagcccctgtgcccagcaactgccagtcagcagcctcttccaaggccctgaaaacttgcagcccccaccccctgagaagactcccaaccccatggaatgcaccaagccaggggcagccctgagccaggactcagagccagcggtgagcctggagcagtgtgagcagctggtggcagagctccgcggcagcgtgcgccaggcagtgcggctctaccactcggtggctggctgcaagatgccctcagcagagcaaagtcggattgcccagctcctcagagacaccttctcttcagtgcgacaggagctggaagctgtggctggggcagtgctgtccagcccaggcagcagccctggggctgtgggagccgagcagacacaggccctgctggagcaatactcagaactgttgcttcgagccgtggaacggcgtatggaacgcaaactctgagttctggaagcctgtcccaagtgaatgaatgctccagcgattccaaactgcagcccctctgcccctcaccaaaacctgcggggctgcttggagtggaaagcagggagcagtgttcagaggcaaagcagccttcccagccgctcctcgtggggggcctgtatttattaatttatttccctgactgttgcctcacttccttggaactcctgcctccacagcccctccagtggcagggacaggtcttgggtctttgtcatcttggtgctgtgagaggtaggagggcagcctgccccatctaggaatctgggaagggctggccctctcttagaagccatttgaaattactgcagggattagctccctgtggtggagcatacacagggtactctggggtcgaggtgagaggtgatgtggtattcagtgcccgtcagccaactgtgggccttcacctctacctgcacttcccctctcacaccagctgcactcccgtggctgccagagcagggtggttttccccaatacctggagctcagaaaggcagagccatctggccctccagggtgtccccagccatcaggagacttgagttggtatttggacctgagcccgcacattccactcccattctccctccaagaggggcccagcattgtatttccctgtgaccccttactctcctggccagaacttgagccagctgtgggatgttgctgcaggacagtaagccctcacctgggcaaacatgaagctctggcctcctttcctcagccccttgttcttccctgtcctccaccctggaccccagccggctgctggagcccagaggccaccttctccctgcatcctgaatgatgcttagtcagaagcctgtgttggaacatccctcgtttacggggcgctggcctacctcctgaggacctcagccacagatgagatcacacgcatgcacgtgcacacatgtacacacacacacctacctgcacagcacgctgttgagtgttggttgctagagtatccggctggctgctgtgtgcctggtttcctcacatcctgcctcagcttcaccaccctggcttatgtggaacacctatcagggagcagaaaaggggtgcagtacactaagtgaacccagattctggattcttggtgtccacagcctagctgatacgagatagcccataggacacctggtttaggtagaaggagcctcctcaaaggcagtgctgggcacccacgggtgtgctggatactggagtttgagaggagggaggtgctggggccaaaggagacactagaaaagtggtagatgggacaggtaagtggcagaggtgaggggataagttagaatgtaaaagggcagtaattaggggtgagggaaaggagataggggaccctaggaggtagagtgggaccatgtcgtgaggcagttgaagagttgaggaaaggtttttctgggccctactgctcccctctgctgcaggtaagtcagagcagctttaccacagcttcaggccacgagagccccttcacccgccctgctgcgccataggcagaggcttataaagaaatgggttctgggccaggtgtggtggctcaagcctgtaatcccagcactttgggaggccgaggcgggtggatcacctgaggttaggagttcgagatcagcctggccaacatggtgaaaccctgtctctactaaaaataaaaaaattagctgggcgtggtggtgggcgcctgtaaatcgcttgaaccctggaggtggaggtggaggttgcagtgagccgagatcgcgccattgcactccaacctaggtgacaaagctacacgccatctcaaaaaaaaaaaagaaaaagggttacaaaaggttcccagctccggggcatcagcctgagtgcgcttgagctgctccaaacctggcccttccccactcctctagcatcgccacccgcatggccctggaactcccgcggcggcgggggcgggcccgtgcctgctgtgccccgacttcccacaccagccgcgcccaccgcaggtgggactcaggttcgccctctgggccaggtccttcacgaggagggagctacccttcgccagaagtttgtgagaatgtggccgcccttttcctgccctctgccccatgtgggtggggggcctcgtggcccggccggcgccccgtccccttctgcatgtctgaggccaccggcaaccgccgccccactccagatttgcccccgccctgttttgaaagccccttatttataacttttatactttgtgcaggtcgcggcgcttcctgcctcatcctcggctgcatggggcgggggcgctgtttttaacgtgcccgtttgtactgatgtatgaacttgtcaataaacacaattgtttgttaaccctggga

SEQ ID NO: 334181 - DNA, 967 bp, Homo sapiens
cgcgtcggctccgcccacccagcccgcggcttggcccaggcggtagttcgcgttttgagccgatcgtgccaccatagctcctgctgctgcctctaccgctgcggctaccgcggcggagctgaaattgccgaacgcgatgcccgagggcgctgtgagcggggtggccttagctcgccgaggctggtcagtgagagggcatactgggaagccctctggagtgggaagacagtgccgctgttgagacaagacccaggactgggccggggactgtcccaaagggtttctcgtcataatggctgtggaagggtcaaccattaccagccggatcaagaatctgttgagatctccatccatcaaactgcgcaggagtaaggcaggaaaccgacgagaggacctcagctccaaggtgaccttggagaaggtgctgggaattacagtgtctggaggcagaggacttgcctgtgacccccgatcaggtttagttgcttacccagcagggtgtgtggttgtgttgttcaatccccggaaacacaaacagcaccacatcctcaacagttccaggaaaaccatcactgcccttgccttctcccctgatggcaagtacttggtcactggagagagtgggcacatgcctgccgtgcgggtatgggacgtggcagagcacagccaggtggcgagctgcaggagcacaagtatggtgtggcttgtgtggccttctctcctagcgccaagtacattgtctctgtgggctaccagcatgacatgatcgtcaacgtgtgggcctggaagaaaaacattgtggtggcctccaacaaggtgtccagtcgggtgacagcagtgtccttctctgaggattgcagctactttgtcactgcaggcaaccgacacatcaaattctggtatctcgatgacagcaagacctcaaaggtgaggtgctgaagctgggagtagccaccaaggcccctgg

SEQ ID NO: 334182 - DNA, 506 bp, Homo sapiens
atagaccgtattctttgctcttcacagagattgtcactggcatgaaatttagtaatgattgtaaacatctcatctctgtgtctggggacaggtgagcagaagccagcttccctgagaggcagattcttactctgccacagcaccctgccctcccctctctccatttcagtgatgtctctgggaagtggggttaacagggatagcttttggctgtgcttgacctgaagtggagggtggctctggtctccttgccatccatggataaggggaacgaatggcgctagccattctacctgcccctccttcagccaactgtgtggctttaccccagctgcatatttgtgtggcgcctgagctctgagatgaccatcagcatgaggcagcgtctggccgagttgcgccagcgtcagcggggcggcaagcagcaaggaccatcctctccccaaagggcttctggacccaaccggtgagaacagaatgtgggcaagtgatgggtgggtgtgcag

SEQ ID NO: 334183 - DNA, 734 bp, Homo sapiens
ctggaagtaaatatcatcagagaagagctcaaggtggagaggacaaaggacccctaagccagatagttagaactaaaatgcaggaaatcaaggatccaaagagcggagatctggagaaacagttctaaagatcccggttaggaggtaagcggagaacttccagaatagttagagggaaaaggccatgaggggacccataactcagcgactgccctggggtggccaaagggggatcaaggtgttcagagcaagttcccaagcaccagtaccttccgttgtcagcaacagtttcacagagtgatgatgctgtggtgtctctggagcaccctgaccgggccaggggtctcaggcctgggctataggtttgtccttggtgctgtgaggggactttggggcccccagctattggagtgattggggtagagaggcaaaaggagtggttggggtagacaggcagaagtggcctttgccctgggctggatttcttgggggactcttggtagtaagtggttgctgctggggctgtcctcagagtaggagacttttagagacccccagctctgaggcatccatgataccaggtgaaggctgagactaggggttcctgtgccagaggatgcggaatgcagctaagagcatgaactctggagccagactaatctgcaggccacttactgtctgtgggacgcagactgctcacttaagccccctgtgcttcagtctcctcatctgta

SEQ ID NO: 334184 - DNA, 376 bp, Homo sapiens
caggagtccgtggggttcctggacccagctcctgcagccaacccaggacccagaagaagagggcgctgggttcagccaggtgtggaactgagcgttagatccatgctggatctgcggcagctggaaacactggccccaagcctgcaggaccctagccaggactcgctggccatcatcccatctggtcccaggaagcatgggcaggaggcccttgagacttcactcactagccaggtgagcctgctttctcccagctctctagagagttccaaggggccttaggcagcctttgccaccagctgggacctgagcactggtccagctatgcttgctctgcccctgtggcacatgggtaacctgaactgcaaagccagga

SEQ ID NO: 334185 - DNA, 478 bp, Homo sapiens
actgtgtggctttaccccagctgcatatttgtgtggcgcctgagctctgagatgaccatcagcatgaggcagcgtctggccgagttgcgccagcgtcagcggggcggcaagcagcaaggaccatcctctccccaaagggcttctggacccaaccggcaccaggccccatcaatgctgtctcctggaccggctctctcatcagacagtgacaaggagggagaagatgaggggactgaagaagaacttccagcactgcccgtccttgccaagagtaccaagaaggcactggcctcggtccccagcccagctttgccccgaagcctgtcccactgggagatgagtcgggtgagtcgccattgttaaaatgttcttccaaggttagaggaggcaaagggagctgtgagaacagggctctctgggcctggtagggtactggggcatggggtctgcccacatgctgcactcgtgtgtccaagga

SEQ ID NO: 334186 - DNA, 5728 bp, Homo sapiens
caagaaaaaggacatagtaggaaaactggtgaaatttgaataaggtctctaattaatagtattataccaacataaatttcctagttttgataattgcactatcgttatgtaagatgttcacattagggaaagctgggtaagggaaatatagacgctctctgttctttcagcaacttttctctaagcctaaaagttcaaaaaaaggaaaaaggaggagaaaatgtagcagaggagggggcgtgagtccttcctgcggcctggccatggcctcttcccacctctcctcatctttgcagggtgcacgaacttcagtccctgagtgagatgctgaaggtggaggcccatgactctgagattctgtgcctggagtattctaagccagacacaggtctgaaactgctagcatcggcgagccgggaccggctgatccatgtgctggatgccgggcgggagtacagcctacagcagacgctggacgaacactcatcctccatcactgctgtcaagtttgcagccagtgatgggcaagtccgcatgatcagctgtggagcagacaagagcatctacttccgcactgcgcagaagtctggagatggagtgcagttcacacggacacaccacgtggtgcggaagacgaccctctatgacatggatgtggagcccagctggaagtacacggctatcggctgccaggaccgaaatattcggatatttaacatcagcagtggaaagcagaagaagctgtttaaagggtcacagggtgaggacggcacactcattaaggtgcagacagacccctcagggatctacattgccaccagctgttctgacaagaatctctccatttttgacttctcctcaggcgagtgcgtggccaccatgtttggccactcagagattgtcactggcatgaaatttagtaatgattgtaaacatctcatctctgtgtctggggacagctgcatatttgtgtggcgcctgagctctgagatgaccatcagcatgaggcagcgtctggccgagttgcgccagcgtcagcggggcggcaagcagcaaggaccatcctctccccaaagggcttctggacccaaccggcaccaggccccatcaatgctgtctcctggaccggctctctcatcagacagtgacaaggagggagaagatgaggggactgaagaagaacttccagcactgcccgtccttgccaagagtaccaagaaggcactggcctcggtccccagcccagctttgccccgaagcctgtcccactgggagatgagtcgggcacaggagtccgtggggttcctggacccagctcctgcagccaacccaggacccagaagaagagggcgctgggttcagccaggtgtggaactgagcgttagatccatgctggatctgcggcagctggaaacactggccccaagcctgcaggaccctagccaggactcgctggccatcatcccatctggtcccaggaagcatgggcaggaggcccttgagacttcactcactagccagaatgaaaagccccctcggcctcaggcttcccaaccttgttcctatccccatattatccgattattgtcacaagaggaaggggtctttgcccaagatctggaacctgcacccattgaagatggtattgtctacccggagccgagtgacaaccccaccatggataccagtgagttccaagtgcaggctccagcccggggaactctgggaagagtgtacccaggcagcaggagctcagaaaagcacagccctgacagtgcctgctctgtggattacagcagcagctgcctttccagcccggagcaccccactgaagactctgagagcacggagcccctcagtgtggatggcatctcctcagaccttgaagagccagctgagggtgatgaagaagaggaagaagaggagggaggcatgggcccctatgggctacaggagggcagcccccagactccagaccaggagcagtttctaaaacagcactttgagactctggccagtggagctgctccaggggccccagtgcaggtcccagagaggtcagagtctcggagtatctcttcacgattcctgttgcaagtacagacccgcccactcagggaaccatccccatcctcctcaagcctggcactgatgtcgagaccagcccaggtgccacaggcatctggtgagcagccgagaggcaatggtgccaatccccctggagcacccccggaggtggaaccgtcctctggcaaccccagcccccagcaggcagcctctgtgctgttgccacgatgccgtctcaaccctgacagcagctgggctcccaagagagtggccacagccagccccttttctggactccagaaggcccagtctgtgcacagtctggtgccacaggaaagacatgaggccagtctgcaggccccttcaccaggcgcactgctgtctcgggagatcgaagctcaggatggtctgggctccctgcccccagctgatggccgtccgtctcggcctcactcctatcagaaccccaccaccagttccatggccaagatatcccgcagtatctctgttggggagaacctgggcctggtggctgaacctcaagctcatgcccccatccgagtctcaccactcagcaagctggccctgcccagccgggctcacctggtcctggacatccccaaaccactgcctgaccgtcctaccctggctgcattctctcctgtcaccaaaggccgggcccctggcgaggcagaaaagcctggcttcccggtgggcctaggaaaagctcacagtacaactgagagatgggcctgtttgggggagggcaccactcccaagcctaggacagagtgccaggctcatcctgggcccagcagcccctgtgcccagcaactgccagtcagcagcctcttccaaggccctgaaaacttgcagcccccaccccctgagaagactcccaaccccatggaatgcaccaagccaggggcagccctgagccaggactcagagccagcggtgagcctggagcagtgtgagcagctggtggcagagctccgcggcagcgtgcgccaggcagtgcggctctaccactcggtggctggctgcaagatgccctcagcagagcaaagtcggattgcccagctcctcagagacaccttctcttcagtgcgacaggagctggaagctgtggctggggcagtgctgtccagcccaggcagcagccctggggctgtgggagccgagcagacacaggccctgctggagcaatactcagaactgttgcttcgagccgtggaacggcgtatggaacgcaaactctgagttctggaagcctgtcccaagtgaatgaatgctccagcgattccaaactgcagcccctctgcccctcaccaaaacctgcggggctgcttggagtggaaagcagggagcagtgttcagaggcaaagcagccttcccagccgctcctcgtggggggcctgtatttattaatttatttccctgactgttgcctcacttccttggaactcctgcctccacagcccctccagtggcagggacaggtcttgggtctttgtcatcttggtgctgtgagaggtaggagggcagcctgccccatctaggaatctgggaagggctggccctctcttagaagccatttgaaattactgcagggattagctccctgtggtggagcatacacagggtactctggggtcgaggtgagaggtgatgtggtattcagtgcccgtcagccaactgtgggccttcacctctacctgcacttcccctctcacaccagctgcactcccgtggctgccagagcagggtggttttccccaatacctggagctcagaaaggcagagccatctggccctccagggtgtccccagccatcaggagacttgagttggtatttggacctgagcccgcacattccactcccattctccctccaagaggggcccagcattgtatttccctgtgaccccttactctcctggccagaacttgagccagctgtgggatgttgctgcaggacagtaagccctcacctgggcaaacatgaagctctggcctcctttcctcagccccttgttcttccctgtcctccaccctggaccccagccggctgctggagcccagaggccaccttctccctgcatcctgaatgatgcttagtcagaagcctgtgttggaacatccctcgtttacggggcgctggcctacctcctgaggacctcagccacagatgagatcacacgcatgcacgtgcacacatgtacacacacacacctacctgcacagcacgctgttgagtgttggttgctagagtatccggctggctgctgtgtgcctggtttcctcacatcctgcctcagcttcaccaccctggcttatgtggaacacctatcagggagcagaaaaggggtgcagtacactaagtgaacccagattctggattcttggtgtccacagcctagctgatacgagatagcccataggacacctggtttaggtagaaggagcctcctcaaaggcagtgctgggcacccacgggtgtgctggatactggagtttgagaggagggaggtgctggggccaaaggagacactagaaaagtggtagatgggacaggtaagtggcagaggtgaggggataagttagaatgtaaaagggcagtaattaggggtgagggaaaggagataggggaccctaggaggtagagtgggaccatgtcgtgaggcagttgaagagttgaggaaaggtttttctgggccctactgctcccctctgctgcaggtaagtcagagcagctttaccacagcttcaggccacgagagccccttcacccgccctgctgcgccataggcagaggcttataaagaaatgggttctgggccaggtgtggtggctcaagcctgtaatcccagcactttgggaggccgaggcgggtggatcacctgaggttaggagttcgagatcagcctggccaacatggtgaaaccctgtctctactaaaaataaaaaaattagctgggcgtggtggtgggcgcctgtaaatcgcttgaaccctggaggtggaggtggaggttgcagtgagccgagatcgcgccattgcactccaacctaggtgacaaagctacacgccatctcaaaaaaaaaaaagaaaaagggttacaaaaggttcccagctccggggcatcagcctgagtgcgcttgagctgctccaaacctggcccttccccactcctctagcatcgccacccgcatggccctggaactcccgcggcggcgggggcgggcccgtgcctgctgtgccccgacttcccacaccagccgcgcccaccgcaggtgggactcaggttcgccctctgggccaggtccttcacgaggagggagctacccttcgccagaagtttgtgagaatgtggccgcccttttcctgccctctgccccatgtgggtggggggcctcgtggcccggccggcgccccgtccccttctgcatgtctgaggccaccggcaaccgccgccccactccagatttgcccccgccctgttttgaaagccccttatttataacttttatactttgtgcaggtcgcggcgcttcctgcctcatcctcggctgcatggggcgggggcgctgtttttaacgtgcccgtttgtactgatgtatgaacttgtcaataaacacaattgtttgttaaccctggga

SEQ ID NO: 334187 - DNA, 5577 bp, Homo sapiens
cgcgtcggctccgcccacccagcccgcggcttggcccaggcggtagttcgcgttttgagccgatcgtgccaccatagctcctgctgctgcctctaccgctgcggctaccgcggcggagctgaaattgccgaacgcgatgcccgagggcgctgtgagcggggtggccttagctcgccgaggctggtcagtgagagggcatactgggaagccctctggagtgggaagacagtgccgctgttgagacaagacccaggactgggccggggactgtcccaaagggtttctcgtcataatggctgtggaagggtcaaccattaccagccggatcaagaatctgttgagatctccatccatcaaactgcgcaggagtaaggcaggaaaccgacgagaggacctcagctccaaggtgaccttggagaaggtgctgggaattacagtgtctggaggcagaggacttgcctgtgacccccgatcaggtttagttgcttacccagcagggtgtgtggttgtgttgttcaatccccggaaacacaaacagcaccacatcctcaacagttccaggaaaaccatcactgcccttgccttctcccctgatggcaagtacttggtcactggagagagtgggcacatgcctgccgtgcgggtatgggacgtggcagagcacagccaggtggcgagctgcaggagcacaagtatggtgtggcttgtgtggccttctctcctagcgccaagtacattgtctctgtgggctaccagcatgacatgatcgtcaacgtgtgggcctggaagaaaaacattgtggtggcctccaacaaggtgtccagtcgggtgacagcagtgtccttctctgaggattgcagctactttgtcactgcaggcaaccgacacatcaaattctggtatctcgatgacagcaagacctcaaaggtgaatgccactgtgcccttgctgggccgctcagggctgctgggagagctacggaacaacctattcactgatgtggcctgtggcagaggaaaaaaggcggacagtaccttctgcatcacgtcctcagggctgctgtgcgagttcagtgatcgaaggcttttggacaagtgggtggagctgagggtctaccccgaggtgaaggatagtaaccaggcctgcctgccccccagttcctttattacctgctcctcagacaacaccatccgcctgtggaacacagagagctccggggtgcatggctccaccctccaccgaaacatcctcagcagtgacctcattaaaatcatctatgtggatgggaacacccaggccctgctggacacagagctgcctggaggagacaaagctgatgcatccctgttggatccccgcgtgggcatccgctcggtgtgtgtcagccccaatggacagcatctagcatcaggggaccgtatgggcacacttagggtgcacgaacttcagtccctgagtgagatgctgaaggtggaggcccatgactctgagattctgtgcctggagtattctaagccagacacaggtctgaaactgctagcatcggcgagccgggaccggctgatccatgtgctggatgccgggcgggagtacagcctacagcagacgctggacgaacactcatcctccatcactgctgtcaagtttgcagccagtgatgggcaagtccgcatgatcagctgtggagcagacaagagcatctacttccgcactgcgcagaagtctggagatggagtgcagttcacacggacacaccacgtggtgcggaagacgaccctctatgacatggatgtggagcccagctggaagtacacggctatcggctgccaggaccgaaatattcggatatttaacatcagcagtggaaagcagaagaagctgtttaaagggtcacagggtgaggacggcacactcattaaggtgcagacagacccctcagggatctacattgccaccagctgttctgacaagaatctctccatttttgacttctcctcaggcgagtgcgtggccaccatgtttggccactcagagattgtcactggcatgaaatttagtaatgattgtaaacatctcatctctgtgtctggggacagctgcatatttgtgtggcgcctgagctctgagatgaccatcagcatgaggcagcgtctggccgagttgcgccagcgtcagcggggcggcaagcagcaaggaccatcctctccccaaagggcttctggacccaaccggcaccaggccccatcaatgctgtctcctggaccggctctctcatcagacagtgacaaggagggagaagatgaggggactgaagaagaacttccagcactgcccgtccttgccaagagtaccaagaaggcactggcctcggtccccagcccagctttgccccgaagcctgtcccactgggagatgagtcgggcacaggagtccgtggggttcctggacccagctcctgcagccaacccaggacccagaagaagagggcgctgggttcagccaggtgtggaactgagcgttagatccatgctggatctgcggcagctggaaacactggccccaagcctgcaggaccctagccaggactcgctggccatcatcccatctggtcccaggaagcatgggcaggaggcccttgagacttcactcactagccagaatgaaaagccccctcggcctcaggcttcccaaccttgttcctatccccatattatccgattattgtcacaagaggaaggggtctttgcccaagatctggaacctgcacccattgaagatggtattgtctacccggagccgagtgacaaccccaccatggataccagtgagttccaagtgcaggctccagcccggggaactctgggaagagtgtacccaggcagcaggagctcagaaaagcacagccctgacagtgcctgctctgtggattacagcagcagctgcctttccagcccggagcaccccactgaagactctgagagcacggagcccctcagtgtggatggcatctcctcagaccttgaagagccagctgagggtgatgaagaagaggaagaagaggagggaggcatgggcccctatgggctacaggagggcagcccccagactccagaccaggagcagtttctaaaacagcactttgagactctggccagtggagctgctccaggggccccagtgcaggtcccagagaggtcagagtctcggagtatctcttcacgattcctgttgcaagtacagacccgcccactcagggaaccatccccatcctcctcaagcctggcactgatgtcgagaccagcccaggtgccacaggcatctggtgagcagccgagaggcaatggtgccaatccccctggagcacccccggaggtggaaccgtcctctggcaaccccagcccccagcaggcagcctctgtgctgttgccacgatgccgtctcaaccctgacagcagctgggctcccaagagagtggccacagccagccccttttctggactccagaaggcccagtctgtgcacagtctggtgccacaggaaagacatgaggccagtctgcaggccccttcaccaggcgcactgctgtctcgggagatcgaagctcaggatggtctgggctccctgcccccagctgatggccgtccgtctcggcctcactcctatcagaaccccaccaccagttccatggccaagatatcccgcagtatctctgttggggagaacctgggcctggtggctgaacctcaagctcatgcccccatccgagtctcaccactcagcaagctggccctgcccagccgggctcacctggtcctggacatccccaaaccactgcctgaccgtcctaccctggctgcattctctcctgtcaccaaaggccgggcccctggcgaggcagaaaagcctggcttcccggtgggcctaggaaaagctcacagtacaactgagagatgggcctgtttgggggagggcaccactcccaagcctaggacagagtgccaggctcatcctgggcccagcagcccctgtgcccagcaactgccagtcagcagcctcttccaaggccctgaaaacttgcagcccccaccccctgagaagactcccaaccccatggaatgcaccaagccaggggcagccctgagccaggactcagagccagcggtgagcctggagcagtgtgagcagctggtggcagagctccgcggcagcgtgcgccaggcagtgcggctctaccactcggtggctggctgcaagatgccctcagcagagcaaagtcggattgcccagctcctcagagacaccttctcttcagtgcgacaggagctggaagctgtggctggggcagtgctgtccagcccaggcagcagccctggggctgtgggagccgagcagacacaggccctgctggagcaatactcagaactgttgcttcgagccgtggaacggcgtatggaacgcaaactctgagttctggaagcctgtcccaagtgaatgaatgctccagcgattccaaactgcagcccctctgcccctcaccaaaacctgcggggctgcttggagtggaaagcagggagcagtgttcagaggcaaagcagccttcccagccgctcctcgtggggggcctgtatttattaatttatttccctgactgttgcctcacttccttggaactcctgcctccacagcccctccagtggcagggacaggtcttgggtctttgtcatcttggtgctgtgagaggtaggagggcagcctgccccatctaggaatctgggaagggctggccctctcttagaagccatttgaaattactgcagggattagctccctgtggtggagcatacacagggtactctggggtcgaggtgagaggtgatgtggtattcagtgcccgtcagccaactgtgggccttcacctctacctgcacttcccctctcacaccagctgcactcccgtggctgccagagcagggtggttttccccaatacctggagctcagaaaggcagagccatctggccctccagggtgtccccagccatcaggagacttgagttggtatttggacctgagcccgcacattccactcccattctccctccaagaggggcccagcattgtatttccctgtgaccccttactctcctggccagaacttgagccagctgtgggatgttgctgcaggacagtaagccctcacctgggcaaacatgaagctctggcctcctttcctcagccccttgttcttccctgtcctccaccctggaccccagccggctgctggagcccagaggccaccttctccctgcatcctgaatgatgcttagtcagaagcctgtgttggaacatcccccgtccccttctgcatgtctgaggccaccggcaaccgccgccccactccagatttgcccccgccctgttttgaaagccccttatttataacttttatactttgtgcaggtcgcggcgcttcctgcctcatcctcggctgcatggggcgggggcgctgtttttaacgtgcccgtttgtactgatgtatgaacttgtcaataaacacaattgtttgttaaccctggga

SEQ ID NO: 334188 - DNA, 880 bp, Homo sapiens
cgcgtcggctccgcccacccagcccgcggcttggcccaggcggtagttcgcgttttgagccgatcgtgccaccatagctcctgctgctgcctctaccgctgcggctaccgcggcggagctgaaattgccgaacgcgatgcccgagggcgctgtgagcggggtggccttagctcgccgaggctggtcagtgagagggcatactgggaagccctctggagtgggaagacagtgccgctgttgagacaagacccaggactgggccggggactgtcccaaagggtttctcgtcataatggctgtggaagggtcaaccattaccagccggatcaagaatctgttgagatctccatccatcaaactgcgcaggagtaaggcaggaaaccgacgagaggacctcagctccaaggtgaccttggagaaggtgctgggaattacagtgtctggaggcagaggacttgcctgtgacccccgatcaggtttagttgcttacccagcagggtaagtaagcgccttggaagagatcttgatgcatgggaatttatagccacgctagagcagttgggatgggcagggattttctggtatcttctggaagatagatacaggttaatgttttgttgtcatttttgtaaagagacgcaggaccaggtaaaggttctttgtcgggtgctgtcattgttgccatcctgtgctgcttttcagttatctaccccacctcccacacacagatttacactttatgttacacacagttcccagcaccatcttcagtaactaccttccagtcatttaaaaaacagctttattgagatgtaattcacataccatataactcactatttaaaatacccaattcagtagttttttagtatattcacag

SEQ ID NO: 334189 - DNA, 358 bp, Homo sapiens
tagttagagcccccaaggcttcagcaaacattttgctcatcacttgtaggactagcagtaaatgtaatcattgcaagactgagctaacacatctgctaacagggttgttcatttgagtaaacagcaaggtgataaggcgcagggacggaccattggattgagtcagacaggcccgagtacaaaaaccagcctcactacttaaatcttacatagcccattaagagtaagttgcttcactttgggaggctgaggcggacagattacgaagtcaggagatcgagaccatcctggccaacatggttaaacctcatctctattaaaaaaaaaatacaaaaattaactgggcatggtggtgggc

SEQ ID NO: 334190 - DNA, 204 bp, Homo sapiens
gggaaaaaggaaaaccaacaatactccctggacctcccaaaccttcttgtcttcaagtcctaagcacaacaaagaatgcaaaaggagagacacactgcatatgcctatgtggattctcatatgcttatgttccagtgacaccttcccatttgtcttgtgctaagtaaacccacaggtttgtgtaataaagacaaaaagcatgcc

SEQ ID NO: 334191 - DNA, 397 bp, Homo sapiens
tctttgctcaattccagcaaatgtttacatttattcagcagatatttattcagcaacttctaagtactcaaaaattctatttatgctgttctatttctattcatggaggtgtactgcctacaaaatcattttgtgctagacactatggctaaaaccaaataaagacaaggttcttcccttcatggtgtttacatactggtgagaatagctaaatagtcctgtgaaactttcccttattatagtatcaaatactgattgtacctttctttgaacatttgtaatatttagcctctcccagtttcgtatctgcatgtatttggtcttataggcattttgttttatgacattttatctgttctttttatttgattaaagtcccttttgaagcaataactat

SEQ ID NO: 334192 - DNA, 537 bp, Homo sapiens
ctatctataatataatccattggaaatgctccaatatcaattctggatatgtaatttaaatgagggtcctggaaagctcaggcatcagttctaatattactctattctgaaagtttcttttatttcttgttcctcaaacatcatctttaatttataggctatcaattccttccttaagactattactgctaacttatggaagtggaagttgtttcagaaaagttttgcttctctgagtaactgagtaaattaattggttaaaatgaatagagagatctctgttcaggaaattcatctctcaccacatgataaatctgactttggtttaaagagaaagaaataaaatatgtcttttagccaagaattattttattattattcatttaggcaacaaatatttatgtgcctaccttgtacccaggaaggttctatggagaaattgcagaaacctgcatataaagccttttgggactttgtatggttgatgcaattgactccaaagtttgccgtacttacttaggccttccaaatgcctct

SEQ ID NO: 334193 - DNA, 978 bp, Homo sapiens
  misc_feature (862)..(862): n is a, c, g, or t
aactaaggctaggtacgaggctgggtgggtgaactgtcgttgcagagattgcgggcggctgagacgccgcctgcctggcacctaggagcgcagcggagccccgacaccgccgccgccgccatggagtccgagaccgaacccgagcccgtcacgctcctggtgaagagccccaaccagcgccaccgcgacttggagctgagtggcgaccgcggctggagtgtgggccacctcaaggcccacctgagccgcgtctaccccgagcgtccgcgtccagaggaccagaggttaatttattctgggaagctgttgttggatcaccaatgtctcagggacttgcttccaaagcaggaaaaacggcatgttttgcatctggtgtgcaatgtgaagagtccttcaaaaatgccagaaatcaacgccaaggtggctgaatccacagaggagcctgctggttctaatcggggacagtatcctgaggattcctcaagtgatggtttaaggcaaagggaagttcttcggaacctttcttcccctggatgggaaaacatctcaaggcctgaagctgcccagcaggcattccaaggcctgggtcctggtttctccggttacacaccctatgggtggcttcagctttcctggttccagcagatatatgcacgacagtactacatgcaatatttagcagccactgctgcatcaggggcttttgttccaccaccaagtgcacaagagatacctgtggtctctgcacctgctccagcccctattcacaaccagtttccagctgaaaaccagcctgccaatcagaatgctgctcctcaagtggttgttaatcctggagccatcaaattgcggtgatgccagngcctttggggaacagttaaaatccgcagggggtggcatacgcgcatttggtccatctccttcccgagaactcggtgggccggtttccccggttcagtcgtaccaggtccttgccaa

SEQ ID NO: 334194 - DNA, 1751 bp, Homo sapiens
cggacgcgtgggtcgacccacgcgtccgcggacgtgtggatgatgatatgcttttgtgagcaagcaaaagcagaaacgtgaagccgtgatacaaattggtgaacaaaaaatgcccaaggcttctcatgtctttattctgaagagctttaatatatactctatgtagtttaataagcactgtacgtagaaggccttaggtgttgcatgtctatgcttgaggaacttttccaaatgtgtgtgtctgcatgtgtgtttgtacatagaagtcatagatgcagaagtggttctgctggtacgatttgattcctgttggaatgtttaaattacactaagtgtactactttatataatcaatgaaattgctagacatgttttagcaggacttttctaggaaagacttatgtataattgctttttaaaatgcagtgctttactttaaactaaggggaactttgcggaggtgaaaacctttgctgggttttctgttcaataaagttttactatgaatgaccctgctgaaacaacacccaaacacacaacaacatacacaccacaaaacaaaacacacacaccccaaagcacaaaaaaaaaggggggcaacccacaagagaaccctcaaggagggaccacacaaaaaaagaaaaaaaggttatcacaaacggaggcccacaagagacgcaataatacagcgaacgacggacgactacacaacaagagcagagaaaaccgacaggacacgtcgaagaccaaaccagagcgagcacatgcgaaccacccgagacaaagaccgagacatcaacagctgaagctacacagccagacgcgcaagctccgcaagagtaataagccggaggagaagagacgcaagacgcaacaccgaagcgaacgcggacacaacagaaggagagaaaacaaggagacagacaagaagagaaaaggaacagaacaaaagggcacagcagcccggacgacggcactaacaggaagcaaaaaagagagcaagcgcagagaacgactcagacgcatagcaaccgagcagacaagcgccgcacaacaacgaccgcagcagccgacagacgaacacacagagcgcagcaaacgagagcgaaggacgcgagagcggcctgcgaagagagacaggacgagagcagaaacacggcacacgacaccagagagagaggcaagagcagcaggagagcagacaagccggacacgaagagaccaagacagccacaccagccggagagaagacagcaggcgacagagacaaacagcaacagagcgaagcacagacgaagagagcagagcagcagagcgagtagagcaaagggaaagcaaaggcagaggacacacaaagacgaaccagaagagacacgccagagaccgcgcacagcgagcacaacgacgagaagagaagaggaacgggaggcgagcagagagagtcatagagtctcatagcggtatagtagaggaaagaggacagatacagtctgggtatgcgaggtgatatcagatggtaatcgagagcaatgccatcacaaaggtggaagcgagagcgacagaggagtgaagaaggaaggagagagtagaatagcagagggaggagaggggcggctatgagcgagtggatgggggtgaagagctgcgacgaaacagggtgagagagagaggcgagataaggtcggaagagtcgagatgagcagagggacaagagacgaagcctcgagacagacggcagggcgatgaaagga

SEQ ID NO: 334195 - DNA, 608 bp, Homo sapiens
actggaagtactgagaaaccaggctctccacacatggctcctttgcctgtctccgaaccaaagctccctcaaggcctgaagctgcccagcaggcattccaaggcctgggtcctggtttctccggttacacaccctatgggtggcttcagctttcctggttccagcagatatatgcacgacagtactacatgcaatatttagcagccactgctgcatcaggggcttttgttccaccaccaagtgcacaagagatacctgtggtctctgcacctgctccagcccctattcacaaccagtttccagctgaaaaccagcctgccaatcagaatgctgctcctcaagtggttgttaatcctggagccaatcaaaatttgcggatgaatgcacaaggtggccctattgtggaagaagatgatgaaataaatcgagattggttggattggacctattcagcagctacattttctgtttttctcagtatcctctacttctactcctccctgagcagattcctcatggtcatgggggccaccgttgttatgtacctgtaagcagatggtttctctaatataaattacactacactgtgttcacactaagcagatttt

SEQ ID NO: 334196 - DNA, 240 bp, Homo sapiens
tcccttcattattgcaaagtgctgggattacaggcatgggccaccgctcccgggctttttttcctagtcttgattctttctaggaaagacttatgtataattgctttttaaaatgcagtgctttactttaaactaaggggaactttgcggaggtgaaaacctttgctgggttttctgttcaataaagcaggatgcggccacgcccctttttttttccctgtgaaagaaataaaactgcgt

SEQ ID NO: 334197 - DNA, 2549 bp, Homo sapiens
aactaaggctaggtacgaggctgggtgggtgaactgtcgttgcagagattgcgggcggctgagacgccgcctgcctggcacctaggagcgcagcggagccccgacaccgccgccgccgccatggagtccgagaccgaacccgagcccgtcacgctcctggtgaagagccccaaccagcgccaccgcgacttggagctgagtggcgaccgcggctggagtgtgggccacctcaaggcccacctgagccgcgtctaccccgagcgtccgcgtccagaggaccagaggttaatttattctgggaagctgttgttggatcaccaatgtctcagggacttgcttccaaagcaggaaaaacggcatgttttgcatctggtgtgcaatgtgaagagtccttcaaaaatgccagaaatcaacgccaaggtggctgaatccacagaggagcctgctggttctaatcggggacagtatcctgaggattcctcaagtgatggtttaaggcaaagggaagttcttcggaacctttcttcccctggatgggaaaacatctcaaggcctgaagctgcccagcaggcattccaaggcctgggtcctggtttctccggttacacaccctatgggtggcttcagctttcctggttccagcagatatatgcacgacagtactacatgcaatatttagcagccactgctgcatcaggggcttttgttccaccaccaagtgcacaagagatacctgtggtctctgcacctgctccagcccctattcacaaccagtttccagctgaaaaccagcctgccaatcagaatgctgctcctcaagtggttgttaatcctggagccaatcaaaatttgcggatgaatgcacaaggtggccctattgtggaagaagatgatgaaataaatcgagattggttggattggacctattcagcagctacattttctgtttttctcagtatcctctacttctactcctccctgagcagattcctcatggtcatgggggccaccgttgttatgtacctgcatcacgttgggtggtttccatttagaccgaggccggttcagaacttcccaaatgatggtcctcctcctgacgttgtaaatcaggaccccaacaataacttacaggaaggcactgatcctgaaactgaagaccccaaccacctccctccagacagggatgtactagatggcgagcagaccagcccctcctttatgagcacagcatggcttgtcttcaagactttctttgcctctcttcttccagaaggccccccagccatcgcaaactgatggtgtttgtgctgtagctgttggaggctttgacaggaatggactggatcacctgactccagctagattgcctctcctggacatggcaatgatgagtttttaaaaaacagtgtggatgatgatatgcttttgtgagcaagcaaaagcagaaacgtgaagccgtgatacaaattggtgaacaaaaaatgcccaaggcttctcatgtctttattctgaagagctttaatatatactctatgtagtttaataagcactgtacgtagaaggccttaggtgttgcatgtctatgcttgaggaacttttccaaatgtgtgtgtctgcatgtgtgtttgtacatagaagtcatagatgcagaagtggttctgctggtacgatttgattcctgttggaatgtttaaattacactaagtgtactactttatataatcaatgaaattgctagacatgttttagcaggacttttctaggaaagacttatgtataattgctttttaaaatgcagtgctttactttaaactaaggggaactttgcggaggtgaaaacctttgctgggttttctgttcaataaagttttactatgaatgaccctgaaaaaaaaaaaaaaaaaaaaaaaaaaaaaatttttggggggtagggccctcgaaaaagagctttttaagaaccacttcgcgttgtgggagcgcgcgcggggcccccatatggtgttattggtgaacccgtgtggtcaaatagggtgtttcccaaagggaaaactcgggaacagagaacacagtgtgctgtgggattttcttcccaatttaaaaaaacgcccgcggggggaaacaccgaggggtgttccttgagaacacaaatacccaaagagtggggtcacaggagggccacaaaacaaggggggaccttattacacacggggggagtcccaacgggaaagcgcggaatgtcaaaatttatacccccgagcacttcggggggaaaagagaacgaagagagacagaggaaaaaagagagagggaaagagagacgagagaagaaagaaagaaggagggaaaggaaggagaggaggagaggggggaggagagaagagggagagcagggaagagcaagagaggcaaggaaagacaggagagcgagacggaaagagggaggcaggaggagagagagggcgaggggcggagagagggaggagaggaacaggggacacaagaagagagcagagggaagaagaggggagagcggggacgagagagaaagg

SEQ ID NO: 334198 - DNA, 2779 bp, Homo sapiens
ccacccgagctgggggcctcgcaggtctcagaccaagctccccgcgcggcctgcagcgcacccaaacatggccaccgaacccgggttcccggggcacagccgcgcctctgggtgacgcagacgcggcgggttgcatcagcccgtgcccacgtgctcggtccgccctctgccacccggatccggacgccgattgggccacgttgggagagtgcctccgcctcagccaatgggcggcagccacagagcgttctgtccgcagagccaggcgcggggcttctataaaaggcgcccgaagcgggggcgcgggccccagagacgtgaactgtcgttgcagagattgcgggcggctgagacgccgcctgcctggcacctaggagcgcagcggagccccgacaccgccgccgccgccatggagtccgagaccgaacccgagcccgtcacgctcctggtgaagagccccaaccagcgccaccgcgacttggagctgagtggcgaccgcggctggagtgtgggccacctcaaggcccacctgagccgcgtctaccccgagcgtccgcgtccagaggaccagaggttaatttattctgggaagctgttgttggatcaccaatgtctcagggacttgcttccaaagcaggaaaaacggcatgttttgcatctggtgtgcaatgtgaagagtccttcaaaaatgccagaaatcaacgccaaggtggctgaatccacagaggagcctgctggttctaatcggggacagtatcctgaggattcctcaagtgatggtttaaggcaaagggaagttcttcggaacctttcttcccctggatgggaaaacatctcaaggcctgaagctgcccagcaggcattccaaggcctgggtcctggtttctccggttacacaccctatgggtggcttcagctttcctggttccagcagatatatgcacgacagtactacatgcaatatttagcagccactgctgcatcaggggcttttgttccaccaccaagtgcacaagagatacctgtggtctctgcacctgctccagcccctattcacaaccagtttccagctgaaaaccagcctgccaatcagaatgctgctcctcaagtggttgttaatcctggagccaaatcgagattggttggattggacctattcagcagctacattttctgtttttctcagtatcctctacttctactcctccctgagcagattcctcatggtcatgggggccaccgttgttatgtacctgcatcacgttgggtggtttccatttagaccgaggccggttcagaacttcccaaatgatggtcctcctcctgacgttgtaaatcaggaccccaacaataacttacaggaaggcactgatcctgaaactgaagaccccaaccacctccctccagacagggatgtactagatggcgagcagaccagcccctcctttatgagcacagcatggcttgtcttcaagactttctttgcctctcttcttccagaaggccccccagccatcgcaaactgatggtgtttgtgctgtagctgttggaggctttgacaggaatggactggatcacctgactccagctagattgcctctcctggacatggcaatgatgagtttttaaaaaacagtgtggatgatgatatgcttttgtgagcaagcaaaagcagaaacgtgaagccgtgatacaaattggtgaacaaaaaatgcccaaggcttctcatgtctttattctgaagagctttaatatatactctatgtagtttaataagcactgtacgtagaaggccttaggtgttgcatgtctatgcttgaggaacttttccaaatgtgtgtgtctgcatgtgtgtttgtacatagaagtcatagatgcagaagtggttctgctggtacgatttgattcctgttggaatgtttaaattacactaagtgtactactttatataatcaatgaaattgctagacatgttttagcaggacttttctaggaaagacttatgtataattgctttttaaaatgcagtgctttactttaaactaaggggaactttgcggaggtgaaaacctttgctgggttttctgttcaataaagttttactatgaatgaccctgaaaaaaaaaaaaaaaaaaaaaaaaaaaaaatttttggggggtagggccctcgaaaaagagctttttaagaaccacttcgcgttgtgggagcgcgcgcggggcccccatatggtgttattggtgaacccgtgtggtcaaatagggtgtttcccaaagggaaaactcgggaacagagaacacagtgtgctgtgggattttcttcccaatttaaaaaaacgcccgcggggggaaacaccgaggggtgttccttgagaacacaaatacccaaagagtggggtcacaggagggccacaaaacaaggggggaccttattacacacggggggagtcccaacgggaaagcgcggaatgtcaaaatttatacccccgagcacttcggggggaaaagagaacgaagagagacagaggaaaaaagagagagggaaagagagacgagagaagaaagaaagaaggagggaaaggaaggagaggaggagaggggggaggagagaagagggagagcagggaagagcaagagaggcaaggaaagacaggagagcgagacggaaagagggaggcaggaggagagagagggcgaggggcggagagagggaggagaggaacaggggacacaagaagagagcagagggaagaagaggggagagcggggacgagagagaaagg

SEQ ID NO: 334199 - DNA, 3849 bp, Homo sapiens
gcctcccacagtacttggattacaggcatgagccaccatgcccagccgataatttgccattctgtatttatttgcgtgttagagaccagttaaagttaagacactttctaaatagaagtcttgtatatggggcttttgagaaagtgttttcccgtgatgctggggggaaacacacatattcaaattacttgtataaaacagtttattctgtgtttaggaacttgtaggggtgaaatgctgacctgtgttactctttctttccatgatcagcgtccagaggaccagaggttaatttattctgggaagctgttgttggatcaccaatgtctcagggacttgcttccaaaggtacatcacttacacattaacttctgaatgtttttaagcactcaccaggttaggttcaggtccttaagtaccttcgtattacttttagcaggaaaaacggcatgttttgcatctggtgtgcaatgtgaagagtccttcaaaaatgccagaaatcaacgccaaggtgtctgcctcttcatgatggtaacaatttgtatcattcagactttcaggggagtaataaaagaagttggataaaacgtttattgagagactgtatggtgttattaccaagtaatattttgtttctttcctaggaattagaaactgtattatcaacacaaagtgatgagttaatagtagcagattgttccgttagtgctgtagtagaaaggtggagttacatattgcactatcttatgggatatgatttgatctatggttactgtgtatctagattactgaactaacactaattgggtttttattgaatttagcacatagcaagtttcttcaaaggagtcactaatttttataaagagtacaaaagtgaatatatttcctttggaaattttcattgtgattagttggataggaaaagatcagagtttttatcaagtgatctttaaagaattttttttttttaaagatggtctcgctgtgtggcccaggcttttctcaaactcctgagggcaagcgatcctcccacctcagcctcctgagtagctgggactacaggcatgtgccactagacctggctctaaagacatatatgacacacgaaaccatttatttttcatttcacaatgtttattcacatatatggtattagtattctaatgtagtgatgcactctaaatttgcattatatttcctagaacatctgaacagagcataggaaattccctattttgccattatcagttctaacaaaaatcttaaaagcactttatcatttcatttccctgcactgtaatttttttaaatgatcaaaaacagtatcataccaaggcttacttatattggaatactattttagaaagttgtgggctgggttgtatttataaatcttgttggtcagatgtctgcaatgagtaaatttagcaccattatcaggaagctttctcaccaatgacaacttcattggaagattttaatgaaagtgtagcatactctagggaaaaaatatgaatattttagcatctatgtattgaaaattatgttgaataaatgtcagactattttttacataacgttgcttctgtttaattttgtcacgttcagaggtggggggtaggagatgtaagcccttgacagcaaaataattccttttgcttgatttcagacagttgcatcagctcctttgttctgtgttcatgttacacttatttaggtggctgaatccacagaggagcctgctggttctaatcggggacagtatcctgaggattcctcaagtgatggtttaaggcaaagggaagttcttcggaacctttcttcccctggatgggaaaacatctcaaggcctgaagctgcccagcaggcattccaaggcctgggtcctggtttctccggttacacaccctatgggtggcttcagctttcctggttccagcagatatatgcacgacagtactacatgcaatatttagcagccactgctgcatcaggggcttttgttccaccaccaagtgcacaagagatacctgtggtctctgcacctgctccagcccctattcacaaccagtttccagctgaaaaccagcctgccaatcagaatgctgctcctcaagtggttgttaatcctggagccaatcaaaatttgcggatgaatgcacaaggtggccctattgtggaagaagatgatgaaataaatcgagattggttggattggacctattcagcagctacattttctgtttttctcagtatcctctacttctactcctccctgagcagattcctcatggtcatgggggccaccgttgttatgtacctgcatcacgttgggtggtttccatttagaccgaggccggttcagaacttcccaaatgatggtcctcctcctgacgttgtaaatcaggaccccaacaataacttacaggaaggcactgatcctgaaactgaagaccccaaccacctccctccagacagggatgtactagatggcgagcagaccagcccctcctttatgagcacagcatggcttgtcttcaagactttctttgcctctcttcttccagaaggccccccagccatcgcaaactgatggtgtttgtgctgtagctgttggaggctttgacaggaatggactggatcacctgactccagctagattgcctctcctggacatggcaatgatgagtttttaaaaaacagtgtggatgatgatatgcttttgtgagcaagcaaaagcagaaacgtgaagccgtgatacaaattggtgaacaaaaaatgcccaaggcttctcatgtctttattctgaagagctttaatatatactctatgtagtttaataagcactgtacgtagaaggccttaggtgttgcatgtctatgcttgaggaacttttccaaatgtgtgtgtctgcatgtgtgtttgtacatagaagtcatagatgcagaagtggttctgctggtacgatttgattcctgttggaatgtttaaattacactaagtgtactactttatataatcaatgaaattgctagacatgttttagcaggacttttctaggaaagacttatgtataattgctttttaaaatgcagtgctttactttaaactaaggggaactttgcggaggtgaaaacctttgctgggttttctgttcaataaagttttactatgaatgaccctgaaaaaaaaaaaaaaaaaaaaaaaaaaaaaatttttggggggtagggccctcgaaaaagagctttttaagaaccacttcgcgttgtgggagcgcgcgcggggcccccatatggtgttattggtgaacccgtgtggtcaaatagggtgtttcccaaagggaaaactcgggaacagagaacacagtgtgctgtgggattttcttcccaatttaaaaaaacgcccgcggggggaaacaccgaggggtgttccttgagaacacaaatacccaaagagtggggtcacaggagggccacaaaacaaggggggaccttattacacacggggggagtcccaacgggaaagcgcggaatgtcaaaatttatacccccgagcacttcggggggaaaagagaacgaagagagacagaggaaaaaagagagagggaaagagagacgagagaagaaagaaagaaggagggaaaggaaggagaggaggagaggggggaggagagaagagggagagcagggaagagcaagagaggcaaggaaagacaggagagcgagacggaaagagggaggcaggaggagagagagggcgaggggcggagagagggaggagaggaacaggggacacaagaagagagcagagggaagaagaggggagagcggggacgagagagaaagg

SEQ ID NO: 334200 - DNA, 3761 bp, Homo sapiens
gcctcccacagtacttggattacaggcatgagccaccatgcccagccgataatttgccattctgtatttatttgcgtgttagagaccagttaaagttaagacactttctaaatagaagtcttgtatatggggcttttgagaaagtgttttcccgtgatgctggggggaaacacacatattcaaattacttgtataaaacagtttattctgtgtttaggaacttgtaggggtgaaatgctgacctgtgttactctttctttccatgatcagcgtccagaggaccagaggttaatttattctgggaagctgttgttggatcaccaatgtctcagggacttgcttccaaagcaggaaaaacggcatgttttgcatctggtgtgcaatgtgaagagtccttcaaaaatgccagaaatcaacgccaaggtgtctgcctcttcatgatggtaacaatttgtatcattcagactttcaggggagtaataaaagaagttggataaaacgtttattgagagactgtatggtgttattaccaagtaatattttgtttctttcctaggaattagaaactgtattatcaacacaaagtgatgagttaatagtagcagattgttccgttagtgctgtagtagaaaggtggagttacatattgcactatcttatgggatatgatttgatctatggttactgtgtatctagattactgaactaacactaattgggtttttattgaatttagcacatagcaagtttcttcaaaggagtcactaatttttataaagagtacaaaagtgaatatatttcctttggaaattttcattgtgattagttggataggaaaagatcagagtttttatcaagtgatctttaaagaattttttttttttaaagatggtctcgctgtgtggcccaggcttttctcaaactcctgagggcaagcgatcctcccacctcagcctcctgagtagctgggactacaggcatgtgccactagacctggctctaaagacatatatgacacacgaaaccatttatttttcatttcacaatgtttattcacatatatggtattagtattctaatgtagtgatgcactctaaatttgcattatatttcctagaacatctgaacagagcataggaaattccctattttgccattatcagttctaacaaaaatcttaaaagcactttatcatttcatttccctgcactgtaatttttttaaatgatcaaaaacagtatcataccaaggcttacttatattggaatactattttagaaagttgtgggctgggttgtatttataaatcttgttggtcagatgtctgcaatgagtaaatttagcaccattatcaggaagctttctcaccaatgacaacttcattggaagattttaatgaaagtgtagcatactctagggaaaaaatatgaatattttagcatctatgtattgaaaattatgttgaataaatgtcagactattttttacataacgttgcttctgtttaattttgtcacgttcagaggtggggggtaggagatgtaagcccttgacagcaaaataattccttttgcttgatttcagacagttgcatcagctcctttgttctgtgttcatgttacacttatttaggtggctgaatccacagaggagcctgctggttctaatcggggacagtatcctgaggattcctcaagtgatggtttaaggcaaagggaagttcttcggaacctttcttcccctggatgggaaaacatctcaaggcctgaagctgcccagcaggcattccaaggcctgggtcctggtttctccggttacacaccctatgggtggcttcagctttcctggttccagcagatatatgcacgacagtactacatgcaatatttagcagccactgctgcatcaggggcttttgttccaccaccaagtgcacaagagatacctgtggtctctgcacctgctccagcccctattcacaaccagtttccagctgaaaaccagcctgccaatcagaatgctgctcctcaagtggttgttaatcctggagccaatcaaaatttgcggatgaatgcacaaggtggccctattgtggaagaagatgatgaaataaatcgagattggttggattggacctattcagcagctacattttctgtttttctcagtatcctctacttctactcctccctgagcagattcctcatggtcatgggggccaccgttgttatgtacctgcatcacgttgggtggtttccatttagaccgaggccggttcagaacttcccaaatgatggtcctcctcctgacgttgtaaatcaggaccccaacaataacttacaggaaggcactgatcctgaaactgaagaccccaaccacctccctccagacagggatgtactagatggcgagcagaccagcccctcctttatgagcacagcatggcttgtcttcaagactttctttgcctctcttcttccagaaggccccccagccatcgcaaactgatggtgtttgtgctgtagctgttggaggctttgacaggaatggactggatcacctgactccagctagattgcctctcctggacatggcaatgatgagtttttaaaaaacagtgtggatgatgatatgcttttgtgagcaagcaaaagcagaaacgtgaagccgtgatacaaattggtgaacaaaaaatgcccaaggcttctcatgtctttattctgaagagctttaatatatactctatgtagtttaataagcactgtacgtagaaggccttaggtgttgcatgtctatgcttgaggaacttttccaaatgtgtgtgtctgcatgtgtgtttgtacatagaagtcatagatgcagaagtggttctgctggtacgatttgattcctgttggaatgtttaaattacactaagtgtactactttatataatcaatgaaattgctagacatgttttagcaggacttttctaggaaagacttatgtataattgctttttaaaatgcagtgctttactttaaactaaggggaactttgcggaggtgaaaacctttgctgggttttctgttcaataaagttttactatgaatgaccctgaaaaaaaaaaaaaaaaaaaaaaaaaaaaaatttttggggggtagggccctcgaaaaagagctttttaagaaccacttcgcgttgtgggagcgcgcgcggggcccccatatggtgttattggtgaacccgtgtggtcaaatagggtgtttcccaaagggaaaactcgggaacagagaacacagtgtgctgtgggattttcttcccaatttaaaaaaacgcccgcggggggaaacaccgaggggtgttccttgagaacacaaatacccaaagagtggggtcacaggagggccacaaaacaaggggggaccttattacacacggggggagtcccaacgggaaagcgcggaatgtcaaaatttatacccccgagcacttcggggggaaaagagaacgaagagagacagaggaaaaaagagagagggaaagagagacgagagaagaaagaaagaaggagggaaaggaaggagaggaggagaggggggaggagagaagagggagagcagggaagagcaagagaggcaaggaaagacaggagagcgagacggaaagagggaggcaggaggagagagagggcgaggggcggagagagggaggagaggaacaggggacacaagaagagagcagagggaagaagaggggagagcggggacgagagagaaagg

SEQ ID NO: 334201 - DNA, 2763 bp, Homo sapiens
ccacccgagctgggggcctcgcaggtctcagaccaagctccccgcgcggcctgcagcgcacccaaacatggccaccgaacccgggttcccggggcacagccgcgcctctgggtgacgcagacgcggcgggttgcatcagcccgtgcccacgtgctcggtccgccctctgccacccggatccggacgccgattgggccacgttgggagagtgcctccgcctcagccaatgggcggcagccacagagcgttctgtccgcagagccaggcgcggggcttctataaaaggcgcccgaagcgggggcgcgggccccagagacgtgaactgtcgttgcagagattgcgggcggctgagacgccgcctgcctggcacctaggagcgcagcggagccccgacaccgccgccgccgccatggagtccgagaccgaacccgagcccgtcacgctcctggtgaagagccccaaccagcgccaccgcgacttggagctgagtggcgaccgcggctggagtgtgggccacctcaaggcccacctgagccgcgtctaccccgagcgtccgcgtccagaggaccagaggttaatttattctgggaagctgttgttggatcaccaatgtctcagggacttgcttccaaaggtggctgaatccacagaggagcctgctggttctaatcggggacagtatcctgaggattcctcaagtgatggtttaaggcaaagggaagttcttcggaacctttcttcccctggatgggaaaacatctcaaggcctgaagctgcccagcaggcattccaaggcctgggtcctggtttctccggttacacaccctatgggtggcttcagctttcctggttccagcagatatatgcacgacagtactacatgcaatatttagcagccactgctgcatcaggggcttttgttccaccaccaagtgcacaagagatacctgtggtctctgcacctgctccagcccctattcacaaccagtttccagctgaaaaccagcctgccaatcagaatgctgctcctcaagtggttgttaatcctggagccaatcaaaatttgcggatgaatgcacaaggtggccctattgtggaagaagatgatgaaataaatcgagattggttggattggacctattcagcagctacattttctgtttttctcagtatcctctacttctactcctccctgagcagattcctcatggtcatgggggccaccgttgttatgtacctgcatcacgttgggtggtttccatttagaccgaggccggttcagaacttcccaaatgatggtcctcctcctgacgttgtaaatcaggaccccaacaataacttacaggaaggcactgatcctgaaactgaagaccccaaccacctccctccagacagggatgtactagatggcgagcagaccagcccctcctttatgagcacagcatggcttgtcttcaagactttctttgcctctcttcttccagaaggccccccagccatcgcaaactgatggtgtttgtgctgtagctgttggaggctttgacaggaatggactggatcacctgactccagctagattgcctctcctggacatggcaatgatgagtttttaaaaaacagtgtggatgatgatatgcttttgtgagcaagcaaaagcagaaacgtgaagccgtgatacaaattggtgaacaaaaaatgcccaaggcttctcatgtctttattctgaagagctttaatatatactctatgtagtttaataagcactgtacgtagaaggccttaggtgttgcatgtctatgcttgaggaacttttccaaatgtgtgtgtctgcatgtgtgtttgtacatagaagtcatagatgcagaagtggttctgctggtacgatttgattcctgttggaatgtttaaattacactaagtgtactactttatataatcaatgaaattgctagacatgttttagcaggacttttctaggaaagacttatgtataattgctttttaaaatgcagtgctttactttaaactaaggggaactttgcggaggtgaaaacctttgctgggttttctgttcaataaagttttactatgaatgaccctgaaaaaaaaaaaaaaaaaaaaaaaaaaaaaatttttggggggtagggccctcgaaaaagagctttttaagaaccacttcgcgttgtgggagcgcgcgcggggcccccatatggtgttattggtgaacccgtgtggtcaaatagggtgtttcccaaagggaaaactcgggaacagagaacacagtgtgctgtgggattttcttcccaatttaaaaaaacgcccgcggggggaaacaccgaggggtgttccttgagaacacaaatacccaaagagtggggtcacaggagggccacaaaacaaggggggaccttattacacacggggggagtcccaacgggaaagcgcggaatgtcaaaatttatacccccgagcacttcggggggaaaagagaacgaagagagacagaggaaaaaagagagagggaaagagagacgagagaagaaagaaagaaggagggaaaggaaggagaggaggagaggggggaggagagaagagggagagcagggaagagcaagagaggcaaggaaagacaggagagcgagacggaaagagggaggcaggaggagagagagggcgaggggcggagagagggaggagaggaacaggggacacaagaagagagcagagggaagaagaggggagagcggggacgagagagaaagg

SEQ ID NO: 334202 - DNA, 2091 bp, Homo sapiens
tcgatttgaattcttgattttaatttaaacttagttttcatttgttcatactcaacccactcaaaatgagtgttttttcaaatctatgtataggcctgaagctgcccagcaggcattccaaggcctgggtcctggtttctccggttacacaccctatgggtggcttcagctttcctggttccagcagatatatgcacgacagtactacatgcaatatttagcagccactgctgcatcaggggcttttgttccaccaccaagtgcacaagagatacctgtggtctctgcacctgctccagcccctattcacaaccagtttccagctgaaaaccagcctgccaatcagaatgctgctcctcaagtggttgttaatcctggagccaatcaaaatttgcggatgaatgcacaaggtggccctattgtggaagaagatgatgaaataaatcgagattggttggattggacctattcagcagctacattttctgtttttctcagtatcctctacttctactcctccctgagcagattcctcatggtcatgggggccaccgttgttatgtacctgcatcacgttgggtggtttccatttagaccgaggccggttcagaacttcccaaatgatggtcctcctcctgacgttgtaaatcaggaccccaacaataacttacaggaaggcactgatcctgaaactgaagaccccaaccacctccctccagacagggatgtactagatggcgagcagaccagcccctcctttatgagcacagcatggcttgtcttcaagactttctttgcctctcttcttccagaaggccccccagccatcgcaaactgatggtgtttgtgctgtagctgttggaggctttgacaggaatggactggatcacctgactccagctagattgcctctcctggacatggcaatgatgagtttttaaaaaacagtgtggatgatgatatgcttttgtgagcaagcaaaagcagaaacgtgaagccgtgatacaaattggtgaacaaaaaatgcccaaggcttctcatgtctttattctgaagagctttaatatatactctatgtagtttaataagcactgtacgtagaaggccttaggtgttgcatgtctatgcttgaggaacttttccaaatgtgtgtgtctgcatgtgtgtttgtacatagaagtcatagatgcagaagtggttctgctggtacgatttgattcctgttggaatgtttaaattacactaagtgtactactttatataatcaatgaaattgctagacatgttttagcaggacttttctaggaaagacttatgtataattgctttttaaaatgcagtgctttactttaaactaaggggaactttgcggaggtgaaaacctttgctgggttttctgttcaataaagttttactatgaatgaccctgaaaaaaaaaaaaaaaaaaaaaaaaaaaaaatttttggggggtagggccctcgaaaaagagctttttaagaaccacttcgcgttgtgggagcgcgcgcggggcccccatatggtgttattggtgaacccgtgtggtcaaatagggtgtttcccaaagggaaaactcgggaacagagaacacagtgtgctgtgggattttcttcccaatttaaaaaaacgcccgcggggggaaacaccgaggggtgttccttgagaacacaaatacccaaagagtggggtcacaggagggccacaaaacaaggggggaccttattacacacggggggagtcccaacgggaaagcgcggaatgtcaaaatttatacccccgagcacttcggggggaaaagagaacgaagagagacagaggaaaaaagagagagggaaagagagacgagagaagaaagaaagaaggagggaaaggaaggagaggaggagaggggggaggagagaagagggagagcagggaagagcaagagaggcaaggaaagacaggagagcgagacggaaagagggaggcaggaggagagagagggcgaggggcggagagagggaggagaggaacaggggacacaagaagagagcagagggaagaagaggggagagcggggacgagagagaaagg

SEQ ID NO: 334203 - DNA, 2071 bp, Homo sapiens
actggaagtactgagaaaccaggctctccacacatggctcctttgcctgtctccgaaccaaagctccctcaaggcctgaagctgcccagcaggcattccaaggcctgggtcctggtttctccggttacacaccctatgggtggcttcagctttcctggttccagcagatatatgcacgacagtactacatgcaatatttagcagccactgctgcatcaggggcttttgttccaccaccaagtgcacaagagatacctgtggtctctgcacctgctccagcccctattcacaaccagtttccagctgaaaaccagcctgccaatcagaatgctgctcctcaagtggttgttaatcctggagccaatcaaaatttgcggatgaatgcacaaggtggccctattgtggaagaagatgatgaaataaatcgagattggttggattggacctattcagcagctacattttctgtttttctcagtatcctctacttctactcctccctgagcagattcctcatggtcatgggggccaccgttgttatgtacctgcatcacgttgggtggtttccatttagaccgaggccggttcagaacttcccaaatgatggtcctcctcctgacgttgtaaatcaggaccccaacaataacttacaggaaggcactgatcctgaaactgaagaccccaaccacctccctccagacagggatgtactagatggcgagcagaccagcccctcctttatgagcacagcatggcttgtcttcaagactttctttgcctctcttcttccagaaggccccccagccatcgcaaactgatggtgtttgtgctgtagctgttggaggctttgacaggaatggactggatcacctgactccagctagattgcctctcctggacatggcaatgatgagtttttaaaaaacagtgtggatgatgatatgcttttgtgagcaagcaaaagcagaaacgtgaagccgtgatacaaattggtgaacaaaaaatgcccaaggcttctcatgtctttattctgaagagctttaatatatactctatgtagtttaataagcactgtacgtagaaggccttaggtgttgcatgtctatgcttgaggaacttttccaaatgtgtgtgtctgcatgtgtgtttgtacatagaagtcatagatgcagaagtggttctgctggtacgatttgattcctgttggaatgtttaaattacactaagtgtactactttatataatcaatgaaattgctagacatgttttagcaggacttttctaggaaagacttatgtataattgctttttaaaatgcagtgctttactttaaactaaggggaactttgcggaggtgaaaacctttgctgggttttctgttcaataaagttttactatgaatgaccctgaaaaaaaaaaaaaaaaaaaaaaaaaaaaaatttttggggggtagggccctcgaaaaagagctttttaagaaccacttcgcgttgtgggagcgcgcgcggggcccccatatggtgttattggtgaacccgtgtggtcaaatagggtgtttcccaaagggaaaactcgggaacagagaacacagtgtgctgtgggattttcttcccaatttaaaaaaacgcccgcggggggaaacaccgaggggtgttccttgagaacacaaatacccaaagagtggggtcacaggagggccacaaaacaaggggggaccttattacacacggggggagtcccaacgggaaagcgcggaatgtcaaaatttatacccccgagcacttcggggggaaaagagaacgaagagagacagaggaaaaaagagagagggaaagagagacgagagaagaaagaaagaaggagggaaaggaaggagaggaggagaggggggaggagagaagagggagagcagggaagagcaagagaggcaaggaaagacaggagagcgagacggaaagagggaggcaggaggagagagagggcgaggggcggagagagggaggagaggaacaggggacacaagaagagagcagagggaagaagaggggagagcggggacgagagagaaagg

SEQ ID NO: 334204 - DNA, 1991 bp, Homo sapiens
ggctgtggtcgttctagagtatccccctggagcgttttctccggttacacaccctatgggtggcttcagctttcctggttccagcagatatatgcacgacagtactacatgcaatatttagcagccactgctgcatcaggggcttttgttccaccaccaagtgcacaagagatacctgtggtctctgcacctgctccagcccctattcacaaccagtttccagctgaaaaccagcctgccaatcagaatgctgctcctcaagtggttgttaatcctggagccaatcaaaatttgcggatgaatgcacaaggtggccctattgtggaagaagatgatgaaataaatcgagattggttggattggacctattcagcagctacattttctgtttttctcagtatcctctacttctactcctccctgagcagattcctcatggtcatgggggccaccgttgttatgtacctgcatcacgttgggtggtttccatttagaccgaggccggttcagaacttcccaaatgatggtcctcctcctgacgttgtaaatcaggaccccaacaataacttacaggaaggcactgatcctgaaactgaagaccccaaccacctccctccagacagggatgtactagatggcgagcagaccagcccctcctttatgagcacagcatggcttgtcttcaagactttctttgcctctcttcttccagaaggccccccagccatcgcaaactgatggtgtttgtgctgtagctgttggaggctttgacaggaatggactggatcacctgactccagctagattgcctctcctggacatggcaatgatgagtttttaaaaaacagtgtggatgatgatatgcttttgtgagcaagcaaaagcagaaacgtgaagccgtgatacaaattggtgaacaaaaaatgcccaaggcttctcatgtctttattctgaagagctttaatatatactctatgtagtttaataagcactgtacgtagaaggccttaggtgttgcatgtctatgcttgaggaacttttccaaatgtgtgtgtctgcatgtgtgtttgtacatagaagtcatagatgcagaagtggttctgctggtacgatttgattcctgttggaatgtttaaattacactaagtgtactactttatataatcaatgaaattgctagacatgttttagcaggacttttctaggaaagacttatgtataattgctttttaaaatgcagtgctttactttaaactaaggggaactttgcggaggtgaaaacctttgctgggttttctgttcaataaagttttactatgaatgaccctgaaaaaaaaaaaaaaaaaaaaaaaaaaaaaatttttggggggtagggccctcgaaaaagagctttttaagaaccacttcgcgttgtgggagcgcgcgcggggcccccatatggtgttattggtgaacccgtgtggtcaaatagggtgtttcccaaagggaaaactcgggaacagagaacacagtgtgctgtgggattttcttcccaatttaaaaaaacgcccgcggggggaaacaccgaggggtgttccttgagaacacaaatacccaaagagtggggtcacaggagggccacaaaacaaggggggaccttattacacacggggggagtcccaacgggaaagcgcggaatgtcaaaatttatacccccgagcacttcggggggaaaagagaacgaagagagacagaggaaaaaagagagagggaaagagagacgagagaagaaagaaagaaggagggaaaggaaggagaggaggagaggggggaggagagaagagggagagcagggaagagcaagagaggcaaggaaagacaggagagcgagacggaaagagggaggcaggaggagagagagggcgaggggcggagagagggaggagaggaacaggggacacaagaagagagcagagggaagaagaggggagagcggggacgagagagaaagg

SEQ ID NO: 334205 - DNA, 2556 bp, Homo sapiens
ccacccgagctgggggcctcgcaggtctcagaccaagctccccgcgcggcctgcagcgcacccaaacatggccaccgaacccgggttcccggggcacagccgcgcctctgggtgacgcagacgcggcgggttgcatcagcccgtgcccacgtgctcggtccgccctctgccacccggatccggacgccgattgggccacgttgggagagtgcctccgcctcagccaatgggcggcagccacagagcgttctgtccgcagagccaggcgcggggcttctataaaaggcgcccgaagcgggggcgcgggccccagagacgtgaactgtcgttgcagagattgcgggcggctgagacgccgcctgcctggcacctaggagcgcagcggagccccgacaccgccgccgccgccatggagtccgagaccgaacccgagcccgtcacgctcctggtgaagagccccaaccagcgccaccgcgacttggagctgagtggcgaccgcggctggagtgtgggccacctcaaggcccacctgagccgcgtctaccccgagcgtccgcgtccagaggaccagaggttaatttattctgggaagctgttgttggatcaccaatgtctcagggacttgcttccaaagcaggaaaaacggcatgttttgcatctggtgtgcaatgtgaagagtccttcaaaaatgccagaaatcaacgccaaggtggctgaatccacagaggagcctgctggttctaatcggggacagtatcctgaggattcctcaagtgatggtttaaggcaaagggaagttcttcggaacctttcttcccctggatgggaaaacatctcaaggcctgaagctgcccagcaggcattccaaggcctgggtcctggtttctccggttacacaccctatgggtggcttcagctttcctggttccagcagatatatgcacgacagtactacatgcaatatatcctctacttctactcctccctgagcagattcctcatggtcatgggggccaccgttgttatgtacctgcatcacgttgggtggtttccatttagaccgaggccggttcagaacttcccaaatgatggtcctcctcctgacgttgtaaatcaggaccccaacaataacttacaggaaggcactgatcctgaaactgaagaccccaaccacctccctccagacagggatgtactagatggcgagcagaccagcccctcctttatgagcacagcatggcttgtcttcaagactttctttgcctctcttcttccagaaggccccccagccatcgcaaactgatggtgtttgtgctgtagctgttggaggctttgacaggaatggactggatcacctgactccagctagattgcctctcctggacatggcaatgatgagtttttaaaaaacagtgtggatgatgatatgcttttgtgagcaagcaaaagcagaaacgtgaagccgtgatacaaattggtgaacaaaaaatgcccaaggcttctcatgtctttattctgaagagctttaatatatactctatgtagtttaataagcactgtacgtagaaggccttaggtgttgcatgtctatgcttgaggaacttttccaaatgtgtgtgtctgcatgtgtgtttgtacatagaagtcatagatgcagaagtggttctgctggtacgatttgattcctgttggaatgtttaaattacactaagtgtactactttatataatcaatgaaattgctagacatgttttagcaggacttttctaggaaagacttatgtataattgctttttaaaatgcagtgctttactttaaactaaggggaactttgcggaggtgaaaacctttgctgggttttctgttcaataaagttttactatgaatgaccctgaaaaaaaaaaaaaaaaaaaaaaaaaaaaaatttttggggggtagggccctcgaaaaagagctttttaagaaccacttcgcgttgtgggagcgcgcgcggggcccccatatggtgttattggtgaacccgtgtggtcaaatagggtgtttcccaaagggaaaactcgggaacagagaacacagtgtgctgtgggattttcttcccaatttaaaaaaacgcccgcggggggaaacaccgaggggtgttccttgagaacacaaatacccaaagagtggggtcacaggagggccacaaaacaaggggggaccttattacacacggggggagtcccaacgggaaagcgcggaatgtcaaaatttatacccccgagcacttcggggggaaaagagaacgaagagagacagaggaaaaaagagagagggaaagagagacgagagaagaaagaaagaaggagggaaaggaaggagaggaggagaggggggaggagagaagagggagagcagggaagagcaagagaggcaaggaaagacaggagagcgagacggaaagagggaggcaggaggagagagagggcgaggggcggagagagggaggagaggaacaggggacacaagaagagagcagagggaagaagaggggagagcggggacgagagagaaagg

SEQ ID NO: 334206 - DNA, 3430 bp, Homo sapiens
ccacccgagctgggggcctcgcaggtctcagaccaagctccccgcgcggcctgcagcgcacccaaacatggccaccgaacccgggttcccggggcacagccgcgcctctgggtgacgcagacgcggcgggttgcatcagcccgtgcccacgtgctcggtccgccctctgccacccggatccggacgccgattgggccacgttgggagagtgcctccgcctcagccaatgggcggcagccacagagcgttctgtccgcagagccaggcgcggggcttctataaaaggcgcccgaagcgggggcgcgggccccagagacgtgaactgtcgttgcagagattgcgggcggctgagacgccgcctgcctggcacctaggagcgcagcggagccccgacaccgccgccgccgccatggagtccgagaccgaacccgagcccgtcacgctcctggtgaagagccccaaccagcgccaccgcgacttggagctgagtggcgaccgcggctggagtgtgggccacctcaaggcccacctgagccgcgtctaccccgagcgtccgcgtccagaggaccagaggttaatttattctgggaagctgttgttggatcaccaatgtctcagggacttgcttccaaaggcaggagaattgcttgaactggggaggcagaggttgcagtgagccaagatcgcaccactgcactccagcctgggtgacagagcaagaccctgtcttagaataaatacataataaatagtatgtattctggcactttcgatacaaggaattcatggcttggttgtatggtcccaagaacatatcaatcctgtgttaatataagaatattatcttgtcctctagataagctaccttaccttccaggctcacaaaccacaagtatgtagccatactgaggcatggaacagaaaactgtattgttttgaatgagaacacatttgcctttatcaggccacagctgccttccagggtaaagtcaggcactgactgttagcatggccctgaaaggcaagggaaccttcacatacctgacatttggttttagctgtggcccgaagcagtagttctcaactgggggtggttttgtaccctctctccccaggggacatttggcaatgtgtagctatttttggttgtcacatctaggggaagtggtcctgctggcgtctagttagtagaagcaagagtgctgctgaattttctacaatgcacaggacaactcccacagtaaatatttggctcaatatgtcactagtgccaaagctgagaaagcctggcctagagtgatgggtcttcgtggttgaaactaaaagaagaaattttcctgtatagtaaaaatggatttttattttagcttttaaaaataaaaaaggaataattagaatataatgaacactcaaatatccacaattagtcattgttaatattttattatatttaagacttgggatttaattggtttcttcaaataaaacgtttagttaatattttctgtagtctctagaatcatatatttaaaagaccaaatgtaggttgtcattatgttatatataattatagctttgtaggtatatgcattctccccgctctgttcaggttttcaagggtaaggtttagttcatataaataagcatttattgagtgcatactatgtgccaggtgctgtttatatggctgggtgtgcaatgatgaataaaacacagtccctgccttcaaggaccttacagactggtgagaatgtctgggagacagtgtgatcaaatgcctctgtagatgggtcttgcagtgagcttatcagggtgctgctgtgattagaggtggggagccttggattcttgagtaagtctcactgtgacatcagctaagatggacttttatgtgcttcctttgaaggcatcacgttgggtggtttccatttagaccgaggccggttcagaacttcccaaatgatggtcctcctcctgacgttgtaaatcaggaccccaacaataacttacaggaaggcactgatcctgaaactgaagaccccaaccacctccctccagacagggatgtactagatggcgagcagaccagcccctcctttatgagcacagcatggcttgtcttcaagactttctttgcctctcttcttccagaaggccccccagccatcgcaaactgatggtgtttgtgctgtagctgttggaggctttgacaggaatggactggatcacctgactccagctagattgcctctcctggacatggcaatgatgagtttttaaaaaacagtgtggatgatgatatgcttttgtgagcaagcaaaagcagaaacgtgaagccgtgatacaaattggtgaacaaaaaatgcccaaggcttctcatgtctttattctgaagagctttaatatatactctatgtagtttaataagcactgtacgtagaaggccttaggtgttgcatgtctatgcttgaggaacttttccaaatgtgtgtgtctgcatgtgtgtttgtacatagaagtcatagatgcagaagtggttctgctggtacgatttgattcctgttggaatgtttaaattacactaagtgtactactttatataatcaatgaaattgctagacatgttttagcaggacttttctaggaaagacttatgtataattgctttttaaaatgcagtgctttactttaaactaaggggaactttgcggaggtgaaaacctttgctgggttttctgttcaataaagttttactatgaatgaccctgaaaaaaaaaaaaaaaaaaaaaaaaaaaaaatttttggggggtagggccctcgaaaaagagctttttaagaaccacttcgcgttgtgggagcgcgcgcggggcccccatatggtgttattggtgaacccgtgtggtcaaatagggtgtttcccaaagggaaaactcgggaacagagaacacagtgtgctgtgggattttcttcccaatttaaaaaaacgcccgcggggggaaacaccgaggggtgttccttgagaacacaaatacccaaagagtggggtcacaggagggccacaaaacaaggggggaccttattacacacggggggagtcccaacgggaaagcgcggaatgtcaaaatttatacccccgagcacttcggggggaaaagagaacgaagagagacagaggaaaaaagagagagggaaagagagacgagagaagaaagaaagaaggagggaaaggaaggagaggaggagaggggggaggagagaagagggagagcagggaagagcaagagaggcaaggaaagacaggagagcgagacggaaagagggaggcaggaggagagagagggcgaggggcggagagagggaggagaggaacaggggacacaagaagagagcagagggaagaagaggggagagcggggacgagagagaaagg

SEQ ID NO: 334207 - DNA, 2825 bp, Homo sapiens
cgggcctgtaatttacttgggtggctaaggcaggagaattgcttgaactggggaggcagaggttgcagtgagccaagatcgcaccactgcactccagcctgggtgacagagcaagaccctgtcttagaataaatacataataaatagtatgtattctggcactttcgatacaaggaattcatggcttggttgtatggtcccaagaacatatcaatcctgtgttaatataagaatattatcttgtcctctagataagctaccttaccttccaggctcacaaaccacaagtatgtagccatactgaggcatggaacagaaaactgtattgttttgaatgagaacacatttgcctttatcaggccacagctgccttccagggtaaagtcaggcactgactgttagcatggccctgaaaggcaagggaaccttcacatacctgacatttggttttagctgtggcccgaagcagtagttctcaactgggggtggttttgtaccctctctccccaggggacatttggcaatgtgtagctatttttggttgtcacatctaggggaagtggtcctgctggcgtctagttagtagaagcaagagtgctgctgaattttctacaatgcacaggacaactcccacagtaaatatttggctcaatatgtcactagtgccaaagctgagaaagcctggcctagagtgatgggtcttcgtggttgaaactaaaagaagaaattttcctgtatagtaaaaatggatttttattttagcttttaaaaataaaaaaggaataattagaatataatgaacactcaaatatccacaattagtcattgttaatattttattatatttaagacttgggatttaattggtttcttcaaataaaacgtttagttaatattttctgtagtctctagaatcatatatttaaaagaccaaatgtaggttgtcattatgttatatataattatagctttgtaggtatatgcattctccccgctctgttcaggttttcaagggtaaggtttagttcatataaataagcatttattgagtgcatactatgtgccaggtgctgtttatatggctgggtgtgcaatgatgaataaaacacagtccctgccttcaaggaccttacagactggtgagaatgtctgggagacagtgtgatcaaatgcctctgtagatgggtcttgcagtgagcttatcagggtgctgctgtgattagaggtggggagccttggattcttgagtaagtctcactgtgacatcagctaagatggacttttatgtgcttcctttgaaggcatcacgttgggtggtttccatttagaccgaggccggttcagaacttcccaaatgatggtcctcctcctgacgttgtaaatcaggaccccaacaataacttacaggaaggcactgatcctgaaactgaagaccccaaccacctccctccagacagggatgtactagatggcgagcagaccagcccctcctttatgagcacagcatggcttgtcttcaagactttctttgcctctcttcttccagaaggccccccagccatcgcaaactgatggtgtttgtgctgtagctgttggaggctttgacaggaatggactggatcacctgactccagctagattgcctctcctggacatggcaatgatgagtttttaaaaaacagtgtggatgatgatatgcttttgtgagcaagcaaaagcagaaacgtgaagccgtgatacaaattggtgaacaaaaaatgcccaaggcttctcatgtctttattctgaagagctttaatatatactctatgtagtttaataagcactgtacgtagaaggccttaggtgttgcatgtctatgcttgaggaacttttccaaatgtgtgtgtctgcatgtgtgtttgtacatagaagtcatagatgcagaagtggttctgctggtacgatttgattcctgttggaatgtttaaattacactaagtgtactactttatataatcaatgaaattgctagacatgttttagcaggacttttctaggaaagacttatgtataattgctttttaaaatgcagtgctttactttaaactaaggggaactttgcggaggtgaaaacctttgctgggttttctgttcaataaagttttactatgaatgaccctgaaaaaaaaaaaaaaaaaaaaaaaaaaaaaatttttggggggtagggccctcgaaaaagagctttttaagaaccacttcgcgttgtgggagcgcgcgcggggcccccatatggtgttattggtgaacccgtgtggtcaaatagggtgtttcccaaagggaaaactcgggaacagagaacacagtgtgctgtgggattttcttcccaatttaaaaaaacgcccgcggggggaaacaccgaggggtgttccttgagaacacaaatacccaaagagtggggtcacaggagggccacaaaacaaggggggaccttattacacacggggggagtcccaacgggaaagcgcggaatgtcaaaatttatacccccgagcacttcggggggaaaagagaacgaagagagacagaggaaaaaagagagagggaaagagagacgagagaagaaagaaagaaggagggaaaggaaggagaggaggagaggggggaggagagaagagggagagcagggaagagcaagagaggcaaggaaagacaggagagcgagacggaaagagggaggcaggaggagagagagggcgaggggcggagagagggaggagaggaacaggggacacaagaagagagcagagggaagaagaggggagagcggggacgagagagaaagg

SEQ ID NO: 334208 - DNA, 1654 bp, Homo sapiens
ccacccgagctgggggcctcgcaggtctcagaccaagctccccgcgcggcctgcagcgcacccaaacatggccaccgaacccgggttcccggggcacagccgcgcctctgggtgacgcagacgcggcgggttgcatcagcccgtgcccacgtgctcggtccgccctctgccacccggatccggacgccgattgggccacgttgggagagtgcctccgcctcagccaatgggcggcagccacagagcgttctgtccgcagagccaggcgcggggcttctataaaaggcgcccgaagcgggggcgcgggccccagagacgtgaactgtcgttgcagagattgcgggcggctgagacgccgcctgcctggcacctaggagcgcagcggagccccgacaccgccgccgccgccatggagtccgagaccgaacccgagcccgtcacgctcctggtgaagagccccaaccagcgccaccgcgacttggagctgagtggcgaccgcggctggagtgtgggccacctcaaggcccacctgagccgcgtctaccccgagcgtccgcgtccagaggaccagaggttaatttattctgggaagctgttgttggatcaccaatgtctcagggacttgcttccaaagcaggaaaaacggcatgttttgcatctggtgtgcaatgtgaagagtccttcaaaaatgccagaaatcaacgccaaggtggctgaatccacagaggagcctgctggttctaatcggggacagtatcctgaggattcctcaagtgatggtttaaggcaaagggaagttcttcggaacctttcttcccctggatgggaaaacatctcaaggcctgaagctgcccagcaggcattccaaggcctgggtcctggtttctccggttacacaccctatgggtggcttcagctttcctggttccagcagatatatgcacgacagtactacatgcaatatttagcagccactgctgcatcaggggcttttgttccaccaccaagtgcacaagagatacctgtggtctctgcacctgctccagcccctattcacaaccagtttccagctgaaaaccagcctgccaatcagaatgctgctcctcaagtggttgttaatcctggagccaatcaaaatttgcggatgaatgcacaaggtggccctattgtggaagaagatgatgaaataaatcgagattggttggattggacctattcagcagctacattttctgtttttctcagtatcctctacttctactcctccctgagcagattcctcatggtcatgggggccaccgttgttatgtacctgcatcacgttgggtggtttccatttagaccgaggccggttcagaacttcccaaatgatggtcctcctcctgacgttgtaaatcaggaccccaacaataacttacaggcgcaagatgggagcgcccgaatctggcttggcggaatatctctttgacaagcacaccctgggagacagtgataatgaaagctaagcctcgggctaatttccccatagccgtggggtgacttccctggtcaccaaggcagtgcatgcatgttggggtttcctttaccttttctataagttgtaccaaaacatccacttaagttctttgatttgtaccattccttcaaataaaga

SEQ ID NO: 334209 - DNA, 1247 bp, Homo sapiens
ccacccgagctgggggcctcgcaggtctcagaccaagctccccgcgcggcctgcagcgcacccaaacatggccaccgaacccgggttcccggggcacagccgcgcctctgggtgacgcagacgcggcgggttgcatcagcccgtgcccacgtgctcggtccgccctctgccacccggatccggacgccgattgggccacgttgggagagtgcctccgcctcagccaatgggcggcagccacagagcgttctgtccgcagagccaggcgcggggcttctataaaaggcgcccgaagcgggggcgcgggccccagagacgtgaactgtcgttgcagagattgcgggcggctgagacgccgcctgcctggcacctaggagcgcagcggagccccgacaccgccgccgccgccatggagtccgagaccgaacccgagcccgtcacgctcctggtgaagagccccaaccagcgccaccgcgacttggagctgagtggcgaccgcggctggagtgtgggccacctcaaggcccacctgagccgcgtctaccccgagcgtccgcgtccagaggaccagaggttaatttattctgggaagctgttgttggatcaccaatgtctcagggacttgcttccaaagcaggaaaaacggcatgttttgcatctggtgtgcaatgtgaagagtccttcaaaaatgccagaaatcaacgccaaggtggctgaatccacagaggagcctgctggttctaatcggggacagtatcctgaggattcctcaagtgatggtttaaggcaaagggaagttcttcggaacctttcttcccctggatgggaaaacatctcaaggcctgaagctgcccagcaggcattccaaggcctgggtcctggtttctccggttacacaccctatgggtggcttcagctttcctggttccagcagatatatgcacgacagtactacatgcaatatttagcagccactgctgcatcaggggcttttgttccaccaccaagtgcacaagagatacctgtggtctctgcacctgctccagcccctattcacaaccagtttccagctgaaaaccagcctgccaatcagaatgctgctcctcaagtggttgttaatcctggagccaatcaaaatttgcggatgaatgcacaaggtggccctattgtggaagaagatgatgaaataatccgagatgcgggcagcgccccgcgctcttatgacaatacgcaacatcgatgatact

SEQ ID NO: 334210 - DNA, 1400 bp, Homo sapiens
aagcaggctgtacggtcggaagcgtaagatcaggatgtactagatggcgagcagaccagcccctcctttatgagcacagcatggcttgtcttcaagactttctttgcctctcttcttccagaaggccccccagccatcgcaaactgatggtgtttgtgctgtagctgttggaggctttgacaggaatggactggatcacctgactccagctagattgcctctcctggacatggcaatgatgagtttttaaaaaacagtgtggatgatgatatgcttttgtgagcaagcaaaagcagaaacgtgaagccgtgatacaaattggtgaacaaaaaatgcccaaggcttctcatgtctttattctgaagagctttaatatatactctatgtagtttaataagcactgtacgtagaaggccttaggtgttgcatgtctatgcttgaggaacttttccaaatgtgtgtgtctgcatgtgtgtttgtacatagaagtcatagatgcagaagtggttctgctggtacgatttgattcctgttggaatgtttaaattacactaagtgtactactttatataatcaatgaaattgctagacatgttttagcaggacttttctaggaaagacttatgtataattgctttttaaaatgcagtgctttactttaaactaaggggaactttgcggaggtgaaaacctttgctgggttttctgttcaataaagttttactatgaatgaccctgaaaaaaaaaaaaaaaaaaaaaaaaaaaaaatttttggggggtagggccctcgaaaaagagctttttaagaaccacttcgcgttgtgggagcgcgcgcggggcccccatatggtgttattggtgaacccgtgtggtcaaatagggtgtttcccaaagggaaaactcgggaacagagaacacagtgtgctgtgggattttcttcccaatttaaaaaaacgcccgcggggggaaacaccgaggggtgttccttgagaacacaaatacccaaagagtggggtcacaggagggccacaaaacaaggggggaccttattacacacggggggagtcccaacgggaaagcgcggaatgtcaaaatttatacccccgagcacttcggggggaaaagagaacgaagagagacagaggaaaaaagagagagggaaagagagacgagagaagaaagaaagaaggagggaaaggaaggagaggaggagaggggggaggagagaagagggagagcagggaagagcaagagaggcaaggaaagacaggagagcgagacggaaagagggaggcaggaggagagagagggcgaggggcggagagagggaggagaggaacaggggacacaagaagagagcagagggaagaagaggggagagcggggacgagagagaaagg

SEQ ID NO: 334211 - DNA, 1241 bp, Homo sapiens
  misc_feature (1138)..(1138): n is a, c, g, or t
ccacccgagctgggggcctcgcaggtctcagaccaagctccccgcgcggcctgcagcgcacccaaacatggccaccgaacccgggttcccggggcacagccgcgcctctgggtgacgcagacgcggcgggttgcatcagcccgtgcccacgtgctcggtccgccctctgccacccggatccggacgccgattgggccacgttgggagagtgcctccgcctcagccaatgggcggcagccacagagcgttctgtccgcagagccaggcgcggggcttctataaaaggcgcccgaagcgggggcgcgggccccagagacgtgaactgtcgttgcagagattgcgggcggctgagacgccgcctgcctggcacctaggagcgcagcggagccccgacaccgccgccgccgccatggagtccgagaccgaacccgagcccgtcacgctcctggtgaagagccccaaccagcgccaccgcgacttggagctgagtggcgaccgcggctggagtgtgggccacctcaaggcccacctgagccgcgtctaccccgagcgtccgcgtccagaggaccagaggttaatttattctgggaagctgttgttggatcaccaatgtctcagggacttgcttccaaagcaggaaaaacggcatgttttgcatctggtgtgcaatgtgaagagtccttcaaaaatgccagaaatcaacgccaaggtggctgaatccacagaggagcctgctggttctaatcggggacagtatcctgaggattcctcaagtgatggtttaaggcaaagggaagttcttcggaacctttcttcccctggatgggaaaacatctcaaggcctgaagctgcccagcaggcattccaaggcctgggtcctggtttctccggttacacaccctatgggtggcttcagctttcctggttccagcagatatatgcacgacagtactacatgcaatatttagcagccactgctgcatcaggggcttttgttccaccaccaagtgcacaagagatacctgtggtctctgcacctgctccagcccctattcacaaccagtttccagctgaaaaccagcctgccaatcagaatgctgctcctcaagtggttgttaatcctggagccaccaaattnggggtgatgcccagggccatttggcaaaaggtgcaaaaccgcaagtcggtgagcttccggactactggggcacggtccacaacccggagagaccgatggcccg

SEQ ID NO: 334212 - DNA, 1332 bp, Homo sapiens
agaaatccccgtgtgggggaatgcagcagctctgccatcctcacgactgtcggtctgtgcaatcttcctggactgctgagaggaccgcccgctattaaagctatccggatcatagttttaaatggactaccgtgtttgaacacctgaagtgccaacgtacgtctgcggacgagtggatgaaagatggatctctgtaagcatggtgtcttcctgtcctgccaggcgggcttccgtggtcatctcgtgccctgcagacaggctcttggcacagcatatgatccatgagttgacgcatctcgagctgcggtaccctctatgtagtttaataagcactgtacgtagaaggccttaggtgttgcatgtctatgcttgaggaacttttccaaatgtgtgtgtctgcatgtgtgtttgtacatagaagtcatagatgcagaagtggttctgctggtacgatttgattcctgttggaatgtttaaattacactaagtgtactactttatataatcaatgaaattgctagacatgttttagcaggacttttctaggaaagacttatgtataattgctttttaaaatgcagtgctttactttaaactaaggggaactttgcggaggtgaaaacctttgctgggttttctgttcaataaagttttactatgaatgaccctgaaaaaaaaaaaaaaaaaaaaaaaaaaaaaatttttggggggtagggccctcgaaaaagagctttttaagaaccacttcgcgttgtgggagcgcgcgcggggcccccatatggtgttattggtgaacccgtgtggtcaaatagggtgtttcccaaagggaaaactcgggaacagagaacacagtgtgctgtgggattttcttcccaatttaaaaaaacgcccgcggggggaaacaccgaggggtgttccttgagaacacaaatacccaaagagtggggtcacaggagggccacaaaacaaggggggaccttattacacacggggggagtcccaacgggaaagcgcggaatgtcaaaatttatacccccgagcacttcggggggaaaagagaacgaagagagacagaggaaaaaagagagagggaaagagagacgagagaagaaagaaagaaggagggaaaggaaggagaggaggagaggggggaggagagaagagggagagcagggaagagcaagagaggcaaggaaagacaggagagcgagacggaaagagggaggcaggaggagagagagggcgaggggcggagagagggaggagaggaacaggggacacaagaagagagcagagggaagaagaggggagagcggggacgagagagaaagg

SEQ ID NO: 334213 - DNA, 981 bp, Homo sapiens
ctcggtacccgacggcttcaacggaacttttccaaatgtgtgtgtctgcatgtgtgtttgtacatagaagtcatagatgcagaagtggttctgctggtacgatttgattcctgttggaatgtttaaattacactaagtgtactactttatataatcaatgaaattgctagacatgttttagcaggacttttctaggaaagacttatgtataattgctttttaaaatgcagtgctttactttaaactaaggggaactttgcggaggtgaaaacctttgctgggttttctgttcaataaagttttactatgaatgaccctgaaaaaaaaaaaaaaaaaaaaaaaaaaaaaatttttggggggtagggccctcgaaaaagagctttttaagaaccacttcgcgttgtgggagcgcgcgcggggcccccatatggtgttattggtgaacccgtgtggtcaaatagggtgtttcccaaagggaaaactcgggaacagagaacacagtgtgctgtgggattttcttcccaatttaaaaaaacgcccgcggggggaaacaccgaggggtgttccttgagaacacaaatacccaaagagtggggtcacaggagggccacaaaacaaggggggaccttattacacacggggggagtcccaacgggaaagcgcggaatgtcaaaatttatacccccgagcacttcggggggaaaagagaacgaagagagacagaggaaaaaagagagagggaaagagagacgagagaagaaagaaagaaggagggaaaggaaggagaggaggagaggggggaggagagaagagggagagcagggaagagcaagagaggcaaggaaagacaggagagcgagacggaaagagggaggcaggaggagagagagggcgaggggcggagagagggaggagaggaacaggggacacaagaagagagcagagggaagaagaggggagagcggggacgagagagaaagg

SEQ ID NO: 334214 - DNA, 1614 bp, Homo sapiens
ccacccgagctgggggcctcgcaggtctcagaccaagctccccgcgcggcctgcagcgcacccaaacatggccaccgaacccgggttcccggggcacagccgcgcctctgggtgacgcagacgcggcgggttgcatcagcccgtgcccacgtgctcggtccgccctctgccacccggatccggacgccgattgggccacgttgggagagtgcctccgcctcagccaatgggcggcagccacagagcgttctgtccgcagagccaggcgcggggcttctataaaaggcgcccgaagcgggggcgcgggccccagagacgtgaactgtcgttgcagagattgcgggcggctgagacgccgcctgcctggcacctaggagcgcagcggagccccgacaccgccgccgccgccatggagtccgagaccgaacccgagcccgtcacgctcctggtgaagagccccaaccagcgccaccgcgacttggagctgagtggcgaccgcggctggagtgtgggccacctcaaggcccacctgagccgcgtctaccccgagcgtccgcgtccagaggaccagaggttaatttattctgggaagctgttgttggatcaccaatgtctcagggacttgcttccaaagcaggaaaaacggcatgttttgcatctggtgtgcaatgtgaagagtccttcaaaaatgccagaaatcaacgccaagatgcagaagtggttctgctggtacgatttgattcctgttggaatgtttaaattacactaagtgtactactttatataatcaatgaaattgctagacatgttttagcaggacttttctaggaaagacttatgtataattgctttttaaaatgcagtgctttactttaaactaaggggaactttgcggaggtgaaaacctttgctgggttttctgttcaataaagttttactatgaatgaccctgaaaaaaaaaaaaaaaaaaaaaaaaaaaaaatttttggggggtagggccctcgaaaaagagctttttaagaaccacttcgcgttgtgggagcgcgcgcggggcccccatatggtgttattggtgaacccgtgtggtcaaatagggtgtttcccaaagggaaaactcgggaacagagaacacagtgtgctgtgggattttcttcccaatttaaaaaaacgcccgcggggggaaacaccgaggggtgttccttgagaacacaaatacccaaagagtggggtcacaggagggccacaaaacaaggggggaccttattacacacggggggagtcccaacgggaaagcgcggaatgtcaaaatttatacccccgagcacttcggggggaaaagagaacgaagagagacagaggaaaaaagagagagggaaagagagacgagagaagaaagaaagaaggagggaaaggaaggagaggaggagaggggggaggagagaagagggagagcagggaagagcaagagaggcaaggaaagacaggagagcgagacggaaagagggaggcaggaggagagagagggcgaggggcggagagagggaggagaggaacaggggacacaagaagagagcagagggaagaagaggggagagcggggacgagagagaaagg

SEQ ID NO: 334215 - DNA, 2277 bp, Homo sapiens
ccacccgagctgggggcctcgcaggtctcagaccaagctccccgcgcggcctgcagcgcacccaaacatggccaccgaacccgggttcccggggcacagccgcgcctctgggtgacgcagacgcggcgggttgcatcagcccgtgcccacgtgctcggtccgccctctgccacccggatccggacgccgattgggccacgttgggagagtgcctccgcctcagccaatgggcggcagccacagagcgttctgtccgcagagccaggcgcggggcttctataaaaggcgcccgaagcgggggcgcgggccccagagacgtgaactgtcgttgcagagattgcgggcggctgagacgccgcctgcctggcacctaggagcgcagcggagccccgacaccgccgccgccgccatggagtccgagaccgaacccgagcccgtcacgctcctggtgaagagccccaaccagcgccaccgcgacttggagctgagtggcgaccgcggctggagtgtgggccacctcaaggcccacctgagccgcgtctaccccgagcgtccgcgtccagaggaccagaggttaatttattctgggaagctgttgttggatcaccaatgtctcagggacttgcttccaaagcaggaaaaacggcatgttttgcatctggtgtgcaatgtgaagagtccttcaaaaatgccagaaatcaacgccaaggtgtctgcctcttcatgatggtaacaatttgtatcattcagactttcaggggagtaataaaagaagttggataaaacgtttattgagagactgtatggtgttattaccaagtaatattttgtttctttcctaggaattagaaactgtattatcaacacaaagtgatgagttaatagtagcagattgttccgttagtgctgtagtagaaaggtggagttacatattgcactatcttatgggatatgatttgatctatggttactgtgtatctagattactgaactaacactaattgggtttttattgaatttagcacatagcaagtttcttcaaaggagtcactaatttttataaagagtacaaaagtgaatatatttcctttggaaattttcattgtgattagttggataggaaaagatcagagtttttatcaagtgatctttaaagaattttttttttttaaagatggtctcgctgtgtggcccaggcttttctcaaactcctgagggcaagcgatcctcccacctcagcctcctgagtagctgggactacaggcatgtgccactagacctggctctaaagacatatatgacacacgaaaccatttatttttcatttcacaatgtttattcacatatatggtattagtattctaatgtagtgatgcactctaaatttgcattatatttcctagaacatctgaacagagcataggaaattccctattttgccattatcagttctaacaaaaatcttaaaagcactttatcatttcatttccctgcactgtaatttttttaaatgatcaaaaacagtatcataccaaggcttacttatattggaatactattttagaaagttgtgggctgggttgtatttataaatcttgttggtcagatgtctgcaatgagtaaatttagcaccattatcaggaagctttctcaccaatgacaacttcattggaagattttaatgaaagtgtagcatactctagggaaaaaatatgaatattttagcatctatgtattgaaaattatgttgaataaatgtcagactattttttacataacgttgcttctgtttaattttgtcacgttcagaggtggggggtaggagatgtaagcccttgacagcaaaataattccttttgcttgatttcagacagttgcatcagctcctttgttctgtgttcatgttacacttatttaggtggctgaatccacagaggagcctgctggttctaatcggggacagtatcctgaggattcctcaagtgatggtttaaggcaaagggaagttcttcggaacctttcttcccctggatgggaaaacatctcaaggtgagtgttataataaagatcttggcttatgcaacatgaatgttcctcgtttgcatcaatttaagaataaggtatgtttacacgtatataatcagaacttttaaacatacagaattttgctttataaatagcttcgctttaaagatctcttatatatttaacttttcttaatacacagccttttagtacacacaaatttaaaaagtaggtaatgcatatattgaaaaa

SEQ ID NO: 334216 - DNA, 857 bp, Homo sapiens
cgtccctcacaaacctgaaacaccacaactccaggaaggaacaaggggcagaagcaggaagcagtttctaggaaagacttatgtataattgctttttaaaatgcagtgctttactttaaactaaggggaactttgcggaggtgaaaacctttgctgggttttctgttcaataaagttttactatgaatgaccctgaaaaaaaaaaaaaaaaaaaaaaaaaaaaaatttttggggggtagggccctcgaaaaagagctttttaagaaccacttcgcgttgtgggagcgcgcgcggggcccccatatggtgttattggtgaacccgtgtggtcaaatagggtgtttcccaaagggaaaactcgggaacagagaacacagtgtgctgtgggattttcttcccaatttaaaaaaacgcccgcggggggaaacaccgaggggtgttccttgagaacacaaatacccaaagagtggggtcacaggagggccacaaaacaaggggggaccttattacacacggggggagtcccaacgggaaagcgcggaatgtcaaaatttatacccccgagcacttcggggggaaaagagaacgaagagagacagaggaaaaaagagagagggaaagagagacgagagaagaaagaaagaaggagggaaaggaaggagaggaggagaggggggaggagagaagagggagagcagggaagagcaagagaggcaaggaaagacaggagagcgagacggaaagagggaggcaggaggagagagagggcgaggggcggagagagggaggagaggaacaggggacacaagaagagagcagagggaagaagaggggagagcggggacgagagagaaagg

SEQ ID NO: 334217 - DNA, 869 bp, Homo sapiens
tcccttcattattgcaaagtgctgggattacaggcatgggccaccgctcccgggctttttttcctagtcttgattctttctaggaaagacttatgtataattgctttttaaaatgcagtgctttactttaaactaaggggaactttgcggaggtgaaaacctttgctgggttttctgttcaataaagttttactatgaatgaccctgaaaaaaaaaaaaaaaaaaaaaaaaaaaaaatttttggggggtagggccctcgaaaaagagctttttaagaaccacttcgcgttgtgggagcgcgcgcggggcccccatatggtgttattggtgaacccgtgtggtcaaatagggtgtttcccaaagggaaaactcgggaacagagaacacagtgtgctgtgggattttcttcccaatttaaaaaaacgcccgcggggggaaacaccgaggggtgttccttgagaacacaaatacccaaagagtggggtcacaggagggccacaaaacaaggggggaccttattacacacggggggagtcccaacgggaaagcgcggaatgtcaaaatttatacccccgagcacttcggggggaaaagagaacgaagagagacagaggaaaaaagagagagggaaagagagacgagagaagaaagaaagaaggagggaaaggaaggagaggaggagaggggggaggagagaagagggagagcagggaagagcaagagaggcaaggaaagacaggagagcgagacggaaagagggaggcaggaggagagagagggcgaggggcggagagagggaggagaggaacaggggacacaagaagagagcagagggaagaagaggggagagcggggacgagagagaaagg

SEQ ID NO: 334218 - DNA, 817 bp, Homo sapiens
tcaagcttctaacgatgtacggggtttctaggaaagacttatgtataattgctttttaaaatgcagtgctttactttaaactaaggggaactttgcggaggtgaaaacctttgctgggttttctgttcaataaagttttactatgaatgaccctgaaaaaaaaaaaaaaaaaaaaaaaaaaaaaatttttggggggtagggccctcgaaaaagagctttttaagaaccacttcgcgttgtgggagcgcgcgcggggcccccatatggtgttattggtgaacccgtgtggtcaaatagggtgtttcccaaagggaaaactcgggaacagagaacacagtgtgctgtgggattttcttcccaatttaaaaaaacgcccgcggggggaaacaccgaggggtgttccttgagaacacaaatacccaaagagtggggtcacaggagggccacaaaacaaggggggaccttattacacacggggggagtcccaacgggaaagcgcggaatgtcaaaatttatacccccgagcacttcggggggaaaagagaacgaagagagacagaggaaaaaagagagagggaaagagagacgagagaagaaagaaagaaggagggaaaggaaggagaggaggagaggggggaggagagaagagggagagcagggaagagcaagagaggcaaggaaagacaggagagcgagacggaaagagggaggcaggaggagagagagggcgaggggcggagagagggaggagaggaacaggggacacaagaagagagcagagggaagaagaggggagagcggggacgagagagaaagg

SEQ ID NO: 334219 - DNA, 957 bp, Homo sapiens
  misc_feature (7)..(7): n is a, c, g, or t
  misc_feature (854)..(854): n is a, c, g, or t
aaacccncaataggctaaggtcgagggctgtgtgtgaactgtcgttgcagagattgcgggcggctgagacgccgcctgcctggcacctaggagcgcagcggagccccgacaccgccgccgccgccatggagtccgagaccgaacccgagcccgtcacgctcctggtgaagagccccaaccagcgccaccgcgacttggagctgagtggcgaccgcggctggagtgtgggccacctcaaggcccacctgagccgcgtctaccccgagcgtccgcgtccagaggaccagaggttaatttattctgggaagctgttgttggatcaccaatgtctcagggacttgcttccaaagcaggaaaaacggcatgttttgcatctggtgtgcaatgtgaagagtccttcaaaaatgccagaaatcaacgccaaggtggctgaatccacagaggagcctgctggttctaatcggggacagtatcctgaggattcctcaagtgatggtttaaggcaaagggaagttcttcggaacctttcttcccctggatgggaaaacatctcaaggcctgaagctgcccagcaggcattccaaggcctgggtcctggtttctccggttacacaccctatgggtggcttcagctttcctggttccagcagatatatgcacgacagtactacatgcaatatttagcagccactgctgcatcaggggcttttgttccaccaccaagtgcacaagagatacctgtggtctctgcacctgctccagcccctattcacaaccagtttccagctgaaaaccagcctgccaatcagaatgctgctcctcaagtggttgttaatcctggagccaccaaattnggggtgatgcccagggccatttggcaaaaggtgcaaaaccgcaagtcggtgagcttccggactactggggcacggtccacaacccggagagaccgatggcccg

SEQ ID NO: 334220 - DNA, 628 bp, Homo sapiens
tcgatttgaattcttgattttaatttaaacttagttttcatttgttcatactcaacccactcaaaatgagtgttttttcaaatctatgtataggcctgaagctgcccagcaggcattccaaggcctgggtcctggtttctccggttacacaccctatgggtggcttcagctttcctggttccagcagatatatgcacgacagtactacatgcaatatttagcagccactgctgcatcaggggcttttgttccaccaccaagtgcacaagagatacctgtggtctctgcacctgctccagcccctattcacaaccagtttccagctgaaaaccagcctgccaatcagaatgctgctcctcaagtggttgttaatcctggagccaatcaaaatttgcggatgaatgcacaaggtggccctattgtggaagaagatgatgaaataaatcgagattggttggattggacctattcagcagctacattttctgtttttctcagtatcctctacttctactcctccctgagcagattcctcatggtcatgggggccaccgttgttatgtacctgtaagcagatggtttctctaatataaattacactacactgtgttcacactaagcagatttt

SEQ ID NO: 334221 - DNA, 2838 bp, Homo sapiens
ccacccgagctgggggcctcgcaggtctcagaccaagctccccgcgcggcctgcagcgcacccaaacatggccaccgaacccgggttcccggggcacagccgcgcctctgggtgacgcagacgcggcgggttgcatcagcccgtgcccacgtgctcggtccgccctctgccacccggatccggacgccgattgggccacgttgggagagtgcctccgcctcagccaatgggcggcagccacagagcgttctgtccgcagagccaggcgcggggcttctataaaaggcgcccgaagcgggggcgcgggccccagagacgtgaactgtcgttgcagagattgcgggcggctgagacgccgcctgcctggcacctaggagcgcagcggagccccgacaccgccgccgccgccatggagtccgagaccgaacccgagcccgtcacgctcctggtgaagagccccaaccagcgccaccgcgacttggagctgagtggcgaccgcggctggagtgtgggccacctcaaggcccacctgagccgcgtctaccccgagcgtccgcgtccagaggaccagaggttaatttattctgggaagctgttgttggatcaccaatgtctcagggacttgcttccaaagcaggaaaaacggcatgttttgcatctggtgtgcaatgtgaagagtccttcaaaaatgccagaaatcaacgccaaggtggctgaatccacagaggagcctgctggttctaatcggggacagtatcctgaggattcctcaagtgatggtttaaggcaaagggaagttcttcggaacctttcttcccctggatgggaaaacatctcaaggcctgaagctgcccagcaggcattccaaggcctgggtcctggtttctccggttacacaccctatgggtggcttcagctttcctggttccagcagatatatgcacgacagtactacatgcaatatttagcagccactgctgcatcaggggcttttgttccaccaccaagtgcacaagagatacctgtggtctctgcacctgctccagcccctattcacaaccagtttccagctgaaaaccagcctgccaatcagaatgctgctcctcaagtggttgttaatcctggagccaatcaaaatttgcggatgaatgcacaaggtggccctattgtggaagaagatgatgaaataaatcgagattggttggattggacctattcagcagctacattttctgtttttctcagtatcctctacttctactcctccctgagcagattcctcatggtcatgggggccaccgttgttatgtacctgcatcacgttgggtggtttccatttagaccgaggccggttcagaacttcccaaatgatggtcctcctcctgacgttgtaaatcaggaccccaacaataacttacaggaaggcactgatcctgaaactgaagaccccaaccacctccctccagacagggatgtactagatggcgagcagaccagcccctcctttatgagcacagcatggcttgtcttcaagactttctttgcctctcttcttccagaaggccccccagccatcgcaaactgatggtgtttgtgctgtagctgttggaggctttgacaggaatggactggatcacctgactccagctagattgcctctcctggacatggcaatgatgagtttttaaaaaacagtgtggatgatgatatgcttttgtgagcaagcaaaagcagaaacgtgaagccgtgatacaaattggtgaacaaaaaatgcccaaggcttctcatgtctttattctgaagagctttaatatatactctatgtagtttaataagcactgtacgtagaaggccttaggtgttgcatgtctatgcttgaggaacttttccaaatgtgtgtgtctgcatgtgtgtttgtacatagaagtcatagatgcagaagtggttctgctggtacgatttgattcctgttggaatgtttaaattacactaagtgtactactttatataatcaatgaaattgctagacatgttttagcaggacttttctaggaaagacttatgtataattgctttttaaaatgcagtgctttactttaaactaaggggaactttgcggaggtgaaaacctttgctgggttttctgttcaataaagttttactatgaatgaccctgaaaaaaaaaaaaaaaaaaaaaaaaaaaaaatttttggggggtagggccctcgaaaaagagctttttaagaaccacttcgcgttgtgggagcgcgcgcggggcccccatatggtgttattggtgaacccgtgtggtcaaatagggtgtttcccaaagggaaaactcgggaacagagaacacagtgtgctgtgggattttcttcccaatttaaaaaaacgcccgcggggggaaacaccgaggggtgttccttgagaacacaaatacccaaagagtggggtcacaggagggccacaaaacaaggggggaccttattacacacggggggagtcccaacgggaaagcgcggaatgtcaaaatttatacccccgagcacttcggggggaaaagagaacgaagagagacagaggaaaaaagagagagggaaagagagacgagagaagaaagaaagaaggagggaaaggaaggagaggaggagaggggggaggagagaagagggagagcagggaagagcaagagaggcaaggaaagacaggagagcgagacggaaagagggaggcaggaggagagagagggcgaggggcggagagagggaggagaggaacaggggacacaagaagagagcagagggaagaagaggggagagcggggacgagagagaaagg

SEQ ID NO: 334222 - DNA, 4047 bp, Homo sapiens
ccacccgagctgggggcctcgcaggtctcagaccaagctccccgcgcggcctgcagcgcacccaaacatggccaccgaacccgggttcccggggcacagccgcgcctctgggtgacgcagacgcggcgggttgcatcagcccgtgcccacgtgctcggtccgccctctgccacccggatccggacgccgattgggccacgttgggagagtgcctccgcctcagccaatgggcggcagccacagagcgttctgtccgcagagccaggcgcggggcttctataaaaggcgcccgaagcgggggcgcgggccccagagacgtgaactgtcgttgcagagattgcgggcggctgagacgccgcctgcctggcacctaggagcgcagcggagccccgacaccgccgccgccgccatggagtccgagaccgaacccgagcccgtcacgctcctggtgaagagccccaaccagcgccaccgcgacttggagctgagtggcgaccgcggctggagtgtgggccacctcaaggcccacctgagccgcgtctaccccgagcgtccgcgtccagaggaccagaggttaatttattctgggaagctgttgttggatcaccaatgtctcagggacttgcttccaaagcaggaaaaacggcatgttttgcatctggtgtgcaatgtgaagagtccttcaaaaatgccagaaatcaacgccaaggtgtctgcctcttcatgatggtaacaatttgtatcattcagactttcaggggagtaataaaagaagttggataaaacgtttattgagagactgtatggtgttattaccaagtaatattttgtttctttcctaggaattagaaactgtattatcaacacaaagtgatgagttaatagtagcagattgttccgttagtgctgtagtagaaaggtggagttacatattgcactatcttatgggatatgatttgatctatggttactgtgtatctagattactgaactaacactaattgggtttttattgaatttagcacatagcaagtttcttcaaaggagtcactaatttttataaagagtacaaaagtgaatatatttcctttggaaattttcattgtgattagttggataggaaaagatcagagtttttatcaagtgatctttaaagaattttttttttttaaagatggtctcgctgtgtggcccaggcttttctcaaactcctgagggcaagcgatcctcccacctcagcctcctgagtagctgggactacaggcatgtgccactagacctggctctaaagacatatatgacacacgaaaccatttatttttcatttcacaatgtttattcacatatatggtattagtattctaatgtagtgatgcactctaaatttgcattatatttcctagaacatctgaacagagcataggaaattccctattttgccattatcagttctaacaaaaatcttaaaagcactttatcatttcatttccctgcactgtaatttttttaaatgatcaaaaacagtatcataccaaggcttacttatattggaatactattttagaaagttgtgggctgggttgtatttataaatcttgttggtcagatgtctgcaatgagtaaatttagcaccattatcaggaagctttctcaccaatgacaacttcattggaagattttaatgaaagtgtagcatactctagggaaaaaatatgaatattttagcatctatgtattgaaaattatgttgaataaatgtcagactattttttacataacgttgcttctgtttaattttgtcacgttcagaggtggggggtaggagatgtaagcccttgacagcaaaataattccttttgcttgatttcagacagttgcatcagctcctttgttctgtgttcatgttacacttatttaggtggctgaatccacagaggagcctgctggttctaatcggggacagtatcctgaggattcctcaagtgatggtttaaggcaaagggaagttcttcggaacctttcttcccctggatgggaaaacatctcaaggcctgaagctgcccagcaggcattccaaggcctgggtcctggtttctccggttacacaccctatgggtggcttcagctttcctggttccagcagatatatgcacgacagtactacatgcaatatttagcagccactgctgcatcaggggcttttgttccaccaccaagtgcacaagagatacctgtggtctctgcacctgctccagcccctattcacaaccagtttccagctgaaaaccagcctgccaatcagaatgctgctcctcaagtggttgttaatcctggagccaatcaaaatttgcggatgaatgcacaaggtggccctattgtggaagaagatgatgaaataaatcgagattggttggattggacctattcagcagctacattttctgtttttctcagtatcctctacttctactcctccctgagcagattcctcatggtcatgggggccaccgttgttatgtacctgcatcacgttgggtggtttccatttagaccgaggccggttcagaacttcccaaatgatggtcctcctcctgacgttgtaaatcaggaccccaacaataacttacaggaaggcactgatcctgaaactgaagaccccaaccacctccctccagacagggatgtactagatggcgagcagaccagcccctcctttatgagcacagcatggcttgtcttcaagactttctttgcctctcttcttccagaaggccccccagccatcgcaaactgatggtgtttgtgctgtagctgttggaggctttgacaggaatggactggatcacctgactccagctagattgcctctcctggacatggcaatgatgagtttttaaaaaacagtgtggatgatgatatgcttttgtgagcaagcaaaagcagaaacgtgaagccgtgatacaaattggtgaacaaaaaatgcccaaggcttctcatgtctttattctgaagagctttaatatatactctatgtagtttaataagcactgtacgtagaaggccttaggtgttgcatgtctatgcttgaggaacttttccaaatgtgtgtgtctgcatgtgtgtttgtacatagaagtcatagatgcagaagtggttctgctggtacgatttgattcctgttggaatgtttaaattacactaagtgtactactttatataatcaatgaaattgctagacatgttttagcaggacttttctaggaaagacttatgtataattgctttttaaaatgcagtgctttactttaaactaaggggaactttgcggaggtgaaaacctttgctgggttttctgttcaataaagttttactatgaatgaccctgaaaaaaaaaaaaaaaaaaaaaaaaaaaaaatttttggggggtagggccctcgaaaaagagctttttaagaaccacttcgcgttgtgggagcgcgcgcggggcccccatatggtgttattggtgaacccgtgtggtcaaatagggtgtttcccaaagggaaaactcgggaacagagaacacagtgtgctgtgggattttcttcccaatttaaaaaaacgcccgcggggggaaacaccgaggggtgttccttgagaacacaaatacccaaagagtggggtcacaggagggccacaaaacaaggggggaccttattacacacggggggagtcccaacgggaaagcgcggaatgtcaaaatttatacccccgagcacttcggggggaaaagagaacgaagagagacagaggaaaaaagagagagggaaagagagacgagagaagaaagaaagaaggagggaaaggaaggagaggaggagaggggggaggagagaagagggagagcagggaagagcaagagaggcaaggaaagacaggagagcgagacggaaagagggaggcaggaggagagagagggcgaggggcggagagagggaggagaggaacaggggacacaagaagagagcagagggaagaagaggggagagcggggacgagagagaaagg

SEQ ID NO: 334223 - DNA, 2926 bp, Homo sapiens
ccacccgagctgggggcctcgcaggtctcagaccaagctccccgcgcggcctgcagcgcacccaaacatggccaccgaacccgggttcccggggcacagccgcgcctctgggtgacgcagacgcggcgggttgcatcagcccgtgcccacgtgctcggtccgccctctgccacccggatccggacgccgattgggccacgttgggagagtgcctccgcctcagccaatgggcggcagccacagagcgttctgtccgcagagccaggcgcggggcttctataaaaggcgcccgaagcgggggcgcgggccccagagacgtgaactgtcgttgcagagattgcgggcggctgagacgccgcctgcctggcacctaggagcgcagcggagccccgacaccgccgccgccgccatggagtccgagaccgaacccgagcccgtcacgctcctggtgaagagccccaaccagcgccaccgcgacttggagctgagtggcgaccgcggctggagtgtgggccacctcaaggcccacctgagccgcgtctaccccgagcgtccgcgtccagaggaccagaggttaatttattctgggaagctgttgttggatcaccaatgtctcagggacttgcttccaaaggtacatcacttacacattaacttctgaatgtttttaagcactcaccaggttaggttcaggtccttaagtaccttcgtattacttttagcaggaaaaacggcatgttttgcatctggtgtgcaatgtgaagagtccttcaaaaatgccagaaatcaacgccaaggtggctgaatccacagaggagcctgctggttctaatcggggacagtatcctgaggattcctcaagtgatggtttaaggcaaagggaagttcttcggaacctttcttcccctggatgggaaaacatctcaaggcctgaagctgcccagcaggcattccaaggcctgggtcctggtttctccggttacacaccctatgggtggcttcagctttcctggttccagcagatatatgcacgacagtactacatgcaatatttagcagccactgctgcatcaggggcttttgttccaccaccaagtgcacaagagatacctgtggtctctgcacctgctccagcccctattcacaaccagtttccagctgaaaaccagcctgccaatcagaatgctgctcctcaagtggttgttaatcctggagccaatcaaaatttgcggatgaatgcacaaggtggccctattgtggaagaagatgatgaaataaatcgagattggttggattggacctattcagcagctacattttctgtttttctcagtatcctctacttctactcctccctgagcagattcctcatggtcatgggggccaccgttgttatgtacctgcatcacgttgggtggtttccatttagaccgaggccggttcagaacttcccaaatgatggtcctcctcctgacgttgtaaatcaggaccccaacaataacttacaggaaggcactgatcctgaaactgaagaccccaaccacctccctccagacagggatgtactagatggcgagcagaccagcccctcctttatgagcacagcatggcttgtcttcaagactttctttgcctctcttcttccagaaggccccccagccatcgcaaactgatggtgtttgtgctgtagctgttggaggctttgacaggaatggactggatcacctgactccagctagattgcctctcctggacatggcaatgatgagtttttaaaaaacagtgtggatgatgatatgcttttgtgagcaagcaaaagcagaaacgtgaagccgtgatacaaattggtgaacaaaaaatgcccaaggcttctcatgtctttattctgaagagctttaatatatactctatgtagtttaataagcactgtacgtagaaggccttaggtgttgcatgtctatgcttgaggaacttttccaaatgtgtgtgtctgcatgtgtgtttgtacatagaagtcatagatgcagaagtggttctgctggtacgatttgattcctgttggaatgtttaaattacactaagtgtactactttatataatcaatgaaattgctagacatgttttagcaggacttttctaggaaagacttatgtataattgctttttaaaatgcagtgctttactttaaactaaggggaactttgcggaggtgaaaacctttgctgggttttctgttcaataaagttttactatgaatgaccctgaaaaaaaaaaaaaaaaaaaaaaaaaaaaaatttttggggggtagggccctcgaaaaagagctttttaagaaccacttcgcgttgtgggagcgcgcgcggggcccccatatggtgttattggtgaacccgtgtggtcaaatagggtgtttcccaaagggaaaactcgggaacagagaacacagtgtgctgtgggattttcttcccaatttaaaaaaacgcccgcggggggaaacaccgaggggtgttccttgagaacacaaatacccaaagagtggggtcacaggagggccacaaaacaaggggggaccttattacacacggggggagtcccaacgggaaagcgcggaatgtcaaaatttatacccccgagcacttcggggggaaaagagaacgaagagagacagaggaaaaaagagagagggaaagagagacgagagaagaaagaaagaaggagggaaaggaaggagaggaggagaggggggaggagagaagagggagagcagggaagagcaagagaggcaaggaaagacaggagagcgagacggaaagagggaggcaggaggagagagagggcgaggggcggagagagggaggagaggaacaggggacacaagaagagagcagagggaagaagaggggagagcggggacgagagagaaagg

SEQ ID NO: 334224 - DNA, 2715 bp, Homo sapiens
ccacccgagctgggggcctcgcaggtctcagaccaagctccccgcgcggcctgcagcgcacccaaacatggccaccgaacccgggttcccggggcacagccgcgcctctgggtgacgcagacgcggcgggttgcatcagcccgtgcccacgtgctcggtccgccctctgccacccggatccggacgccgattgggccacgttgggagagtgcctccgcctcagccaatgggcggcagccacagagcgttctgtccgcagagccaggcgcggggcttctataaaaggcgcccgaagcgggggcgcgggccccagagacgtgaactgtcgttgcagagattgcgggcggctgagacgccgcctgcctggcacctaggagcgcagcggagccccgacaccgccgccgccgccatggagtccgagaccgaacccgagcccgtcacgctcctggtgaagagccccaaccagcgccaccgcgacttggagctgagtggcgaccgcggctggagtgtgggccacctcaaggcccacctgagccgcgtctaccccgagcgtccgcgtccagaggaccagaggttaatttattctgggaagctgttgttggatcaccaatgtctcagggacttgcttccaaagcaggaaaaacggcatgttttgcatctggtgtgcaatgtgaagagtccttcaaaaatgccagaaatcaacgccaaggtggctgaatccacagaggagcctgctggttctaatcggggacagtatcctgaggattcctcaagtgatggtttaaggcaaagggaagttcttcggaacctttcttcccctggatgggaaaacatctcaagtttagcagccactgctgcatcaggggcttttgttccaccaccaagtgcacaagagatacctgtggtctctgcacctgctccagcccctattcacaaccagtttccagctgaaaaccagcctgccaatcagaatgctgctcctcaagtggttgttaatcctggagccaatcaaaatttgcggatgaatgcacaaggtggccctattgtggaagaagatgatgaaataaatcgagattggttggattggacctattcagcagctacattttctgtttttctcagtatcctctacttctactcctccctgagcagattcctcatggtcatgggggccaccgttgttatgtacctgcatcacgttgggtggtttccatttagaccgaggccggttcagaacttcccaaatgatggtcctcctcctgacgttgtaaatcaggaccccaacaataacttacaggaaggcactgatcctgaaactgaagaccccaaccacctccctccagacagggatgtactagatggcgagcagaccagcccctcctttatgagcacagcatggcttgtcttcaagactttctttgcctctcttcttccagaaggccccccagccatcgcaaactgatggtgtttgtgctgtagctgttggaggctttgacaggaatggactggatcacctgactccagctagattgcctctcctggacatggcaatgatgagtttttaaaaaacagtgtggatgatgatatgcttttgtgagcaagcaaaagcagaaacgtgaagccgtgatacaaattggtgaacaaaaaatgcccaaggcttctcatgtctttattctgaagagctttaatatatactctatgtagtttaataagcactgtacgtagaaggccttaggtgttgcatgtctatgcttgaggaacttttccaaatgtgtgtgtctgcatgtgtgtttgtacatagaagtcatagatgcagaagtggttctgctggtacgatttgattcctgttggaatgtttaaattacactaagtgtactactttatataatcaatgaaattgctagacatgttttagcaggacttttctaggaaagacttatgtataattgctttttaaaatgcagtgctttactttaaactaaggggaactttgcggaggtgaaaacctttgctgggttttctgttcaataaagttttactatgaatgaccctgaaaaaaaaaaaaaaaaaaaaaaaaaaaaaatttttggggggtagggccctcgaaaaagagctttttaagaaccacttcgcgttgtgggagcgcgcgcggggcccccatatggtgttattggtgaacccgtgtggtcaaatagggtgtttcccaaagggaaaactcgggaacagagaacacagtgtgctgtgggattttcttcccaatttaaaaaaacgcccgcggggggaaacaccgaggggtgttccttgagaacacaaatacccaaagagtggggtcacaggagggccacaaaacaaggggggaccttattacacacggggggagtcccaacgggaaagcgcggaatgtcaaaatttatacccccgagcacttcggggggaaaagagaacgaagagagacagaggaaaaaagagagagggaaagagagacgagagaagaaagaaagaaggagggaaaggaaggagaggaggagaggggggaggagagaagagggagagcagggaagagcaagagaggcaaggaaagacaggagagcgagacggaaagagggaggcaggaggagagagagggcgaggggcggagagagggaggagaggaacaggggacacaagaagagagcagagggaagaagaggggagagcggggacgagagagaaagg

SEQ ID NO: 334225 - DNA, 2025 bp, Homo sapiens
gccgactctcgaggatccacggacgaggcctgaagctgcccagcaggcattccaaggcctgggtcctggtttctccggttacacaccctatgggtggcttcagctttcctggttccagcagatatatgcacgacagtactacatgcaatatttagcagccactgctgcatcaggggcttttgttccaccaccaagtgcacaagagatacctgtggtctctgcacctgctccagcccctattcacaaccagtttccagctgaaaaccagcctgccaatcagaatgctgctcctcaagtggttgttaatcctggagccaatcaaaatttgcggatgaatgcacaaggtggccctattgtggaagaagatgatgaaataaatcgagattggttggattggacctattcagcagctacattttctgtttttctcagtatcctctacttctactcctccctgagcagattcctcatggtcatgggggccaccgttgttatgtacctgcatcacgttgggtggtttccatttagaccgaggccggttcagaacttcccaaatgatggtcctcctcctgacgttgtaaatcaggaccccaacaataacttacaggaaggcactgatcctgaaactgaagaccccaaccacctccctccagacagggatgtactagatggcgagcagaccagcccctcctttatgagcacagcatggcttgtcttcaagactttctttgcctctcttcttccagaaggccccccagccatcgcaaactgatggtgtttgtgctgtagctgttggaggctttgacaggaatggactggatcacctgactccagctagattgcctctcctggacatggcaatgatgagtttttaaaaaacagtgtggatgatgatatgcttttgtgagcaagcaaaagcagaaacgtgaagccgtgatacaaattggtgaacaaaaaatgcccaaggcttctcatgtctttattctgaagagctttaatatatactctatgtagtttaataagcactgtacgtagaaggccttaggtgttgcatgtctatgcttgaggaacttttccaaatgtgtgtgtctgcatgtgtgtttgtacatagaagtcatagatgcagaagtggttctgctggtacgatttgattcctgttggaatgtttaaattacactaagtgtactactttatataatcaatgaaattgctagacatgttttagcaggacttttctaggaaagacttatgtataattgctttttaaaatgcagtgctttactttaaactaaggggaactttgcggaggtgaaaacctttgctgggttttctgttcaataaagttttactatgaatgaccctgaaaaaaaaaaaaaaaaaaaaaaaaaaaaaatttttggggggtagggccctcgaaaaagagctttttaagaaccacttcgcgttgtgggagcgcgcgcggggcccccatatggtgttattggtgaacccgtgtggtcaaatagggtgtttcccaaagggaaaactcgggaacagagaacacagtgtgctgtgggattttcttcccaatttaaaaaaacgcccgcggggggaaacaccgaggggtgttccttgagaacacaaatacccaaagagtggggtcacaggagggccacaaaacaaggggggaccttattacacacggggggagtcccaacgggaaagcgcggaatgtcaaaatttatacccccgagcacttcggggggaaaagagaacgaagagagacagaggaaaaaagagagagggaaagagagacgagagaagaaagaaagaaggagggaaaggaaggagaggaggagaggggggaggagagaagagggagagcagggaagagcaagagaggcaaggaaagacaggagagcgagacggaaagagggaggcaggaggagagagagggcgaggggcggagagagggaggagaggaacaggggacacaagaagagagcagagggaagaagaggggagagcggggacgagagagaaagg

SEQ ID NO: 334226 - DNA, 2626 bp, Homo sapiens
ccacccgagctgggggcctcgcaggtctcagaccaagctccccgcgcggcctgcagcgcacccaaacatggccaccgaacccgggttcccggggcacagccgcgcctctgggtgacgcagacgcggcgggttgcatcagcccgtgcccacgtgctcggtccgccctctgccacccggatccggacgccgattgggccacgttgggagagtgcctccgcctcagccaatgggcggcagccacagagcgttctgtccgcagagccaggcgcggggcttctataaaaggcgcccgaagcgggggcgcgggccccagagacgtgaactgtcgttgcagagattgcgggcggctgagacgccgcctgcctggcacctaggagcgcagcggagccccgacaccgccgccgccgccatggagtccgagaccgaacccgagcccgtcacgctcctggtgaagagccccaaccagcgccaccgcgacttggagctgagtggcgaccgcggctggagtgtgggccacctcaaggcccacctgagccgcgtctaccccgagcgtccgcgtccagaggaccagaggttaatttattctgggaagctgttgttggatcaccaatgtctcagggacttgcttccaaagcaggaaaaacggcatgttttgcatctggtgtgcaatgtgaagagtccttcaaaaatgccagaaatcaacgccaagctggttccagcagatatatgcacgacagtactacatgcaatatttagcagccactgctgcatcaggggcttttgttccaccaccaagtgcacaagagatacctgtggtctctgcacctgctccagcccctattcacaaccagtttccagctgaaaaccagcctgccaatcagaatgctgctcctcaagtggttgttaatcctggagccaatcaaaatttgcggatgaatgcacaaggtggccctattgtggaagaagatgatgaaataaatcgagattggttggattggacctattcagcagctacattttctgtttttctcagtatcctctacttctactcctccctgagcagattcctcatggtcatgggggccaccgttgttatgtacctgcatcacgttgggtggtttccatttagaccgaggccggttcagaacttcccaaatgatggtcctcctcctgacgttgtaaatcaggaccccaacaataacttacaggaaggcactgatcctgaaactgaagaccccaaccacctccctccagacagggatgtactagatggcgagcagaccagcccctcctttatgagcacagcatggcttgtcttcaagactttctttgcctctcttcttccagaaggccccccagccatcgcaaactgatggtgtttgtgctgtagctgttggaggctttgacaggaatggactggatcacctgactccagctagattgcctctcctggacatggcaatgatgagtttttaaaaaacagtgtggatgatgatatgcttttgtgagcaagcaaaagcagaaacgtgaagccgtgatacaaattggtgaacaaaaaatgcccaaggcttctcatgtctttattctgaagagctttaatatatactctatgtagtttaataagcactgtacgtagaaggccttaggtgttgcatgtctatgcttgaggaacttttccaaatgtgtgtgtctgcatgtgtgtttgtacatagaagtcatagatgcagaagtggttctgctggtacgatttgattcctgttggaatgtttaaattacactaagtgtactactttatataatcaatgaaattgctagacatgttttagcaggacttttctaggaaagacttatgtataattgctttttaaaatgcagtgctttactttaaactaaggggaactttgcggaggtgaaaacctttgctgggttttctgttcaataaagttttactatgaatgaccctgaaaaaaaaaaaaaaaaaaaaaaaaaaaaaatttttggggggtagggccctcgaaaaagagctttttaagaaccacttcgcgttgtgggagcgcgcgcggggcccccatatggtgttattggtgaacccgtgtggtcaaatagggtgtttcccaaagggaaaactcgggaacagagaacacagtgtgctgtgggattttcttcccaatttaaaaaaacgcccgcggggggaaacaccgaggggtgttccttgagaacacaaatacccaaagagtggggtcacaggagggccacaaaacaaggggggaccttattacacacggggggagtcccaacgggaaagcgcggaatgtcaaaatttatacccccgagcacttcggggggaaaagagaacgaagagagacagaggaaaaaagagagagggaaagagagacgagagaagaaagaaagaaggagggaaaggaaggagaggaggagaggggggaggagagaagagggagagcagggaagagcaagagaggcaaggaaagacaggagagcgagacggaaagagggaggcaggaggagagagagggcgaggggcggagagagggaggagaggaacaggggacacaagaagagagcagagggaagaagaggggagagcggggacgagagagaaagg

SEQ ID NO: 334227 - DNA, 2548 bp, Homo sapiens
ccacccgagctgggggcctcgcaggtctcagaccaagctccccgcgcggcctgcagcgcacccaaacatggccaccgaacccgggttcccggggcacagccgcgcctctgggtgacgcagacgcggcgggttgcatcagcccgtgcccacgtgctcggtccgccctctgccacccggatccggacgccgattgggccacgttgggagagtgcctccgcctcagccaatgggcggcagccacagagcgttctgtccgcagagccaggcgcggggcttctataaaaggcgcccgaagcgggggcgcgggccccagagacgtgaactgtcgttgcagagattgcgggcggctgagacgccgcctgcctggcacctaggagcgcagcggagccccgacaccgccgccgccgccatggagtccgagaccgaacccgagcccgtcacgctcctggtgaagagccccaaccagcgccaccgcgacttggagctgagtggcgaccgcggctggagtgtgggccacctcaaggcccacctgagccgcgtctaccccgagcgtccgcgtccagaggaccagaggttaatttattctgggaagctgttgttggatcaccaatgtctcagggacttgcttccaaagcaggaaaaacggcatgttttgcatctggtgtgcaatgtgaagagtccttcaaaaatgccagaaatcaacgccaaggtggctgaatccacagaggagcctgctggttctaatcggggacagtatcctgaggattcctcaagtgatggtttaaggcaaagggaagttcttcggaacctttcttcccctggatgggaaaacatctcaaggcctgaagctgcccagcaggcattccaaggcctgggtcctggtttctccggttacacaccctatgggtggcttcagctttcctggttccagcagatatatgcacgacagtactacatgcaatatttagcagccactgctgcatcaggggcttttgttccaccaccaagtgcacaagagatacctgcatcacgttgggtggtttccatttagaccgaggccggttcagaacttcccaaatgatggtcctcctcctgacgttgtaaatcaggaccccaacaataacttacaggaaggcactgatcctgaaactgaagaccccaaccacctccctccagacagggatgtactagatggcgagcagaccagcccctcctttatgagcacagcatggcttgtcttcaagactttctttgcctctcttcttccagaaggccccccagccatcgcaaactgatggtgtttgtgctgtagctgttggaggctttgacaggaatggactggatcacctgactccagctagattgcctctcctggacatggcaatgatgagtttttaaaaaacagtgtggatgatgatatgcttttgtgagcaagcaaaagcagaaacgtgaagccgtgatacaaattggtgaacaaaaaatgcccaaggcttctcatgtctttattctgaagagctttaatatatactctatgtagtttaataagcactgtacgtagaaggccttaggtgttgcatgtctatgcttgaggaacttttccaaatgtgtgtgtctgcatgtgtgtttgtacatagaagtcatagatgcagaagtggttctgctggtacgatttgattcctgttggaatgtttaaattacactaagtgtactactttatataatcaatgaaattgctagacatgttttagcaggacttttctaggaaagacttatgtataattgctttttaaaatgcagtgctttactttaaactaaggggaactttgcggaggtgaaaacctttgctgggttttctgttcaataaagttttactatgaatgaccctgaaaaaaaaaaaaaaaaaaaaaaaaaaaaaatttttggggggtagggccctcgaaaaagagctttttaagaaccacttcgcgttgtgggagcgcgcgcggggcccccatatggtgttattggtgaacccgtgtggtcaaatagggtgtttcccaaagggaaaactcgggaacagagaacacagtgtgctgtgggattttcttcccaatttaaaaaaacgcccgcggggggaaacaccgaggggtgttccttgagaacacaaatacccaaagagtggggtcacaggagggccacaaaacaaggggggaccttattacacacggggggagtcccaacgggaaagcgcggaatgtcaaaatttatacccccgagcacttcggggggaaaagagaacgaagagagacagaggaaaaaagagagagggaaagagagacgagagaagaaagaaagaaggagggaaaggaaggagaggaggagaggggggaggagagaagagggagagcagggaagagcaagagaggcaaggaaagacaggagagcgagacggaaagagggaggcaggaggagagagagggcgaggggcggagagagggaggagaggaacaggggacacaagaagagagcagagggaagaagaggggagagcggggacgagagagaaagg

SEQ ID NO: 334228 - DNA, 2364 bp, Homo sapiens
ccacccgagctgggggcctcgcaggtctcagaccaagctccccgcgcggcctgcagcgcacccaaacatggccaccgaacccgggttcccggggcacagccgcgcctctgggtgacgcagacgcggcgggttgcatcagcccgtgcccacgtgctcggtccgccctctgccacccggatccggacgccgattgggccacgttgggagagtgcctccgcctcagccaatgggcggcagccacagagcgttctgtccgcagagccaggcgcggggcttctataaaaggcgcccgaagcgggggcgcgggccccagagacgtgaactgtcgttgcagagattgcgggcggctgagacgccgcctgcctggcacctaggagcgcagcggagccccgacaccgccgccgccgccatggagtccgagaccgaacccgagcccgtcacgctcctggtgaagagccccaaccagcgccaccgcgacttggagctgagtggcgaccgcggctggagtgtgggccacctcaaggcccacctgagccgcgtctaccccgagcgtccgcgtccagaggaccagaggttaatttattctgggaagctgttgttggatcaccaatgtctcagggacttgcttccaaagcaggaaaaacggcatgttttgcatctggtgtgcaatgtgaagagtccttcaaaaatgccagaaatcaacgccaaggtggctgaatccacagaggagcctgctggttctaatcggggacagtatcctgaggattcctcaagtgatggtttaaggcaaagggaagttcttcggaacctttcttcccctggatgggaaaacatctcaaggcatcacgttgggtggtttccatttagaccgaggccggttcagaacttcccaaatgatggtcctcctcctgacgttgtaaatcaggaccccaacaataacttacaggaaggcactgatcctgaaactgaagaccccaaccacctccctccagacagggatgtactagatggcgagcagaccagcccctcctttatgagcacagcatggcttgtcttcaagactttctttgcctctcttcttccagaaggccccccagccatcgcaaactgatggtgtttgtgctgtagctgttggaggctttgacaggaatggactggatcacctgactccagctagattgcctctcctggacatggcaatgatgagtttttaaaaaacagtgtggatgatgatatgcttttgtgagcaagcaaaagcagaaacgtgaagccgtgatacaaattggtgaacaaaaaatgcccaaggcttctcatgtctttattctgaagagctttaatatatactctatgtagtttaataagcactgtacgtagaaggccttaggtgttgcatgtctatgcttgaggaacttttccaaatgtgtgtgtctgcatgtgtgtttgtacatagaagtcatagatgcagaagtggttctgctggtacgatttgattcctgttggaatgtttaaattacactaagtgtactactttatataatcaatgaaattgctagacatgttttagcaggacttttctaggaaagacttatgtataattgctttttaaaatgcagtgctttactttaaactaaggggaactttgcggaggtgaaaacctttgctgggttttctgttcaataaagttttactatgaatgaccctgaaaaaaaaaaaaaaaaaaaaaaaaaaaaaatttttggggggtagggccctcgaaaaagagctttttaagaaccacttcgcgttgtgggagcgcgcgcggggcccccatatggtgttattggtgaacccgtgtggtcaaatagggtgtttcccaaagggaaaactcgggaacagagaacacagtgtgctgtgggattttcttcccaatttaaaaaaacgcccgcggggggaaacaccgaggggtgttccttgagaacacaaatacccaaagagtggggtcacaggagggccacaaaacaaggggggaccttattacacacggggggagtcccaacgggaaagcgcggaatgtcaaaatttatacccccgagcacttcggggggaaaagagaacgaagagagacagaggaaaaaagagagagggaaagagagacgagagaagaaagaaagaaggagggaaaggaaggagaggaggagaggggggaggagagaagagggagagcagggaagagcaagagaggcaaggaaagacaggagagcgagacggaaagagggaggcaggaggagagagagggcgaggggcggagagagggaggagaggaacaggggacacaagaagagagcagagggaagaagaggggagagcggggacgagagagaaagg

SEQ ID NO: 334229 - DNA, 1552 bp, Homo sapiens
gaatggtaaccacccaacgtgatgcaggtacataacaacggtggcccccatttagaccgaggccggttcagaacttcccaaatgatggtcctcctcctgacgttgtaaatcaggaccccaacaataacttacaggaaggcactgatcctgaaactgaagaccccaaccacctccctccagacagggatgtactagatggcgagcagaccagcccctcctttatgagcacagcatggcttgtcttcaagactttctttgcctctcttcttccagaaggccccccagccatcgcaaactgatggtgtttgtgctgtagctgttggaggctttgacaggaatggactggatcacctgactccagctagattgcctctcctggacatggcaatgatgagtttttaaaaaacagtgtggatgatgatatgcttttgtgagcaagcaaaagcagaaacgtgaagccgtgatacaaattggtgaacaaaaaatgcccaaggcttctcatgtctttattctgaagagctttaatatatactctatgtagtttaataagcactgtacgtagaaggccttaggtgttgcatgtctatgcttgaggaacttttccaaatgtgtgtgtctgcatgtgtgtttgtacatagaagtcatagatgcagaagtggttctgctggtacgatttgattcctgttggaatgtttaaattacactaagtgtactactttatataatcaatgaaattgctagacatgttttagcaggacttttctaggaaagacttatgtataattgctttttaaaatgcagtgctttactttaaactaaggggaactttgcggaggtgaaaacctttgctgggttttctgttcaataaagttttactatgaatgaccctgaaaaaaaaaaaaaaaaaaaaaaaaaaaaaatttttggggggtagggccctcgaaaaagagctttttaagaaccacttcgcgttgtgggagcgcgcgcggggcccccatatggtgttattggtgaacccgtgtggtcaaatagggtgtttcccaaagggaaaactcgggaacagagaacacagtgtgctgtgggattttcttcccaatttaaaaaaacgcccgcggggggaaacaccgaggggtgttccttgagaacacaaatacccaaagagtggggtcacaggagggccacaaaacaaggggggaccttattacacacggggggagtcccaacgggaaagcgcggaatgtcaaaatttatacccccgagcacttcggggggaaaagagaacgaagagagacagaggaaaaaagagagagggaaagagagacgagagaagaaagaaagaaggagggaaaggaaggagaggaggagaggggggaggagagaagagggagagcagggaagagcaagagaggcaaggaaagacaggagagcgagacggaaagagggaggcaggaggagagagagggcgaggggcggagagagggaggagaggaacaggggacacaagaagagagcagagggaagaagaggggagagcggggacgagagagaaagg

SEQ ID NO: 334230 - DNA, 2576 bp, Homo sapiens
ccacccgagctgggggcctcgcaggtctcagaccaagctccccgcgcggcctgcagcgcacccaaacatggccaccgaacccgggttcccggggcacagccgcgcctctgggtgacgcagacgcggcgggttgcatcagcccgtgcccacgtgctcggtccgccctctgccacccggatccggacgccgattgggccacgttgggagagtgcctccgcctcagccaatgggcggcagccacagagcgttctgtccgcagagccaggcgcggggcttctataaaaggcgcccgaagcgggggcgcgggccccagagacgtgaactgtcgttgcagagattgcgggcggctgagacgccgcctgcctggcacctaggagcgcagcggagccccgacaccgccgccgccgccatggagtccgagaccgaacccgagcccgtcacgctcctggtgaagagccccaaccagcgccaccgcgacttggagctgagtggcgaccgcggctggagtgtgggccacctcaaggcccacctgagccgcgtctaccccgagcgtccgcgtccagaggaccagaggttaatttattctgggaagctgttgttggatcaccaatgtctcagggacttgcttccaaagcaggaaaaacggcatgttttgcatctggtgtgcaatgtgaagagtccttcaaaaatgccagaaatcaacgccaaggtggctgaatccacagaggagcctgctggttctaatcggggacagtatcctgaggattcctcaagtgatggtttaaggcaaagggaagttcttcggaacctttcttcccctggatgggaaaacatctcaagtttagcagccactgctgcatcaggggcttttgttccaccaccaagtgcacaagagatacctgtggtctctgcacctgctccagcccctattcacaaccagtttccagctgaaaaccagcctgccaatcagaatgctgctcctcaagtggttgttaatcctggagccaatcaaaatttgcggatgaatgcacaaggtggccctattgtggaagaagatgatgaaataaatcgagattggttggattggacctattcagcagctacattttctgtttttctcagtatcctctacttctactcctccctgagcagattcctcatggtcatgggggccaccgttgttatgtacctgcatcacgttgggtggtttccatttagaccgaggccggttcagaacttcccaaatgatggtcctcctcctgacgttgtaaatcaggaccccaacaataacttacagaaggccccccagccatcgcaaactgatggtgtttgtgctgtagctgttggaggctttgacaggaatggactggatcacctgactccagctagattgcctctcctggacatggcaatgatgagtttttaaaaaacagtgtggatgatgatatgcttttgtgagcaagcaaaagcagaaacgtgaagccgtgatacaaattggtgaacaaaaaatgcccaaggcttctcatgtctttattctgaagagctttaatatatactctatgtagtttaataagcactgtacgtagaaggccttaggtgttgcatgtctatgcttgaggaacttttccaaatgtgtgtgtctgcatgtgtgtttgtacatagaagtcatagatgcagaagtggttctgctggtacgatttgattcctgttggaatgtttaaattacactaagtgtactactttatataatcaatgaaattgctagacatgttttagcaggacttttctaggaaagacttatgtataattgctttttaaaatgcagtgctttactttaaactaaggggaactttgcggaggtgaaaacctttgctgggttttctgttcaataaagttttactatgaatgaccctgaaaaaaaaaaaaaaaaaaaaaaaaaaaaaatttttggggggtagggccctcgaaaaagagctttttaagaaccacttcgcgttgtgggagcgcgcgcggggcccccatatggtgttattggtgaacccgtgtggtcaaatagggtgtttcccaaagggaaaactcgggaacagagaacacagtgtgctgtgggattttcttcccaatttaaaaaaacgcccgcggggggaaacaccgaggggtgttccttgagaacacaaatacccaaagagtggggtcacaggagggccacaaaacaaggggggaccttattacacacggggggagtcccaacgggaaagcgcggaatgtcaaaatttatacccccgagcacttcggggggaaaagagaacgaagagagacagaggaaaaaagagagagggaaagagagacgagagaagaaagaaagaaggagggaaaggaaggagaggaggagaggggggaggagagaagagggagagcagggaagagcaagagaggcaaggaaagacaggagagcgagacggaaagagggaggcaggaggagagagagggcgaggggcggagagagggaggagaggaacaggggacacaagaagagagcagagggaagaagaggggagagcggggacgagagagaaagg

SEQ ID NO: 334231 - DNA, 1267 bp, Homo sapiens
  misc_feature (1151)..(1151): n is a, c, g, or t
ccacccgagctgggggcctcgcaggtctcagaccaagctccccgcgcggcctgcagcgcacccaaacatggccaccgaacccgggttcccggggcacagccgcgcctctgggtgacgcagacgcggcgggttgcatcagcccgtgcccacgtgctcggtccgccctctgccacccggatccggacgccgattgggccacgttgggagagtgcctccgcctcagccaatgggcggcagccacagagcgttctgtccgcagagccaggcgcggggcttctataaaaggcgcccgaagcgggggcgcgggccccagagacgtgaactgtcgttgcagagattgcgggcggctgagacgccgcctgcctggcacctaggagcgcagcggagccccgacaccgccgccgccgccatggagtccgagaccgaacccgagcccgtcacgctcctggtgaagagccccaaccagcgccaccgcgacttggagctgagtggcgaccgcggctggagtgtgggccacctcaaggcccacctgagccgcgtctaccccgagcgtccgcgtccagaggaccagaggttaatttattctgggaagctgttgttggatcaccaatgtctcagggacttgcttccaaagcaggaaaaacggcatgttttgcatctggtgtgcaatgtgaagagtccttcaaaaatgccagaaatcaacgccaaggtggctgaatccacagaggagcctgctggttctaatcggggacagtatcctgaggattcctcaagtgatggtttaaggcaaagggaagttcttcggaacctttcttcccctggatgggaaaacatctcaaggcctgaagctgcccagcaggcattccaaggcctgggtcctggtttctccggttacacaccctatgggtggcttcagctttcctggttccagcagatatatgcacgacagtactacatgcaatatttagcagccactgctgcatcaggggcttttgttccaccaccaagtgcacaagagatacctgtggtctctgcacctgctccagcccctattcacaaccagtttccagctgaaaaccagcctgccaatcagaatgctgctcctcaagtggttgttaatcctggagccatcaaattgcggtgatgccagngcctttggggaacagttaaaatccgcagggggtggcatacgcgcatttggtccatctccttcccgagaactcggtgggccggtttccccggttcagtcgtaccaggtccttgccaa

SEQ ID NO: 334232 - DNA, 1068 bp, Homo sapiens
ccacccgagctgggggcctcgcaggtctcagaccaagctccccgcgcggcctgcagcgcacccaaacatggccaccgaacccgggttcccggggcacagccgcgcctctgggtgacgcagacgcggcgggttgcatcagcccgtgcccacgtgctcggtccgccctctgccacccggatccggacgccgattgggccacgttgggagagtgcctccgcctcagccaatgggcggcagccacagagcgttctgtccgcagagccaggcgcggggcttctataaaaggcgcccgaagcgggggcgcgggccccagagacgtgaactgtcgttgcagagattgcgggcggctgagacgccgcctgcctggcacctaggagcgcagcggagccccgacaccgccgccgccgccatggagtccgagaccgaacccgagcccgtcacgctcctggtgaagagccccaaccagcgccaccgcgacttggagctgagtggcgaccgcggctggagtgtgggccacctcaaggcccacctgagccgcgtctaccccgagcgtccgcgtccagaggaccagaggttaatttattctgggaagctgttgttggatcaccaatgtctcagggacttgcttccaaagcaggaaaaacggcatgttttgcatctggtgtgcaatgtgaagagtccttcaaaaatgccagaaatcaacgccaaggtggctgaatccacagaggagcctgctggttctaatcggggacagtatcctgaggattcctcaagtgatggtttaaggcaaagggaagttcttcggaacctttcttcccctggatgggaaaacatctcaaggtgagtgttataataaagatcttggcttatgcaacatgaatgttcctcgtttgcatcaatttaagaataaggtatgtttacacgtatataatcagaacttttaaacatacagaattttgctttataaatagcttcgctttaaagatctcttatatatttaacttttcttaatacacagccttttagtacacacaaatttaaaaagtaggtaatgcatatattgaaaaa

SEQ ID NO: 334233 - DNA, 221 bp, Homo sapiens
tcctggccctcttcttgaatttatgtcagacacatgtgaggcttcattcatcatatatttctaagcaggcttttgtgtgtctgtttgaattcttttccaagaattaggggaagtgggagttgggtcgtgatgtgacagtcaaaggacttagccggaaagggtagagttaatgcatgacagacaaggggactctcatctgaaaatttgtgtgtctttgtttc

SEQ ID NO: 334234 - DNA, 736 bp, Homo sapiens
aatagcagcttcctcagatagctttagtcaattcacaacttctgaacatgataaaagcatcttttactggctgtgaagttcttcaatatccttgtaattaccatcttctttcaataaggcaactattatcaatttggcccgaatagtagccaaactgattcacacacacacacacacacacacacacacacacacacacttctctctctcaatccaaagtagaagtaaatgttccatctaaaccacaagcatctttctattctagtgcaatataagtgaaaagatggtgaagtgactttatcctggtctttatagtgacaggacttttccaatatgctttgtaccattagcttcctgtaggcttaggtcttgccctagcttcatcttgctgttgtcccttttcaaatctttctaatcacattcaatttcacttctagaggtttttcttgttgccaagtccgtcttccaattatccatttttgtaaaatgtcacgtgggtttatccctgggagttaaagaggtgacacaacccacacagctgttgcctgagagtaactgacagtagatgtgcagtgatcaagagcgaagtgacaaaactggtcatgaccatgatgctcctgttatgtccagatgtgtagactgaagagctggcagagaagtctgtattttatacaattgctcacagttaatacatcatggtgactgaaatctgaactgtgttgttggcagccaggtg

SEQ ID NO: 334235 - DNA, 178 bp, Homo sapiens
ccaccaaaacctcccacatcagtcaacattgtaactgatgtacacccttcttaaacaatacaagggtgacccaacttccatttagatcataaagctttagttaactagaggaaaaaaaaaaaagtgccatgaagaaataccactatccccgaaaaacttcagaaaggttttctttgag

SEQ ID NO: 334236 - DNA, 465 bp, Homo sapiens
gaatccataccaatcttatctgctgtcaggtcaactggacacacttggaaaatgcctacatcataaacctaaagactctgggacacaaaggactgttttgagcagtgacttctttagttatgtcttttttttttcttctagttttcagtgtttacagtaccgtgctctttttcttgtccaacttcatttgatttctgttgtcagtgtgtctcttggtttttcttttgtttgtgtattgtgtgtttggtcattttaggttatatttttttcttttgctggatctttttgtgtgcgtgtgttcctgagtttccaatcctccccgccatcaaccatggtaaatcaaaagatggtattcaacccttcaaaggcccaaagcctgcggcccgcatagcaaacagccttgagaacacagcgtattgagcagcctacagagactggcatacccctgaccctactaccttccat

SEQ ID NO: 334237 - DNA, 544 bp, Homo sapiens
gggaagtgttcttattcctggtctacatatctgtgaataaccacaaaggcatgggtgggggtgggattaaagaaaagactgagagggctttaagttacaataggatgggttcccttaagaaaatacctagcttgattttgaaatttttgttagaggtaattttgtttccctggggatgtttttctctcctttctttttttatggagtctggggtggggaaatatgaagaaagtcatttcttctctaaattcttcgaaagtcccttgatcctttttccacaatagtgacctcccttgctgcatgaggcatgtgtaccttcttccatggaaaatttcaaaatgatgctggctattgtttctaataccatgttagtctgtgagatattgctaacttttccagctgagataggaaggatgaactagagcgaataaagatgttcaagtagcagttgaaagccttgatatggcctttttactctctctgtgtttcccttgtttttctcctttcctcatttcattgtgttctgcatcaaaccccctacatc

SEQ ID NO: 334238 - DNA, 222 bp, Homo sapiens
tgtctcatcatggtgatgcatatatgtacagcaactaactacttcagtttgccttccagtgttgtcctgcccaaagtctatgtattgaactacatattttactatcaattacatttattcccctttatattataactagatcacttatcaattaaaaaatgtataaagcatattatctatgaattttatttcaggttagtaaagtgggaattacaaaatatt

SEQ ID NO: 334239 - DNA, 176 bp, Homo sapiens
ttaacgatgtactctttcctttatgagaatttaattctctgaatatgatatgtttttaaaataagacaaactcaaaccagttgccaatagatcctcagctcctcctgaggtccttgttttatgggtctgttctactgtgtaattgtttagtttaacttggtaaacatgtcagtttt

SEQ ID NO: 334240 - DNA, 573 bp, Homo sapiens
ctttccaacgaaaattagaattttgggaaagttgtatacatgattcattcccaatacttacttagttgaagataataatgagtgtaaattttcaatattgtataatgtgtcattatttggaagttgtacacaactcattttctaaataaccagtttatgattttacaaaatcacggatgcttaaaagattcatttaaagtataagaaagaatatggaattttaatgtaacagaaggcaaaaaaactattaatattgtttcagattccatgttacaactacccatcaatgaattacaaataaacaagtttcagtatgttatcaaaaacagaacagccgcaatatctgaagaaaaacaagcctctcgtctctgtgaggacaaattttctgtatagaccaaaacaaactcttgcaattgattgcagagacatgcttgtcttctcttgtcaggaattaaagataatttgcaaatatgtaaaacattgccactttttaaaatattttttaaaataatggtaatattttattaaaatatattaacatgtaatgaactttaagatttctgggctttttta

SEQ ID NO: 334241 - DNA, 459 bp, Homo sapiens
atgtttttgctgctggaagctattcaagaattagttccgaaaaataagtaagatagtaaaattgattattactaaagactgtggggcccctttggttaaaaattgattattttcccgggcttttggccttttcttaggaaattagagatctatatatgggtaaaagaagaaaaacatgttttaggagcatcatttgtatctaatatctgttctcttgatacctgttaaactttaatcatatagaaagatttgaatagaaaagcaaatatggagtcaagccatatacggtagaggtatagaaacttagaaatttataactaaacgttatttctaccacttcagcaaactgaagactattcactgattcatttaaaatatgtggtggccattattatgtggaaacataagatacaattatcaaaatacttcatttgcatctggtatgaaaatgttcgtttc

SEQ ID NO: 334242 - DNA, 186 bp, Homo sapiens
cctacctgatatcaggatgagataatctcactgaacgtatatacggctagcaatagatgtggctgtggttctttggctgccatggtttgactatgctgggtgcttgccagacataactgcttcagagaaagctagaagaatattcttggacccagaagctagaccagcaggaggttgtagatggta

SEQ ID NO: 334243 - DNA, 240 bp, Homo sapiens
ctcaaagaaattacatcccaaggaactcacgttgaaacccaaatcagaacgtaaggaacgaggttcagatgctgaccctgggggagatggactgaggagggaggtgtccttccagtttggggactcagagaagcctgaggggggctaagctatttttcaagcataaggatgattggttatggatgattgggcagcatcctttgaaaagtcagtgtgacatgagcaaagctaggagagggg

SEQ ID NO: 334244 - DNA, 262 bp, Homo sapiens
cctagttttagaagtttccatatcaccagtcatggggctctgtgtcacatcaaagcaggcccacacacaaaaacccagaaagtggtcaaattagagaaattgaggccctttgttatttttattccaattctaaatttggaattatggaagccccttcagtggttctagttgccctcaattctgtaggttgagataggcttacattttttctctgtctctttatgctatcagtctatgatttcctaaactagatcatgagttc

SEQ ID NO: 334245 - DNA, 216 bp, Homo sapiens
cctagttttagaagtttccataaaaaacccagaaagtggtcaaattagagaaattgaggccctttgttatttttattccaattctaaatttggaattatggaagccccttcagtggttctagttgccctcaattctgtaggttgagataggcttacattttttctctgtctctttatgctatcagtctatgatttcctaaactagatcatgagttc

SEQ ID NO: 334246 - DNA, 257 bp, Homo sapiens
tccaactaaaactctttttcttcacggtcttgggtacatctttattggcagtgtggaaacggactaatacaccccatctttaccgaaaatacaaaaaactagccaggcatggtggcatgcacctgtagtcccaactacttgggagactgagatgcaaggttcacatgagcctgggaagtggaagctgcagtgagccgggagtgtgccactacaccccagcctggatgacagagtgagaccccatctcaaaataaata

SEQ ID NO: 334247 - DNA, 249 bp, Homo sapiens
cgcatctggccgactccactttcttaacctctaattcactcataaaccttctccaatctagcttgagccatccaccattcctaatctcttcaaggtcaccaaggaattccaagtggccagatctaattgacacttctctatcctcatcttaatctctcagcaatgctggacacaagcgactctccccctcttaacatctcttagcttctagcactctgcccccgtggctttcctcctacctcaaagcct

SEQ ID NO: 334248 - DNA, 516 bp, Homo sapiens
aagggataagggagaagagagaaataagaggaaaaaggaaacaaggcctgtgaataaatgaacatacattaaaaatatttaatttcagagcctggagtcctttgaaatagaaggttgcagatgaggatcatagaaggcttgtgtcaaaaacattgcctacctaataatgtatcccagggtcagccctgaaactgtcctaaaacaatcactggaataatccaagcaacactgcattttcagagaagcactcccctaaatgtgatacagtgtagaggcttaggagcctaatcaaaagaacaaagatctataggttctgagggctgaatggaacaggtgcttggcaattctaatatgtacttgcaagagagaaaaggtaactggacaaatgaatcactactgattttattcagagcacactgcagtgtctcttaacaagatcatgtttacctgcagttaaattaatcaccatagctcagccttctgaacttcaagtaatagcaaagggctcacaaggct

SEQ ID NO: 334249 - DNA, 612 bp, Homo sapiens
ttgtgtgttgaatctttggctaaacaattatttgttctaaattagtggaaaacctgttagcctcttttgagaatgctttgctctgaaaaggatttgcattttattttaccacaggcctgaggctgcattaagtctccttacaggagccctcgctcccaagaatgttgtgtttagtcctcccgcttgccgtcccctccagcaggcctcctctcccagccccaccagcgtgtcctcatagtccaccaccttcatttttttcatgtcggtattcacagttcagctcagggctttggggttgctttactttgtcccttggagattttttgtatgttctgtgggcccagcaatgcagcacacacacacacacacacacacacacacacacacacacacacacacactcacacacatacaccatttagatctttagtaggaggtcccttcagagtgtccagccaaccgttatcctggaaatagaggtttcaaagcatttttaaaatgaaaaagacaaagaaatggagggaggaaggaaagaggaaaagtaataccattataatactgagcatttggatgatgggaataaagaaggaaaaaacttttagatgatggtcc

SEQ ID NO: 334250 - DNA, 276 bp, Homo sapiens
tgacctcaggtgatctgcccgcctcggcctcccgaagtgctgggattacaggcgtgagccactgcgcccagtcgctatgtttattcttaattttaagattcatgactcactaaaatcttcccttaaaaaaatacaaataaaaaaatactttttcaagatgtagaactaagaaacaagttgaaaagatctgtctattcttgttcttccagttcttgctggaatttaccttttgccattaacccatagttttagcttgcttctgaacctagagaagga

SEQ ID NO: 334251 - DNA, 505 bp, Homo sapiens
gctctctcatcttggagcatgagccttccatcatctctaccagatgaactctcatttcttctttcaaaaaataaaaaacccaaaaaacccagagatcccaactgtcctggtgtctgcatagtctgcagcacacgccccctccatggcccttcctccataagcagaatcactcctcactgttcctgcagcacctcctgtgtgcccacacagctgtcctgcggtgggctgtgtgtgtgagtgtgccccctctaggacctgagctccttctggagggtgggcacagcatccattcattctgggaatcctggtcggcaccatgctagaacttctgcaagtgagtgcctttggtgctggcccatgggagagctgttggtaaggcatacttttgcagattccagttgctgctgaggttgttgctctttgcacaagtttcttctagtcaccagtgaagtgacatgtgtggcaggcatggcccagggaggctttttcataaagaagaggttga

SEQ ID NO: 334252 - DNA, 493 bp, Homo sapiens
tttactacatctatttttagcacctcatctccatggttcttgccctctcaaaaccaattatagtaaaatccatttaaacagagatactccagtccaagttaagttcttacattttcttttcctggaaagataggctacttatcccaagaattatttgaagttggttcattcttttttaagtgctgtattgaggaggagagaaaaatagtagataaaacattccaatagtacttcattttttttaaaccaatgaattaaaatccacacatattcaatagagaggtctataaaagtttgttaacttctcatgaaacagacatttccaacaatagtatgtaaacatggacatttacatattcaaaagctactttccaagatttttccctcctacccaggttgtcagtataatgacatcgatttaggctatcataggccttttgagctggaaggtcacccaagaaccgtatttgtttaacaccctcacttaaaaaga

SEQ ID NO: 334253 - DNA, 548 bp, Homo sapiens
gtattttggtaaagacattcatctcagtcgtttctctctcccagcttgaccttaggttaatatttcatttgggtcaagaaaagaatatgtaggagagctatgttgctttaacaagaaaatggacaaaaatggatagtttgcctcattaaagaacacgcatgctcgcagaagccattacaatcccgtcgtgcagcagcctgtgctattgaccagcctagaagtcatttttcgactcaaggggagaagggtgggtttctgctctttccttgcaccatctgaaggacacggcagaagataaaggaaaatggccatgagatgctccagcggagctgggtccaaggcctggcgctcaccaaagattgcactactctcagcatggtacaggaagacaactgatgggacaatgcaagctgggacaatctccaacccaaagggtatctcagaaaacagcactagagtctgaaatgattccacctggtcttagcagaaagctggcccggaagttgtaatacatgaagatccaacagccaccacgtgaccaagagaaa

SEQ ID NO: 334254 - DNA, 610 bp, Homo sapiens
gtattttggtaaagacattcatctcagtcgtttctctctcccagcttgaccttaggttaatatttcatttgggtcaagaaaagaatatgtaggagagctatgttgctttaacaagaaaatggacaaaaatggatagtttgcctcattaaagaacacgcatgctcgcagaagccattacaatcccgtcgtgcagcagcctgtgctattgaccagcctagaagtcatttttcgactcaaggggagaagggtgggtttctgctctttccttgcaccatctgaaggacacggcagaagataaaggaaaatggccatgagatgctccagcggagctgggtccaaggcctggcgctcaccaaagattgcactactctcagcatggtacaggaagacaactgatgggacaatgcaagctgggacaatctccaacccaaagggtatctcagaaaacagcactaggtgagaccacagcacaaccccagtcaacctttaaatcagaaaaggagctggaggatgcaattcattgatgtatagaaagttttaaaaagtaaaaactgaaatacagaaaacaaagtttgcaatgtgtaagaaataaaggactgaaatttgtacc

SEQ ID NO: 334255 - DNA, 252 bp, Homo sapiens
ttgcccggtacatcctttataataaaccagtaaatgtgtttccctgggttctctaagctgcattagcaattaaatgaacccaaagagagggttgtgggaacaccaagttgaaacaagtcagaagttctggaggctcagatttgtgactggtgggaagggagagggctgcttggtgggagtgagccctcagttgtggggcctgatgctgtatcagtgaggtagatactgtcatccaggctgggcgtgcagtgc

SEQ ID NO: 334256 - DNA, 2514 bp, Homo sapiens
ccggaactaacctcggctcccttgggaaggccgcgttgcatggccaggagcagcagtctgggccgcgagtgcgggacaccgaggtcaggtctcggaaagggaggacctcctcgtccccaggggccccaggccaggtgcacccttggccgcaggtgcacggtctccggaaagtgcaggcgcccacgtcccagctggaccatggcgcctccgcggaacgtggtgaagattgccatcaagatgcgtgacgccatcccgcagctcatccagctggaccaggcgaagcccctggccgctgtgctgaaggaggtgtgcgacgcgtggagcctgacgcactctgagcgttacgccctgcagtttgcggatgggcaccggagatacatcaccgagaataaccgcgcggagatcaagaatggcagcatcctgtgcctcagcacggccccagaccttgaggctgagcagctcttgggtgggctgcagagtaacagtcctgaagggcgccgggaagccctgaggcgccttgttccgctggcctcggacatgatctttgccagggaggtcatcagccgtaatgggctccagatactaggcaccatcattgaagatggggacgacctaggagaggtgctggccctcagcctgagggccttctcagagctcatggagcacggcgtggtgtcctgggagactctgagcatcccctttgtgaggaaggtggtgtgctacgtgaacatgaacctcatggatgcctccgtgcctcccctggcccttgggctgctggagagtgtgaccttgagcagcccagccctgggccagctggtcaagagcgaggtgcccctggataggctgctggtgcacctacaggtgatgaaccagcagctgcaaaccaaggccatggccctgctgacagccttgctgcagggggccagccctgtggaacgcaagcacatgcttgactatctttggcagaggaaccttcgccagttcatctataagaacatcatccacagtgcagcaccaatgggcgacgagatggctcatcacctgtacgtactgcaggctctcatgctggggctgctggagccgcgcatgcggacgcccctggacccctacagccaggagcagcgggagcagctgcaggtcctacgccaggctgccttcgaggtggagggggagtcctcgggtgccgggctaagtgctgaccgtcgccgttccctctgtgcccgagagttccgcaaactgggcttttctaacagcaacccagcacaggacctggagcgcgtgccccccggtctgctggccctggacaacatgttgtacttctccagaaacgcgcccagcgcgtacagccggtttgtgttggagaacagcagccgcgaggacaagcacgagtgcccctttgcccggggcagcatccagctgacggtgctgctgtgtgagctgctccgtgttggggagccctgctctgagacagcccaggacttctcacccatgttcttcggccaagaccagagcttccacgagctcttctgtgtgggcatccagctgttgaataagacctggaaggagatgcgggctacacaggaggacttcgacaaggtcatgcaggtggtgcgggagcagctggcccgcactctggccctgaagcccacttccctggagctcttccgaaccaaggtgaatgcgctcacttatggggaggtgctgcggctgcggcagactgaacggctgcaccaggagggcacactggctccccctatactggagctgcgggagaagctgaagccagagctcatgggcctgatccgccagcagcgcttgctccgcctctgtgaggggacgctcttccgcaagatcagcagccggcggcgccaggataagctgtggttctgctgcctgtcccccaaccacaagctgctgcagtacggagacatggaggagggcgccagcccgcctaccctggagagtctgcccgagcaactccctgtggccgacatgagggcactcctgacaggcaaggactgcccccatgtccgggagaagggctccgggaagcagaacaaggacctctatgagttggccttctcaatcagctatgaccgtggggaggaggaagcgtacctcaacttcattgccccctccaagcgggagttctacctgtggacagatgggctcagtgccttgctgggcagtcccatgggcagcgagcagacacggctggacctggagcagctgctgaccatggagaccaagctgcgtctgctggagctggagaacgtgcccatccccgagcggccaccccctgtgcccccaccccccaccaacttcaacttctgctatgactgcagcatcgctgaaccttgacagtgtggctggccatgggccacagctgcggccactgcagcagccatgaagggcagtgggtagaggagtgcaggcaccctgaccagcagagattgctgcagaaataaagtctgcttggctcttgggatatgttgagccagctctgtaccttgc

SEQ ID NO: 334257 - DNA, 1851 bp, Homo sapiens
cgggctgcaggaattcggcacgaggaagagagagagagagagagagagagagagagagagagagagagagagagagagagagctcgtgccgaattcggcacgaggagtttttttttttttttttttttttttaagtagagacggggtttcactgtgttagccaggttggcctccatctcctgacctcgtgatccgcccgccttggcctcccaaagtgctgggattacaggcgtgagccaccgcgcccagcctaagccccctttctttctaccccctcagcacatgcttgactatctttggcagaggaaccttcgccagttcatctataagaacatcatccacagtgcagcaccaatgggcgacgagatggctcatcacctgtacgtactgcaggctctcatgctggggctgctggagccgcgcatgcggacgcccctggacccctacagccaggagcagcgggagcagctgcaggtcctacgccaggctgccttcgaggtggagggggagtcctcgggtgccgggctaagtgctgaccgtcgccgttccctctgtgcccgagagttccgcaaactgggcttttctaacagcaacccagcacaggacctggagcgcgtgccccccggtctgctggccctggacaacatgttgtacttctccagaaacgcgcccagcgcgtacagccggtttgtgttggagaacagcagccgcgaggacaagcacgagtgcccctttgcccggggcagcatccagctgacggtgctgctgtgtgagctgctccgtgttggggagccctgctctgagacagcccaggacttctcacccatgttcttcggccaagaccagagcttccacgagctcttctgtgtgggcatccagctgttgaataagacctggaaggagatgcgggctacacaggaggacttcgacaaggtcatgcaggtggtgcgggagcagctggcccgcactctggccctgaagcccacttccctggagctcttccgaaccaaggtgaatgcgctcacttatggggaggtgctgcggctgcggcagactgaacggctgcaccaggagggcacactggctccccctatactggagctgcgggagaagctgaagccagagctcatgggcctgatccgccagcagcgcttgctccgcctctgtgaggggacgctcttccgcaagatcagcagccggcggcgccaggataagctgtggttctgctgcctgtcccccaaccacaagctgctgcagtacggagacatggaggagggcgccagcccgcctaccctggagagtctgcccgagcaactccctgtggccgacatgagggcactcctgacaggcaaggactgcccccatgtccgggagaagggctccgggaagcagaacaaggacctctatgagttggccttctcaatcagctatgaccgtggggaggaggaagcgtacctcaacttcattgccccctccaagcgggagttctacctgtggacagatgggctcagtgccttgctgggcagtcccatgggcagcgagcagacacggctggacctggagcagctgctgaccatggagaccaagctgcgtctgctggagctggagaacgtgcccatccccgagcggccaccccctgtgcccccaccccccaccaacttcaacttctgctatgactgcagcatcgctgaaccttgacagtgtggctggccatgggccacagctgcggccactgcagcagccatgaagggcagtgggtagaggagtgcaggcaccctgaccagcagagattgctgcagaaataaagtctgcttggctcttgggatatgttgagccagctctgtaccttgc

SEQ ID NO: 334258 - DNA, 2628 bp, Homo sapiens
ccggaactaacctcggctcccttgggaaggccgcgttgcatggccaggagcagcagtctgggccgcgagtgcgggacaccgaggtcaggtctcggaaagggaggacctcctcgtccccaggggccccaggccaggtgcacccttggccgcaggtgcacggtctccggaaagtgcaggcgcccacgtcccagctggaccatggcgcctccgcggaacgtggtgaagattgccatcaagatgcgtgacgccatcccgcagctcatccagctggaccaggcgaagcccctggccgctgtgctgaaggaggtgtgcgacgcgtggagcctgacgcactctgagcgttacgccctgcagtttgcggatgggcaccggagatacatcaccgagaataaccgcgcggagatcaagaatggcagcatcctgtgcctcagcacggccccagaccttgaggctgagcagctcttgggtgggctgcagagtaacagtcctgaagggcgccgggaagccctgaggcgccttgttccgctggcctcggacatgatctttgccagggaggtcatcagccgtaatgggctccagatactaggcaccatcattgaagatggggacgacctaggagaggtgctggccctcagcctgagggccttctcagagctcatggagcacggcgtggtgtcctgggagactctgagcatcccctttgtgaggaaggtggtgtgctacgtgaacatgaacctcatggatgcctccgtgcctcccctggcccttgggctgctggagagtgtgaccttgagcagcccagccctgggccagctggtcaagagcgaggtgcccctggataggctgctggtgcacctacaggtgatgaaccagcagctgcaaaccaaggccatggccctgctgacagccttgctgcagggggccagccctgtggaacgcaagcacatgcttgactatctttggcagaggaaccttcgccagttcatctataagaacatcatccacagtgcagcaccaatgggcgacgagatggctcatcacctgtacgtactgcaggctctcatgctggggctgctggagccgcgcatgcggacgcccctggacccctacagccaggagcagcgggagcagctgcaggtcctacgccaggctgccttcgaggtggagggggagtcctcgggtgccgggctaagtgctgaccgtcgccgttccctctgtgcccgagagttccgcaaactgggcttttctaacagcaacccagcacaggacctggagcgcgtgccccccggtctgctggccctggacaacatgttgtacttctccagaaacgcgcccagcgcgtacagccggtttgtgttggagaacagcagccgcgaggacaagcacgagtgcccctttgcccggggcagcatccagctgacggtgctgctgtgtgagctgctccgtgttggggagccctgctctgagacagcccaggacttctcacccatgttcttcggccaagaccagagcttccacgagctcttctgtgtgggcatccagctgttgaataagacctggaaggagatgcgggctacacaggaggacttcgacaaggtcatgcaggtggtgcgggagcagctggcccgcactctggccctgaagcccacttccctggagctcttccgaaccaaggtgaatgcgctcacttatggggaggtgctgcggctgcggcagactgaacggctgcaccaggagggcacactggctccccctatactggagctgcgggagaagctgaagccagagctcatgggcctgatccgccagcagcgcttgctccgcctctgtgaggggacgctcttccgcaagatcagcagccggcggcgccagggtctctgaatgggcatgggcagggggcagagggcaggcagagggcaggcagagggcggctggcttggtgtcaggacctctcagcactctggccctcttccctttctccacgcagataagctgtggttctgctgcctgtcccccaaccacaagctgctgcagtacggagacatggaggagggcgccagcccgcctaccctggagagtctgcccgagcaactccctgtggccgacatgagggcactcctgacaggcaaggactgcccccatgtccgggagaagggctccgggaagcagaacaaggacctctatgagttggccttctcaatcagctatgaccgtggggaggaggaagcgtacctcaacttcattgccccctccaagcgggagttctacctgtggacagatgggctcagtgccttgctgggcagtcccatgggcagcgagcagacacggctggacctggagcagctgctgaccatggagaccaagctgcgtctgctggagctggagaacgtgcccatccccgagcggccaccccctgtgcccccaccccccaccaacttcaacttctgctatgactgcagcatcgctgaaccttgacagtgtggctggccatgggccacagctgcggccactgcagcagccatgaagggcagtgggtagaggagtgcaggcaccctgaccagcagagattgctgcagaaataaagtctgcttggctcttgggatatgttgagccagctctgtaccttgc

SEQ ID NO: 334259 - DNA, 829 bp, Homo sapiens
ccggaactaacctcggctcccttgggaaggccgcgttgcatggccaggagcagcagtctgggccgcgagtgcgggacaccgaggtcaggtctcggaaagggaggacctcctcgtccccaggggccccaggccaggtgcacccttggccgcaggtgcacggtctccggaaagtgcaggcgcccacgtcccagctggaccatggcgcctccgcggaacgtggtgaagattgccatcaagatgcgtgacgccatcccgcagctcatccagctggaccaggcgaagcccctggccgctgtgctgaaggaggtgtgcgacgcgtggagcctgacgcactctgagcgttacgccctgcagtttgcggatgggcaccggagatacatcaccgagaataaccgcgcggagatcaagaatggcagcatcctgtgcctcagcacggccccagaccttgaggctgagcagctcttgggtgggctgcagagtaacagtcctgaagggcgccgggaagccctgaggcgccttgttccgctggcctcggacatgatctttgccagggaggtcatcagccgtaatgggctccagatactaggcaccatcattgaagatggggacgacctaggagaggtgctggccctcagcctgagggccttctcagagctcatggagcacggcgtggtgtcctgggagactctgagcatcccctttgtgaggaaggtgggtgggctttcctagggcagcgggtgggggcagtggagcagtggggctggcagatggtggggatccgtctagtagtctgaccctgcatggcactgcaatgcttgtgcacttggcc

SEQ ID NO: 334260 - DNA, 251 bp, Homo sapiens
gagggcgggagggcaggaggggcggcgccccctgccggcctcgctgagcctcgtgcccctcaggtggagcctgacgcactctgagcgttacgccctgcagtttgcggatgggcaccggagatacatcaccgagaatgtgagtcccctctccccagccccaagctcggccttccgacccctctaacccacctggccccgataactctggctcttcatcccactaccggagcgcgatctgttattcaccccca

SEQ ID NO: 334261 - DNA, 2282 bp, Homo sapiens
atccctccctgcccaggccgcgagaatgaccactccacttgcaggcgaagcccctggccgctgtgctgaaggaggtgtgcgacgcgtggagcctgacgcactctgagcgttacgccctgcagtttgcggatgggcaccggagatacatcaccgagaataaccgcgcggagatcaagaatggcagcatcctgtgcctcagcacggccccagaccttgaggctgagcagctcttgggtgggctgcagagtaacagtcctgaagggcgccgggaagccctgaggcgccttgttccgctggcctcggacatgatctttgccagggaggtcatcagccgtaatgggctccagatactaggcaccatcattgaagatggggacgacctaggagaggtgctggccctcagcctgagggccttctcagagctcatggagcacggcgtggtgtcctgggagactctgagcatcccctttgtgaggaaggtggtgtgctacgtgaacatgaacctcatggatgcctccgtgcctcccctggcccttgggctgctggagagtgtgaccttgagcagcccagccctgggccagctggtcaagagcgaggtgcccctggataggctgctggtgcacctacaggtgatgaaccagcagctgcaaaccaaggccatggccctgctgacagccttgctgcagggggccagccctgtggaacgcaagcacatgcttgactatctttggcagaggaaccttcgccagttcatctataagaacatcatccacagtgcagcaccaatgggcgacgagatggctcatcacctgtacgtactgcaggctctcatgctggggctgctggagccgcgcatgcggacgcccctggacccctacagccaggagcagcgggagcagctgcaggtcctacgccaggctgccttcgaggtggagggggagtcctcgggtgccgggctaagtgctgaccgtcgccgttccctctgtgcccgagagttccgcaaactgggcttttctaacagcaacccagcacaggacctggagcgcgtgccccccggtctgctggccctggacaacatgttgtacttctccagaaacgcgcccagcgcgtacagccggtttgtgttggagaacagcagccgcgaggacaagcacgagtgcccctttgcccggggcagcatccagctgacggtgctgctgtgtgagctgctccgtgttggggagccctgctctgagacagcccaggacttctcacccatgttcttcggccaagaccagagcttccacgagctcttctgtgtgggcatccagctgttgaataagacctggaaggagatgcgggctacacaggaggacttcgacaaggtcatgcaggtggtgcgggagcagctggcccgcactctggccctgaagcccacttccctggagctcttccgaaccaaggtgaatgcgctcacttatggggaggtgctgcggctgcggcagactgaacggctgcaccaggagggcacactggctccccctatactggagctgcgggagaagctgaagccagagctcatgggcctgatccgccagcagcgcttgctccgcctctgtgaggggacgctcttccgcaagatcagcagccggcggcgccaggataagctgtggttctgctgcctgtcccccaaccacaagctgctgcagtacggagacatggaggagggcgccagcccgcctaccctggagagtctgcccgagcaactccctgtggccgacatgagggcactcctgacaggcaaggactgcccccatgtccgggagaagggctccgggaagcagaacaaggacctctatgagttggccttctcaatcagctatgaccgtggggaggaggaagcgtacctcaacttcattgccccctccaagcgggagttctacctgtggacagatgggctcagtgccttgctgggcagtcccatgggcagcgagcagacacggctggacctggagcagctgctgaccatggagaccaagctgcgtctgctggagctggagaacgtgcccatccccgagcggccaccccctgtgcccccaccccccaccaacttcaacttctgctatgactgcagcatcgctgaaccttgacagtgtggctggccatgggccacagctgcggccactgcagcagccatgaagggcagtgggtagaggagtgcaggcaccctgaccagcagagattgctgcagaaataaagtctgcttggctcttgggatatgttgagccagctctgtaccttgc

SEQ ID NO: 334262 - DNA, 1817 bp, Homo sapiens
ggagccgcgcatgcggacgcccctggacccctacagccaggagcagcgggagcagctgcaggtcctacgccaggctgctggagagtgtgaccttgagcagcccagccctgggccagctggtcaagagcgaggtgcccctggataggctgctggtgcacctacaggtgatgaaccagcagctgcaaaccaaggccatggccctgctgacagccttgctgcagggggccagccctgtggaacgcaagcacatgcttgactatctttggcagaggaaccttcgccagttcatctataagaacatcatccacagtgcagcaccaatgggcgacgagatggctcatcacctgtacgtactgcaggctctcatgctggggctgctggagccgcgcatgcggacgcccctggacccctacagccaggagcagcgggagcagctgcaggtcctacgccaggctgccttcgaggtggagggggagtcctcgggtgccgggctaagtgctgaccgtcgccgttccctctgtgcccgagagttccgcaaactgggcttttctaacagcaacccagcacaggacctggagcgcgtgccccccggtctgctggccctggacaacatgttgtacttctccagaaacgcgcccagcgcgtacagccggtttgtgttggagaacagcagccgcgaggacaagcacgagtgcccctttgcccggggcagcatccagctgacggtgctgctgtgtgagctgctccgtgttggggagccctgctctgagacagcccaggacttctcacccatgttcttcggccaagaccagagcttccacgagctcttctgtgtgggcatccagctgttgaataagacctggaaggagatgcgggctacacaggaggacttcgacaaggtcatgcaggtggtgcgggagcagctggcccgcactctggccctgaagcccacttccctggagctcttccgaaccaaggtgaatgcgctcacttatggggaggtgctgcggctgcggcagactgaacggctgcaccaggagggcacactggctccccctatactggagctgcgggagaagctgaagccagagctcatgggcctgatccgccagcagcgcttgctccgcctctgtgaggggacgctcttccgcaagatcagcagccggcggcgccaggataagctgtggttctgctgcctgtcccccaaccacaagctgctgcagtacggagacatggaggagggcgccagcccgcctaccctggagagtctgcccgagcaactccctgtggccgacatgagggcactcctgacaggcaaggactgcccccatgtccgggagaagggctccgggaagcagaacaaggacctctatgagttggccttctcaatcagctatgaccgtggggaggaggaagcgtacctcaacttcattgccccctccaagcgggagttctacctgtggacagatgggctcagtgccttgctgggcagtcccatgggcagcgagcagacacggctggacctggagcagctgctgaccatggagaccaagctgcgtctgctggagctggagaacgtgcccatccccgagcggccaccccctgtgcccccaccccccaccaacttcaacttctgctatgactgcagcatcgctgaaccttgacagtgtggctggccatgggccacagctgcggccactgcagcagccatgaagggcagtgggtagaggagtgcaggcaccctgaccagcagagattgctgcagaaataaagtctgcttggctcttgggatatgttgagccagctctgtaccttgc

SEQ ID NO: 334263 - DNA, 1110 bp, Homo sapiens
gctgggaggcctgggccagggcagggggctgatctgggtacagagcttaggccctgagctgagcttgggcggccccaggtcatgcaggtggtgcgggagcagctggcccgcactctggccctgaagcccacttccctggagctcttccgaaccaaggtgaatgcgctcacttatggggaggtgctgcggctgcggcagactgaacggctgcaccaggagggcacactggctccccctatactggagctgcgggagaagctgaagccagagctcatgggcctgatccgccagcagcgcttgctccgcctctgtgaggggacgctcttccgcaagatcagcagccggcggcgccagggtctctgaatgggcatgggcagggggcagagggcaggcagagggcaggcagagggcggctggcttggtgtcaggacctctcagcactctggccctcttccctttctccacgcagataagctgtggttctgctgcctgtcccccaaccacaagctgctgcagtacggagacatggaggagggcgccagcccgcctaccctggagagtctgcccgagcaactccctgtggccgacatgagggcactcctgacaggcaaggactgcccccatgtccgggagaagggctccgggaagcagaacaaggacctctatgagttggccttctcaatcagctatgaccgtggggaggaggaagcgtacctcaacttcattgccccctccaagcgggagttctacctgtggacagatgggctcagtgccttgctgggcagtcccatgggcagcgagcagacacggctggacctggagcagctgctgaccatggagaccaagctgcgtctgctggagctggagaacgtgcccatccccgagcggccaccccctgtgcccccaccccccaccaacttcaacttctgctatgactgcagcatcgctgaaccttgacagtgtggctggccatgggccacagctgcggccactgcagcagccatgaagggcagtgggtagaggagtgcaggcaccctgaccagcagagattgctgcagaaataaagtctgcttggctcttgggatatgttgagccagctctgtaccttgc

SEQ ID NO: 334264 - DNA, 427 bp, Homo sapiens
cacagctactgtgtgccaagcactggagtaagtacattacaaatttcacccctactccccatctctataaaatgttatcctcatgcgacggaacaggaaaactgagaccaagggaattagccgcctcactgacagtcacatgctgagtggcagacaggactcaaatccagatgtgcccaactgcagagaccatgttctgtggagcaggcagccgcctctcagctctcactcagtgtttatgtagctggcgctaagtgccaggcggccagtgcaaggtgtggggtactcagagggaaccaaacagacaaggtccctgctctcacagagctcatatgctctgtccccagccctgtctctcttcttccaagcctggaagagggcaggaaccctccagtcacagggggttccactggcacaaacaaggaat

SEQ ID NO: 334265 - DNA, 581 bp, Homo sapiens
tttgagaccagcctgggcaacatagcaagacttagtctctacaaaaaattaaaaaataagttgggcatgtggtgcaggcctgtagtcccagctactagggaggctgaggcaggaggatcgcctgagccaacaagtttgaggctgcagtgagctatgatggtaccactgtactccagcctgtgtaacagagagagactgtgtctctaaaaaacaaaaacaagaaaactcgcatttgaaaaacaagacacaactgaaagactccaaacctaacccttttcagaaaatcagaggataaccatttacagtaaagaaaaagggtaattttaatggcagaagttaaaagttcaaagaaaattgcatgttgggtattttttgtatacttatcaccatgctgacagcagtaaggtgattcaagggaaatacatgaaattgttcctgcccataggaatgtgtgttaccttcagggagataagatgataacagtaaaagttatgtagtctactgtgtgtagaacactgccagtttctttatacacagacgtggtggttctccaaggtatatatattttatccctgttttag

SEQ ID NO: 334266 - DNA, 508 bp, Homo sapiens
gctgaggcgggcggatcacctgaggtcaggagtttgagaccagcctgaccaacatggagaaaccccatctctatcaaaaatacaaaataggccaggcgtggtggtgcatgcccgtaaccccagctactcaagaggctgaggcaggagaatagtttgaacccgggaggcagaggttgtggtgagctgagatcgtgccattgcactccagcctgggaaacaagagtgaaactccacctcaaaaaaaaaacaaaataaagaactaattcactgtgactcctacaaccaaagttaaactgaaagagctgctttttatctcccaaatccccatgaagcagccaggatggtaaatgagatgccctctccttccagcagcctccaaggtcggagggaccaaggggcttggaagtcaagaccaagatcaaaccaggtctctcccctgctccacggtcaaccgtggctccctactgctcccagaagaaagcccaactccctgcctgcctgccggtcc

SEQ ID NO: 334267 - DNA, 830 bp, Homo sapiens
tgcagtcaaattgttgtctcagggtccttctgaagacccaatctaagacagaagccttctcagacagggtgacatctttccgagctaggatttgagaggtgtttggcacagagaaggagagggactgccttcttgcctatgctggaagcctcttttgtatttgagtcaaaaaaaggctcatgtcctccagctggatttggggtttatctgagccaaacccagttgagagaggtcccaggcatgatctgatacaatagagtccaagctctgtcattagagcctgagtctttaggtctctcctctccatctgcactgcccttgactaaggtcaaacttcatcagctttcactgagactatttctcaacttttgcacttgtcttcatgaatcctccacataagcagtcaaaggaatacttctaaaatgcacttcagattatgtcactcccctgctcaaacacctcctctggctccccatggcccccagactcacagtcatggcattcaaagcttatcagtgtgtcccagtacaggcttcccacattccccactttctctgttatcttggacacagttctctcagcagtctacgctgcttgtcattctctgggcctttgcacatgcttttccttttgccaggaacattcttctgcttcttcatctagtgaattatgactcatcttgtaaaggccatttttatcctgtgacccccaccctaaagtcctggtcagttccaatatctatgctctcacagcactcggttcacagaagagcagaacagcacagcggttaagaacatgggcttgttgcaagacttcctggatttgaacta

SEQ ID NO: 334268 - DNA, 617 bp, Homo sapiens
ccccccccccacccccccgcccgcaattagatttcaagcaatccagagccctatacaccagggtcattaagagcagttaaagctgaaaacaacctgctctgtgaatggtcttcccctaattcccattcatctgatgccagtgcctcctgagagagggtgggggctatctctgaatcatccagaatgagaaaggttctgtgtattcaaactcatactctatacagtctgacgccatgctgtgcagtgaccacaggtttctcggtgttattaggagtcttggaaaggagatgggtggtaaatggataacaacagcagagccaagaaactactgctgaggtgggtttcaatattgatgtgtttctctctagcccttatttacagagcacagagctagtacttatataagaatgagtcccttcctttcttaatagcctcttcccaaaagactgttttaagtcaagaattccagttgagttggttgtaagaatagatatcctttcccacattatcattttaggtaggaactaacagattccattgatgctttgaagcagcgatctttggaggtttttaaaaatagtaccataatgcaaattaggttatgtaagctttacagc

SEQ ID NO: 334269 - DNA, 536 bp, Homo sapiens
gcgtggacccggaaggcggaggaaaggggccggggacctgtgcgagttttgttaacactcctccctcttgttgaggacctggatagaactgtttgtggagaccattgcaaaagatgcctactgttgcgctcagcagggaaaaaggaaaacccttcagaggagagacttggataatgcaatagaagctgtggatgaatttgcttttctggaaggtactttagattgattgccgagcggggcagttttgtgagccttcatctgaagccttcagttcacccctctgcacaggcctcagctttgaagaacggagtctttgcacttacacacactcttcctgttctgccttcacctatgccgggataagcagagatctcatcaattagctcttctctgcaaggtcttccactatttctgtctgtcttccatatcaagcctggatgcagctgctgctgcttagagcagagatgaagaaagtgttctgcataagtggcttcctgaatgatgaggaccagaataaaggtttttgatcaacctca

SEQ ID NO: 334270 - DNA, 866 bp, Homo sapiens
  misc_feature (85)..(85): n is a, c, g, or t
agtcggcggccgcgcgcagcacgctcaaggccgggatggcggcggcggcggcggcaggaagcgggacgccccgagaggaggaggnacctgctggggaggcagcggcctcgcagccccaggccccaacgagtgtgcctggggctcgtctctcgaggttgcctctggcgcgagtgaaggccttggtgaaggcagatcccgacgtgacgctagcgggacaggaagccatcttcattctggcacgagccgcggaactgtttgtggagaccattgcaaaagatgcctactgttgcgctcagcagggaaaaaggaaaacccttcagaggagagacttggataatgcaatagaagctgtggatgaatttgcttttctggaaggtactttagattgattgccgagcggggcagttttgtgagccttcatctgaagccttcagttcacccctctgcacaggcctcagctttgaagaacggagtctttgcacttacacacactcttcctgttctgccttcacctatgccgggataagcagagatctcatcaattagctcttctctgcaaggtcttccactatttctgtctgtcttccatatcaagcctggatgcagctgctgctgcttagagcagagatgaagaaagtgttctgcataagtggcttcctgaatgatgaggaccagaataaaggtttttgatcaacctcaaaaaaaaaaatttattttttatattatataatatattttagaaaaaaaatcttgaggggggccccggtccccaaattccccttatagggagccgttttacgcgcgctaattggccgtggttttacaactttgggactgggaaaaccctggggttcccccatttaatt

SEQ ID NO: 334271 - DNA, 703 bp, Homo sapiens
gcgtggacccggaaggcggaggaaaggggccggggacctgtgcgagttttgttaacactcctccctcttgttgaggacctggatagaactgtttgtggagaccattgcaaaagatgcctactgttgcgctcagcagggaaaaaggaaaacccttcagaggagagacttggataatgcaatagaagctgtggatgaatttgcttttctggaaggtactttagattgattgccgagcggggcagttttgtgagccttcatctgaagccttcagttcacccctctgcacaggcctcagctttgaagaacggagtctttgcacttacacacactcttcctgttctgccttcacctatgccgggataagcagagatctcatcaattagctcttctctgcaaggtcttccactatttctgtctgtcttccatatcaagcctggatgcagctgctgctgcttagagcagagatgaagaaagtgttctgcataagtggcttcctgaatgatgaggaccagaataaaggtttttgatcaacctcaaaaaaaaaaatttattttttatattatataatatattttagaaaaaaaatcttgaggggggccccggtccccaaattccccttatagggagccgttttacgcgcgctaattggccgtggttttacaactttgggactgggaaaaccctggggttcccccatttaatt

SEQ ID NO: 334272 - DNA, 682 bp, Homo sapiens
  misc_feature (85)..(85): n is a, c, g, or t
agtcggcggccgcgcgcagcacgctcaaggccgggatggcggcggcggcggcggcaggaagcgggacgccccgagaggaggaggnacctgctggggaggcagcggcctcgcagccccaggccccaacgagtgtgcctggggctcgtctctcgaggttgcctctggcgcgagtgaaggccttggtgaaggcagatcccgacgtgacgctagcgggacaggaagccatcttcattctggcacgagccgcggaactgtttgtggagaccattgcaaaagatgcctactgttgcgctcagcagggaaaaaggaaaacccttcagaggagagacttggataatgcaatagaagctgtggatgaatttgcttttctggaagaaatgaagtgttaaaagagaagtatacaacaagtaacgtggaagctctgatgagaaaagaatcaattctgtctgtgaggattatggaccagaccctgagaagataatctttgaagtacccttggggcataaatggaatttcacttcaacggttataaaataattagtcttggctgcaacacctttttttttttttggagagggagtttcgtgcttgtggcccaggctggagtgtaagggcgtgatctgggctcactgcaacttccacctcccaggttcaagcgattctcctgcctcagcctcctgag

SEQ ID NO: 334273 - DNA, 821 bp, Homo sapiens
  misc_feature (85)..(85): n is a, c, g, or t
agtcggcggccgcgcgcagcacgctcaaggccgggatggcggcggcggcggcggcaggaagcgggacgccccgagaggaggaggnacctgctggggaggcagcggcctcgcagccccaggccccaacgagtgtgcctggggctcgtctctcgaggttgcctctggcgcgagtgaaggccttggtgaaggcagatcccgacgtgacgctagcgggacaggaagccatcttcattctggcacgagccgcggaactgtttgtggagaccattgcaaaagatgcctactgttgcgctcagcagggaaaaaggaaaacccttcagaggagagacttggataatgcaatagaagctgtggatgaatttgcttttctggaagtggtgaaatcgcctgaagatgtgatgcatttctcaggatgtatccttgttgttgagcgacacatgtattttgattgaatagcttagcaaaagccatgtatccttattctcccagggtgttctcattacctccttcaagccttattacctttagaaatatcttgatttattccactcttttttactcctttgttctgcatctccctgtcaacctaggcccctggtccttttgatagatattttttaaatgtcttattagatagatagactaccatggccaactctatgtctagactattgagcattcttttaatttgcagatttttcttcagcctctctttccacctactcatttttcttaaaattaacttttgttagtcctacctaaggcaggcactccttgtgacagactttctgtaagttctgcagtcaaaaatgtttggagcc

SEQ ID NO: 334274 - DNA, 518 bp, Homo sapiens
  misc_feature (85)..(85): n is a, c, g, or t
agtcggcggccgcgcgcagcacgctcaaggccgggatggcggcggcggcggcggcaggaagcgggacgccccgagaggaggaggnacctgctggggaggcagcggcctcgcagccccaggccccaacgagtgtgcctggggctcgtctctcgaggttgcctctggcgcgagtgaaggccttggtgaaggcagatcccgacgtgacgctagcgggacaggaagccatcttcattctggcacgagccgcggaactgtttgtggagaccattgcaaaagatgcctactgttgcgctcagcagggaaaaaggaaaacccttcagaggagagacttggataatgcaatagaagctgtggatgaatttgcttttctggaagcattattcacaataaccaagatatagaatcaacctgtgttcctcaatggattaatagataaagaaaatgtgataaatatacacaatggaatatgattcagctttaaaaaaggagatgctttcatgtgtgacaacatgggatga

SEQ ID NO: 334275 - DNA, 667 bp, Homo sapiens
atctccagggcctcgtacagaacttgtaggagtctttagtgaatgagggagaatactgggaagagggtagcggaatggatcttcatgaagtccaggacaatcttagcttccagaacattttcttgccccgagcctttcttctccctttctgcccccacccacaaaccggagccctcacctcctcagtgtgttagaacccattactaaaactttgcttttttacttcacaggaactgtttgtggagaccattgcaaaagatgcctactgttgcgctcagcagggaaaaaggaaaacccttcagaggagagacttggataatgcaatagaagctgtggatgaatttgcttttctggaaggatattgcgctcatcttcaaggaatgaaccacagtggtctaagccaatgaagtaaatctatcctcctttgccagtgattgatgtaccgatggccatgtgatccagccctagtcttttgagggcttccggaaagatctaatcccttggtgaaaagagaagtccatatatgccctcaccacaacctcaaaatttcctaaaagaaaagaaatccaccttacaagctaagctcttgcatatgaagaagaagtccctgaggactgggaatagctaagaaaatctctgctcttttgactttcaccatgaggagggg

SEQ ID NO: 334276 - DNA, 662 bp, Homo sapiens
  misc_feature (85)..(85): n is a, c, g, or t
  misc_feature (628)..(628): n is a, c, g, or t
agtcggcggccgcgcgcagcacgctcaaggccgggatggcggcggcggcggcggcaggaagcgggacgccccgagaggaggaggnacctgctggggaggcagcggcctcgcagccccaggccccaacgagtgtgcctggggctcgtctctcgaggttgcctctggcgcgagtgaaggccttggtgaaggcagatcccgacgtgacgctagcgggacaggaagccatcttcattctggcacgagccgcggaactgtttgtggagaccattgcaaaagatgcctactgttgcgctcagcagggaaaaaggaaaacccttcagaggagagacttggataatgcaatagaagctgtggatgaatttgcttttctggaaggtactttagattgattgccgagcggggcagttttgtgagccttcatctgaagccttcagttcacccctctgcacaggcctcagctttgaagaacggagtctttgcacttacacacactcttcctgttctgccttcacctatgccgggataagcagagatctcatcaattagctcttctctgcaaggtcttccactatttctgtctgtcttccatatcaagcctggatgcagctgctgctgcttagaggagggncttagagtcgactagatgcaagttgatgcgttaa

SEQ ID NO: 334277 - DNA, 382 bp, Homo sapiens
ggagccattgtggctccggccggttgcgctcagcagggaaaaagggcttttctggaaggtactttagattgattgccgagcggggcagttttgtgagccttcatctgaagccttcagttcacccctctgcacaggcctcagctttgaagaacggagtctttgcacttacacacactcttcctgttctgccttcacctatgccgggataagcagagatctcatcaattagctcttctctgcaaggtcttccactatttctgtctgtcttccatatcaagcctggatgcagctgctgctgcttagagcagagatgaagaaagtgttctgcataagtggcttcctgaatgatgaggaccagaataaaggtttttgatcaacctca

SEQ ID NO: 334278 - DNA, 583 bp, Homo sapiens
tgcccagcttgttacactaatccagcttctgaggtcccctgatatactcattgctctttgtatgtttaggtactttagattgattgccgagcggggcagttttgtgagccttcatctgaagccttcagttcacccctctgcacaggcctcagctttgaagaacggagtctttgcacttacacacactcttcctgttctgccttcacctatgccgggataagcagagatctcatcaattagctcttctctgcaaggtcttccactatttctgtctgtcttccatatcaagcctggatgcagctgctgctgcttagagcagagatgaagaaagtgttctgcataagtggcttcctgaatgatgaggaccagaataaaggtttttgatcaacctcaacctcagtccagtgtgttttataatctcgcctttgttcctaccctgtgactggagagtcaccatacctggtcacagaccttcctgatcttccctgccagccattctaacatacagtcctttcattaattttgttcttttatttttccagcacatcaccagaaagtggttccagaatttatggaacaccac

SEQ ID NO: 334279 - DNA, 699 bp, Homo sapiens
  misc_feature (85)..(85): n is a, c, g, or t
agtcggcggccgcgcgcagcacgctcaaggccgggatggcggcggcggcggcggcaggaagcgggacgccccgagaggaggaggnacctgctggggaggcagcggcctcgcagccccaggccccaacgagtgtgcctggggctcgtctctcgaggttgcctctggcgcgagtgaaggccttggtgaaggcagatcccgacgtgacgctagcgggacaggaagccatcttcattctggcacgagccgcggaactgtttgtggagaccattgcaaaagatgcctactgttgcgctcagcagggaaaaaggaaaacccttcagaggagagacttggataatgcaatagaagctgtggatgaatttgcttttctggaaggtactttagattgattgccgagcggggcagttttgtgagccttcatctgaagccttcagttcacccctctgcacaggcctcagctttgaagaacggagtctttgcacttacacacactcttcctgttctgccttcacctatgccgggataagcagagatctcatcaattagctcttctctgcaaggtcttccactatttctgtctgtcttccatatcaagcctggatgcagctgctgctgcttagagcagagatgaagaaagtgttctgcataagtggcttcctgaatgatgaggaccagaataaaggtttttgatcaacctca

SEQ ID NO: 334280 - DNA, 750 bp, Homo sapiens
  misc_feature (85)..(85): n is a, c, g, or t
agtcggcggccgcgcgcagcacgctcaaggccgggatggcggcggcggcggcggcaggaagcgggacgccccgagaggaggaggnacctgctggggaggcagcggcctcgcagccccaggccccaacgagtgtgcctggggctcgtctctcgaggttgcctctggcgcgagtgaaggccttggtgaaggcagatcccgacgtgacgctagcgggacaggaagccatcttcattctggcacgagccgcggaactgtttgtggagaccattgcaaaagatgcctactgttgcgctcagcagggaaaaaggaaaacccttcagaggagagacttggcaactggggatttgatttctgactcttgtctggctgggaaccctcacctggataatgcaatagaagctgtggatgaatttgcttttctggaaggtactttagattgattgccgagcggggcagttttgtgagccttcatctgaagccttcagttcacccctctgcacaggcctcagctttgaagaacggagtctttgcacttacacacactcttcctgttctgccttcacctatgccgggataagcagagatctcatcaattagctcttctctgcaaggtcttccactatttctgtctgtcttccatatcaagcctggatgcagctgctgctgcttagagcagagatgaagaaagtgttctgcataagtggcttcctgaatgatgaggaccagaataaaggtttttgatcaacctca

SEQ ID NO: 334281 - DNA, 465 bp, Homo sapiens
  misc_feature (85)..(85): n is a, c, g, or t
agtcggcggccgcgcgcagcacgctcaaggccgggatggcggcggcggcggcggcaggaagcgggacgccccgagaggaggaggnacctgctggggaggcagcggcctcgcagccccaggccccaacgagtgtgcctggggctcgtctctcgaggttgcctctggcgcgagtgaaggccttggtgaaggcagatcccgacgtgacgctagcgggacaggaagccatcttcattctggcacgagccgcggaactgtttgtggagaccattgcaaaagatgcctactgttgcgctcagcagggaaaaaggaaaacccttcagaggagagacttggataatgcaatagaagctgtggatgaatttgcttttctggaaggtgagttccctctcagtgggcaatcatttccgcctgtcttttgcatgttgatgtgaaattcaaaatctcataaaacggatgcctgcttct

SEQ ID NO: 334282 - DNA, 465 bp, Homo sapiens
  misc_feature (85)..(85): n is a, c, g, or t
agtcggcggccgcgcgcagcacgctcaaggccgggatggcggcggcggcggcggcaggaagcgggacgccccgagaggaggaggnacctgctggggaggcagcggcctcgcagccccaggccccaacgagtgtgcctggggctcgtctctcgaggttgcctctggcgcgagtgaaggccttggtgaaggcagatcccgacgtgacgctagcgggacaggaagccatcttcattctggcacgagccgcggaactgtttgtggagaccattgcaaaagatgcctactgttgcgctcagcagggaaaaaggaaaacccttctctgcaaggtcttccactatttctgtctgtcttccatatcaagcctggatgcagctgctgctgcttagagcagagatgaagaaagtgttctgcataagtggcttcctgaatgatgaggaccagaataaaggtttttgatcaacctca

SEQ ID NO: 334283 - DNA, 541 bp, Homo sapiens
gaggataaaactgctaactgaggggcgagctgctaactcagggcgagctgctaactcagaagcgagctgctaactcaggggcgagctgccgaactgtttgtggagaccattgcaaaagatgcctactgttgcgctcagcagggaaaaaggaaaacccttcagaggagagacttggataatgcaatagaagctgtggatgaatttgcttttctggaaggtactttagattgattgccgagcggggcagttttgtgagccttcatctgaagccttcagttcacccctctgcacaggcctcagctttgaagaacggagtctttgcacttacacacactcttcctgttctgccttcacctatgccgggataagcagagatctcatcaattagctcttctctgcaaggtcttccactatttctgtctgtcttccatatcaagcctggatgcagctgctgctgcttagagcagagatgaagaaagtgttctgcataagtggcttcctgaatgatgaggaccagaataaaggtttttgatcaacctca

SEQ ID NO: 334284 - DNA, 422 bp, Homo sapiens
cacctgccgggttcagcatctgctgggctcccagcacctgtccttcatcctttctgtgcagagaagctcctcttcctgcatatgtgtaactgagaaacagcagggctcctggcccctcgtcctcaccctgatcaggggggctctcatgggggctggcttcctcctcacctatggcctcacctggatctactataccaggtgtggaggcccccagcagagcagggctgagaggcctggctgagcccctcccgctcaagacagaactgaggtgtggacacttagccctgtgggacacatgcaggacatcactgtcagcttctttctggaagctcacatcccactgactacccctcttttccttcctgccccataccccttctacttattcccctctgcttgtgagtcttgccccaccacacctg

SEQ ID NO: 334285 - DNA, 833 bp, Homo sapiens
acttccgcctcccaaattcaagctattctcctgcctcagcctcccgagtagctgggattacaggtgcccgccaccacgcccagctaatttttgtatttttagtagagatggggtttcaccatgttgaccaggcagatcttgacctcctgacctcaggtgatccgcctgtctcggcctcccggtgagtcacggtgcctggccaagaactgtttcttgttggctctggtgctggtgacttagaacccgccagctcctggagaaaggggctgggccgcccaccctgtgtagctttcccaaagacagagtcaaacgtctcctggagaacagaggcttcccttcgtctttggtcatttgtcctctagctgggggtaccccctggtggaaaggcacaggtcccttgctccccaggtggcaacgcaggccagacacggccctggcacagctctcctgggtgttggctcaggacagccctgtttccaactggttaggcggtgaggggtggtggccctttggttccaggttgaaactgcccatgtggtgctgatttagcagactggggaggctctttttgtaggcaggttcttttctttccccagctgctggacctgggagttggaagagaagttgcacccattttaggggtaacagatattttctgttgctcttggttggattgggaagtgaattgaagggaggtcacgtttcaggggtgccttgggatgtctgtcagtgattttcttttctttcttaatttctttttctttctttttttttttttttttgagacacactccagcctcggtgacagcgcaaggctccgtctcaataattta

SEQ ID NO: 334286 - DNA, 842 bp, Homo sapiens
cgcccctcgctcggctgctggaggcgagggcttcggaagtcttcatgctagtctcgtggggttccgcggtgtcgtcgctggctgtgcgcgtcatttccgggcgtcacgtaacggagtggccaacggcctgcagagcaacatgcccaagttttattgtgactactgcgatacatacctcacccatgactctccatctgtgagaaagacacactgcagtggaaggaaacacaaagagaatgtgaaagactattatcagaaatggatggaagagcaggctcagagcctgattgacaaaacaacggctgcatttcaacaaggaaagatacctcctactccattctctgctcctcctcctgcaggggcgatgataccacctccccccagccttccgggtcctcctcgccctggtatgatgccagcaccccatatggggggccctcccatgatgccaatgatgggccctcctcctcctgggatgatgccagtgggacctgctcctggaatgaggccgcccatgggaggccatatgccaatgatgcctgggcccccaatgatgagacctcctgcccgtcccatgatggtgcccactcggcccggaatgactcgaccagacagataaggatagaggggaggccttattgtatcggttttatattacctgttctgcttcaccaggagatcatgctgctgtgatactgagttttctaaacagcataaggaagacttgctcccctgtcctatgaaagagaatagttttggaggggagaagtgggacaaaaaagatgcagttttcctttgtattgggaaatgtgaaaataaaattgtcaactctttcagttaaa

SEQ ID NO: 334287 - DNA, 734 bp, Homo sapiens
  misc_feature (9)..(9): n is a, c, g, or t
  misc_feature (28)..(28): n is a, c, g, or t
gtaacggangcgcaacctggccaggagnaacatgcccaagttttattgtgactactgcgatacatacctcacccatgactctccatctgtgagaaagacacactgcagtggaaggaaacacaaagagaatgtgaaagactattatcagaaatggatggaagagcaggctcagagcctgattgacaaaacaacggctgcatttcaacaaggaaagatacctcctactccattctctgctcctcctcctgcaggggcgatgataccacctccccccagccttccgggtcctcctcgccctggtatgatgccagcaccccatatggggggccctcccatgatgccaatgatgggccctcctcctcctgggatgatgccagtgggacctgctcctggaatgaggccgcccatgggaggccatatgccaatgatgcctgggcccccaatgatgagacctcctgcccgtcccatgatggtgcccactcggcccggaatgactcgaccagacagataaggatagaggggaggccttattgtatcggttttatattacctgttctgcttcaccaggagatcatgctgctgtgatactgagttttctaaacagcataaggaagacttgctcccctgtcctatgaaagagaatagttttggaggggagaagtgggacaaaaaagatgcagttttcctttgtattgggaaatgtgaaaataaaattgtcaactctttcagttaaa

SEQ ID NO: 334288 - DNA, 922 bp, Homo sapiens
cgcccctcgctcggctgctggaggcgagggcttcggaagtcttcatgctagtctcgtggggttccgcggtgtcgtcgctggctgtgcgcgtcatttccgggcgtcacgtaacggagtggccaacggcctgcagagcaacatgcccaagttttattgtgactactgcgatacatacctcacccatgactctccatctgtgagaaagacacactgcagtggaaggaaacacaaagagaatgtgaaagactattatcagaaatggatggaagagcaggctcagagcctgattgacaaaacaacggctgcatttcaacaaggaaagatacctcctactccattctctgctcctcctcctgcaggggcgatgataccacctccccccagccttccgggtcctcctcgccctggtatgatgccagcaccccatatggggggccctcccatgatgccaatgatgggccctcctcctcctgggatgatgccagtgggacctgctcctggaatgaggccgcccatgggaggccatatgccaatgatgcctgggcccccaatgatgagacctcctgcccgtcccatgatggtgcccactcggcccggaatgactcgaccagacagataaggatagaggggaggccttattgtatcggttttatattacctgttctgcttcaccaggagatcatgctgctgtgatactgagttttctaaacagcataaggaagacttgctcccctgtcctatgaaagagaatagttttggaggggagaagtgggacaaaaaagatgcagttttcctttgtattgggaaatgtgaaaataaaattgtcaactctttcagttaaacacaccaccacccccccacacaaaaccccgggccacaccgcgggggccacacggcgcctcaagcgcccgtccaaacggcc

SEQ ID NO: 334289 - DNA, 507 bp, Homo sapiens
acggctaggtacgaggctgggtgtgaatcggccgaggcactccccccagccttccgggtcctcctcgccctggtatgatgccagcaccccatatggggggccctcccatgatgccaatgatgggccctcctcctcctgggatgatgccagtgggacctgctcctggaatgaggccgcccatgggaggccatatgccaatgatgcctgggcccccaatgatgagacctcctgcccgtcccatgatggtgcccactcggcccggaatgactcgaccagacagataaggatagaggggaggccttattgtatcggttttatattacctgttctgcttcaccaggagatcatgctgctgtgatactgagttttctaaacagcataaggaagacttgctcccctgtcctatgaaagagaatagttttggaggggagaagtgggacaaaaaagatgcagttttcctttgtattgggaaatgtgaaaataaaattgtcaactctttcagttaaa

SEQ ID NO: 334290 - DNA, 425 bp, Homo sapiens
ttgaagtcccatcaaactctccctaaatcgtattttctgactccctttttctccctcttctttgttttgtcctgcagctcctggaatgaggccgcccatgggaggccatatgccaatgatgcctgggcccccaatgatgagacctcctgcccgtcccatgatggtgcccactcggcccggaatgactcgaccagacagataaggatagaggggaggccttattgtatcggttttatattacctgttctgcttcaccaggagatcatgctgctgtgatactgagttttctaaacagcataaggaagacttgctcccctgtcctatgaaagagaatagttttggaggggagaagtgggacaaaaaagatgcagttttcctttgtattgggaaatgtgaaaataaaattgtcaactctttcagttaaa

SEQ ID NO: 334291 - DNA, 408 bp, Homo sapiens
  misc_feature (9)..(9): n is a, c, g, or t
  misc_feature (28)..(28): n is a, c, g, or t
gtaacggangcgcaacctggccaggagnaacatgcccaagttttattgtgactactgcgatacatacctcacccatgactctccatctgtgagaaagacacactgcagtggaaggaaacacaaagagaatgtgaaagactattatcagaaatggatggaagagcaggctcagagcctgattgacaaaacaacggctgcatttcaacaaggaaagatacctcctactccattctctgctcctcctcctgcaggggcgatgataccacctccccccagccttccgggtcctcctcgccctggtatgatgccagcaccccatatggggggccctcccatgatgccaatgatgggccctcctcctcctgggatgatgccagtgggacctggtaagtttgaatgtctgtcttt

SEQ ID NO: 334292 - DNA, 751 bp, Homo sapiens
cccacgcgtccgtcgacccacgcgtccgccaacggcctgcagagcaacatgcccaagttttattgtgactactgcgatacatacctcacccatgactctccatctgtgagaaagacacactgcagtggaaggaaacacaaagagaatgtgaaagactattatcagaaatggatggaagagcaggctcagagcctgattgacaaaacaacggctgcatttcaacaaggaaagatacctcctactccattctctgctcctcctcctgcaggggcgatgataccacctccccccagccttccgggtcctcctcgccctggtatgatgccagcaccccatatggggggccctcccatgatgccaatgatgggccctcctcctcctgggatgatgccagtgggacctgctcctggaatgaggccgcccatgggaggccatatgccaatgatgcctgggcccccaatgatgagacctcctgcccgtcccatgatggtgcccactcggcccggaatgactcgaccagacagataaggatagaggggaggccttattgtatcggttttatattacctgttctgcttcaccaggagatcatgctgctgtgatactgagttttctaaacagcataaggaagacttgctcccctgtcctatgaaagagaatagttttggaggggagaagtgggacaaaaaagatgcagttttcctttgtattgggaaatgtgaaaataaaattgtcaactctttcagttaaa

SEQ ID NO: 334293 - DNA, 1053 bp, Homo sapiens
gagtggggccccgaaatctgagggtgatcgtagtcactagttgtggcccccatgcaggagcggagagcgggttctggtttctgaaacctcgagggatgggagagtatctgggccgggtggacggaggcagggagatggagagcgctagacaccccattttagagtgcagatggatcccgcttaaggcaacaaaaaaaagcctggtttatgtgtcgacgctttgatgcttttgagtcgtgaggcggtctggctttttgttttgtttgtttgttttgtttttatcttccatgaacagcgcttccgtggatgggcatctcagtggttgtcgtctttttctcttcctttcacctcttttcaggttttattgtgactactgcgatacatacctcacccatgactctccatctgtgagaaagacacactgcagtggaaggaaacacaaagagaatgtgaaagactattatcagaaatggatggaagagcaggctcagagcctgattgacaaaacaacggctgcatttcaacaaggaaagatacctcctactccattctctgctcctcctcctgcaggggcgatgataccacctccccccagccttccgggtcctcctcgccctggtatgatgccagcaccccatatggggggccctcccatgatgccaatgatgggccctcctcctcctgggatgatgccagtgggacctgctcctggaatgaggccgcccatgggaggccatatgccaatgatgcctgggcccccaatgatgagacctcctgcccgtcccatgatggtgcccactcggcccggaatgactcgaccagacagataaggatagaggggaggccttattgtatcggttttatattacctgttctgcttcaccaggagatcatgctgctgtgatactgagttttctaaacagcataaggaagacttgctcccctgtcctatgaaagagaatagttttggaggggagaagtgggacaaaaaagatgcagttttcctttgtattgggaaatgtgaaaataaaattgtcaactctttcagttaaa

SEQ ID NO: 334294 - DNA, 799 bp, Homo sapiens
cgcccctcgctcggctgctggaggcgagggcttcggaagtcttcatgctagtctcgtggggttccgcggtgtcgtcgctggctgtgcgcgtcatttccgggcgtcacgtaacggagtggccaacggcctgcagagcaacatgcccaaccatctgtgagaaagacacactgcagtggaaggaaacacaaagagaatgtgaaagactattatcagaaatggatggaagagcaggctcagagcctgattgacaaaacaacggctgcatttcaacaaggaaagatacctcctactccattctctgctcctcctcctgcaggggcgatgataccacctccccccagccttccgggtcctcctcgccctggtatgatgccagcaccccatatggggggccctcccatgatgccaatgatgggccctcctcctcctgggatgatgccagtgggacctgctcctggaatgaggccgcccatgggaggccatatgccaatgatgcctgggcccccaatgatgagacctcctgcccgtcccatgatggtgcccactcggcccggaatgactcgaccagacagataaggatagaggggaggccttattgtatcggttttatattacctgttctgcttcaccaggagatcatgctgctgtgatactgagttttctaaacagcataaggaagacttgctcccctgtcctatgaaagagaatagttttggaggggagaagtgggacaaaaaagatgcagttttcctttgtattgggaaatgtgaaaataaaattgtcaactctttcagttaaa

SEQ ID NO: 334295 - DNA, 1048 bp, Homo sapiens
cgcccctcgctcggctgctggaggcgagggcttcggaagtcttcatgctagtctcgtggggttccgcggtgtcgtcgctggctgtgcgcgtcatttccgggcgtcacgtaacggagtggccaacggcctgcagagcaacatgcccaagttttattgtgactactgcgatacatacctcacccatgactctccatctgtgagaaagacacactgcagtggaaggaaacacaaagagaatgtgaaagactattatcagaaatggatggaagagcaggctcagagcctgattgacaaaacaacggctgcatttcaacaaggaaagatacctcctactccattctctgctcctcctcctgcaggggcgatgataccacctccccccagccttccgggtcctcctcgccctggtatgatgccagcaccccatatggggggccctcccatgatgccaatgatgggccctcctcctcctgggatgatgccagtgggacctgctcctggaatgaggccgcccatgggaggccatatgccaatgatgcctgggcccccaatgatgagacctcctgcccgtcccatgatggtgcccactcggcccggaatgactcgaccagacagataaggatagaggggaggccttattgtatcggttttatattacctgttctgcttcaccaggagatcatgctgctgtgatactgagttttctaaacagcataaggaagacttgctcccctgtcctatgaaagagaatagttttggaggggagaagtgggacaaaaaagatgcagttttcctttgtattgggaaatgtgaaaataaaattgtcaactctttcagttaaaaaaaaaaaaaaaaaccccaacccgtaatgtacttctaccatctttggcgggcccctccattaaagggctagacctcgcacggatttttaccggagcggcctagaaattacctgctagcttaattcagttctaccaaaaattacctcgtccagagcggcccaaattccccgaggcacggacgtatccttaaaagttccttaaatatc

SEQ ID NO: 334296 - DNA, 905 bp, Homo sapiens
cgcccctcgctcggctgctggaggcgagggcttcggaagtcttcatgctagtctcgtggggttccgcggtgtcgtcgctggctgtgcgcgtcatttccgggcgtcacgtaacggagtggccaacggcctgcagagcaacatgcccaagttttattgtgactactgcgatacatacctcacccatgactctccatctgtgagaaagacacactgcagtggaaggaaacacaaagagaatgtgaaagactattatcagaaatggatggaagagcaggctcagagcctgattgacaaaacaacggctgcatttcaacaaggaaagatacctcctactccattctctgctcctcctcctgcaggggcgatgataccacctccccccagccttccgggtcctcctcgccctggtatgatgccagcaccccatatggggggccctcccatgatgccaatgatgggccctcctcctcctgggatgatgccagtgggacctgctcctggaatgaggccgcccatgggaggccatatgccaatgatgcctgggcccccaatgatgagacctcctgcccgtcccatgatggtgcccactcggcccggaatgactcgaccagacagataaggatagaggggaggccttattgtatcggttttatattacctgttctgcttcaccaggagatcatgctgctgtgatactgagttttctaaacagcataaggaagacttgctcccctgtcctatgaaagagaatagttttggaggggagaagtgggacaaaaaagatgcagttttcctttgtattgggaaatgtgaaaataaaattgtcaactctttcagttaaaagtgtgttccctttttcctcctctctgtgttctctgtgtattataaaagaaatgaaacattcc

SEQ ID NO: 334297 - DNA, 746 bp, Homo sapiens
  misc_feature (3)..(3): n is a, c, g, or t
  misc_feature (8)..(8): n is a, c, g, or t
  misc_feature (31)..(31): n is a, c, g, or t
  misc_feature (33)..(33): n is a, c, g, or t
  misc_feature (117)..(117): n is a, c, g, or t
cancgggnacagggtggattggcaaccgttnanatgccggttttaagcatctttcggcaaatggcgcttcgagtctgggtgccttccccgcagcttgtggaacactctgtccagttnagagaagccacttcgctgggacagtcatctttcttgcatgctttgctggcaggcaggttttgaagctgaacagaaggtctcaggaagctccaggaagcttgccatcagccatgcgctgctggaaatgctgactcctcctcctgcaggggcgatgataccacctccccccagccttccgggtcctcctcgccctggtatgatgccagcaccccatatggggggccctcccatgatgccaatgatgggccctcctcctcctgggatgatgccagtgggacctgctcctggaatgaggccgcccatgggaggccatatgccaatgatgcctgggcccccaatgatgagacctcctgcccgtcccatgatggtgcccactcggcccggaatgactcgaccagacagataaggatagaggggaggccttattgtatcggttttatattacctgttctgcttcaccaggagatcatgctgctgtgatactgagttttctaaacagcataaggaagacttgctcccctgtcctatgaaagagaatagttttggaggggagaagtgggacaaaaaagatgcagttttcctttgtattgggaaatgtgaaaataaaattgtcaactctttcagttaaa

SEQ ID NO: 334298 - DNA, 302 bp, Homo sapiens
tgcttttgagtcgtgaggcggtctggctttttgttttgtttgtttgttttgtttttatcttccatgaacagcgcttccgtggatgggcatctcagtggttgtcgtctttttctcttcctttcacctcttttcaggttttattgtgactactgcgatacatacctcacccatgactctgtaagtggcatatctattcatagtttcaaaaagccttatgtgtaataattaaatgagttttgtgttttttttaagttgcaagttgtgctttcccacctgctgaggtttaaggtctactccttgaa

SEQ ID NO: 334299 - DNA, 758 bp, Homo sapiens
  misc_feature (15)..(15): n is a, c, g, or t
  misc_feature (21)..(22): n is a, c, g, or t
  misc_feature (28)..(29): n is a, c, g, or t
aattaaggctaagtncgaggnnggggtnnaatcggccgagcggctgcagagcaacatgcccaagttttattgtgactactgcgatacatacctcacccatgactctccatctgtgagaaagacacactgcagtggaaggaaacacaaagagaatgtgaaagactattatcagaaatggatggaagagcaggctcagagcctgattgacaaaacaacggctgcatttcaacaaggaaagatacctcctactccattctctgctcctcctcctgcaggggcgatgataccacctccccccagccttccgggtcctcctcgccctggtatgatgccagcaccccatatggggggccctcccatgatgccaatgatgggccctcctcctcctgggatgatgccagtgggacctgctcctggaatgaggccgcccatgggaggccatatgccaatgatgcctgggcccccaatgatgagacctcctgcccgtcccatgatggtgcccactcggcccggaatgactcgaccagacagataaggatagaggggaggccttattgtatcggttttatattacctgttctgcttcaccaggagatcatgctgctgtgatactgagttttctaaacagcataaggaagacttgctcccctgtcctatgaaagagaatagttttggaggggagaagtgggacaaaaaagatgcagttttcctttgtattgggaaatgtgaaaataaaattgtcaactctttcagttaaa

SEQ ID NO: 334300 - DNA, 821 bp, Homo sapiens
  misc_feature (15)..(15): n is a, c, g, or t
  misc_feature (21)..(22): n is a, c, g, or t
  misc_feature (28)..(29): n is a, c, g, or t
aattaaggctaagtncgaggnnggggtnnaatcggccgagcggctgcagagcaacatgcccaagttttattgtgactactgcgatacatacctcacccatgactctccatctgtgagaaagacacactgcagtggaaggaaacacaaagagaatgtgaaagactattatcagaaatggatggaagagcaggctcagagcctgattgacaaaacaacggctgcatttcaacaaggaaagatacctcctactccattctctgctcctcctcctgcaggggcgatgataccacctccccccagccttccgggtcctcctcgccctggtatgatgccagcaccccatatggggggccctcccatgatgccaatgatgggccctcctcctcctgggatgatgccagtgggacctgctcctggaatgaggccgcccatgggaggccatatgccaatgatgcctgggcccccaatgatgagacctcctgcccgtcccatgatggtgcccactcggcccggaatgactcgaccagacagataaggatagaggggaggccttattgtatcggttttatattacctgttctgcttcaccaggagatcatgctgctgtgatactgagttttctaaacagcataaggaagacttgctcccctgtcctatgaaagagaatagttttggaggggagaagtgggacaaaaaagatgcagttttcctttgtattgggaaatgtgaaaataaaattgtcaactctttcagttaaaagtgtgttccctttttcctcctctctgtgttctctgtgtattataaaagaaatgaaacattcc

SEQ ID NO: 334301 - DNA, 923 bp, Homo sapiens
tagctagtacgaggctgggtgttaaatcggccgagggcgataccatacctctatcccatgactctccatctgtgagaaagacacactgcagtggaaggaaacacaaagagaatgtgaaagactattatcagaaatggatggaagagcaggctcagagcctgattgacaaaacaacggctgcatttcaacaaggaaagatacctcctactccattctctgctcctcctcctgcaggggcgatgataccacctccccccagccttccgggtcctcctcgccctggtatgatgccagcaccccatatggggggccctcccatgatgccaatgatgggccctcctcctcctgggatgatgccagtgggacctgctcctggaatgaggccgcccatgggaggccatatgccaatgatgcctgggcccccaatgatgagacctcctgcccgtcccatgatggtgcccactcggcccggaatgactcgaccagacagataaggatagaggggaggccttattgtatcggttttatattacctgttctgcttcaccaggagatcatgctgctgtgatactgagttttctaaacagcataaggaagacttgctcccctgtcctatgaaagagaatagttttggaggggagaagtgggacaaaaaagatgcagttttcctttgtattgggaaatgtgaaaataaaattgtcaactctttcagttaaaaaaaaaaaaaaaaaccccaacccgtaatgtacttctaccatctttggcgggcccctccattaaagggctagacctcgcacggatttttaccggagcggcctagaaattacctgctagcttaattcagttctaccaaaaattacctcgtccagagcggcccaaattccccgaggcacggacgtatccttaaaagttccttaaatatc

SEQ ID NO: 334302 - DNA, 749 bp, Homo sapiens
  misc_feature (19)..(19): n is a, c, g, or t
  misc_feature (24)..(24): n is a, c, g, or t
  misc_feature (45)..(45): n is a, c, g, or t
  misc_feature (53)..(53): n is a, c, g, or t
cagctgttgtatctaggtncgagnctgggtggcgctgcagagcanggtgccgnagttttattgtgactactgcgatacatacctcacccatgactctccatctgtgagaaagacacactgcagtggaaggaaacacaaagagaatgtgaaagactattatcagaaatggatggaagagcaggctcagagcctgattgacaaaacaacggctgcatttcaacaaggaaagatacctcctactccattctctgctcctcctcctgcaggggcgatgataccacctccccccagccttccgggtcctcctcgccctggtatgatgccagcaccccatatggggggccctcccatgatgccaatgatgggccctcctcctcctgggatgatgccagtgggacctgctcctggaatgaggccgcccatgggaggccatatgccaatgatgcctgggcccccaatgatgagacctcctgcccgtcccatgatggtgcccactcggcccggaatgactcgaccagacagataaggatagaggggaggccttattgtatcggttttatattacctgttctgcttcaccaggagatcatgctgctgtgatactgagttttctaaacagcataaggaagacttgctcccctgtcctatgaaagagaatagttttggaggggagaagtgggacaaaaaagatgcagttttcctttgtattgggaaatgtgaaaataaaattgtcaactctttcagttaaa

SEQ ID NO: 334303 - DNA, 942 bp, Homo sapiens
gagtggggccccgaaatctgagggtgatcgtagtcactagttgtggcccccattgcagatggatcccgcttaaggcaacaaaaaaaagcctggtttatgtgtcgacgctttgatgcttttgagtcgtgaggcggtctggctttttgttttgtttgtttgttttgtttttatcttccatgaacagcgcttccgtggatgggcatctcagtggttgtcgtctttttctcttcctttcacctcttttcaggttttattgtgactactgcgatacatacctcacccatgactctccatctgtgagaaagacacactgcagtggaaggaaacacaaagagaatgtgaaagactattatcagaaatggatggaagagcaggctcagagcctgattgacaaaacaacggctgcatttcaacaaggaaagatacctcctactccattctctgctcctcctcctgcaggggcgatgataccacctccccccagccttccgggtcctcctcgccctggtatgatgccagcaccccatatggggggccctcccatgatgccaatgatgggccctcctcctcctgggatgatgccagtgggacctgctcctggaatgaggccgcccatgggaggccatatgccaatgatgcctgggcccccaatgatgagacctcctgcccgtcccatgatggtgcccactcggcccggaatgactcgaccagacagataaggatagaggggaggccttattgtatcggttttatattacctgttctgcttcaccaggagatcatgctgctgtgatactgagttttctaaacagcataaggaagacttgctcccctgtcctatgaaagagaatagttttggaggggagaagtgggacaaaaaagatgcagttttcctttgtattgggaaatgtgaaaataaaattgtcaactctttcagttaaa

SEQ ID NO: 334304 - DNA, 717 bp, Homo sapiens
actttgacatgaacattgccagggttctattgtgactactggatacatactcacccattggatctccatctgtgagaaagacacactgcagtggaaggaaacacaaagagaatgtgaaagactattatcagaaatggatggaagagcaggctcagagcctgattgacaaaacaacggctgcatttcaacaaggaaagatacctcctactccattctctgctcctcctcctgcaggggcgatgataccacctccccccagccttccgggtcctcctcgccctggtatgatgccagcaccccatatggggggccctcccatgatgccaatgatgggccctcctcctcctgggatgatgccagtgggacctgctcctggaatgaggccgcccatgggaggccatatgccaatgatgcctgggcccccaatgatgagacctcctgcccgtcccatgatggtgcccactcggcccggaatgactcgaccagacagataaggatagaggggaggccttattgtatcggttttatattacctgttctgcttcaccaggagatcatgctgctgtgatactgagttttctaaacagcataaggaagacttgctcccctgtcctatgaaagagaatagttttggaggggagaagtgggacaaaaaagatgcagttttcctttgtattgggaaatgtgaaaataaaattgtcaactctttcagttaaa

SEQ ID NO: 334305 - DNA, 572 bp, Homo sapiens
ataggctggtgctactgcttgggatgtcttcctcctcctcctcctcctcctgtcctctcctactccattctctgctcctcctcctgcaggggcgatgataccacctccccccagccttccgggtcctcctcgccctggtatgatgccagcaccccatatggggggccctcccatgatgccaatgatgggccctcctcctcctgggatgatgccagtgggacctgctcctggaatgaggccgcccatgggaggccatatgccaatgatgcctgggcccccaatgatgagacctcctgcccgtcccatgatggtgcccactcggcccggaatgactcgaccagacagataaggatagaggggaggccttattgtatcggttttatattacctgttctgcttcaccaggagatcatgctgctgtgatactgagttttctaaacagcataaggaagacttgctcccctgtcctatgaaagagaatagttttggaggggagaagtgggacaaaaaagatgcagttttcctttgtattgggaaatgtgaaaataaaattgtcaactctttcagttaaa

SEQ ID NO: 334306 - DNA, 316 bp, Homo sapiens
gggtagcctgttaatattctcattttgcagtgtgtaaggtacctgttcctgtctgtggtatgataattgtcaattgggtactttgggttagttttccaatctttggtcttctttaaaggggagagagtgggagatttccagcagtgcagatccccggtcaaaggagaaatgtgcaggagttaagatgagctgcccatctatctaaccatctatgtatctgtctctcaagtgggtggatgggggttgctatcttggctgtataaagaatcctaaaaaccttgtctcataagctagaggtttcctgatgggtttaact

SEQ ID NO: 334307 - DNA, 1179 bp, Homo sapiens
cttactggctgtgtgccagtgaacaagctttttatgcatcagttccctttcctcacctgtcaagtagagatcataacatagaacgacagggataataatatatgataatatgatcaaagtgtagggttgttaggagaataagatgtaatgatacatgtgtagttcttggagcaatgccaggcattacagtaagcactcgataaatattagctctattctaatcaaatacctatccagaaacacacagaatccttactgccaaaaatgcttatgtgccttccttgaaaaatgggtaagataaacaagagatatcttagaaaactaggctcaacagataagaaaataagcaccctgctttcccctgtagtcgttccagtgaggcctctgcagcctcctgggtggctttggagccctgaacacctgggcacaaatcttggcttccttccttccatgtgagggtcctgtaaaagtcgcttcacctcctggagttacattatcctcatctgtcaagtgtcggaagctggaagttggcaaagaaatgcaaagcacattggaaatggaaaagaaagaaggaggcatccattgataaacactaagttacttcttcatgtccagaggactctacatgccacatgctcatcttgcaaaacagagataaccacctgaatcctttgaagactggaattctgcgagtttaattttagtattcatgatcttaattgtgaataccagatgccacttccatgcttaggatgatgaagctaaacaaaactgaagcaggagctgccgtgggagtcacgttctgaaagagatgggagtcacgtgactctcctacatcagctgcttgccctggagccattcattcactagcaagcatgcatcaatgccttcatgctgaagatgtgaggctgcagctggcacgagctgggggtggtaaggaaccaggaggagtgacataattatgaccctatgaggctaccaatccaacagaggtgatcacatcccttaacatatcaaataggaagagcagggctgagcacggtagctcacgcctgtaatcccagcactttggaagtccgaggcaggtagatggcttgaggtcaagagttcaagaccagcccagccaacatggtgaatccccatttctactaaaaacacaaaaagtagccagacgtggtg

SEQ ID NO: 334308 - DNA, 327 bp, Homo sapiens
ctcccaaagtgctcgggaatctgtatttttactatgatcctcaggtgatctttgtgcctagtagtggcctgacaatgaatcttaggaaactctgatttaaatagactcaatcaaataatttccatatcacaaatatgagtgtcagaggagcctgggctgctcctttgctggatatctgtactctgggcaaagggagagagcagataatatgccgggtggttaattatgttggcatttattcattctgaaatgtttacaaatgtaattagaagccagattaggtatgatgctcactgacctttaaggagagcttggcatcaaacaacc

SEQ ID NO: 334309 - DNA, 429 bp, Homo sapiens
atacatgcacctaactaacactggagttcccaaattaataaaacaattactaatatgcctaagaaatgagacagacagcaacacaataatagtgggggactttaatactccattgacagcactagacaggtaatcaatatagaaagtcaaaacagaaacaatggattttaaactataccttggaatacatggacttaacagatttatacagaacattccatcctacaactacaaaatacacattctattcaacagctcatggaactttctccaaggtagaccatgtgataggccacaaaatgagcctcaataaatttcagaaaattgaagttatatcaagcactctctcagaccacagtggaataaaactggaaatcaactccaaaaggaatcttcaaaaccatgccaacacagggaaattgaataacc

SEQ ID NO: 334310 - DNA, 342 bp, Homo sapiens
ggccctttttctgcaaacgccgagggacatccgttgtataataaggccagcctgggtcgagagacgagaaacgctaccagaaagatatttctggtctctctgacctaggaggaacaaaaggccgagccttcatttgaattatgtttcagcagtggcctcgcacgtttattcgcctgcgttaggccggcaggcctgttgatttcgtaggtcgacagaggagaggggaaaaaaggccagtagaagcaatcttaaaggcacttgcaagcaagccccggttgggaactccaaaatgggagtagagtggtccttgatggaaggagcgtttaagagtgtcgcctagcc

SEQ ID NO: 334311 - DNA, 764 bp, Homo sapiens
aaacatctttcttatccccttgctttccctgggagacagtcactctatttatttcacccgcctctctgtgccttcatttactagatgtccagtagtgctaggcagtctgctaacctctgatgaacagggcacatggaccctgtccgagggcacacggtggataccaatgccatcacaagttctgggaacaggtttgaagcaagtataccaatactgatgaatacactgtgcaagctggaaaagtgatacttgagctgaggattgttcaaatgattaggaattcactagaagggaagggggcccaggtagtgagtacagatgagtcccagaagcaggaggcagaaggaggatggaggtgtgcctggggagctgctgatggttctgtgtggttgaaatgtgtataggtctttgtgtgtgtgtgtgtgtgtgtgtgtgtgtgtgtgtgtagcacacgatgggcaaggaagcagagagggaagaaggaaatcacagatgtgctggaaaagaatactagagccaaattgtaaagggccttgtgtgctgtgtgctggagcttaacctgtattctttgggccatgtcgaatcacattaaatgtgaccaagcagggagctgtggcatgtgtctgtggtccatcccgtactagggaggcttgcttgagcccaggagttcgggggcgcagtgagccatgaccatacctgtgaatatccactgcactccagcctgggccatgggccatgtagtgagaccccatctcttaaaaaaa

SEQ ID NO: 334312 - DNA, 585 bp, Homo sapiens
atctctggagagggtgaatgagagaccccaatcttaggaacacaagtcacaactgaagcaagacaaaatgtcttactgaaaaagaggaaaattatgtgaaattctgctcaggatgcagtagactatctcccaggagaaaatggaggtgacagattacttaatgtgtccaaccatattaagagctgtttcagatttgttaaataattgtaaatgaattaataacaagaaaaaaattttaaactgggataattatctggaaaaacaaaatataattagtgaattttgtgactcagttgtgaaaaatatttgcatagtcttaataaacactaaactacccccaaaatctgataccctataaagatgagaaaaagggaagtatgtataaaagcctgtgggcagtagagagattaagataactaatcttcatccttcttagatggaagtcagtagctactatctaaaatgaaaacccaacaaaaagcagaataactgacttagaaaaatgaagacaaatatcagaacaaataactaaaagaacggaaactgactgccttgtaaagattggtaattggaggtgaagagaga

SEQ ID NO: 334313 - DNA, 916 bp, Homo sapiens
ctgtgtgtactcagtgatagatttcagagacagaaatacctcagcctccagcagatgcaagaactttacagcatcctgaatcttagctacaaacaggttaagacttggttccagaaccagagaataaaatataagaggtggcagaaaaacagctgcccaaagaatagcaatggtgtgactccaaaggcctgagcacctacctaccccagcctctattcttcctgcctccaaggatgcttggcgaacatgtctgggaacctttcaatgcagagcaaccagacctgtagcagttcggcctggggcaaccagacctggaacatccagtcctagaacagccattcctgaacactcagacctggtgcacccaatcctggaacaatcaggcctggaacaatcccttctatagctgtggagaggaatctctgcaagtcctgcatgcggttccagcaaattcttctctcagtgacttggaggctgccttggaaactgctgaagaaagctacaatggaatacagcagaccactaggtattttagtactccacaaaccatagatttattcctaaactattccaagaacatgcagcctgaagatatgtaaagatgagtgaaactgatattactcaatttcagtctgggcactggctgaatccttcctctcccctcctgcctccctcataggattttacttgtttggaagctacatgttctgccttcatatctttgtttcctttatgcctatcaagtcgattttgtggagggtggggtatgattggagccaaatcagagagttttctttttttcctatgggatctttctggagaaaaaaggttttaataaccttggctgctaaggacaacatgatagaagctgtctctggctatagataagtagatataatactagtttgaatatctt

SEQ ID NO: 334314 - DNA, 517 bp, Homo sapiens
ggaggaagttaggaaattactggtttgcctaagggaggcagggaaggcttacaggagtacagggaacccgaattttgactttactttcctatgctccacctaagcagaaggaagagtatgcacaaaggcacaggggcaggaattaatacagtacaaggaagcccagggtgcgctggcaggaagagtccgtatgctggaaaagcacgttgggccttaaagttacatttcatcctacaagccccaggaggctgggtggaacaaaaatcatttggtagacaatttggtataaggatttaaattaatccttcttgatcttcttttcttttttgagacagagtgtcacactgtcactcagactaggatgtggtggtacaatcacggctcactgcagactcgacctcctgggctcaagcaatcctcccacctcagcctcctgagtatttgggaccaaaggcggatgccaccacgcccagctaattttttttttttttttgagacggagtctcactctgtcatc

SEQ ID NO: 334315 - DNA, 345 bp, Homo sapiens
tttctcctcttccagcttctaatcactgaagttccctagggctctgtccttagatatttcttccctacctacactccctttaaagatgatatcatccaatctcttgcctttaaatgtcctctatatgctagggatcctcacctttatgttaccactccagacctcctccctagattccactcccatataactacctactcaatatctccatttatttatctaataggactctcaaaactaattatttcttcttatcccacagtctgcttctcataaagtactcctcatctcggtaaacacccactttatccttcccattgctcagaccaaaatctttggagctat

SEQ ID NO: 334316 - DNA, 515 bp, Homo sapiens
aaaaaaaagaaaagaaaagctatctgatatggccatagaagtgagttgctgaagaaaagttaaggtgcatataattggagatcaatactgctaggtctaaaatctttccagtactgaccattcctaaaaggaaatgcagtgtagcttatttagtctgccagacattattttttcaaatgctaacttcacatcattactgataggctaatatttgtatcataaacttttatggtaaagctcagtaaataatttttgagagtttatgtatttaacgtttttgagcacatatatatatatgccacatagtgggcattagagatacaaagatgagtaagacatggcttcagtttgtgggaagcttcagcgattcctattctaatataagaagcatgagtaggatcactaactgtaacctatttctaaattggactacttgtctggcattgcgggtgatgtgaaaaaggaagaaaaaaataaaaaaaattttattgctatatgaaatttgttagattttg

SEQ ID NO: 334317 - DNA, 411 bp, Homo sapiens
agattactgcactttgagatacactgagttatttcatctttaaggtcctttacaacgtctttcccttaccttttcattttctgtgatttccttctgcaaacccttacagtgcttacaattcacattctactatcttatgctgtttttataacgaagaattgagttgaagattaaaatccactttagctttaaggcttgcttgatttttctattttgaagtaaaaattatacctacttcctatttttggaggcaatacttcttatcattacaacctgaggaggccaaagaaatatgtaaagttccccttaggtataaaccaaaacatccgcatcactggtcaatccttttgattgtagatgataaccaagaccatggtatgcatgtgtacactggcacaccaatgctcaaac

SEQ ID NO: 334318 - DNA, 226 bp, Homo sapiens
ctgacaccacccagcctggtaatctggctaaaccagttctgccatcccacccaggaacagaaaacagcaggaaaaactcacttccacccctgatgattccatcaccaacctgaccaatcagcactccccacttcccaagcccctacccgccaaattatctttaaaaactctgatctccgaattcagggagactgatgtgaataataataaaacttcaatctcccac

SEQ ID NO: 334319 - DNA, 439 bp, Homo sapiens
tttttttttttccaatatcggctcactgcagcctcaacctcctgggctcaagtgatcctcccacctcagccccccaagtagttgggaccacaggcacatgccactacacctggctaattttttgtattttttgtagagacaaggttttgccatgttgcccaggctggtctcaaactcctgagctcaagcgatccgcccgccttggcctcccaaagtgctaggattacaggtgtgagccactgtgcctggcctctaaacacaaagttcttttgaaggaaaatcaagcagagcagatcactaaacgtattccttaaatatgttctcttccctcccctatcctccataaaatcccacaaataagtatcagatataagtgagatgcttcctaatttaaacccatgatccactgtgtaggaagcaatgacaacagcaagacgtt

SEQ ID NO: 334320 - DNA, 249 bp, Homo sapiens
catttgtgtctcattcatcctcttatcttcagaaccttgcaaaatgctttgcacatagtaagtcttctgtaaacatttgttgaattaactatataaaaatcgtttccagcaaaaacaggtttgagggcaaatatttcagaacattaataagagttatttcttagtgatgggattatgtatgactttcatttttttctttattttttgggaaattgaaaaatattcagtaatgtgcatagtactcttatt

SEQ ID NO: 334321 - DNA, 315 bp, Homo sapiens
attccaatgcaagtttgcctaaagaaacagatatgcggattaagcagacacaaacatttgggccgatgtgataactacatttcctactataaataaataaggcaatctattggtttctgtaatcattctcttggaacctggtaaatggaatcattcttgcctcctttccttttctcatatccaactgtcagcccatcagaaaaatttttgtgagctcttcttcaaaacatatctagaatctgaaccatctttaacacttccaccataagtctaagctaccatcatctctcacatgggcagcctcttttttttttt

SEQ ID NO: 334322 - DNA, 459 bp, Homo sapiens
agacaacttcttgctatgttgcccagcttggacccattggctcactcaagcagtcttcccaccttggctttccaacatgctgggatacagacatgagccaccatgcctggtctctttccgttttttgtgtgtgtgttctctttaatttcttgcatcaattatttattgttttagttgtagcaattttttacttctttgattattaggttaaccttaacttaggttaacttattaagtactttattttatttgtagatactgtaaatgggagtactgttttcatttctttttcagatgggtcattgttgacatatggaaatactgatttttactgatttttgtatattgattttatatcctgaaactttagtgaatttattagttctttttttttttttttttttttttgggaaaaagttttggtcgggcgcccaggggggcaggcccggggggggaccc

SEQ ID NO: 334323 - DNA, 414 bp, Homo sapiens
tttttccacaaggatttaatagtctagtgagggagacaaaaagatcctctcaaaaatgaagtatctgggctgggtgtggtggctcatgcttgtaatcccagcactttgggaggccaaggcgggtggatcatttgaggtcaggagttcaggacaagtctggccaatatggtgaaaccccatctctactaaaaatacaaaaattaggccgggcgcggtggctgacgcctgtaataccagcactttgggaggccgaggtgggcggatcacgaggtcaggagatcgagaccatcctggctaacacggtgaaaccccatctctactaaaaatacaaaaaattagccgggcgaggtgacgggcgcctgtagtcccagctactcgggaggctgaggcaggagaatggcgtgaacccgggag

SEQ ID NO: 334324 - DNA, 429 bp, Homo sapiens
ggagagccctcagcacaagattgatgcatatctattctataattaacaacaatatgaaggaagagattccacggtcaccattaggttccaatccctcatggtcaagactttcttctttttaactagactattttgagcccttttcttctctttgtcttttcagtaactggaaaagaattactaaaactcaccccatgaaaatccctcatgtgcctgaattctttcgaagttaaagattggaactggattaaactcttttcccttaacaacttcttagctacagttttctaagcctttaatgccctttgaattgtctgctctaagttctcttgggttaaagtacaccagtaagaatagccagatttcgtcatatcccatgcaaagctagtgctctccttcatgatctgggagccccgtcccgcggtgcca

SEQ ID NO: 334325 - DNA, 360 bp, Homo sapiens
tgagcagtggtaagcacttgggagggtaagtaggacagggcgtgcctctccaagggcagagggatgtgagaacttgcagtgtggaagggaggcctcaactggagatgcatgagatgttagcttctggatggatttgaaactccagactgggtaagatcattgagggagcgagtgctgatagaaataggaggagaaggcctaaagactcctccaggcactccaacaagacaacaaatggccaggaagaatcaggaaagaagactgaaaggaagcaacagtgaggtggtggaagaccttgaatgccagagtaaggagtttggtggagattgttgaggcactagttcttcagggaaggcctca

SEQ ID NO: 334326 - DNA, 220 bp, Homo sapiens
atgtcctgaaacttccatgctgttgggagctcctagcccccttcaatgcagaccaaatcacccagctcccagacaagggttccaactcacagctgctacatgtgagctcccagatgggatagctctataatgtgccgcacctacatccccatttaaaggaaaccgcctgccctcatcccctgccacaggtacttcccagcagggcagttctgttttatgg

SEQ ID NO: 334327 - DNA, 1045 bp, Homo sapiens
catggtggtgggcgcctgtggtcccagctactcgggagactgaggcagaagaatggcatgaacccgggaggcagggattgcagtgagccgagatcacaccactgcacttcagcctgggtgacagagcgagactccatctcaaaaaataaataaataaataaatccagcctcaggggtcattggcatggttaatttaagtcaagaaatttgcatggaagtatttaaatatagtaagttacatgctcacatacaatttcttactattgctagttcattcattcattcactcatccatcctgtgactctggaacaagcacttcctgggtgcccctgttagacactgcagatagagacggcaagcctagcccttgcccctagcctttgcccttctctggctgtagacagtgtgatgactgtgaggaaaaagaagtgctccaaaggcttcctgagcacagaagagaggcagctcgctctgccctggttataacatccagggtccctgaatcttgaacaaagcaggtgagttagctggtagaacagatgtaaggcaagaagaaggggaggcaaggcaaaggtatttcaggttcttataaagacagagagaaccgtgaaagaactcttgagggaactgcaagcagctcagtagggctggaacatgagatgtgaatggtgagtacgaaggctgaggctgcaggcagaaacaggggccaggataccaccatgctaaggacaggccccaaagccaaggaacaatgttttgtggagactgtcactccagcagcagtggacaggaggctgtgagggagaaggtgggtagagggatcagagcagcacgggcagccacggtggtgactgggggtctaggaggcagcagcagatttattggtatcttgcaagcagaattgatgagatctggaaactgaggacttttggagatgagggagaccgagcagtctcagatggtggctgggagtcagtcatcacaccaagggacacagatggaagaactaatcccgacggactgaaatccaatcaatggaattca

SEQ ID NO: 334328 - DNA, 506 bp, Homo sapiens
ggctgcaggatttaataaaattccacaatacttccagtgttaacaatggtgtatgctgggattaatcccacatgaaataatcacaaaatgataccagttagtatgatgcactgctatcctaccacagccgtgcaaattttaaggacagtcttttttggataaggtcccaccagtagataaactccacaaagtctggccaccagggagggtcaattaccaggactacattgtttctctagttcagatgtgcagaatataagggcagtgtgaagttcagcattacaaaaacagaaagcaatttagtaattagtgaaagtattacatggacaaaacaatagctgggagatttgtttaaaggaataaactaataactttgttcataccaacccatttcaaatatgggaaaataatttttaaacatttaaataaaactagaattaacgaaataccttggatacactggctagacaaaagattcctggtcctgactaacttgagaatttcgg

SEQ ID NO: 334329 - DNA, 343 bp, Homo sapiens
tggctttgacactttgaggacactggtgagatggcctgggccagccaacggtccactaggagactgatgggcactgaagccttccaaagcgactgagctggaaccaggggcagggaatcatttagtccccgggcactgcagagaagcggagttctctcattcacatccctgcaatgtcaacagtgagcaacagtgggcaggccctaggcgatttgggaagagcgggtgtcagaaagcctggggtttggccagccacggtgggtcacacctataattccagcactttgggagcctaaagcaggcaggttacttgagctcaggagttggagacaggcctgggcaa

SEQ ID NO: 334330 - DNA, 399 bp, Homo sapiens
ctctccctttctcagaaactgggtatcaccttgactcctccttcctactcatcggctacatcctcacagtcactgacacctgtcagtcagctgagtctccaaagcacttctcagctctgcccaccactcagcctctccaccatcatcacctgctccacgctgtctccttcccaggcctggatccctgaaacagcccttccctggtctccatgcctcccttcttgcccgctccaatccttctctgccttccacaatgcaaatttttattatattgctctctagattaaacactctctacagtttctcatttactgcttcttaagagcatgcaaattccttaccctcatgcatagggtaaccatacgttcccatttgcctgggatggttgcagcttatgcc

SEQ ID NO: 334331 - DNA, 544 bp, Homo sapiens
tagggtctgattagcagctcctcagatgctcactttataactacttgttagaacgtacatggttttgtgtacttttctccatatgtgatttatttcttttatttccttctccttccctcaccatcccccttgaggcatacaaaacacatacacacagaatttagaaagaagtcctgtgcttcagtttttggtcaacaccaggtcaaacgccttcgaacggttcagtctcacttgctgtttcctcgtcgcttaaaaaaaaaggcagagtggcgccaaaatctggttcttaatcttctggaggcctcatggaccccctggagaatctggtacagttacagacattcctcagaataatgcacatccacacaaaaacttgcatatgatttctggcctaaatatctacccccacccagcccactcctaagcccaagtttaaaattcctggtgtagaaaagaagagacagacttcagagttcggtgctattgagttgaaattccagttccatcacttctaggtggtcatccgtgtccctgggcctccctg

SEQ ID NO: 334332 - DNA, 278 bp, Homo sapiens
agacgcaggtgtgattgtaaacaggtggttcaggcagccctcactgagaagacagcatttaaataaagacctaaaggaaatgagcaagtagcccatgcagagacctggcgggaaagcattctagacagaaggaacagcaagtgccaatattctaaggcaagaacctgagtggaagaatacaggagatgagagaagcaatagggtaccaaatcacgtcaggccttgcaggccattgtaacaattccggcttttaccccctgcaagaaaggaagccactg

SEQ ID NO: 334333 - DNA, 105 bp, Homo sapiens
atgttttttaatagaataaaactcattttatcttgcaattaccatatggaccactttgtaaatctaagaagcatttggggatattactggtcttactttacctat

SEQ ID NO: 334334 - DNA, 520 bp, Homo sapiens
tgctgggattacaggggtgagcagagcactgctctaaaaatgttttttgggcaatgtagagttaattttaaacaatggagtttgaatgcctgtaggaagccatgttcctagtcaccacaggtctctcctcagtctcctttactccccgtattgctgcctcacaggcttagatttttccctgtcctgaaggcatctatgaatccaggtttaaagtcaccatggacaatttggcctcaaaggggagaacgggaagtgagattgccggtggggatcagaatcggccagagccagttgagaccatgtcccagagggagcccctatggtgtggagcaatgaccacaattaaaatgtgtttcagtttccaagctcttagcttgagatatgctaacctagactccttcttccgaataacaataatcttaagattataatttaattggaagaagctaggacaacaacaggtgcacatagatacttagcacaataattgctcataatttggcaggaggagcctgggtta

SEQ ID NO: 334335 - DNA, 93 bp, Homo sapiens
atgaatcagcattatgctgagtgaaagaaactttaaacaaaagattccctttgtatgacactgcatcattccctttatatagcattcaacaac

SEQ ID NO: 334336 - DNA, 387 bp, Homo sapiens
atacttgagcattaggctgtggtccaggaaaaagaaatgtccagtgaaaggctactctaaagacccacaggcccctcccctagagccccattagagtgaggtagagtttatagccattctcctgagagacctcaagacctaattagaagaaaactataacatttgttatatagaaggcattttccaaagactagttcaaagatgaaagatatagtcttcctttggatataaaacaaaatctcaagatacaccaaaactgttttgcttttactgaataatttttgtgcatatgtgtttagctgcaagtgcctaacaagctgtgattttctttcctttcctttccctttttttttgtcttgagacagccttgctctgtcacccaggctg

SEQ ID NO: 334337 - DNA, 473 bp, Homo sapiens
cgcacctgaccagcatttcttttttcttttgagagagggtcttgctctgtcacctaggctgaagtgcagtggtgtcatcatggctcactgcagcctcgacctcctggcctcaagcgatcctcccacctcagcatcccaagtagctgggattacaggtgtgtgctaccacacctggttaatttttatattttttgtagagtcaaggttttgccatgttgcctaggctggtctcaaactcctgagctcaagtgatcgtctcacctggcctcctaaagtgctgggattacaagcatgagccaccacaccctgcccccgaggcggcttttaaccagcatctggggtgaccaatctaagtagacagggtcaggacaacactgatgtgtatacagatgctgtttccctgctgttctcttctaagtatgaatcccggtcccctttgcagacccagtaggtgaatccaattacgtagagca

SEQ ID NO: 334338 - DNA, 117 bp, Homo sapiens
ctaactgggctaaggaatgcctggatagctggaaaaacatgatttctgttttgggtagaactgtgagggtgtccctggaaatgattggcatttgaacagagtaaagatccctcttgc

SEQ ID NO: 334339 - DNA, 131 bp, Homo sapiens
ctgcaaatccttattgtgttagttttaattgatcttggtaattaacgtttttgatatgtgggatttttatcattaatttaaaatgtttcttatttcagaataattcttgagaaagatgaggaacagcctag

SEQ ID NO: 334340 - DNA, 457 bp, Homo sapiens
  misc_feature (27)..(27): n is a, c, g, or t
ctagaggatcccaagaagaactctggngacagtgagcagatctggacaaggacctcagtgtggtacccacttctgacatctggaccacttcttgcagtcattgggggtcatcccccacactggtaacctgtcatcaaatgggccacagcaacattcagcttaagtatttctccttcccacatccaagggattgagtgggagtgagattggggggtggaaaaaacagtgaacagtcctggtgagttgcagatgtggtctcattccctagagatgcaggatgcagctgacctgaatcaggacagatccctgcaggagggactcctggtgccatgtcagtcccacctggcactgccctagctcccaggctccgcctctgcatctttccttgctacttcctctttcacttctcccccgttcccagacccaccagacagagcttccagagtgtcaggacatg

SEQ ID NO: 334341 - DNA, 171 bp, Homo sapiens
ggggggctggggcgtggtccaggtggggagtgataagccctgaacggacagaaaagaagggatggagccaagaaattaggaggtcaaaggggccactgagaggggcaaggaggggagaggagttgagaagggctctgaggtgtaggagtgggcgccttggctagagagggt

SEQ ID NO: 334342 - DNA, 265 bp, Homo sapiens
tctgcgcactctgatttggcctcctcagttaagcctgagcccagatggagttggccccagcccacctgtgcccgactgcgtccgggcctatggggccctgccctcgtgccatttctcttcttgcagaagatatcaggagagagcctaggctcatcttcattccttcttgcccttctccacaaatcacttctgccaagatggaaagcagtggattagatctcaacacacagacagaataaccgcatttcatggtttaagcccttca

SEQ ID NO: 334343 - DNA, 2732 bp, Homo sapiens
cacacttggactcttttcaaacattaggttagtttgtaatgaaagcaaaaaatttgtgaatagagagcagtagaaacacatccagcaacagctcacctcttaacctaaaaggctcctccgagcagctccatggccggtctgagagcttcagcagcgaagacctgatccccagcagggacctggccactttgccccgggaagccagcacaccgggacgcaacgccctcggccgccacgagtaccccttgcctcggaacgggcctctcccacaggagggtgcccagaagaggggcacagcccctccctacgtcggagtgcggccctgctcggcctcccccagcagtgagatggtcaccttggaggagttcctggaggagagcaaccgcagctcccccacccatgacactcccagttgccgggatgacctgctgagtgactacttccgaaaggccagcgatcccccagccatcggaggccaaccaggaccacctgccaagaaagaaggggccaagatgcccaccaactttgtggcccccaccgtcaaaatggccgcccccacctcggaggggaggccgctgaagcccgggcagtacgtaaagccaaacttcagactgactgaggccgaggccccacccagcgtggccccgagacaggcccagcctccccagagcctgtctctgggcagaccccggcaggctccggtgcccccagcttcccatgcacctgccagccgcagtgcctccttgagccgggccttcagcctggcctcagctgaccttctccgggccagcgggccagaggcctgcaaacaggagtcccctcagaagctgggggctcctgaggccttagggggcagagagacaggcagccacaccctgcaaagccccgcaccccccagctcccatagcctggcccgggagcggaccccacttgtgggaaaggctggcagctcctgtcagggcccaggtccccgcagccggccgctggacacgaggcgcttctccctggctcccccaaaggaggagaggctggcccccctgcatcagtctgccacagcccccgccattgccactgcaggtgctggtgctgctgctgctggcagtggcagcaactcccagctcctgcacttctcacctgctgcagccccggctgccaggaccaagcccaaggcgcccccacgctcaggggaggtggccaccatcacccctgtccgggcagggctcagcctctcagagggagacggggtcccggggcagggctgcagtgaggggcttccggccaagagcccaggtcggtctcccgatttggctccccacctcggccgggccctggaggactgcagtcgagggagcgtctcaaagagcagtccggcctccccggagcccggcggggatccgcagaccgtgtggtatgagtacggctgtgtgtgactgtctcgtggttgagctcgcaaacctgaaaactactgacgcgccttccgactctcacggccttttctcttgcttgcctgcggtgccaggagagggtttggaatgaggaaaggggttcccacgcatttctgctgtttgttctgtgaatggaaacactgtgccaagccccaagaggattacgcttccaggtgtgtaacgtgttttctgtgtctgccgcttccagcagctgatatctttggaacaaataatccacgtcagcatggggaccaattcggatgcaatgacaaactgacttcccccaaagcagacactactccagtatgtcccagtagaacactcatttgcaatgtgttgagctccgttaagcacacacacactcacacaacaggctcacgaggctcaggcctggcgggtcagaaagcccactccctctcccaaggccactggatcccaggagaagcccagactggcgatactacaaaggtctccagggcctggcagaccccagagtcaggcctgctgttaaaaagtgagagtgctgctgttccattcctggggtcccaagcacttccctttaccccaggacccagggcagcctgcagggcagctggcggtggccttggccatttgcccccagcctccagctggctcctgagctctgcaccagggggtttggggaccacacaggcacctgccttcctagatttccctggctcacttttctgcaaacactggatctgccaggcctggggattggggggcaggaaagaggcccccatccagccccctccaggccagtgtgcacagtgcaccgaggggtcatccgcacagagcgaggtgcaagctcgatgtgtaacctggctgcggcacccgacatccccggtctcggggtgttgatttatttctgaataactttttgggtatagaaaccaattttttttaatatatgacatgtatatgtacacactcatgtgaaatatgtatactttggggggatctatttatgttccagtgggagtcactctcttctgtcgggaatcttatctgctgctttgtgtctttggtcagattcctgacaatttagtttcctgttgtaaaggtgcttttcctggggtgaactaaacctattgattttttttttttaagatttttttttccttttgatttaatatactgagaaagaaatgggagacttttgaatgttaacaagatccattttaggagtgtttggggttgtgtattaaatagccattcattctggaactcaaggacaggactgtaataaaatggaatggaaccgaa

SEQ ID NO: 334344 - DNA, 6867 bp, Homo sapiens
tggggtggtacagctgccgctggggtctccttacctgccccacacacagggagggagacctgagtggcggatggacatagtttaagggccggtgttgcaaacttatgaaaagaaaagaattttgagtcagtaacatttttgcaggccccataagcagatcgcctccccaccgcccaaatcccgagtcctttccttttcccactggttttaggaagtggcagcctgctcccagggctgcttgttgaggaagctgcctcccacactctttctccttactgcctctgcagggaggataagacagagcagcttgtggacaccagacatgaggtggaccagctggtgctggaactgcagaaagttaagcaggagaacatccagctagcggcagacgcccggtctgctcgtgcctatcgagacgagctggattccctgcgggagaaggcgaaccgcgtggagaggctggagctggagctgacccgctgcaaggagaagctgcacgacgtggacttctacaaggcccgcatggaggagctgagagaagataatatcattttaattgaaaccaaggccatgctggaggaacagctgactgctgctcgggcccggggcgataaagtccatgagctggaaaaggagaacctgcagctgaaatccaagcttcacgacctggaattggaccgggacacagataagaaacgaattgaggagctgctggaagaaaacatggtccttgagattgcacagaagcagagcatgaacgaatctgcccaccttggctgggagctggagcagctgtccaagaacgcagacttgtcagacgcctccaggaagtcgtttgtgtttgagctgaacgaatgtgcgtccagccgcatcctgaagctggagaaggagaatcagagcctccagagcaccatccaggggctgcgggacgcgtccctggtgttggaggagagcggcctcaagtgcggggagctggagaaggagaaccaccagctcagcaagaagattgaaaagttacaaacccagctggagagagaaaagcagagcaaccaagatctggagaccctcagtgaggagctgatcagagagaaggagcagctgcagagtgacatggagaccctgaaggctgacaaagccaggcagatcaaggaccttgagcaggaaaaggaccacctcaaccgagccatgtggtcgctgcgggagaggtcgcaggtcagcagtgaggcccgcatgaaagacgtggagaaggagaacaaagccctccaccagacggtgacggaggccaatggcaagctcagccagttggagtttgagaagcggcagctgcacagggacttggagcaggccaaggagaagggggagcgggcagagaagctggagagggagctacagcgactccaggaggagaacgggaggctggccaggaaggtgacctccctggagacagccaccgagaaagtcgaggccctggagcatgagagccagggcctgcagctggagaaccggactctgaggaagtctctggacaccttgcagaacgtgtccctgcagcttgagggcctggagcgtgacaacaagcagctggacgcagagaacctggagctgcgcaggctggtggagaccatgcgcttcaccagcaccaagctggcacagatggagagggagaaccagcagctggagcgtgagaaggaggagctgaggaagaacgtggatctgctcaaggcgctgggcaagaagtcagagcgcctggagctcagctaccagagcgtgagcgctgagaacctccggctgcagcagagcctggagagcagcagccacaagacgcagaccttggagagtgagctgggcgagctggaggctgagcgccaggcgctgcggcgggacctggaggccctccggctggccaatgcacagttggagggggccgagaaggacaggaaggccctggagcaggaggtggcccagctcgagaaggataagaagctgctggagaaggaggccaagcggctgtggcagcaggtggagctcaaggatgcagtcttggacgatagcactgccaaactgtccgccgttgagaaggagagccgcgcgctggacaaggagctggcccgctgcagggacgcagccggcaagctgaaggagctggagaaggacaaccgggacctcaccaagcaagtcaccgtgcatgcaaggacactgacaactctgagggaggacctggtgctcgagaagctgaagagccagcagctcagcagtgagctggacaagctgagccaggaactggagaaggtcggcctcaacagggagctgctgttgcaggaggacgacagcggcagtgacacaaaatacaagattttggagggcagaaatgaatcagcattaaaaacaacactagccatgaaagaagaaaagattgtgctcttagaagcacagatggaagagaaagcgagcctaaatcgccagttagagagtgagctgcagatgctaaagaaggagtgtgagaccctcaggcagaaccagggagaggggcagcacttgcagaactctttcaagcaccctgcggggaagacagccgccagtcaccaggggaaggaggcctgggggcccggccataaggaagccaccatggagcttctccgagtgaaggaccgggccatcgagctggagcggaataatgcagctctgcaggctgagaagcagctgctaaaggaacagctgcagcacctggagacccagaacgtgaccttcagcagccagatcttgacactgcagaaacagagcgccttcctgcaggagcacaacaccacactgcagacccagaccgccaagctgcaggtggagaactccacgctgagttcccagagcgcagcgctcaccgcgcagtacacgctgctgcagaaccaccacacggccaaggagacggagaacgaaagcctgcagaggcagcaggagcaacttacagcggcctacgaggccctgctgcaggaccacgagcacctgggcacgctgcacgagcggcaatcggccgagtacgaggccctcatccgccagcacagctgcctaaagacactgcatcggaatctggagctggagcacaaggagctcggggagaggcacggtgacatgctgaagcgcaaggcggagctggaggagcgggagaaggtcttgaccactgagcgagaggcgctgcagcaggagcagaggacaaacgccctcgccatgggcgagaaccagaggctgcggggcgagctggacagggtcaatttcctgcaccaccagctgaagggggagtacgaggagctgcacgcccacaccaaggagctgaaaacctcactgaacaacgcgcagctggagctcaaccgctggcaggcccgcttcgacgagctgaaggagcagcaccagaccatggacatctcgctgaccaagctggacaaccactgtgagctgctctcccgtctcaaggggaacttggaggaagaaaatcatcacctcctgagccagatccagctgttgagccagcagaaccagatgcttctggagcagaacatggagaacaaggagcagtaccatgaggagcagaagcagtacatagacaaattaaatgccttacgaagacataaggaaaagctggaagaaaaaatcatggatcaatacaagttctatgatcctcctccaaagaagaagaaccactggattggagccaaagccttagtcaaactcatcaaaccaaagaaagagggttcgagggaacgcttaaaatccaccgtggacagccctccctggcagctggagtcctcagaccccgcctcgccggcggcctctcagccgctcagatcacaggccgagaaccccgacacccccgcactgggctccaactgtgcagaagagcgcgacgcccacaacgggtctgtggggaaaggccctggggatctaaaaccaaagcgaggctccccacacagaggcagccttgaccgcacagatgcctccaccgatctggccatgaggtcctggccctcggagctgggctcccggacttgctcaacttcagccaccactacagccccttccaactccacccccatcgcccggcacccaggccgcaccaaaggctataactcagatgacaacctctgtgagccatccctggagtttgaggtccccaaccacaggcagtacgtgtcgcggccaagtagcttagagagcagtagaaacacatccagcaacagctcacctcttaacctaaaaggctcctccgagcagctccatggccggtctgagagcttcagcagcgaagacctgatccccagcagggacctggccactttgccccgggaagccagcacaccgggacgcaacgccctcggccgccacgagtaccccttgcctcggaacgggcctctcccacaggagggtgcccagaagaggggcacagcccctccctacgtcggagtgcggccctgctcggcctcccccagcagtgagatggtcaccttggaggagttcctggaggagagcaaccgcagctcccccacccatgacactcccagttgccgggatgacctgctgagtgactacttccgaaaggccagcgatcccccagccatcggaggccaaccaggaccacctgccaagaaagaaggggccaagatgcccaccaactttgtggcccccaccgtcaaaatggccgcccccacctcggaggggaggccgctgaagcccgggcagtacgtaaagccaaacttcagactgactgaggccgaggccccacccagcgtggccccgagacaggcccagcctccccagagcctgtctctgggcagaccccggcaggctccggtgcccccagcttcccatgcacctgccagccgcagtgcctccttgagccgggccttcagcctggcctcagctgaccttctccgggccagcgggccagaggcctgcaaacaggagtcccctcagaagctgggggctcctgaggccttagggggcagagagacaggcagccacaccctgcaaagccccgcaccccccagctcccatagcctggcccgggagcggaccccacttgtgggaaaggctggcagctcctgtcagggcccaggtccccgcagccggccgctggacacgaggcgcttctccctggctcccccaaaggaggagaggctggcccccctgcatcagtctgccacagcccccgccattgccactgcaggtgctggtgctgctgctgctggcagtggcagcaactcccagctcctgcacttctcacctgctgcagccccggctgccaggaccaagcccaaggcgcccccacgctcaggggaggtggccaccatcacccctgtccgggcagggctcagcctctcagagggagacggggtcccggggcagggctgcagtgaggggcttccggccaagagcccaggtcggtctcccgatttggctccccacctcggccgggccctggaggactgcagtcgagggagcgtctcaaagagcagtccggcctccccggagcccggcggggatccgcagaccgtgtggtatgagtacggctgtgtgtgactgtctcgtggttgagctcgcaaacctgaaaactactgacgcgccttccgactctcacggccttttctcttgcttgcctgcggtgccaggagagggtttggaatgaggaaaggggttcccacgcatttctgctgtttgttctgtgaatggaaacactgtgccaagccccaagaggattacgcttccaggtgtgtaacgtgttttctgtgtctgccgcttccagcagctgatatctttggaacaaataatccacgtcagcatggggaccaattcggatgcaatgacaaactgacttcccccaaagcagacactactccagtatgtcccagtagaacactcatttgcaatgtgttgagctccgttaagcacacacacactcacacaacaggctcacgaggctcaggcctggcgggtcagaaagcccactccctctcccaaggccactggatcccaggagaagcccagactggcgatactacaaaggtctccagggcctggcagaccccagagtcaggcctgctgttaaaaagtgagagtgctgctgttccattcctggggtcccaagcacttccctttaccccaggacccagggcagcctgcagggcagctggcggtggccttggccatttgcccccagcctccagctggctcctgagctctgcaccagggggtttggggaccacacaggcacctgccttcctagatttccctggctcacttttctgcaaacactggatctgccaggcctggggattggggggcaggaaagaggcccccatccagccccctccaggccagtgtgcacagtgcaccgaggggtcatccgcacagagcgaggtgcaagctcgatgtgtaacctggctgcggcacccgacatccccggtctcggggtgttgatttatttctgaataactttttgggtatagaaaccaattttttttaatatatgacatgtatatgtacacactcatgtgaaatatgtatactttggggggatctatttatgttccagtgggagtcactctcttctgtcgggaatcttatctgctgctttgtgtctttggtcagattcctgacaatttagtttcctgttgtaaaggtgcttttcctggggtgaactaaacctattgattttttttttttaagatttttttttccttttgatttaatatactgagaaagaaatgggagacttttgaatgttaacaagatccattttaggagtgtttggggttgtgtattaaatagccattcattctggaactcaaggacaggactgtaataaaatggaatggaaccgaa

SEQ ID NO: 334345 - DNA, 5945 bp, Homo sapiens
ggggtggtttctgttttgttttaaatcatggttcacttcgtaggactgatgtctgcactgggctgggtcttttggttctgcagattgaaaagttacaaacccagctggagagagaaaagcagagcaaccaagatctggagaccctcagtgaggagctgatcagagagaaggagcagctgcagagtgacatggagaccctgaaggctgacaaagccaggcagatcaaggaccttgagcaggaaaaggaccacctcaaccgagccatgtggtcgctgcgggagaggtcgcaggtcagcagtgaggcccgcatgaaagacgtggagaaggagaacaaagccctccaccagacggtgacggaggccaatggcaagctcagccagttggagtttgagaagcggcagctgcacagggacttggagcaggccaaggagaagggggagcgggcagagaagctggagagggagctacagcgactccaggaggagaacgggaggctggccaggaaggtgacctccctggagacagccaccgagaaagtcgaggccctggagcatgagagccagggcctgcagctggagaaccggactctgaggaagtctctggacaccttgcagaacgtgtccctgcagcttgagggcctggagcgtgacaacaagcagctggacgcagagaacctggagctgcgcaggctggtggagaccatgcgcttcaccagcaccaagctggcacagatggagagggagaaccagcagctggagcgtgagaaggaggagctgaggaagaacgtggatctgctcaaggcgctgggcaagaagtcagagcgcctggagctcagctaccagagcgtgagcgctgagaacctccggctgcagcagagcctggagagcagcagccacaagacgcagaccttggagagtgagctgggcgagctggaggctgagcgccaggcgctgcggcgggacctggaggccctccggctggccaatgcacagttggagggggccgagaaggacaggaaggccctggagcaggaggtggcccagctcgagaaggataagaagctgctggagaaggaggccaagcggctgtggcagcaggtggagctcaaggatgcagtcttggacgatagcactgccaaactgtccgccgttgagaaggagagccgcgcgctggacaaggagctggcccgctgcagggacgcagccggcaagctgaaggagctggagaaggacaaccgggacctcaccaagcaagtcaccgtgcatgcaaggacactgacaactctgagggaggacctggtgctcgagaagctgaagagccagcagctcagcagtgagctggacaagctgagccaggaactggagaaggtcggcctcaacagggagctgctgttgcaggaggacgacagcggcagtgacacaaaatacaagattttggagggcagaaatgaatcagcattaaaaacaacactagccatgaaagaagaaaagattgtgctcttagaagcacagatggaagagaaagcgagcctaaatcgccagttagagagtgagctgcagatgctaaagaaggagtgtgagaccctcaggcagaaccagggagaggggcagcacttgcagaactctttcaagcaccctgcggggaagacagccgccagtcaccaggggaaggaggcctgggggcccggccataaggaagccaccatggagcttctccgagtgaaggaccgggccatcgagctggagcggaataatgcagctctgcaggctgagaagcagctgctaaaggaacagctgcagcacctggagacccagaacgtgaccttcagcagccagatcttgacactgcagaaacagagcgccttcctgcaggagcacaacaccacactgcagacccagaccgccaagctgcaggtggagaactccacgctgagttcccagagcgcagcgctcaccgcgcagtacacgctgctgcagaaccaccacacggccaaggagacggagaacgaaagcctgcagaggcagcaggagcaacttacagcggcctacgaggccctgctgcaggaccacgagcacctgggcacgctgcacgagcggcaatcggccgagtacgaggccctcatccgccagcacagctgcctaaagacactgcatcggaatctggagctggagcacaaggagctcggggagaggcacggtgacatgctgaagcgcaaggcggagctggaggagcgggagaaggtcttgaccactgagcgagaggcgctgcagcaggagcagaggacaaacgccctcgccatgggcgagaaccagaggctgcggggcgagctggacagggtcaatttcctgcaccaccagctgaagggggagtacgaggagctgcacgcccacaccaaggagctgaaaacctcactgaacaacgcgcagctggagctcaaccgctggcaggcccgcttcgacgagctgaaggagcagcaccagaccatggacatctcgctgaccaagctggacaaccactgtgagctgctctcccgtctcaaggggaacttggaggaagaaaatcatcacctcctgagccagatccagctgttgagccagcagaaccagatgcttctggagcagaacatggagaacaaggagcagtaccatgaggagcagaagcagtacatagacaaattaaatgccttacgaagacataaggaaaagctggaagaaaaaatcatggatcaatacaagttctatgatcctcctccaaagaagaagaaccactggattggagccaaagccttagtcaaactcatcaaaccaaagaaagagggttcgagggaacgcttaaaatccaccgtggacagccctccctggcagctggagtcctcagaccccgcctcgccggcggcctctcagccgctcagatcacaggccgagaaccccgacacccccgcactgggctccaactgtgcagaagagcgcgacgcccacaacgggtctgtggggaaaggccctggggatctaaaaccaaagcgaggctccccacacagaggcagccttgaccgcacagatgcctccaccgatctggccatgaggtcctggccctcggagctgggctcccggacttgctcaacttcagccaccactacagccccttccaactccacccccatcgcccggcacccaggccgcaccaaaggctataactcagatgacaacctctgtgagccatccctggagtttgaggtccccaaccacaggcagtacgtgtcgcggccaagtagcttagagagcagtagaaacacatccagcaacagctcacctcttaacctaaaaggctcctccgagcagctccatggccggtctgagagcttcagcagcgaagacctgatccccagcagggacctggccactttgccccgggaagccagcacaccgggacgcaacgccctcggccgccacgagtaccccttgcctcggaacgggcctctcccacaggagggtgcccagaagaggggcacagcccctccctacgtcggagtgcggccctgctcggcctcccccagcagtgagatggtcaccttggaggagttcctggaggagagcaaccgcagctcccccacccatgacactcccagttgccgggatgacctgctgagtgactacttccgaaaggccagcgatcccccagccatcggaggccaaccaggaccacctgccaagaaagaaggggccaagatgcccaccaactttgtggcccccaccgtcaaaatggccgcccccacctcggaggggaggccgctgaagcccgggcagtacgtaaagccaaacttcagactgactgaggccgaggccccacccagcgtggccccgagacaggcccagcctccccagagcctgtctctgggcagaccccggcaggctccggtgcccccagcttcccatgcacctgccagccgcagtgcctccttgagccgggccttcagcctggcctcagctgaccttctccgggccagcgggccagaggcctgcaaacaggagtcccctcagaagctgggggctcctgaggccttagggggcagagagacaggcagccacaccctgcaaagccccgcaccccccagctcccatagcctggcccgggagcggaccccacttgtgggaaaggctggcagctcctgtcagggcccaggtccccgcagccggccgctggacacgaggcgcttctccctggctcccccaaaggaggagaggctggcccccctgcatcagtctgccacagcccccgccattgccactgcaggtgctggtgctgctgctgctggcagtggcagcaactcccagctcctgcacttctcacctgctgcagccccggctgccaggaccaagcccaaggcgcccccacgctcaggggaggtggccaccatcacccctgtccgggcagggctcagcctctcagagggagacggggtcccggggcagggctgcagtgaggggcttccggccaagagcccaggtcggtctcccgatttggctccccacctcggccgggccctggaggactgcagtcgagggagcgtctcaaagagcagtccggcctccccggagcccggcggggatccgcagaccgtgtggtatgagtacggctgtgtgtgactgtctcgtggttgagctcgcaaacctgaaaactactgacgcgccttccgactctcacggccttttctcttgcttgcctgcggtgccaggagagggtttggaatgaggaaaggggttcccacgcatttctgctgtttgttctgtgaatggaaacactgtgccaagccccaagaggattacgcttccaggtgtgtaacgtgttttctgtgtctgccgcttccagcagctgatatctttggaacaaataatccacgtcagcatggggaccaattcggatgcaatgacaaactgacttcccccaaagcagacactactccagtatgtcccagtagaacactcatttgcaatgtgttgagctccgttaagcacacacacactcacacaacaggctcacgaggctcaggcctggcgggtcagaaagcccactccctctcccaaggccactggatcccaggagaagcccagactggcgatactacaaaggtctccagggcctggcagaccccagagtcaggcctgctgttaaaaagtgagagtgctgctgttccattcctggggtcccaagcacttccctttaccccaggacccagggcagcctgcagggcagctggcggtggccttggccatttgcccccagcctccagctggctcctgagctctgcaccagggggtttggggaccacacaggcacctgccttcctagatttccctggctcacttttctgcaaacactggatctgccaggcctggggattggggggcaggaaagaggcccccatccagccccctccaggccagtgtgcacagtgcaccgaggggtcatccgcacagagcgaggtgcaagctcgatgtgtaacctggctgcggcacccgacatccccggtctcggggtgttgatttatttctgaataactttttgggtatagaaaccaattttttttaatatatgacatgtatatgtacacactcatgtgaaatatgtatactttggggggatctatttatgttccagtgggagtcactctcttctgtcgggaatcttatctgctgctttgtgtctttggtcagattcctgacaatttagtttcctgttgtaaaggtgcttttcctggggtgaactaaacctattgattttttttttttaagatttttttttccttttgatttaatatactgagaaagaaatgggagacttttgaatgttaacaagatccattttaggagtgtttggggttgtgtattaaatagccattcattctggaactcaaggacaggactgtaataaaatggaatggaaccgaa

SEQ ID NO: 334346 - DNA, 5507 bp, Homo sapiens
catacctggaccttctggcatacctggactttggcatacctggacttctggcatacctgaccttctggcatacctggaccttctcggcgccctccggctggccaatgcacagttggagggggccgagaaggacaggaaggccctggagcaggaggtggcccagctcgagaaggataagaagctgctggagaaggaggccaagcggctgtggcagcaggtggagctcaaggatgcagtcttggacgatagcactgccaaactgtccgccgttgagaaggagagccgcgcgctggacaaggagctggcccgctgcagggacgcagccggcaagctgaaggagctggagaaggacaaccgggacctcaccaagcaagtcaccgtgcatgcaaggacactgacaactctgagggaggacctggtgctcgagaagctgaagagccagcagctcagcagtgagctggacaagctgagccaggaactggagaaggtcggcctcaacagggagctgctgttgcaggaggacgacagcggcagtgacacaaaatacaagattttggagggcagaaatgaatcagcattaaaaacaacactagccatgaaagaagaaaagattgtgctcttagaagcacagatggaagagaaagcgagcctaaatcgccagttagagagtgagctgcagatgctaaagaaggagtgtgagaccctcaggcagaaccagggagaggggcagcacttgcagaactctttcaagcaccctgcggggaagacagccgccagtcaccaggggaaggaggcctgggggcccggccataaggaagccaccatggagcttctccgagtgaaggaccgggccatcgagctggagcggaataatgcagctctgcaggctgagaagcagctgctaaaggaacagctgcagcacctggagacccagaacgtgaccttcagcagccagatcttgacactgcagaaacagagcgccttcctgcaggagcacaacaccacactgcagacccagaccgccaagctgcaggtggagaactccacgctgagttcccagagcgcagcgctcaccgcgcagtacacgctgctgcagaaccaccacacggccaaggagacggagaacgaaagcctgcagaggcagcaggagcaacttacagcggcctacgaggccctgctgcaggaccacgagcacctgggcacgctgcacgagcggcaatcggccgagtacgaggccctcatccgccagcacagctgcctaaagacactgcatcggaatctggagctggagcacaaggagctcggggagaggcacggtgacatgctgaagcgcaaggcggagctggaggagcgggagaaggtcttgaccactgagcgagaggcgctgcagcaggagcagaggacaaacgccctcgccatgggcgagaaccagaggctgcggggcgagctggacagggtcaatttcctgcaccaccagctgaagggggagtacgaggagctgcacgcccacaccaaggagctgaaaacctcactgaacaacgcgcagctggagctcaaccgctggcaggcccgcttcgacgagctgaaggagcagcaccagaccatggacatctcgctgaccaagctggacaaccactgtgagctgctctcccgtctcaaggggaacttggaggaagaaaatcatcacctcctgagccagatccagctgttgagccagcagaaccagatgcttctggagcagaacatggagaacaaggagcagtaccatgaggagcagaagcagtacatagacaaattaaatgccttacgaagacataaggaaaagctggaagaaaaaatcatggatcaatacaagttctatgatcctcctccaaagaagaagaaccactggattggagccaaagccttagtcaaactcatcaaaccaaagaaagagggttcgagggaacgcttaaaatccaccgtggacagccctccctggcagctggagtcctcagaccccgcctcgccggcggcctctcagccgctcagatcacaggccgagaaccccgacacccccgcactgggctccaactgtgcagaagagcgcgacgcccacaacgggtctgtggggaaagcacctccgcgcaaaaagagtccctttttgaaaagcaaaaacaaggacaaagacaagtctccaacgacccacccagctctctctaaacgcctgcggttctggtcttcctccgacatcccatcctctcctaacgagcctctctctttctccgacattggagatttctaatccctttcctttatcatgtgtctgtattgtgtaccctccttcatttccgaaattcaaacaaacaaaaaaagccagcgtctaaaaggccagatggccgatagcggacccctcctcctgcccccaatttcaagcttaaagtagccagcgtggattctgatttcaaaatagaagatgagttgtcacactccctggaccatttcttcagcacaacacagttttagggggagcctcaggatatacgtgcacatgtccttgggccaggatgtccgtactaagccctggggatctaaaaccaaagcgaggctccccacacagaggcagccttgaccgcacagatgcctccaccgatctggccatgaggtcctggccctcggagctgggctcccggacttgctcaacttcagccaccactacagccccttccaactccacccccatcgcccggcacccaggccgcaccaaaggctataactcagatgacaacctctgtgagccatccctggagtttgaggtccccaaccacaggcagtacgtgtcgcggccaagtagcttagagagcagtagaaacacatccagcaacagctcacctcttaacctaaaaggctcctccgagcagctccatggccggtctgagagcttcagcagcgaagacctgatccccagcagggacctggccactttgccccgggaagccagcacaccgggacgcaacgccctcggccgccacgagtaccccttgcctcggaacgggcctctcccacaggagggtgcccagaagaggggcacagcccctccctacgtcggagtgcggccctgctcggcctcccccagcagtgagatggtcaccttggaggagttcctggaggagagcaaccgcagctcccccacccatgacactcccagttgccgggatgacctgctgagtgactacttccgaaaggccagcgatcccccagccatcggaggccaaccaggaccacctgccaagaaagaaggggccaagatgcccaccaactttgtggcccccaccgtcaaaatggccgcccccacctcggaggggaggccgctgaagcccgggcagtacgtaaagccaaacttcagactgactgaggccgaggccccacccagcgtggccccgagacaggcccagcctccccagagcctgtctctgggcagaccccggcaggctccggtgcccccagcttcccatgcacctgccagccgcagtgcctccttgagccgggccttcagcctggcctcagctgaccttctccgggccagcgggccagaggcctgcaaacaggagtcccctcagaagctgggggctcctgaggccttagggggcagagagacaggcagccacaccctgcaaagccccgcaccccccagctcccatagcctggcccgggagcggaccccacttgtgggaaaggctggcagctcctgtcagggcccaggtccccgcagccggccgctggacacgaggcgcttctccctggctcccccaaaggaggagaggctggcccccctgcatcagtctgccacagcccccgccattgccactgcaggtgctggtgctgctgctgctggcagtggcagcaactcccagctcctgcacttctcacctgctgcagccccggctgccaggaccaagcccaaggcgcccccacgctcaggggaggtggccaccatcacccctgtccgggcagggctcagcctctcagagggagacggggtcccggggcagggctgcagtgaggggcttccggccaagagcccaggtcggtctcccgatttggctccccacctcggccgggccctggaggactgcagtcgagggagcgtctcaaagagcagtccggcctccccggagcccggcggggatccgcagaccgtgtggtatgagtacggctgtgtgtgactgtctcgtggttgagctcgcaaacctgaaaactactgacgcgccttccgactctcacggccttttctcttgcttgcctgcggtgccaggagagggtttggaatgaggaaaggggttcccacgcatttctgctgtttgttctgtgaatggaaacactgtgccaagccccaagaggattacgcttccaggtgtgtaacgtgttttctgtgtctgccgcttccagcagctgatatctttggaacaaataatccacgtcagcatggggaccaattcggatgcaatgacaaactgacttcccccaaagcagacactactccagtatgtcccagtagaacactcatttgcaatgtgttgagctccgttaagcacacacacactcacacaacaggctcacgaggctcaggcctggcgggtcagaaagcccactccctctcccaaggccactggatcccaggagaagcccagactggcgatactacaaaggtctccagggcctggcagaccccagagtcaggcctgctgttaaaaagtgagagtgctgctgttccattcctggggtcccaagcacttccctttaccccaggacccagggcagcctgcagggcagctggcggtggccttggccatttgcccccagcctccagctggctcctgagctctgcaccagggggtttggggaccacacaggcacctgccttcctagatttccctggctcacttttctgcaaacactggatctgccaggcctggggattggggggcaggaaagaggcccccatccagccccctccaggccagtgtgcacagtgcaccgaggggtcatccgcacagagcgaggtgcaagctcgatgtgtaacctggctgcggcacccgacatccccggtctcggggtgttgatttatttctgaataactttttgggtatagaaaccaattttttttaatatatgacatgtatatgtacacactcatgtgaaatatgtatactttggggggatctatttatgttccagtgggagtcactctcttctgtcgggaatcttatctgctgctttgtgtctttggtcagattcctgacaatttagtttcctgttgtaaaggtgcttttcctggggtgaactaaacctattgattttttttttttaagatttttttttccttttgatttaatatactgagaaagaaatgggagacttttgaatgttaacaagatccattttaggagtgtttggggttgtgtattaaatagccattcattctggaactcaaggacaggactgtaataaaatggaatggaaccgaa

SEQ ID NO: 334347 - DNA, 1806 bp, Homo sapiens
caagtcctccagcgccgactccactcccagccccaccagcagcctctctagcgaagacaagcagcacctggccgtagagctggccgacaccaaggccaggctgcggcgcgtcaggcaggagctggaggataagacagagcagcttgtggacaccagacatgaggtggaccagctggtgctggaactgcagaaagttaagcaggagaacatccagctagcggcagacgcccggtctgctcgtgcctatcgagacgagctggattccctgcgggagaaggcgaaccgcgtggagaggctggagctggagctgacccgctgcaaggagaagctgcacgacgtggacttctacaaggcccgcatggaggagctgagagaagataatatcattttaattgaaaccaaggccatgctggaggaacagctgactgctgctcgggcccggggcgataaagtccatgagctggaaaaggagaacctgcagctgaaatccaagcttcacgacctggaattggaccgggacacagataagaaacgaattgaggagctgctggaagaaaacatggtccttgagattgcacagaagcagagcatgaacgaatctgcccaccttggctgggagctggagcagctgtccaagaacgcagacttgtcagacgcctccaggaagtcgtttgtgtttgagctgaacgaatgtgcgtccagccgcatcctgaagctggagaaggagaatcagagcctccagagcaccatccaggggctgcgggacgcgtccctggtgttggaggagagcggcctcaagtgcggggagctggagaaggagaaccaccagctcagcaagaagattgaaaagttacaaacccagctggagagagaaaagcagagcaaccaagatctggagaccctcagtgaggagctgatcagagagaaggagcagctgcagagtgacatggagaccctgaaggctgacaaagccaggcagatcaaggaccttgagcaggaaaaggaccacctcaaccgagccatgtggtcgctgcgggagaggtcgcaggtcagcagtgaggcccgcatgaaagacgtggagaaggagaacaaagccctccaccagacggtgacggaggccaatggcaagctcagccagttggagtttgagaagcggcagctgcacagggacttggagcaggccaaggagaagggggagcgggcagagaagctggagagggagctacagcgactccaggaggagaacgggaggctggccaggaaggtgacctccctggagacagccaccgagaaagtcgaggccctggagcatgagagccagggcctgcagctggagaaccggactctgaggaagtctctggacaccttgcagaacgtgtccctgcagcttgagggcctggagcgtgacaacaagcagctggacgcagagaacctggagctgcgcaggctggtggagaccatgcgcttcaccagcaccaagctggcacagatggagagggagaaccagcagctcgcccctgagttaactcacgagcgagctgccatcacacgaaatggtaacccgagaatacaccatcaacattcacaagcgcatccatggagtgggcttcaagaagcgtgcacctcgggcactcaaagagattcgcgacattcgccaatgaaggagatgcggaacatccagatgtgcccatgacacccaggctaaacaaagcggtctgatcccaaggaatacaggaatgtcccataccgaagccgtgcccagtcacgccgcgtagaagcccactccaggagcgctgtgcatgtgag

SEQ ID NO: 334348 - DNA, 319 bp, Homo sapiens
tcccaggggcttcagtaaatctcagggtcatagagctccctgaacccacggcgcatgccaccattcccgtattccaaactcagtgaccatgacggtggtgagcaccctcatctcaatcctggaaaaataccagccccgggtacaccaggttccaggctgggccgatgagtaaattcacttgtttgatttaaaactggattgataggttttctttctcctatattcacagagacaaattaaatgccttacgaagacataaggaaaagctggaagaaaaaatcatggatcaatacaagttctatgatcctcctccaaagaa

SEQ ID NO: 334349 - DNA, 326 bp, Homo sapiens
gtcatgagcgtcattgtcctgaaccccacgtgagtggcctagcttcccagactggggaagaacatcccagcccatgttagggaaccagggacccactgggggtgtgtgggagggctggctatgtcctaaacatctacttctaaccaggaagaaccactggattggagccaaagccttagtcaaactcatcaaaccaaagaaagagggttcgagggaacgcttaaaatccaccgtggacagccctccctggcagctggagtcctcagaccccgcctcgccggcggcctctcagccgctcagatcacaggccgagaaccccgacaccc

SEQ ID NO: 334350 - DNA, 6703 bp, Homo sapiens
caagtcctccagcgccgactccactcccagccccaccagcagcctctctagcgaagacaagcagcacctggccgtagagctggccgacaccaaggccaggctgcggcgcgtcaggcaggagctggaggataagacagagcagcttgtggacaccagacatgaggtggaccagctggtgctggaactgcagaaagttaagcaggagaacatccagctagcggcagacgcccggtctgctcgtgcctatcgagacgagctggattccctgcgggagaaggcgaaccgcgtggagaggctggagctggagctgacccgctgcaaggagaagctgcacgacgtggacttctacaaggcccgcatggaggagctgagagaagataatatcattttaattgaaaccaaggccatgctggaggaacagctgactgctgctcgggcccggggcgataaagtccatgagctggaaaaggagaacctgcagctgaaatccaagcttcacgacctggaattggaccgggacacagataagaaacgaattgaggagctgctggaagaaaacatggtccttgagattgcacagaagcagagcatgaacgaatctgcccaccttggctgggagctggagcagctgtccaagaacgcagacttgtcagacgcctccaggaagtcgtttgtgtttgagctgaacgaatgtgcgtccagccgcatcctgaagctggagaaggagaatcagagcctccagagcaccatccaggggctgcgggacgcgtccctggtgttggaggagagcggcctcaagtgcggggagctggagaaggagaaccaccagctcagcaagaagattgaaaagttacaaacccagctggagagagaaaagcagagcaaccaagatctggagaccctcagtgaggagctgatcagagagaaggagcagctgcagagtgacatggagaccctgaaggctgacaaagccaggcagatcaaggaccttgagcaggaaaaggaccacctcaaccgagccatgtggtcgctgcgggagaggtcgcaggtcagcagtgaggcccgcatgaaagacgtggagaaggagaacaaagccctccaccagacggtgacggaggccaatggcaagctcagccagttggagtttgagaagcggcagctgcacagggacttggagcaggccaaggagaagggggagcgggcagagaagctggagagggagctacagcgactccaggaggagaacgggaggctggccaggaaggtgacctccctggagacagccaccgagaaagtcgaggccctggagcatgagagccagggcctgcagctggagaaccggactctgaggaagtctctggacaccttgcagaacgtgtccctgcagcttgagggcctggagcgtgacaacaagcagctggacgcagagaacctggagctgcgcaggctggtggagaccatgcgcttcaccagcaccaagctggcacagatggagagggagaaccagcagctggagcgtgagaaggaggagctgaggaagaacgtggatctgctcaaggcgctgggcaagaagtcagagcgcctggagctcagctaccagagcgtgagcgctgagaacctccggctgcagcagagcctggagagcagcagccacaagacgcagaccttggagagtgagctgggcgagctggaggctgagcgccaggcgctgcggcgggacctggaggccctccggctggccaatgcacagttggagggggccgagaaggacaggaaggccctggagcaggaggtggcccagctcgagaaggataagaagctgctggagaaggaggccaagcggctgtggcagcaggtggagctcaaggatgcagtcttggacgatagcactgccaaactgtccgccgttgagaaggagagccgcgcgctggacaaggagctggcccgctgcagggacgcagccggcaagctgaaggagctggagaaggacaaccgggacctcaccaagcaagtcaccgtgcatgcaaggacactgacaactctgagggaggacctggtgctcgagaagctgaagagccagcagctcagcagtgagctggacaagctgagccaggaactggagaaggtcggcctcaacagggagctgctgttgcaggaggacgacagcggcagtgacacaaaatacaagattttggagggcagaaatgaatcagcattaaaaacaacactagccatgaaagaagaaaagattgtgctcttagaagcacagatggaagagaaagcgagcctaaatcgccagttagagagtgagctgcagatgctaaagaaggagtgtgagaccctcaggcagaaccagggagaggggcagcacttgcagaactctttcaagcaccctgcggggaagacagccgccagtcaccaggggaaggaggcctgggggcccggccataaggaagccaccatggagcttctccgagtgaaggaccgggccatcgagctggagcggaataatgcagctctgcaggctgagaagcagctgctaaaggaacagctgcagcacctggagacccagaacgtgaccttcagcagccagatcttgacactgcagaaacagagcgccttcctgcaggagcacaacaccacactgcagacccagaccgccaagctgcaggtggagaactccacgctgagttcccagagcgcagcgctcaccgcgcagtacacgctgctgcagaaccaccacacggccaaggagacggagaacgaaagcctgcagaggcagcaggagcaacttacagcggcctacgaggccctgctgcaggaccacgagcacctgggcacgctgcacgagcggcaatcggccgagtacgaggccctcatccgccagcacagctgcctaaagacactgcatcggaatctggagctggagcacaaggagctcggggagaggcacggtgacatgctgaagcgcaaggcggagctggaggagcgggagaaggtcttgaccactgagcgagaggcgctgcagcaggagcagaggacaaacgccctcgccatgggcgagaaccagaggctgcggggcgagctggacagggtcaatttcctgcaccaccagctgaagggggagtacgaggagctgcacgcccacaccaaggagctgaaaacctcactgaacaacgcgcagctggagctcaaccgctggcaggcccgcttcgacgagctgaaggagcagcaccagaccatggacatctcgctgaccaagctggacaaccactgtgagctgctctcccgtctcaaggggaacttggaggaagaaaatcatcacctcctgagccagatccagctgttgagccagcagaaccagatgcttctggagcagaacatggagaacaaggagcagtaccatgaggagcagaagcagtacatagacaaattaaatgccttacgaagacataaggaaaagctggaagaaaaaatcatggatcaatacaagttctatgatcctcctccaaagaagaagaaccactggattggagccaaagccttagtcaaactcatcaaaccaaagaaagagggttcgagggaacgcttaaaatccaccgtggacagccctccctggcagctggagtcctcagaccccgcctcgccggcggcctctcagccgctcagatcacaggccgagaaccccgacacccccgcactgggctccaactgtgcagaagagcgcgacgcccacaacgggtctgtggggaaaggccctggggatctaaaaccaaagcgaggctccccacacagaggcagccttgaccgcacagatgcctccaccgatctggccatgaggtcctggccctcggagctgggctcccggacttgctcaacttcagccaccactacagccccttccaactccacccccatcgcccggcacccaggccgcaccaaaggctataactcagatgacaacctctgtgagccatccctggagtttgaggtccccaaccacaggcagtacgtgtcgcggccaagtagcttagagagcagtagaaacacatccagcaacagctcacctcttaacctaaaaggctcctccgagcagctccatggccggtctgagagcttcagcagcgaagacctgatccccagcagggacctggccactttgccccgggaagccagcacaccgggacgcaacgccctcggccgccacgagtaccccttgcctcggaacgggcctctcccacaggagggtgcccagaagaggggcacagcccctccctacgtcggagtgcggccctgctcggcctcccccagcagtgagatggtcaccttggaggagttcctggaggagagcaaccgcagctcccccacccatgacactcccagttgccgggatgacctgctgagtgactacttccgaaaggccagcgatcccccagccatcggaggccaaccaggaccacctgccaagaaagaaggggccaagatgcccaccaactttgtggcccccaccgtcaaaatggccgcccccacctcggaggggaggccgctgaagcccgggcagtacgtaaagccaaacttcagactgactgaggccgaggccccacccagcgtggccccgagacaggcccagcctccccagagcctgtctctgggcagaccccggcaggctccggtgcccccagcttcccatgcacctgccagccgcagtgcctccttgagccgggccttcagcctggcctcagctgaccttctccgggccagcgggccagaggcctgcaaacaggagtcccctcagaagctgggggctcctgaggccttagggggcagagagacaggcagccacaccctgcaaagccccgcaccccccagctcccatagcctggcccgggagcggaccccacttgtgggaaaggctggcagctcctgtcagggcccaggtccccgcagccggccgctggacacgaggcgcttctccctggctcccccaaaggaggagaggctggcccccctgcatcagtctgccacagcccccgccattgccactgcaggtgctggtgctgctgctgctggcagtggcagcaactcccagctcctgcacttctcacctgctgcagccccggctgccaggaccaagcccaaggcgcccccacgctcaggggaggtggccaccatcacccctgtccgggcagggctcagcctctcagagggagacggggtcccggggcagggctgcagtgaggggcttccggccaagagcccaggtcggtctcccgatttggctccccacctcggccgggccctggaggactgcagtcgagggagcgtctcaaagagcagtccggcctccccggagcccggcggggatccgcagaccgtgtggtatgagtacggctgtgtgtgactgtctcgtggttgagctcgcaaacctgaaaactactgacgcgccttccgactctcacggccttttctcttgcttgcctgcggtgccaggagagggtttggaatgaggaaaggggttcccacgcatttctgctgtttgttctgtgaatggaaacactgtgccaagccccaagaggattacgcttccaggtgtgtaacgtgttttctgtgtctgccgcttccagcagctgatatctttggaacaaataatccacgtcagcatggggaccaattcggatgcaatgacaaactgacttcccccaaagcagacactactccagtatgtcccagtagaacactcatttgcaatgtgttgagctccgttaagcacacacacactcacacaacaggctcacgaggctcaggcctggcgggtcagaaagcccactccctctcccaaggccactggatcccaggagaagcccagactggcgatactacaaaggtctccagggcctggcagaccccagagtcaggcctgctgttaaaaagtgagagtgctgctgttccattcctggggtcccaagcacttccctttaccccaggacccagggcagcctgcagggcagctggcggtggccttggccatttgcccccagcctccagctggctcctgagctctgcaccagggggtttggggaccacacaggcacctgccttcctagatttccctggctcacttttctgcaaacactggatctgccaggcctggggattggggggcaggaaagaggcccccatccagccccctccaggccagtgtgcacagtgcaccgaggggtcatccgcacagagcgaggtgcaagctcgatgtgtaacctggctgcggcacccgacatccccggtctcggggtgttgatttatttctgaataactttttgggtatagaaaccaattttttttaatatatgacatgtatatgtacacactcatgtgaaatatgtatactttggggggatctatttatgttccagtgggagtcactctcttctgtcgggaatcttatctgctgctttgtgtctttggtcagattcctgacaatttagtttcctgttgtaaaggtgcttttcctggggtgaactaaacctattgattttttttttttaagatttttttttccttttgatttaatatactgagaaagaaatgggagacttttgaatgttaacaagatccattttaggagtgtttggggttgtgtattaaatagccattcattctggaactcaaggacaggactgtaataaaatggaatggaaccgaa

SEQ ID NO: 334351 - DNA, 7145 bp, Homo sapiens
caagtcctccagcgccgactccactcccagccccaccagcagcctctctagcgaagacaagcagcacctggccgtagagctggccgacaccaaggccaggctgcggcgcgtcaggcaggagctggaggataagacagagcagcttgtggacaccagacatgaggtggaccagctggtgctggaactgcagaaagttaagcaggagaacatccagctagcggcagacgcccggtctgctcgtgcctatcgagacgagctggattccctgcgggagaaggcgaaccgcgtggagaggctggagctggagctgacccgctgcaaggagaagctgcacgacgtggacttctacaaggcccgcatggaggagctgagagaagataatatcattttaattgaaaccaaggccatgctggaggaacagctgactgctgctcgggcccggggcgataaagtccatgagctggaaaaggagaacctgcagctgaaatccaagcttcacgacctggaattggaccgggacacagataagaaacgaattgaggagctgctggaagaaaacatggtccttgagattgcacagaagcagagcatgaacgaatctgcccaccttggctgggagctggagcagctgtccaagaacgcagacttgtcagacgcctccaggaagtcgtttgtgtttgagctgaacgaatgtgcgtccagccgcatcctgaagctggagaaggagaatcagagcctccagagcaccatccaggggctgcgggacgcgtccctggtgttggaggagagcggcctcaagtgcggggagctggagaaggagaaccaccagctcagcaagaagattgaaaagttacaaacccagctggagagagaaaagcagagcaaccaagatctggagaccctcagtgaggagctgatcagagagaaggagcagctgcagagtgacatggagaccctgaaggctgacaaagccaggcagatcaaggaccttgagcaggaaaaggaccacctcaaccgagccatgtggtcgctgcgggagaggtcgcaggtcagcagtgaggcccgcatgaaagacgtggagaaggagaacaaagccctccaccagacggtgacggaggccaatggcaagctcagccagttggagtttgagaagcggcagctgcacagggacttggagcaggccaaggagaagggggagcgggcagagaagctggagagggagctacagcgactccaggaggagaacgggaggctggccaggaaggtgacctccctggagacagccaccgagaaagtcgaggccctggagcatgagagccagggcctgcagctggagaaccggactctgaggaagtctctggacaccttgcagaacgtgtccctgcagcttgagggcctggagcgtgacaacaagcagctggacgcagagaacctggagctgcgcaggctggtggagaccatgcgcttcaccagcaccaagctggcacagatggagagggagaaccagcagctggagcgtgagaaggaggagctgaggaagaacgtggatctgctcaaggcgctgggcaagaagtcagagcgcctggagctcagctaccagagcgtgagcgctgagaacctccggctgcagcagagcctggagagcagcagccacaagacgcagaccttggagagtgagctgggcgagctggaggctgagcgccaggcgctgcggcgggacctggaggccctccggctggccaatgcacagttggagggggccgagaaggacaggaaggccctggagcaggaggtggcccagctcgagaaggataagaagctgctggagaaggaggccaagcggctgtggcagcaggtggagctcaaggatgcagtcttggacgatagcactgccaaactgtccgccgttgagaaggagagccgcgcgctggacaaggagctggcccgctgcagggacgcagccggcaagctgaaggagctggagaaggacaaccgggacctcaccaagcaagtcaccgtgcatgcaaggacactgacaactctgagggaggacctggtgctcgagaagctgaagagccagcagctcagcagtgagctggacaagctgagccaggaactggagaaggtcggcctcaacagggagctgctgttgcaggaggacgacagcggcagtgacacaaaatacaagattttggagggcagaaatgaatcagcattaaaaacaacactagccatgaaagaagaaaagattgtgctcttagaagcacagatggaagagaaagcgagcctaaatcgccagttagagagtgagctgcagatgctaaagaaggagtgtgagaccctcaggcagaaccagggagaggggcagcacttgcagaactctttcaagcaccctgcggggaagacagccgccagtcaccaggggaaggaggcctgggggcccggccataaggaagccaccatggagcttctccgagtgaaggaccgggccatcgagctggagcggaataatgcagctctgcaggctgagaagcagctgctaaaggaacagctgcagcacctggagacccagaacgtgaccttcagcagccagatcttgacactgcagaaacagagcgccttcctgcaggagcacaacaccacactgcagacccagaccgccaagctgcaggtggagaactccacgctgagttcccagagcgcagcgctcaccgcgcagtacacgctgctgcagaaccaccacacggccaaggagacggagaacgaaagcctgcagaggcagcaggagcaacttacagcggcctacgaggccctgctgcaggaccacgagcacctgggcacgctgcacgagcggcaatcggccgagtacgaggccctcatccgccagcacagctgcctaaagacactgcatcggaatctggagctggagcacaaggagctcggggagaggcacggtgacatgctgaagcgcaaggcggagctggaggagcgggagaaggtcttgaccactgagcgagaggcgctgcagcaggagcagaggacaaacgccctcgccatgggcgagaaccagaggctgcggggcgagctggacagggtcaatttcctgcaccaccagctgaagggggagtacgaggagctgcacgcccacaccaaggagctgaaaacctcactgaacaacgcgcagctggagctcaaccgctggcaggcccgcttcgacgagctgaaggagcagcaccagaccatggacatctcgctgaccaagctggacaaccactgtgagctgctctcccgtctcaaggggaacttggaggaagaaaatcatcacctcctgagccagatccagctgttgagccagcagaaccagatgcttctggagcagaacatggagaacaaggagcagtaccatgaggagcagaagcagtacatagacaaattaaatgccttacgaagacataaggaaaagctggaagaaaaaatcatggatcaatacaagttctatgatcctcctccaaagaagaagaaccactggattggagccaaagccttagtcaaactcatcaaaccaaagaaagagggttcgagggaacgcttaaaatccaccgtggacagccctccctggcagctggagtcctcagaccccgcctcgccggcggcctctcagccgctcagatcacaggccgagaaccccgacacccccgcactgggctccaactgtgcagaagagcgcgacgcccacaacgggtctgtggggaaagcacctccgcgcaaaaagagtccctttttgaaaagcaaaaacaaggacaaagacaagtctccaacgacccacccagctctctctaaacgcctgcggttctggtcttcctccgacatcccatcctctcctaacgagcctctctctttctccgacattggagatttctaatccctttcctttatcatgtgtctgtattgtgtaccctccttcatttccgaaattcaaacaaacaaaaaaagccagcgtctaaaaggccagatggccgatagcggacccctcctcctgcccccaatttcaagcttaaagtagccagcgtggattctgatttcaaaatagaagatgagttgtcacactccctggaccatttcttcagcacaacacagttttagggggagcctcaggatatacgtgcacatgtccttgggccaggatgtccgtactaagccctggggatctaaaaccaaagcgaggctccccacacagaggcagccttgaccgcacagatgcctccaccgatctggccatgaggtcctggccctcggagctgggctcccggacttgctcaacttcagccaccactacagccccttccaactccacccccatcgcccggcacccaggccgcaccaaaggctataactcagatgacaacctctgtgagccatccctggagtttgaggtccccaaccacaggcagtacgtgtcgcggccaagtagcttagagagcagtagaaacacatccagcaacagctcacctcttaacctaaaaggctcctccgagcagctccatggccggtctgagagcttcagcagcgaagacctgatccccagcagggacctggccactttgccccgggaagccagcacaccgggacgcaacgccctcggccgccacgagtaccccttgcctcggaacgggcctctcccacaggagggtgcccagaagaggggcacagcccctccctacgtcggagtgcggccctgctcggcctcccccagcagtgagatggtcaccttggaggagttcctggaggagagcaaccgcagctcccccacccatgacactcccagttgccgggatgacctgctgagtgactacttccgaaaggccagcgatcccccagccatcggaggccaaccaggaccacctgccaagaaagaaggggccaagatgcccaccaactttgtggcccccaccgtcaaaatggccgcccccacctcggaggggaggccgctgaagcccgggcagtacgtaaagccaaacttcagactgactgaggccgaggccccacccagcgtggccccgagacaggcccagcctccccagagcctgtctctgggcagaccccggcaggctccggtgcccccagcttcccatgcacctgccagccgcagtgcctccttgagccgggccttcagcctggcctcagctgaccttctccgggccagcgggccagaggcctgcaaacaggagtcccctcagaagctgggggctcctgaggccttagggggcagagagacaggcagccacaccctgcaaagccccgcaccccccagctcccatagcctggcccgggagcggaccccacttgtgggaaaggctggcagctcctgtcagggcccaggtccccgcagccggccgctggacacgaggcgcttctccctggctcccccaaaggaggagaggctggcccccctgcatcagtctgccacagcccccgccattgccactgcaggtgctggtgctgctgctgctggcagtggcagcaactcccagctcctgcacttctcacctgctgcagccccggctgccaggaccaagcccaaggcgcccccacgctcaggggaggtggccaccatcacccctgtccgggcagggctcagcctctcagagggagacggggtcccggggcagggctgcagtgaggggcttccggccaagagcccaggtcggtctcccgatttggctccccacctcggccgggccctggaggactgcagtcgagggagcgtctcaaagagcagtccggcctccccggagcccggcggggatccgcagaccgtgtggtatgagtacggctgtgtgtgactgtctcgtggttgagctcgcaaacctgaaaactactgacgcgccttccgactctcacggccttttctcttgcttgcctgcggtgccaggagagggtttggaatgaggaaaggggttcccacgcatttctgctgtttgttctgtgaatggaaacactgtgccaagccccaagaggattacgcttccaggtgtgtaacgtgttttctgtgtctgccgcttccagcagctgatatctttggaacaaataatccacgtcagcatggggaccaattcggatgcaatgacaaactgacttcccccaaagcagacactactccagtatgtcccagtagaacactcatttgcaatgtgttgagctccgttaagcacacacacactcacacaacaggctcacgaggctcaggcctggcgggtcagaaagcccactccctctcccaaggccactggatcccaggagaagcccagactggcgatactacaaaggtctccagggcctggcagaccccagagtcaggcctgctgttaaaaagtgagagtgctgctgttccattcctggggtcccaagcacttccctttaccccaggacccagggcagcctgcagggcagctggcggtggccttggccatttgcccccagcctccagctggctcctgagctctgcaccagggggtttggggaccacacaggcacctgccttcctagatttccctggctcacttttctgcaaacactggatctgccaggcctggggattggggggcaggaaagaggcccccatccagccccctccaggccagtgtgcacagtgcaccgaggggtcatccgcacagagcgaggtgcaagctcgatgtgtaacctggctgcggcacccgacatccccggtctcggggtgttgatttatttctgaataactttttgggtatagaaaccaattttttttaatatatgacatgtatatgtacacactcatgtgaaatatgtatactttggggggatctatttatgttccagtgggagtcactctcttctgtcgggaatcttatctgctgctttgtgtctttggtcagattcctgacaatttagtttcctgttgtaaaggtgcttttcctggggtgaactaaacctattgattttttttttttaagatttttttttccttttgatttaatatactgagaaagaaatgggagacttttgaatgttaacaagatccattttaggagtgtttggggttgtgtattaaatagccattcattctggaactcaaggacaggactgtaataaaatggaatggaaccgaa

SEQ ID NO: 334352 - DNA, 3362 bp, Homo sapiens
tgttgtggccaggtgggcaggtgccctcagcaccataaaccttgatttttttcctttggggcagatgtaaatttgaggcaaatgacacaaagaagctgaagaatagcaaatgtccaggagaagggagtgcccccttccttcccaggcccctggcacctgctccctgtgggtcccctgacgtgacaccttcaggtgcgtgcccttacatgtgcgcacacatggccctgaacggtcctcatctctcttcccgtggcctcggcctcggctgtccacatgtgttccagaaagctctgtgcagtaatagaggagggccccccgcaacctcaacctctggttcacccagcacagccttttttttgtctgccctctatactggcgttctgtgtgagatttcctttgtgaagttgtttgaagctgcagccccaggcctcataaatgtagataagcagagtatcatctgttgatggctgcttgtgctgtgcccagcactccgttggtgaagtgaggcttcctcactggagcgcagagggagtcccagagctcctccttcctgagggcgttgggcttagctttggcatgggattgttttgctgcatcgtttttcttagatggctcatctgggatatacctggtcattggctttttaattttaacactgccatttcctttcagtgtcgcggccaagtagcttagagagcagtagaaacacatccagcaacagctcacctcttaacctaaaaggctcctccgagcagctccatggccggtctgagagcttcagcagcgaagacctgatccccagcagggacctggccactttgccccgggaagccagcacaccgggacgcaacgccctcggccgccacgagtaccccttgcctcggaacgggcctctcccacaggagggtgcccagaagaggggcacagcccctccctacgtcggagtgcggccctgctcggcctcccccagcagtgagatggtcaccttggaggagttcctggaggagagcaaccgcagctcccccacccatgacactcccagttgccgggatgacctgctgagtgactacttccgaaaggccagcgatcccccagccatcggaggccaaccaggaccacctgccaagaaagaaggggccaagatgcccaccaactttgtggcccccaccgtcaaaatggccgcccccacctcggaggggaggccgctgaagcccgggcagtacgtaaagccaaacttcagactgactgaggccgaggccccacccagcgtggccccgagacaggcccagcctccccagagcctgtctctgggcagaccccggcaggctccggtgcccccagcttcccatgcacctgccagccgcagtgcctccttgagccgggccttcagcctggcctcagctgaccttctccgggccagcgggccagaggcctgcaaacaggagtcccctcagaagctgggggctcctgaggccttagggggcagagagacaggcagccacaccctgcaaagccccgcaccccccagctcccatagcctggcccgggagcggaccccacttgtgggaaaggctggcagctcctgtcagggcccaggtccccgcagccggccgctggacacgaggcgcttctccctggctcccccaaaggaggagaggctggcccccctgcatcagtctgccacagcccccgccattgccactgcaggtgctggtgctgctgctgctggcagtggcagcaactcccagctcctgcacttctcacctgctgcagccccggctgccaggaccaagcccaaggcgcccccacgctcaggggaggtggccaccatcacccctgtccgggcagggctcagcctctcagagggagacggggtcccggggcagggctgcagtgaggggcttccggccaagagcccaggtcggtctcccgatttggctccccacctcggccgggccctggaggactgcagtcgagggagcgtctcaaagagcagtccggcctccccggagcccggcggggatccgcagaccgtgtggtatgagtacggctgtgtgtgactgtctcgtggttgagctcgcaaacctgaaaactactgacgcgccttccgactctcacggccttttctcttgcttgcctgcggtgccaggagagggtttggaatgaggaaaggggttcccacgcatttctgctgtttgttctgtgaatggaaacactgtgccaagccccaagaggattacgcttccaggtgtgtaacgtgttttctgtgtctgccgcttccagcagctgatatctttggaacaaataatccacgtcagcatggggaccaattcggatgcaatgacaaactgacttcccccaaagcagacactactccagtatgtcccagtagaacactcatttgcaatgtgttgagctccgttaagcacacacacactcacacaacaggctcacgaggctcaggcctggcgggtcagaaagcccactccctctcccaaggccactggatcccaggagaagcccagactggcgatactacaaaggtctccagggcctggcagaccccagagtcaggcctgctgttaaaaagtgagagtgctgctgttccattcctggggtcccaagcacttccctttaccccaggacccagggcagcctgcagggcagctggcggtggccttggccatttgcccccagcctccagctggctcctgagctctgcaccagggggtttggggaccacacaggcacctgccttcctagatttccctggctcacttttctgcaaacactggatctgccaggcctggggattggggggcaggaaagaggcccccatccagccccctccaggccagtgtgcacagtgcaccgaggggtcatccgcacagagcgaggtgcaagctcgatgtgtaacctggctgcggcacccgacatccccggtctcggggtgttgatttatttctgaataactttttgggtatagaaaccaattttttttaatatatgacatgtatatgtacacactcatgtgaaatatgtatactttggggggatctatttatgttccagtgggagtcactctcttctgtcgggaatcttatctgctgctttgtgtctttggtcagattcctgacaatttagtttcctgttgtaaaggtgcttttcctggggtgaactaaacctattgattttttttttttaagatttttttttccttttgatttaatatactgagaaagaaatgggagacttttgaatgttaacaagatccattttaggagtgtttggggttgtgtattaaatagccattcattctggaactcaaggacaggactgtaataaaatggaatggaaccgaa

SEQ ID NO: 334353 - DNA, 1008 bp, Homo sapiens
caagtcctccagcgccgactccactcccagccccaccagcagcctctctagcgaagacaagcagcacctggccgtagagctggccgacaccaaggccaggctgcggcgcgtcaggcaggagctggaggataagacagagcagcttgtggacaccagacatgaggtggaccagctggtgctggaactgcagaaagttaagcaggagaacatccagctagcggcagacgcccggtctgctcgtgcctatcgagacgagctggattccctgcgggagaaggcgaaccgcgtggagaggctggagctggagctgacccgctgcaaggagaagctgcacgacgtggacttctacaaggcccgcatggaggagctgagagaagataatatcattttaattgaaaccaaggccatgctggaggaacagctgactgctgctcgggcccggggcgataaagtccatgagctggaaaaggagaacctgcagctgaaatccaagcttcacgacctggaattggaccgggacacagataagaaacgaattgaggagctgctggaagaaaacatggtccttgagattgcacagaagcagagcatgaacgaatctgcccaccttggctgggagctggagcagctgtccaagaacgcagacttgtcagacgcctccaggaagtcgtttgtgtttgagctgaacgaatgtgcgtccagccgcatcctgaagctggagaaggagaatcagagcctccagagcaccatccaggggctgcgggacgcgtccctggtgttggaggagagcggcctcaagtgcggggagctggagaaggagaaccaccagctcagcaagaagattgaaaagttacaaacccagctggagagagaaaagcagagcaaccaagatctggagaccctcagtgaggagctgatcagagagaaggagcagctgcagagtgacatggagaccctgaaggctgacaaagccaggcaggtaggtgcctccaccactaacgcctctcc

SEQ ID NO: 334354 - DNA, 181 bp, Homo sapiens
gggttcctgctctatcacctacaccaccaccaccacgtgcaggcccgagaaggcaaaagaggcccagccactctcaccggggattttatccgcctccccggcacacacacactctcactcacgcactcgctcgccggccttccagctgtctgtgtccggggcggggaccggcttggcgcag

SEQ ID NO: 334355 - DNA, 1687 bp, Homo sapiens
ggcggctccggtcggagacaatcgcgctgagcgggcgccgcagcgggagcgggagccggagctgcgaggcgcggcgcagagctggggctgcgcggggccgggcgagcgggaccaggcgggagccatggaccgctagggcccggcctagccccgcgatgccgccggcgagtggccccagcgtcctcgcgcggctgttgccgctgctggggctgctgctcggcagcgcctcccgggctcccggcaagtcgccgccggagccccccagcccgcaggagatcctgatcaaggtgcaggtgtatgtgagcggggagctggtgcccctggcccgggcctcagtggatgtgtttgggaaccggactctgctggcagctggcaccacagactcagagggtgtggccaccctgcccctcagttatcgcttgggcacctgggtgctggtcactgctgcccgccctggcttcctcaccaactctgtgccctggcgtgttgacaagctgcccttgtatgcgtctgtcagcctctacctgctccctgagcggccggccacgctcatcctctatgaggacctggtgcacattctcctaggctctcccggtgcccgctcccagcccttggtgcagttccagcgccgggctgcccgcctgcctgtcagctccacctacagccagctctgggcgtcacttacgcctgccagcacccagcaggaaatgcgggctttccctgccttcctgggcactgaggcctccagctcaggcaatggctcctggctggagctgatgcccctgactgctgtgagcgtgcacctgctgacaggtaatgggacagaggtgccgctctcaggccccattcacctgtccctgcccgtgccctccgagactcgtgccctcaccgtgggcaccagcattccagcctggagatttgaccccaagagtgggctgtgggtgcgcaatggcactggtgtaatccggaaggaaggccggcagctctactggaccttcgtctccccccagctggggtactgggtggccgccatggcctcccccacggctgggctggtcaccatcacgtcgggcatccaggacatcggcacctaccacaccatcttcttgctcaccatcctggcagccctggccctgctggtgcttatcctgctgtgtctgctcatctactactgccggaggcgctgcctgaagccgaggcaacagcaccgcaagctgcagctctcggggccctctgacggtaacaaacgagaccaggccacctcgatgtcccagctccacctcatctgtgggggacccctggaacccgccccgtcgggggaccccgaggctccgcctccaggccccctccactcggccttctccagctcccgggacttggcctcctcccgggatgacttcttccgcaccaagccgcgctctgccagccgcccggccgccgagccttcgggtgcccgcgggggcgagagcgccgggctcaagggcgctcgctcggccgagggccccggcgggctggagcccggcctagaggagcaccggcgggggccctcgggggctgcggccttcctgcacgagccgccctcgccgccgccgcccttcgaccactacctgggccacaagggggcggccgagggcaagacccccgacttcctgctgtcgcagtcggtggaccagctggcgcggccgct

SEQ ID NO: 334356 - DNA, 1769 bp, Homo sapiens
ggcggctccggtcggagacaatcgcgctgagcgggcgccgcagcgggagcgggagccggagctgcgaggcgcggcgcagagctggggctgcgcggggccgggcgagcgggaccaggcgggagccatggaccgctagggcccggcctagccccgcgatgccgccggcgagtggccccagcgtcctcgcgcggctgttgccgctgctggggctgctgctcggcagcgcctcccgggctcccggcaagtcgccgccggagccccccagcccgcaggagatcctgatcaaggtgcaggtgtatgtgagcggggagctggtgcccctggcccgggcctcagtggatgtgtttgggaaccggactctgctggcagctggcaccacagactcagagggtgtggccaccctgcccctcagttatcgcttgggcacctgggtgctggtcactgctgcccgccctggcttcctcaccaactctgtgccctggcgtgttgacaagctgcccttgtatgcgtctgtcagcctctacctgctccctgagcggccggccacgctcatcctctatgaggacctggtgcacattctcctaggctctcccggctgtgccaggcattgtggctggtgctgggaaccacggtgaggaagaagacccgctctttgcctttggacgttcacagacaagtgcccgctcccagcccttggtgcagttccagcgccgggctgcccgcctgcctgtcagctccacctacagccagctctgggcgtcacttacgcctgccagcacccagcaggaaatgcgggctttccctgccttcctgggcactgaggcctccagctcaggcaatggctcctggctggagctgatgcccctgactgctgtgagcgtgcacctgctgacaggtaatgggacagaggtgccgctctcaggccccattcacctgtccctgcccgtgccctccgagactcgtgccctcaccgtgggcaccagcattccagcctggagatttgaccccaagagtgggctgtgggtgcgcaatggcactggtgtaatccggaaggaaggccggcagctctactggaccttcgtctccccccagctggggtactgggtggccgccatggcctcccccacggctgggctggtcaccatcacgtcgggcatccaggacatcggcacctaccacaccatcttcttgctcaccatcctggcagccctggccctgctggtgcttatcctgctgtgtctgctcatctactactgccggaggcgctgcctgaagccgaggcaacagcaccgcaagctgcagctctcggggccctctgacggtaacaaacgagaccaggccacctcgatgtcccagctccacctcatctgtgggggacccctggaacccgccccgtcgggggaccccgaggctccgcctccaggccccctccactcggccttctccagctcccgggacttggcctcctcccgggatgacttcttccgcaccaagccgcgctctgccagccgcccggccgccgagccttcgggtgcccgcgggggcgagagcgccgggctcaagggcgctcgctcggccgagggccccggcgggctggagcccggcctagaggagcaccggcgggggccctcgggggctgcggccttcctgcacgagccgccctcgccgccgccgcccttcgaccactacctgggccacaagggggcggccgagggcaagacccccgacttcctgctgtcgcagtcggtggaccagctggcgcggccgct

SEQ ID NO: 334357 - DNA, 597 bp, Homo sapiens
gggaacaaattctatttctgttttctaacgtaacaggattagtggaggcgcatcaaaaattccattctaagtcagtgctgcgtcttgaagagaattgaaatggtctagtactaactttttaacattgactttgaatacacttttaataatccacatgtcagtcagcttactcttggtgttaaatgtcactcgagcaggaggaggcctcgatgggagcttctttttaatctccaatggatcctcagtgaagtccttagggatttcattttctgggtttcagaagtacacacacctgtcattagggcttcatatgcctagcgtgtgaccccctgccctacccttaagcctaaggcagtcatatggtttttaatgtgtctatcctgccttgaaaccaaacctctccaagaactaaaacaaaaatgtgaattactccttgcccttcaggctgcttcgttggaaagccttccctcacttgagccccttgctgagagccctgtagcaccctgtgaagtggccccgttttccttcctgtctatgcaggcagggacctggctgtgggtggtgccccgtgggcagaacccagaggctggggggctc

SEQ ID NO: 334358 - DNA, 821 bp, Homo sapiens
  misc_feature (791)..(791): n is a, c, g, or t
gcactaccgggaaggcgccgtccccaccacccctcctcactgaccggcaagtgaatgagaaggtggagaacctctccattcagctgcggctgatgacccgggagagaaacgagctccgcaagcgcctggcctttgctacgcatggcacggcctttgacaagaggccctaccacaggctgaatcctgactatgagaggctgaagatccagtgcgtgcgagccatgtcggacctgcagagcctgcagaaccagcacaccaacgccttgaagaggtgtgaggaggtggccaaggagactgacttctaccacacactccacagccggctcctgagtgaccagactcggctgaaggatgacgtggacatgctgaggcgggagaatgggcagctgctgcgggagcgaaacctgctgcagcagtcatgggaggacatgaagcggctccacgaggaggaccagaaggagatcggtgacctccgtgcccagcagcagcaggtgttgaagcacaacgggtcatccgagattctcaacaaactgtatgacacggccatggacaagttggaggtggtcaagaaggactatgacgcccttcggaagaggtacagtgagaaagtcgccatccacaatgcagacctgagccgcctggagcagctgggggaggagaaccagcggttgctgaagcagacagagatgctgacccagcagagggacacggccatccagctgcagcaccagtgcgccctctccctgaggaggtttgaggcgatccaccatgagctgctgcagtcagagctnccgagctcgagtatcacgcagtgaagactt

SEQ ID NO: 334359 - DNA, 416 bp, Homo sapiens
tggggctcactgagcatgtaccgggtgtttcagcacactccacagccggctcctgagtgaccagactcggctgaaggatgacgtggacatgctgaggcgggagaatgggcagctgctgcgggagcgaaacctgctgcagcagtcatgggaggacatgaagcggctccacgaggaggaccagaaggagatcggtgacctccgtgcccagcagcagcaggtaggcccagcccctggagactggccatttctcccaagtagtcctcattccttttaatggagaatagtattgagaagtaaatgctgggccgggcacgttggctcacatctgtgatcccagcgctttggaagaccaaggtgagagattgcttgagatgagcctgggcaacatggcaagatcccatctctacaaaaaaaaa

SEQ ID NO: 334360 - DNA, 785 bp, Homo sapiens
  misc_feature (755)..(755): n is a, c, g, or t
gcactaccgggaaggcgccgtccccaccacccctcctcactgaccggcaagtgaatgagaaggtggagaacctctccattcagctgcggctgatgacccgggagagaaacgagctccgcaagcgcctggcctttgctacgcatggcacggcctttgacaagaggccctaccacaggctgaatcctgactatgagaggctgaagatccagtgcgtgcgagccatgtcggacctgcagagcctgcagaaccagcacaccaacgccttgaagagcacactccacagccggctcctgagtgaccagactcggctgaaggatgacgtggacatgctgaggcgggagaatgggcagctgctgcgggagcgaaacctgctgcagcagtcatgggaggacatgaagcggctccacgaggaggaccagaaggagatcggtgacctccgtgcccagcagcagcaggtgttgaagcacaacgggtcatccgagattctcaacaaactgtatgacacggccatggacaagttggaggtggtcaagaaggactatgacgcccttcggaagaggtacagtgagaaagtcgccatccacaatgcagacctgagccgcctggagcagctgggggaggagaaccagcggttgctgaagcagacagagatgctgacccagcagagggacacggccatccagctgcagcaccagtgcgccctctccctgaggaggtttgaggcgatccaccatgagctgctgcagtcagagctnccgagctcgagtatcacgcagtgaagactt

SEQ ID NO: 334361 - DNA, 410 bp, Homo sapiens
gcatgtaccgggtgtttcagcacactccacagccggctcctgagtgaccagactcggctgaaggatgacgtggacatgctgaggcgggagaatgggcagctgctgcgggagcgaaacctgctgcagcagtcatgggaggacatgaagcggctccacgaggaggaccagaaggagatcggtgacctccgtgcccagcagcagcaggtaggcccagcccctggagactggccatttctcccaagtagtcctcattccttttaatggagaatagtattgagaagtaaatgctgggccgggcacgttggctcacatctgtgatcccagcgctttggaagaccaaggtgagagattgcttgagatgagcctgggcaacatggcaagatcccatctctacaaaaaaaaaaaaaaaa

SEQ ID NO: 334362 - DNA, 775 bp, Homo sapiens
caagatcgcgccactgcactccagcctgggtgacacagcaagactccacctcaaaaaaaaaaaaaaagaaattgatgtcatgttgggagagttcttttttataatgtataattctctcctttttcttttaaagagttaagtttaggttaatacgttttttaactctaatttactccaagcagggctataactgaatgaatattctgttctttttaaactaatattcaggtaaaaccacctcagctaattgattatctgcagcagaagaaaacagaaggttataccatcattggagtggaacaaactgccaaaagtttagacctaacccaatattgctttcctgagaaatctctgctcttgttgggaaatgaacgtgagggaattccagcaaatctgatccaacagttggacgtttgtgtggaaattcctcaacagggcattatccgctccctgaatgtccatgtgagtggagccctgctgatctgggagtacaccaggcagcagctgctctcgcacggagataccaagccatgatgtgccttccttagtgaactgctgctgctgttcagacttttttaaaaaaaactatttggactaaagaaacagattctgaaatttattgtgataatttgtatttcttttttcttgcaatttaatgccaaaagtttgccatgtgccttaaacatattactatatattttcccctttaataaacactttttgttaaattgtattcttcctttaataaaatattttaagcaattgtggaaataaa

SEQ ID NO: 334363 - DNA, 5107 bp, Homo sapiens
atggagtgggtgctcgcggaagcgctgctctcgcagagccgggacccccgggccctgcttggggcgctgtgccaaggggaggcatccgcggagcgcgtggagacgctgcgcttccttctgcagcggctcgaggacgaggaggcgcgcggcagcgggggcgcaggcgcgctcccggaggcggcgcgcgaggtggctgcagggtacctcgtgccactgctgcggagcctgcgcggacgccccgcgggcggcccggaccccagtctgcagcctcgccaccgccggcgcgtgctgagggcggcgggcgcggccctgcgctcgtgcgtccgcctggccgggcgtccgcagctggcggccgcgctggctgaggaggcgctgcgcgatctgctcgccgggtggcgcgcgcctggcgccgaggctgccgtggaagtgctagcagccgtcgggccatgtttgcggccccgcgaggacgggccgctactggagcgggtggcggggaccgccgtcgccctggcgctgggcgggggcggggacggggatgaggccgggcctgccgaggacgcggcggcgctggtggccgggcgactgctgccagtgctggtccaatgtggcggggcggcgctgcgggccgtgtggggcgggctggccgcgcctggggcgtccctggggtccggccgcgtagaggagaagctgctggtcctgagcgccctggccgagaagctgttgcccgagcccggcggcgaccgcgcccgcggcgcgcgcgaggcgggcccggacgcccggcgctgctggcgcttctggaggacggtgcaggcggggctgggccaggcggacgccctgacgcgcaagcgagcgcgctacctgctgcagagggcggtggaggtgtcggcggagctgggggccgactgcacctgcgggccccaggaaggaaacggcccaagtctgttttggtggtctgagaggaaaaaagatgagcttctaaagttttgggaaaattatattttaattatggagactttagaaggaaatcagatacatgttataaagccagttttaccaaagctaaacaatctgtttgaatatgcggtgtcagaggaaaatggatgttggctctttcacccatcctggcatatgtgtatttataaaagaatgtttgaaagtgaaaacaaaatcctgtccaaagaaggtgttatccattttttggagctgtatgaaacaaagattcttccattttcaccagaattttctgagtttattattggaccattaatggatgcgctttcagagagctctctgtatagcaggtccccaggccagccaataggaagctgttctccattgggactgaaattacagaagtttttagtcacttatatttctcttcttccagaagaaataaagagtagcttcctattgaagtttattcggaagatgacaagtaggcattggtgtgctgttcccattttgtttctatctaaggctttggcaaatgtcccaagacataaggccctgggtatagatgggcttcttgctctcagggatgttattcattgcactatgatcacacatcagattctcctgagaggggcagcccaatgctaccttcttcaaacagctatgaatttgctagatgtggagaaagtgtcactttctgatgtctcaacttttctcatgtctctgagacaagaggaatccttaggacgaggaacttcattgtggacagagctgtgtgactggctacgtgttaatgaaagctattttaagccatcccctacgtgtagctccattggacttcacaagacatctttaaatgcttatgtaaagagcattgttcaagagtatgttaagtcatctgcttgggaaacaggagaaaactgctttatgcctgattggtttgaagccaagcttgtttctctgatggtcttgctggctgtggatgtggaaggaatgaagactcagtatagcggaaagcagagaacagagaatgtattgcggatattcttagaccctcttctggatgtgcttatgaagtttagtaccaatgcctacatgcccttgctgaagactgacagatgcctccagctgctgttgaagctgttgaacacatgcaggttgaaaggttccagtgcccaagatgatgaggtgtctactgttcttcagaactttttcatgtctactacagagagcatttctgaatttattctcagaagacttactatgaatgagctaaatagtgtttcagatctggatcgttgccatttatacctgatggtgttaactgagcttataaatctgcatttgaaggttgggtggaaaaggggtaaccctatctggagagttatttctcttttgaaaaatgcatccattcagcatcttcaagagatggacagtggacaggagccaacagttggaagtcagattcagagagtagtgagcatggctgccttggccatggtgtgtgaggccatagaccagaagcctgagctgcagctggactctctccatgctgggcccctggaaagcttcctttcctctcttcagctcaatcagacgctgcagaagccccacgcagaggagcagagcagttatgctcaccccttggagtgcagcagtgttttggaagaatcgtcatcttcccaaggatggggaaaaatagttgcacaatatattcatgatcaatgggtgtgcctctctttcctgttgaaaaaatatcacacccttataccaaccacagggagtgaaattctggaaccgtttctacctgccgttcagatgccaataaggactttgcagtctgcactagaagccctcacagttctttcttctgatcaagttttaccagtgttccattgcttgaaagtgttggttcccaagcttctgacttcctctgaatcactctgcatagagtcttttgacatggcgtggaaaattatatcttctttaagcaacactcagctgatattctgggctaatttaaaagcttttgttcagtttgtttttgataacaaagttcttaccattgctgccaaaatcaagggccaggcatatttcaaaataaaagagattatgtacaagataattgaaatgtctgctataaagactggagtcttcaatacactgataagttactgctgtcagtcttggatagtgtctgcttcaaatgtgtcccaaggatctttatcaagtgctaaaaattatagcgaacttatccttgaggcttgtatatttggaactgtgtttaggcgtgatcaaagacttgttcaggatgtacagaccttcatagaaaaccttggacatgactgtgcggcaaatattgttatggaaaatactaagagagaagaccattatgtgagaatttgtgctgtcaaattcctgtgtttattagatggctccaatatgtcccacaagttgtttattgaggatcttgcaatcaagctattagataaagatgaattagtgtccaagtccaaaaaacgctactatgtgaattctctacagcacagagtgaaaaaccgagtgtggcagactctgctggtacttttccctagacttgaccagaatttcttgaatggaattattgacaggattttccaggctggtttcaccaacaatcaagcatccataaaatattttatagaatggattattatattgattcttcataaattccctcaatttcttccaaagttctgggattgtttttcttatggtgaagaaaatcttaaaacaagcatttgtacgtttttagcagttttatcacatttagacattattactcaaaatattccagaaaagaaactaattctgaagcaagcccttatagttgtgctgcagtggtgtttcaatcacaattttagtgttcgactgtatgctttagttgctcttaagaaactctggactgtgtgtaaagtgttaagtgttgaagaatttgatgccctgactcctgtgattgaatccagcctccatcaagtggaaagcatgcacggagcagggaatgccaagaagaattggcaacgcattcaggagcatttcttttttgcaacatttcacccactcaaggattattgtctagagaccatattttacatccttccacgcctttcaggccttattgaagatgaatggatcaccattgataaatttaccagattcactgatgttcctttagctgcgggatttcagtggtacctttctcaaactcaacttagtaaactaaaaccaggtgactggtctcagcaagacataggtactaatttggttgaagcagataaccaagcagagtggaccgacgttcagaagaagattatcccgtggaacagtcgtgtttccgacttagacctggagctcctgtttcaggatcgtgctgccagacttggaaagtcaattagtagactcatcgttgtggcctcgctcatcgacaaaccgaccaatttaggaggactgtgcaggacctgtgaggtatttggggcttcagtgctcgttgttggcagccttcagtgtatcagcgacaaacagtttcagcacctcagtgtctctgcagaacagtggcttcctctagtggaggtaaaaccacctcagctaattgattatctgcagcagaagaaaacagaaggttataccatcattggagtggaacaaactgccaaaagtttagacctaacccaatattgctttcctgagaaatctctgctcttgttgggaaatgaacgtgagggaattccagcaaatctgatccaacagttggacgtttgtgtggaaattcctcaacagggcattatccgctccctgaatgtccatgtgagtggagccctgctgatctgggagtacaccaggcagcagctgctctcgcacggagataccaagccatgatgtgccttccttagtgaactgctgctgctgttcagacttttttaaaaaaaactatttggactaaagaaacagattctgaaatttattgtgataatttgtatttcttttttcttgcaatttaatgccaaaagtttgccatgtgccttaaacatattactatatattttcccctttaataaacactttttgttaaattgtattcttcctttaataaaatattttaagcaattgtggaaataaa

SEQ ID NO: 334364 - DNA, 4935 bp, Homo sapiens
atggagtgggtgctcgcggaagcgctgctctcgcagagccgggacccccgggccctgcttggggcgctgtgccaaggggaggcatccgcggagcgcgtggagacgctgcgcttccttctgcagcggctcgaggacgaggaggcgcgcggcagcgggggcgcaggcgcgctcccggaggcggcgcgcgaggtggctgcagggtacctcgtgccactgctgcggagcctgcgcggacgccccgcgggcggcccggaccccagtctgcagcctcgccaccgccggcgcgtgctgagggcggcgggcgcggccctgcgctcgtgcgtccgcctggccgggcgtccgcagctggcggccgcgctggctgaggaggcgctgcgcgatctgctcgccgggtggcgcgcgcctggcgccgaggctgccgtggaagtgctagcagccgtcgggccatgtttgcggccccgcgaggacgggccgctactggagcgggtggcggggaccgccgtcgccctggcgctgggcgggggcggggacggggatgaggccgggcctgccgaggacgcggcggcgctggtggccgggcgactgctgccagtgctggtccaatgtggcggggcggcgctgcgggccgtgtggggcgggctggccgcgcctggggcgtccctggggtccggccgcgtagaggagaagctgctggtcctgagcgccctggccgagaagctgttgcccgagcccggcggcgaccgcgcccgcggcgcgcgcgaggcgggcccggacgcccggcgctgctggcgcttctggaggacggtgcaggcggggctgggccaggcggacgccctgacgcgcaagcgagcgcgctacctgctgcagagggcggtggaggtgtcggcggagctgggggccgactgcacctgcgggccccaggaaggaaacggcccaagtctgttttggtggtctgagaggaaaaaagatgagcttctaaagttttgggaaaattatattttaattatggagactttagaaggaaatcagatacatgttataaagccagttttaccaaagctaaacaatctgtttgaatatgcggtgtcagaggaaaatggatgttggctctttcacccatcctggcatatgtgtatttataaaagaatgtttgaaagtgaaaacaaaatcctgtccaaagaaggtgttatccattttttggagctgtatgaaacaaagattcttccattttcaccagaattttctgagtttattattggaccattaatggatgcgctttcagagagctctctgtatagcaggtccccaggccagccaataggaagctgttctccattgggactgaaattacagaagtttttagtcacttatatttctcttcttccagaagaaataaagagtagcttcctattgaagtttattcggaagatgacaagtaggcattggtgtgctgttcccattttgtttctatctaaggctttggcaaatgtcccaagacataaggccctgggtatagatgggcttcttgctctcagggatgttattcattgcactatgatcacacatcagattctcctgagaggggcagcccaatgctaccttcttcaaacagctatgaatttgctagatgtggagaaagtgtcactttctgatgtctcaacttttctcatgtctctgagacaagaggaatccttaggacgaggaacttcattgtggacagagctgtgtgactggctacgtgttaatgaaagctattttaagccatcccctacgtgtagctccattggacttcacaagacatctttaaatgcttatgtaaagagcattgttcaagagtatgttaagtcatctgcttgggaaacaggagaaaactgctttatgcctgattggtttgaagccaagcttgtttctctgatggtcttgctggctgtggatgtggaaggaatgaagactcagtatagcggaaagcagagaacagagaatgtattgcggatattcttagaccctcttctggatgtgcttatgaagtttagtaccaatgcctacatgcccttgctgaagactgacagatgcctccagctgctgttgaagctgttgaacacatgcaggttgaaaggttccagtgcccaagatgatgaggtgtctactgttcttcagaactttttcatgtctactacagagagcatttctgaatttattctcagaagacttactatgaatgagctaaatagtgtttcagatctggatcgttgccatttatacctgatggtgttaactgagcttataaatctgcatttgaaggttgggtggaaaaggggtaaccctatctggagagttatttctcttttgaaaaatgcatccattcagcatcttcaagagatggacagtggacaggagccaacagttggaagtcagattcagagagtagtgagcatggctgccttggccatggtgtgtgaggccatagaccagaagcctgagctgcagctggactctctccatgctgggcccctggaaagcttcctttcctctcttcagctcaatcagacgctgcagaagccccacgcagaggagcagagcagttatgctcaccccttggagtgcagcagtgttttggaagaatcgtcatcttcccaaggatggggaaaaatagttgcacaatatattcatgatcaatgggtgtgcctctctttcctgttgaaaaaatatcacacccttataccaaccacagggagtgaaattctggaaccgtttctacctgccgttcagatgccaataaggactttgcagtctgcactagaagccctcacagttctttcttctgatcaagttttaccagtgttccattgcttgaaagtgttggttcccaagcttctgacttcctctgaatcactctgcatagagtcttttgacatggcgtggaaaattatatcttctttaagcaacactcagctgatattctgggctaatttaaaagcttttgttcagtttgtttttgataacaaagttcttaccattgctgccaaaatcaagggccaggcatatttcaaaataaaagagattatgtacaagataattgaaatgtctgctataaagactggagtcttcaatacactgataagttactgctgtcagtcttggatagtgtctgcttcaaatgtgtcccaaggatctttatcaagtgctaaaaattatagcgaacttatccttgaggcttgtatatttggaactgtgtttaggcgtgatcaaagacttgttcaggatgtacagaccttcatagaaaaccttggacatgactgtgcggcaaatattgttatggaaaatactaagagagaagaccattatgtgagaatttgtgctgtcaaattcctgtgtttattagatggctccaatatgtcccacaagttgtttattgaggatcttgcaatcaagctattagataaagatgaattagtgtccaagtccaaaaaacgctactatgtgaattctctacagcacagagtgaaaaaccgagtgtggcagactctgctggtacttttccctagacttgaccagaatttcttgaatggaattattgacaggattttccaggctggtttcaccaacaatcaagcatccataaaatattttatagaatggattattatattgattcttcataaattccctcaatttcttccaaagttctgggattgtttttcttatggtgaagaaaatcttaaaacaagcatttgtacgtttttagcagttttatcacatttagacattattactcaaaatattccagaaaagaaactaattctgaagcaagcccttatagttgtgctgcagtggtgtttcaatcacaattttagtgttcgactgtatgctttagttgctcttaagaaactctggactgtgtgtaaagtgttaagtgttgaagaatttgatgccctgactcctgtgattgaatccagcctccatcaagtggaaagcatgcacggagcagggaatgccaagaagaattggcaacgcattcaggagcatttcttttttgcaacatttcacccactcaaggattattgtctagaggtactaatttggttgaagcagataaccaagcagagtggaccgacgttcagaagaagattatcccgtggaacagtcgtgtttccgacttagacctggagctcctgtttcaggatcgtgctgccagacttggaaagtcaattagtagactcatcgttgtggcctcgctcatcgacaaaccgaccaatttaggaggactgtgcaggacctgtgaggtatttggggcttcagtgctcgttgttggcagccttcagtgtatcagcgacaaacagtttcagcacctcagtgtctctgcagaacagtggcttcctctagtggaggtaaaaccacctcagctaattgattatctgcagcagaagaaaacagaaggttataccatcattggagtggaacaaactgccaaaagtttagacctaacccaatattgctttcctgagaaatctctgctcttgttgggaaatgaacgtgagggaattccagcaaatctgatccaacagttggacgtttgtgtggaaattcctcaacagggcattatccgctccctgaatgtccatgtgagtggagccctgctgatctgggagtacaccaggcagcagctgctctcgcacggagataccaagccatgatgtgccttccttagtgaactgctgctgctgttcagacttttttaaaaaaaactatttggactaaagaaacagattctgaaatttattgtgataatttgtatttcttttttcttgcaatttaatgccaaaagtttgccatgtgccttaaacatattactatatattttcccctttaataaacactttttgttaaattgtattcttcctttaataaaatattttaagcaattgtggaaataaa

SEQ ID NO: 334365 - DNA, 5276 bp, Homo sapiens
atggagtgggtgctcgcggaagcgctgctctcgcagagccgggacccccgggccctgcttggggcgctgtgccaaggggaggcatccgcggagcgcgtggagacgctgcgcttccttctgcagcggctcgaggacgaggaggcgcgcggcagcgggggcgcaggcgcgctcccggaggcggcgcgcgaggtggctgcagggtacctcgtgccactgctgcggagcctgcgcggacgccccgcgggcggcccggaccccagtctgcagcctcgccaccgccggcgcgtgctgagggcggcgggcgcggccctgcgctcgtgcgtccgcctggccgggcgtccgcagctggcggccgcgctggctgaggaggcgctgcgcgatctgctcgccgggtggcgcgcgcctggcgccgaggctgccgtggaagtgctagcagccgtcgggccatgtttgcggccccgcgaggacgggccgctactggagcgggtggcggggaccgccgtcgccctggcgctgggcgggggcggggacggggatgaggccgggcctgccgaggacgcggcggcgctggtggccgggcgactgctgccagtgctggtccaatgtggcggggcggcgctgcgggccgtgtggggcgggctggccgcgcctggggcgtccctggggtccggccgcgtagaggagaagctgctggtcctgagcgccctggccgagaagctgttgcccgagcccggcggcgaccgcgcccgcggcgcgcgcgaggcgggcccggacgcccggcgctgctggcgcttctggaggacggtgcaggcggggctgggccaggcggacgccctgacgcgcaagcgagcgcgctacctgctgcagagggcggtggaggtgtcggcggagctgggggccgactgcacctgcgggccccaggaaggaaacggcccaagtctgttttggtggtctgagaggaaaaaagatgagcttctaaagttttgggaaaattatattttaattatggagactttagaaggaaatcagatacatgttataaagccagttttaccaaagctaaacaatctgtttgaatatgcggtgtcagaggaaaatggatgttggctctttcacccatcctggcatatgtgtatttataaaagaatgtttgaaagtgaaaacaaaatcctgtccaaagaaggtgttatccattttttggagctgtatgaaacaaagattcttccattttcaccagaattttctgagtttattattggaccattaatggatgcgctttcagagagctctctgtatagcaggtccccaggccagccaataggaagctgttctccattgggactgaaattacagaagtttttagtcacttatatttctcttcttccagaagaaataaagagtagcttcctattgaagtttattcggaagatgacaagtaggcattggtgtgctgttcccattttgtttctatctaaggctttggcaaatgtcccaagacataaggccctgggtatagatgggcttcttgctctcagggatgttattcattgcactatgatcacacatcagattctcctgagaggggcagcccaatgctaccttcttcaaacagctatgaatttgctagatgtggagaaagtgtcactttctgatgtctcaacttttctcatgtctctgagacaagaggaatccttaggacgaggaacttcattgtggacagagctgtgtgactggctacgtgttaatgaaagctattttaagccatcccctacgtgtagctccattggacttcacaagacatctttaaatgcttatgtaaagagcattgttcaagagtatgttaagtcatctgcttgggaaacaggagaaaactgctttatgcctgattggtttgaagccaagcttgtttctctgatggtcttgctggctgtggatgtggaaggaatgaagactcagtatagcggaaagcagagaacagagaatgtattgcggatattcttagaccctcttctggatgtgcttatgaagtttagtaccaatgcctacatgcccttgctgaagactgacagatgcctccagctgctgttgaagctgttgaacacatgcaggttgaaaggttccagtgcccaagatgatgaggtgtctactgttcttcagaactttttcatgtctactacagagagcatttctgaatttattctcagaagacttactatgaatgagctaaatagtgtttcagatctggatcgttgccatttatacctgatggtgttaactgagcttataaatctgcatttgaaggttgggtggaaaaggggtaaccctatctggagagttatttctcttttgaaaaatgcatccattcagcatcttcaagagatggacagtggacaggagccaacagttggaagtcagattcagagagtagtgagcatggctgccttggccatggtgtgtgaggccatagaccagaagcctgagctgcagctggactctctccatgctgggcccctggaaagcttcctttcctctcttcagctcaatcagacgctgcagaagccccacgcagaggagcagagcagttatgctcaccccttggagtgcagcagtgttttggaagaatcgtcatcttcccaaggatggggaaaaatagttgcacaatatattcatgatcaatgggtgtgcctctctttcctgttgaaaaaatatcacacccttataccaaccacagggagtgaaattctggaaccgtttctacctgccgttcagatgccaataaggactttgcagtctgcactagaagccctcacagttctttcttctgatcaagttttaccagtgttccattgcttgaaagtgttggttcccaagcttctgacttcctctgaatcactctgcatagagtcttttgacatggcgtggaaaattatatcttctttaagcaacactcagctgatattctgggctaatttaaaagcttttgttcagtttgtttttgataacaaagttcttaccattgctgccaaaatcaagggccaggcatatttcaaaataaaagagattatgtacaagataattgaaatgtctgctataaagactggagtcttcaatacactgataagttactgctgtcagtcttggatagtgtctgcttcaaatgtgtcccaaggatctttatcaagtgctaaaaattatagcgaacttatccttgaggcttgtatatttggaactgtgtttaggcgtgatcaaagacttgttcaggatgtacagaccttcatagaaaaccttggacatgactgtgcggcaaatattgttatggaaaatactaagagagaagaccattatgtgagaatttgtgctgtcaaattcctgtgtttattagatggctccaatatgtcccacaagttgtttattgaggatcttgcaatcaagctattagataaagatgaattagtgtccaagtccaaaaaacgctactatgtgaattctctacagcacagagtgaaaaaccgagtgtggcagactctgctggtacttttccctagacttgaccagaatttcttgaatggaattattgacaggattttccaggctggtttcaccaacaatcaagcatccataaaatattttatagaatggattattatattgattcttcataaattccctcaatttcttccaaagttctgggattgtttttcttatggtgaagaaaatcttaaaacaagcatttgtacgtttttagcagttttatcacatttagacattattactcaaaatattccagaaaagaaactaattctgaagcaagcccttatagttgtgctgcagtggtgtttcaatcacaattttagtgttcgactgtatgctttagttgctcttaagaaactctggactgtgtgtaaagtgttaagtgttgaagaatttgatgccctgactcctgtgattgaatccagcctccatcaagtggaaagcatgcacggagcaggacaaaatcatacatggaagctcagtatcaagcaagtgacgtggatggggtgagggagcggtgcaggacccagtgtctgtgaagcccccacggtggttcccatgtctgcctctctttccccgcacctgtcacggtgcagaagcaggctgcagtgtcataagcatctccaggaatgccaagaagaattggcaacgcattcaggagcatttcttttttgcaacatttcacccactcaaggattattgtctagagaccatattttacatccttccacgcctttcaggccttattgaagatgaatggatcaccattgataaatttaccagattcactgatgttcctttagctgcgggatttcagtggtacctttctcaaactcaacttagtaaactaaaaccaggtgactggtctcagcaagacataggtactaatttggttgaagcagataaccaagcagagtggaccgacgttcagaagaagattatcccgtggaacagtcgtgtttccgacttagacctggagctcctgtttcaggatcgtgctgccagacttggaaagtcaattagtagactcatcgttgtggcctcgctcatcgacaaaccgaccaatttaggaggactgtgcaggacctgtgaggtatttggggcttcagtgctcgttgttggcagccttcagtgtatcagcgacaaacagtttcagcacctcagtgtctctgcagaacagtggcttcctctagtggaggtaaaaccacctcagctaattgattatctgcagcagaagaaaacagaaggttataccatcattggagtggaacaaactgccaaaagtttagacctaacccaatattgctttcctgagaaatctctgctcttgttgggaaatgaacgtgagggaattccagcaaatctgatccaacagttggacgtttgtgtggaaattcctcaacagggcattatccgctccctgaatgtccatgtgagtggagccctgctgatctgggagtacaccaggcagcagctgctctcgcacggagataccaagccatgatgtgccttccttagtgaactgctgctgctgttcagacttttttaaaaaaaactatttggactaaagaaacagattctgaaatttattgtgataatttgtatttcttttttcttgcaatttaatgccaaaagtttgccatgtgccttaaacatattactatatattttcccctttaataaacactttttgttaaattgtattcttcctttaataaaatattttaagcaattgtggaaataaa

SEQ ID NO: 334366 - DNA, 1974 bp, Homo sapiens
aaccatgtgattttagaaagcaagggattgcttgacatctccaggctgtgaagactaaagttcacaggaaaagactacaaggaaatttaaacagttttattattttccccctcatttcttaattttcctgccactactcagtactgtgtgggtccaggatcaccattagggaagacagagtagctcagaaatcagtagtgaggaggaggacagcactttgtgtggtatcttgctctaggagcattttcaagccatcagaagtgggactcttgaagactatttctgactttctcagcacaaattaagataataggagatggaggctccatttgaaaaacattttggttgtataatggttagcataaaacatacttttttcaagttaactcaggtactagagtatggggggcggggggaaatgtactgcagcattaatgaaaactagagctgggagaatgtgtttttccttgagtaaattgcaaatgcctgtgcaccgcatttgaccaggagggaagaatgagaggccctggtagcaaagccagtggaagaagttttactaggagcagttgtatcattcgtgtactttttttgtgtcatacaagtgagagtaaaatggtccatgtctgtgttttgaggaattttttgcctttcttttcagaaaactaattctgaagcaagcccttatagttgtgctgcagtggtgtttcaatcacaattttagtgttcgactgtatgctttagttgctcttaagaaactctggactgtgtgtaaagtgttaagtgttgaagaatttgatgccctgactcctgtgattgaatccagcctccatcaagtggaaagcatgcacggagcagggaatgccaagaagaattggcaacgcattcaggagcatttcttttttgcaacatttcacccactcaaggattattgtctagagaccatattttacatccttccacgcctttcaggccttattgaagatgaatggatcaccattgataaatttaccagattcactgatgttcctttagctgcgggatttcagtggtacctttctcaaactcaacttagtaaactaaaaccaggtgactggtctcagcaagacataggtactaatttggttgaagcagataaccaagcagagtggaccgacgttcagaagaagattatcccgtggaacagtcgtgtttccgacttagacctggagctcctgtttcaggatcgtgctgccagacttggaaagtcaattagtagactcatcgttgtggcctcgctcatcgacaaaccgaccaatttaggaggactgtgcaggacctgtgaggtatttggggcttcagtgctcgttgttggcagccttcagtgtatcagcgacaaacagtttcagcacctcagtgtctctgcagaacagtggcttcctctagtggaggtaaaaccacctcagctaattgattatctgcagcagaagaaaacagaaggttataccatcattggagtggaacaaactgccaaaagtttagacctaacccaatattgctttcctgagaaatctctgctcttgttgggaaatgaacgtgagggaattccagcaaatctgatccaacagttggacgtttgtgtggaaattcctcaacagggcattatccgctccctgaatgtccatgtgagtggagccctgctgatctgggagtacaccaggcagcagctgctctcgcacggagataccaagccatgatgtgccttccttagtgaactgctgctgctgttcagacttttttaaaaaaaactatttggactaaagaaacagattctgaaatttattgtgataatttgtatttcttttttcttgcaatttaatgccaaaagtttgccatgtgccttaaacatattactatatattttcccctttaataaacactttttgttaaattgtattcttcctttaataaaatattttaagcaattgtggaaataaa

SEQ ID NO: 334367 - DNA, 2070 bp, Homo sapiens
aaccatgtgattttagaaagcaagggattgcttgacatctccaggctgtgaagactaaagttcacaggaaaagactacaaggaaatttaaacagttttattattttccccctcatttcttaattttcctgccactactcagtactgtgtgggtccaggatcaccattagggaagacagagtagctcagaaatcagtagtgaggaggaggacagcactttgtgtggtatcttgctctaggagcattttcaagccatcagaagtgggactcttgaagactatttctgactttctcagcacaaattaagataataggagatggaggctccatttgaaaaacattttggttgtataatggttagcataaaacatacttttttcaagttaactcaggtactagagtatggggggcggggggaaatgtactgcagcattaatgaaaactagagctgggagaatgtgtttttccttgagtaaattgcaaatgcctgtgcaccgcatttgaccaggagggaagaatgagaggccctggtagcaaagccagtggaagaagttttactaggagcagttgtatcattcgtgtactttttttgtgtcatacaagtgagagtaaaatggtccatgtctgtgttttgaggaattttttgcctttcttttcagaaaactaattctgaagcaagcccttatagttgtgctgcagtggtgtttcaatcacaattttagtgttcgactgtatgctttagttgctcttaagaaactctggactgtgtgtaaagtgttaagtgttgaagaatttgatgccctgactcctgtgattgaatccagcctccatcaagtggaaagcatgcacggagcagggaatgccaagaagaattggcaacgcattcaggagcatttcttttttgcaacatttcacccactcaaggattattgtctagaggcagtgtctggcttgtaaacaatggaagggaatatttaactctaaacagaaatctgttctgacattaaaaggaaatgagtgagaacatttgtgcagaccatattttacatccttccacgcctttcaggccttattgaagatgaatggatcaccattgataaatttaccagattcactgatgttcctttagctgcgggatttcagtggtacctttctcaaactcaacttagtaaactaaaaccaggtgactggtctcagcaagacataggtactaatttggttgaagcagataaccaagcagagtggaccgacgttcagaagaagattatcccgtggaacagtcgtgtttccgacttagacctggagctcctgtttcaggatcgtgctgccagacttggaaagtcaattagtagactcatcgttgtggcctcgctcatcgacaaaccgaccaatttaggaggactgtgcaggacctgtgaggtatttggggcttcagtgctcgttgttggcagccttcagtgtatcagcgacaaacagtttcagcacctcagtgtctctgcagaacagtggcttcctctagtggaggtaaaaccacctcagctaattgattatctgcagcagaagaaaacagaaggttataccatcattggagtggaacaaactgccaaaagtttagacctaacccaatattgctttcctgagaaatctctgctcttgttgggaaatgaacgtgagggaattccagcaaatctgatccaacagttggacgtttgtgtggaaattcctcaacagggcattatccgctccctgaatgtccatgtgagtggagccctgctgatctgggagtacaccaggcagcagctgctctcgcacggagataccaagccatgatgtgccttccttagtgaactgctgctgctgttcagacttttttaaaaaaaactatttggactaaagaaacagattctgaaatttattgtgataatttgtatttcttttttcttgcaatttaatgccaaaagtttgccatgtgccttaaacatattactatatattttcccctttaataaacactttttgttaaattgtattcttcctttaataaaatattttaagcaattgtggaaataaa

SEQ ID NO: 334368 - DNA, 2018 bp, Homo sapiens
aaccatgtgattttagaaagcaagggattgcttgacatctccaggctgtgaagactaaagttcacaggaaaagactacaaggaaatttaaacagttttattattttccccctcatttcttaattttcctgccactactcagtactgtgtgggtccaggatcaccattagggaagacagagtagctcagaaatcagtagtgaggaggaggacagcactttgtgtggtatcttgctctaggagcattttcaagccatcagaagtgggactcttgaagactatttctgactttctcagcacaaattaagataataggagatggaggctccatttgaaaaacattttggttgtataatggttagcataaaacatacttttttcaagttaactcaggtactagagtatggggggcggggggaaatgtactgcagcattaatgaaaactagagctgggagaatgtgtttttccttgagtaaattgcaaatgcctgtgcaccgcatttgaccaggagggaagaatgagaggccctggtagcaaagccagtggaagaagttttactaggagcagttgtatcattcgtgtactttttttgtgtcatacaagtgagaaaactaattctgaagcaagcccttatagttgtgctgcagtggtgtttcaatcacaattttagtgttcgactgtatgctttagttgctcttaagaaactctggactgtgtgtaaagtgttaagtgttgaagaatttgatgccctgactcctgtgattgaatccagcctccatcaagtggaaagcatgcacggagcagggaatgccaagaagaattggcaacgcattcaggagcatttcttttttgcaacatttcacccactcaaggattattgtctagaggcagtgtctggcttgtaaacaatggaagggaatatttaactctaaacagaaatctgttctgacattaaaaggaaatgagtgagaacatttgtgcagaccatattttacatccttccacgcctttcaggccttattgaagatgaatggatcaccattgataaatttaccagattcactgatgttcctttagctgcgggatttcagtggtacctttctcaaactcaacttagtaaactaaaaccaggtgactggtctcagcaagacataggtactaatttggttgaagcagataaccaagcagagtggaccgacgttcagaagaagattatcccgtggaacagtcgtgtttccgacttagacctggagctcctgtttcaggatcgtgctgccagacttggaaagtcaattagtagactcatcgttgtggcctcgctcatcgacaaaccgaccaatttaggaggactgtgcaggacctgtgaggtatttggggcttcagtgctcgttgttggcagccttcagtgtatcagcgacaaacagtttcagcacctcagtgtctctgcagaacagtggcttcctctagtggaggtaaaaccacctcagctaattgattatctgcagcagaagaaaacagaaggttataccatcattggagtggaacaaactgccaaaagtttagacctaacccaatattgctttcctgagaaatctctgctcttgttgggaaatgaacgtgagggaattccagcaaatctgatccaacagttggacgtttgtgtggaaattcctcaacagggcattatccgctccctgaatgtccatgtgagtggagccctgctgatctgggagtacaccaggcagcagctgctctcgcacggagataccaagccatgatgtgccttccttagtgaactgctgctgctgttcagacttttttaaaaaaaactatttggactaaagaaacagattctgaaatttattgtgataatttgtatttcttttttcttgcaatttaatgccaaaagtttgccatgtgccttaaacatattactatatattttcccctttaataaacactttttgttaaattgtattcttcctttaataaaatattttaagcaattgtggaaataaa

SEQ ID NO: 334369 - DNA, 5134 bp, Homo sapiens
atggagtgggtgctcgcggaagcgctgctctcgcagagccgggacccccgggccctgcttggggcgctgtgccaaggggaggcatccgcggagcgcgtggagacgctgcgcttccttctgcagcggctcgaggacgaggaggcgcgcggcagcgggggcgcaggcgcgctcccggaggcggcgcgcgaggtggctgcagggtacctcgtgccactgctgcggagcctgcgcggacgccccgcgggcggcccggaccccagtctgcagcctcgccaccgccggcgcgtgctgagggcggcgggcgcggccctgcgctcgtgcgtccgcctggccgggcgtccgcagctggcggccgcgctggctgaggaggcgctgcgcgatctgctcgccgggtggcgcgcgcctggcgccgaggctgccgtggaagtgctagcagccgtcgggccatgtttgcggccccgcgaggacgggccgctactggagcgggtggcggggaccgccgtcgccctggcgctgggcgggggcggggacggggatgaggccgggcctgccgaggacgcggcggcgctggtggccgggcgactgctgccagtgctggtccaatgtggcggggcggcgctgcgggccgtgtggggcgggctggccgcgcctggggcgtccctggggtccggccgcgtagaggagaagctgctggtcctgagcgccctggccgagaagctgttgcccgagcccggcggcgaccgcgcccgcggcgcgcgcgaggcgggcccggacgcccggcgctgctggcgcttctggaggacggtgcaggcggggctgggccaggcggacgccctgacgcgcaagcgagcgcgctacctgctgcagagggcggtggaggtgtcggcggagctgggggccgactgcacctgcgggccccaggaaggaaacggcccaagtctgttttggtggtctgagaggaaaaaagatgagcttctaaagttttgggaaaattatattttaattatggagactttagaaggaaatcagatacatgttataaagccagttttaccaaagctaaacaatctgtttgaatatgcggtgtcagaggaaaatggatgttggctctttcacccatcctggcatatgtgtatttataaaagaatgtttgaaagtgaaaacaaaatcctgtccaaagaaggtgttatccattttttggagctgtatgaaacaaagattcttccattttcaccagaattttctgagtttattattggaccattaatggatgcgctttcagagagctctctgtatagcaggtccccaggccagccaataggaagctgttctccattgggactgaaattacagaagtttttagtcacttatatttctcttcttccagaagaaataaagagtagcttcctattgaagtttattcggaagatgacaagtaggcattggtgtgctgttcccattttgtttctatctaaggctttggcaaatgtcccaagacataaggccctgggtatagatgggcttcttgctctcagggatgttattcattgcactatgatcacacatcagattctcctgagaggggcagcccaatgctaccttcttcaaacagctatgaatttgctagatgtggagaaagtgtcactttctgatgtctcaacttttctcatgtctctgagacaagaggaatccttaggacgaggaacttcattgtggacagagctgtgtgactggctacgtgttaatgaaagctattttaagccatcccctacgtgtagctccattggacttcacaagacatctttaaatgcttatgtaaagagcattgttcaagagtatgttaagtcatctgcttgggaaacaggagaaaactgctttatgcctgattggtttgaagccaagcttgtttctctgatggtcttgctggctgtggatgtggaaggaatgaagactcagtatagcggaaagcagagaacagagaatgtattgcggatattcttagaccctcttctggatgtgcttatgaagtttagtaccaatgcctacatgcccttgctgaagactgacagatgcctccagctgctgttgaagctgttgaacacatgcaggttgaaaggttccagtgcccaagatgatgaggtgtctactgttcttcagaactttttcatgtctactacagagagcatttctgaatttattctcagaagacttactatgaatgagctaaatagtgtttcagatctggatcgttgccatttatacctgatggtgttaactgagcttataaatctgcatttgaaggttgggtggaaaaggggtaaccctatctggagagttatttctcttttgaaaaatgcatccattcagcatcttcaagagatggacagtggacaggagccaacagttggaagtcagattcagagagtagtgagcatggctgccttggccatggtgtgtgaggccatagaccagaagcctgagctgcagctggactctctccatgctgggcccctggaaagcttcctttcctctcttcagctcaatcagacgctgcagaagccccacgcagaggagcagagcagttatgctcaccccttggagtgcagcagtgttttggaagaatcgtcatcttcccaaggatggggaaaaatagttgcacaatatattcatgatcaatgggtgtgcctctctttcctgttgaaaaaatatcacacccttataccaaccacagggagtgaaattctggaaccgtttctacctgccgttcagatgccaataaggactttgcagtctgcactagaagccctcacagttctttcttctgatcaagttttaccagtgttccattgcttgaaagtgttggttcccaagcttctgacttcctctgaatcactctgcatagagtcttttgacatggcgtggaaaattatatcttctttaagcaacactcagctgatattctgggctaatttaaaagcttttgttcagtttgtttttgataacaaagttcttaccattgctgccaaaatcaagggccaggcatatttcaaaataaaagagattatgtacaagataattgaaatgtctgctataaagactggagtcttcaatacactgataagttactgctgtcagtcttggatagtgtctgcttcaaatgtgtcccaaggatctttatcaagtgctaaaaattatagcgaacttatccttgaggcttgtatatttggaactgtgtttaggcgtgatcaaagacttgttcaggatgtacagaccttcatagaaaaccttggacatgactgtgcggcaaatattgttatggaaaatactaagagagaagaccattatgtgagaatttgtgctgtcaaattcctgtgtttattagatggctccaatatgtcccacaagttgtttattgaggatcttgcaatcaagctattagataaagatgaattagtgtccaagtccaaaaaacgctactatgtgaattctctacagcacagagtgaaaaaccgagtgtggcagactctgctggtacttttccctagacttgaccagaatttcttgaatggaattattgacaggattttccaggctggtttcaccaacaatcaagcatccataaaatattttatagaatggattattatattgattcttcataaattccctcaatttcttccaaagttctgggattgtttttcttatggtgaagaaaatcttaaaacaagcatttgtacgtttttagcagttttatcacatttagacattattactcaaaatattccagaaaagaaactaattctgaagcaagcccttatagttgtgctgcagtggtgtttcaatcacaattttagtgttcgactgtatgctttagttgctcttaagaaactctggactgtgtgtaaagtgttaagtgttgaagaatttgatgccctgactcctgtgattgaatccagcctccatcaagtggaaagcatgcacggagcagggaatgccaagaagaattggcaacgcattcaggagcatttcttttttgcaacatttcacccactcaaggattattgtctagagaccatattttacatccttccacgcctttcaggccttattgaagatgaatggatcaccattgataaatttaccagattcactgatgttcctttagctgcgggatttcagtggtacctttctcaaactcaacttagtaaactaaaaccaggtgactggtctcagcaagacataggtactaatttggttgaagcagataaccaagcagagtggaccgacgttcagaagaagattatcccgtggaacagtcgtgtttccgacttagacctggagctcctgtttcaggatcgtgctgccagacttggaaagtcaattagtagactcatcgttgtggcctcgctcatcgacaaaccgaccaatttaggaggactgtgcaggacctgtgaggtatttggggcttcagtgctcgttgttggcagccttcagtgtatcagcgacaaacagtttcagcacctcagtgtctctgcagaacagtggcttcctctagtggaggtaaaaccacctcagctaattgattatctgcagcagaagaaaacagaaggttataccatcattggagtggaacaaactgccaaaagtttagacctaacccaatattgctttcctgagaaatctctgctcttgttgggaaatgaacgtgagggaattccagcaaatctgatccaacagttggacgtttgtgtggaaattcctcaacagggcattatccgctccctgaatgtccatgtgagtggagccctgctgatctgggagtacaccaggcagcagctgctctcgcacggagataccaagccatgatgtgccttccttagtgaactgctgctgctgttcagacttttttaaaaaaaactatttggactaaagaaacagattctgaaatttattgtgataatttgtatttcttttttcttgcaatttaatgccaaaagtttgccatgtgccttaaacatattactatatattttcccctttaataaacactttttgttaaattgtattcttcctttaataaaatattttaagcaattgtggaaataaaacaatggattttttaagagagaattta

SEQ ID NO: 334370 - DNA, 5164 bp, Homo sapiens
atggagtgggtgctcgcggaagcgctgctctcgcagagccgggacccccgggccctgcttggggcgctgtgccaaggggaggcatccgcggagcgcgtggagacgctgcgcttccttctgcagcggctcgaggacgaggaggcgcgcggcagcgggggcgcaggcgcgctcccggaggcggcgcgcgaggtggctgcagggtacctcgtgccactgctgcggagcctgcgcggacgccccgcgggcggcccggaccccagtctgcagcctcgccaccgccggcgcgtgctgagggcggcgggcgcggccctgcgctcgtgcgtccgcctggccgggcgtccgcagctggcggccgcgctggctgaggaggcgctgcgcgatctgctcgccgggtggcgcgcgcctggcgccgaggctgccgtggaagtgctagcagccgtcgggccatgtttgcggccccgcgaggacgggccgctactggagcgggtggcggggaccgccgtcgccctggcgctgggcgggggcggggacggggatgaggccgggcctgccgaggacgcggcggcgctggtggccgggcgactgctgccagtgctggtccaatgtggcggggcggcgctgcgggccgtgtggggcgggctggccgcgcctggggcgtccctggggtccggccgcgtagaggagaagctgctggtcctgagcgccctggccgagaagctgttgcccgagcccggcggcgaccgcgcccgcggcgcgcgcgaggcgggcccggacgcccggcgctgctggcgcttctggaggacggtgcaggcggggctgggccaggcggacgccctgacgcgcaagcgagcgcgctacctgctgcagagggcggtggaggtgtcggcggagctgggggccgactgcacctgcgggccccaggaaggaaacggcccaagtctgttttggtggtctgagaggaaaaaagatgagcttctaaagttttgggaaaattatattttaattatggagactttagaaggaaatcagatacatgttataaagccagttttaccaaagctaaacaatctgtttgaatatgcggtgtcagaggaaaatggatgttggctctttcacccatcctggcatatgtgtatttataaaagaatgtttgaaagtgaaaacaaaatcctgtccaaagaaggtgttatccattttttggagctgtatgaaacaaagattcttccattttcaccagaattttctgagtttattattggaccattaatggatgcgctttcagagagctctctgtatagcaggtccccaggccagccaataggaagctgttctccattgggactgaaattacagaagtttttagtcacttatatttctcttcttccagaagaaataaagagtagcttcctattgaagtttattcggaagatgacaagtaggcattggtgtgctgttcccattttgtttctatctaaggctttggcaaatgtcccaagacataaggccctgggtatagatgggcttcttgctctcagggatgttattcattgcactatgatcacacatcagattctcctgagaggggcagcccaatgctaccttcttcaaacagctatgaatttgctagatgtggagaaagtgtcactttctgatgtctcaacttttctcatgtctctgagacaagaggaatccttaggacgaggaacttcattgtggacagagctgtgtgactggctacgtgttaatgaaagctattttaagccatcccctacgtgtagctccattggacttcacaagacatctttaaatgcttatgtaaagagcattgttcaagagtatgttaagtcatctgcttgggaaacaggagaaaactgctttatgcctgattggtttgaagccaagcttgtttctctgatggtcttgctggctgtggatgtggaaggaatgaagactcagtatagcggaaagcagagaacagagaatgtattgcggatattcttagaccctcttctggatgtgcttatgaagtttagtaccaatgcctacatgcccttgctgaagactgacagatgcctccagctgctgttgaagctgttgaacacatgcaggttgaaaggttccagtgcccaagatgatgaggtgtctactgttcttcagaactttttcatgtctactacagagagcatttctgaatttattctcagaagacttactatgaatgagctaaatagtgtttcagatctggatcgttgccatttatacctgatggtgttaactgagcttataaatctgcatttgaaggttgggtggaaaaggggtaaccctatctggagagttatttctcttttgaaaaatgcatccattcagcatcttcaagagatggacagtggacaggagccaacagttggaagtcagattcagagagtagtgagcatggctgccttggccatggtgtgtgaggccatagaccagaagcctgagctgcagctggactctctccatgctgggcccctggaaagcttcctttcctctcttcagctcaatcagacgctgcagaagccccacgcagaggagcagagcagttatgctcaccccttggagtgcagcagtgttttggaagaatcgtcatcttcccaaggatggggaaaaatagttgcacaatatattcatgatcaatgggtgtgcctctctttcctgttgaaaaaatatcacacccttataccaaccacagggagtgaaattctggaaccgtttctacctgccgttcagatgccaataaggactttgcagtctgcactagaagccctcacagttctttcttctgatcaagttttaccagtgttccattgcttgaaagtgttggttcccaagcttctgacttcctctgaatcactctgcatagagtcttttgacatggcgtggaaaattatatcttctttaagcaacactcagctgatattctgggctaatttaaaagcttttgttcagtttgtttttgataacaaagttcttaccattgctgccaaaatcaagggccaggcatatttcaaaataaaagagattatgtacaagataattgaaatgtctgctataaagactggagtcttcaatacactgataagttactgctgtcagtcttggatagtgtctgcttcaaatgtgtcccaaggatctttatcaagtgctaaaaattatagcgaacttatccttgaggcttgtatatttggaactgtgtttaggcgtgatcaaagacttgttcaggatgtacagaccttcatagaaaaccttggacatgactgtgcggcaaatattgttatggaaaatactaagagagaagaccattatgtgagaatttgtgctgtcaaattcctgtgtttattagatggctccaatatgtcccacaagttgtttattgaggatcttgcaatcaagctattagataaagatgaattagtgtccaagtccaaaaaacgctactatgtgaattctctacagcacagagtgaaaaaccgagtgtggcagactctgctggtacttttccctagacttgaccagaatttcttgaatggaattattgacaggattttccaggctggtttcaccaacaatcaagcatccataaaatattttatagaatggattattatattgattcttcataaattccctcaatttcttccaaagttctgggattgtttttcttatggtgaagaaaatcttaaaacaagcatttgtacgtttttagcagttttatcacatttagacattattactcaaaatattccagaaaagaaactaattctgaagcaagcccttatagttgtgctgcagtggtgtttcaatcacaattttagtgttcgactgtatgctttagttgctcttaagaaactctggactgtgtgtaaagtgttaagtgttgaagaatttgatgccctgactcctgtgattgaatccagcctccatcaagtggaaagcatgcacggagcagggaatgccaagaagaattggcaacgcattcaggagcatttcttttttgcaacatttcacccactcaaggattattgtctagagaccatattttacatccttccacgcctttcaggccttattgaagatgaatggatcaccattgataaatttaccagattcactgatgttcctttagctgcgggatttcagtggtacctttctcaaactcaacttagtaaactaaaaccaggtgactggtctcagcaagacataggtactaatttggttgaagcagataaccaagcagagtggaccgacgttcagaagaagattatcccgtggaacagtcgtgtttccgacttagacctggagctcctgtttcaggatcgtgctgccagacttggaaagtcaattagtagactcatcgttgtggcctcgctcatcgacaaaccgaccaatttaggaggactgtgcaggacctgtgaggtatttggggcttcagtgctcgttgttggcagccttcagtgtatcagcgacaaacagtttcagcacctcagtgtctctgcagaacagtggcttcctctagtggaggtaaaaccacctcagctaattgattatctgcagcagaagaaaacagaaggttataccatcattggagtggaacaaactgccaaaagtttagacctaacccaatattgctttcctgagaaatctctgctcttgttgggaaatgaacgtgagggaattccagcaaatctgatccaacagttggacgtttgtgtggaaattcctcaacagggcattatccgctccctgaatgtccatgtgagtggagccctgctgatctgggagtacaccaggcagcagctgctctcgcacggagataccaagccatgatgtgccttccttagtgaactgctgctgctgttcagacttttttaaaaaaaactatttggactaaagaaacagattctgaaatttattgtgataatttgtatttcttttttcttgcaatttaatgccaaaagtttgccatgtgccttaaacatattactatatattttcccctttaataaacactttttgttaaattgtattcttcctttaataaaatattttaagcaattgtggaaataaacatgttatgcgtccagcatctcaaccgggtggcataaaaagtaaaagcgataaatgt

SEQ ID NO: 334371 - DNA, 4541 bp, Homo sapiens
atggagtgggtgctcgcggaagcgctgctctcgcagagccgggacccccgggccctgcttggggcgctgtgccaaggggaggcatccgcggagcgcgtggagacgctgcgcttccttctgcagcggctcgaggacgaggaggcgcgcggcagcgggggcgcaggcgcgctcccggaggcggcgcgcgaggtggctgcagggtacctcgtgccactgctgcggagcctgcgcggacgccccgcgggcggcccggaccccagtctgcagcctcgccaccgccggcgcgtgctgagggcggcgggcgcggccctgcgctcgtgcgtccgcctggccgggcgtccgcagctggcggccgcgctggctgaggaggcgctgcgcgatctgctcgccgggtggcgcgcgcctggcgccgaggctgccgtggaagtgctagcagccgtcgggccatgtttgcggccccgcgaggacgggccgctactggagcgggtggcggggaccgccgtcgccctggcgctgggcgggggcggggacggggatgaggccgggcctgccgaggacgcggcggcgctggtggccgggcgactgctgccagtgctggtccaatgtggcggggcggcgctgcgggccgtgtggggcgggctggccgcgcctggggcgtccctggggtccggccgcgtagaggagaagctgctggtcctgagcgccctggccgagaagctgttgcccgagcccggcggcgaccgcgcccgcggcgcgcgcgaggcgggcccggacgcccggcgctgctggcgcttctggaggacggtgcaggcggggctgggccaggcggacgccctgacgcgcaagcgagcgcgctacctgctgcagagggcggtggaggtgtcggcggagctgggggccgactgcacctgcgggccccaggaaggaaacggcccaagtctgttttggtggtctgagaggaaaaaagatgagcttctaaagttttgggaaaattatattttaattatggagactttagaaggaaatcagatacatgttataaagccagttttaccaaagctaaacaatctgtttgaatatgcggtgtcagaggaaaatggatgttggctctttcacccatcctggcatatgtgtatttataaaagaatgtttgaaagtgaaaacaaaatcctgtccaaagaaggtgttatccattttttggagctgtatgaaacaaagattcttccattttcaccagaattttctgagtttattattggaccattaatggatgcgctttcagagagctctctgtatagcaggtccccaggccagccaataggaagctgttctccattgggactgaaattacagaagtttttagtcacttatatttctcttcttccagaagaaataaagagtagcttcctattgaagtttattcggaagatgacaagtaggcattggtgtgctgttcccattttgtttctatctaaggctttggcaaatgtcccaagacataaggccctgggtatagatgggcttcttgctctcagggatgttattcattgcactatgatcacacatcagattctcctgagaggggcagcccaatgctaccttcttcaaacagctatgaatttgctagatgtggagaaagtgtcactttctgatgtctcaacttttctcatgtctctgagacaagaggaatccttaggacgaggaacttcattgtggacagagctgtgtgactggctacgtgttaatgaaagctattttaagccatcccctacgtgtagctccattggacttcacaagacatctttaaatgcttatgtaaagagcattgttcaagagtatgttaagtcatctgcttgggaaacaggagaaaactgctttatgcctgattggtttgaagccaagcttgtttctctgatggtcttgctggctgtggatgtggaaggaatgaagactcagtatagcggaaagcagagaacagagaatgtattgcggatattcttagaccctcttctggatgtgcttatgaagtttagtaccaatgcctacatgcccttgctgaagactgacagatgcctccagctgctgttgaagctgttgaacacatgcaggttgaaaggttccagtgcccaagatgatgaggtgtctactgttcttcagaactttttcatgtctactacagagagcatttctgaatttattctcagaagacttactatgaatgagctaaatagtgtttcagatctggatcgttgccatttatacctgatggtgttaactgagcttataaatctgcatttgaaggttgggtggaaaaggggtaaccctatctggagagttatttctcttttgaaaaatgcatccattcagcatcttcaagagatggacagtggacaggagccaacagttggaagtcagattcagagagtagtgagcatggctgccttggccatggtgtgtgaggccatagaccagaagcctgagctgcagctggactctctccatgctgggcccctggaaagcttcctttcctctcttcagctcaatcagacgctgcagaagccccacgcagaggagcagagcagttatgctcaccccttggagtgcagcagtgttttggaagaatcgtcatcttcccaaggatggggaaaaatagttgcacaatatattcatgatcaatgggtgtgcctctctttcctgttgaaaaaatatcacacccttataccaaccacagggagtgaaattctggaaccgtttctacctgccgttcagatgccaataaggactttgcagtctgcactagaagccctcacagttctttcttctgatcaagttttaccagtgttccattgcttgaaagtgttggttcccaagcttctgacttcctctgaatcactctgcatagagtcttttgacatggcgtggaaaattatatcttctttaagcaacactcagctgatattctgggctaatttaaaagcttttgttcagtttgtttttgataacaaagttcttaccattgctgccaaaatcaagggccaggcatatttcaaaataaaagagattatgtacaagataattgaaatgtctgctataaagactggagtcttcaatacactgataagttactgctgtcagtcttggatagtgtctgcttcaaatgtgtcccaaggatctttatcaagtgctaaaaattatagcgaacttatccttgaggcttgtatatttggaactgtgtttaggcgtgatcaaagacttgttcaggatgtacagaccttcatagaaaaccttggacatgactgtgcggcaaatattgttatggaaaatactaagagagaagaccattatgtgagaatttgtgctgtcaaattcctgtgtttattagatggctccaatatgtcccacaagttgtttattgaggatcttgcaatcaagctattagataaagatgaattagtgtccaagtccaaaaaacgctactatgtgaattctctacagcacagagtgaaaaaccgagtgtggcagactctgctggtacttttccctagacttgaccagaatttcttgaatggaattattgacaggattttccaggctggtttcaccaacaatcaagcatccataaaatattttatagaatggattattatattgattcttcataaattccctcaatttcttccaaagttctgggattgtttttcttatggtgaagaaaatcttaaaacaagcatttgtacgtttttagcagttttatcacatttagacattattactcaaaatattccagaaaagaaactaattctgaagcaagcccttatagttgtgctgcagtggtgtttcaatcacaattttagtgttcgactgtatgctttagttgctcttaagaaactctggactgtgtgtaaagtgttaagtgttgaagaatttgatgccctgactcctgtgattgaatccagcctccatcaagtggaaagcatgcacggagcagggaatgccaagaagaattggcaacgcattcaggagcatttcttttttgcaacatttcacccactcaaggattattgtctagaggcagtgtctggcttgtaaacaatggaagggaatatttaactctaaacagaaatctgttctgacattaaaaggaaatgagtgagaacatttgtgcagaccatattttacatccttccacgcctttcaggccttattgaagatgaatggatcaccattgataaatttaccagattcactgatgttcctttagctgcgggatttcagtggtacctttctcaaactcaacttagtaaactaaaaccaggtgactggtctcagcaagacatagaaaataattttcattttattttttccccttgttgatctggttagatttttttgatttaagttactaaggacaggtagttaataataatatcactttcattgacatggtgacctctgcctttccacttagggaaaagacagtgaaaaagtgtggtataactttgactaacacttttagtgaaacttagctttaaagctattta

SEQ ID NO: 334372 - DNA, 439 bp, Homo sapiens
gtttgttacaggaaaactaatctttcttccattttcttcctcagaaatgaacgtgagggaattccagcaaatctgatccaacagttggacgtttgtgtggaaattcctcaacagggcattatccgctccctgaatgtccatgtgagtggagccctgctgatctgggagtacaccaggcagcagctgctctcgcacggagataccaagccatgatgtgccttccttagtgaactgctgctgctgttcagacttttttaaaaaaaactatttggactaaagaaacagattctgaaatttattgtgataatttgtatttcttttttcttgcaatttaatgccaaaagtttgccatgtgccttaaacatattactatatattttcccctttaataaacactttttgttaaattgtattcttcctttaataaaatattttaagc

SEQ ID NO: 334373 - DNA, 396 bp, Homo sapiens
ttgactagcttatgtttgttttggttttatatttttgtattatggaagcagggtgtcattaatttaatttacacattaattgggtataggatttccttcctgctggtgcctggcattgaagacagtggttcttccctgtgccttctttagtgagtcgccaccctcacgggaaagcacggaccagaagatgagtcctcatagctgctggttgtctgggtctttcatgagagtaactttgtctaattggatccattagctaaccagttttcacccaattataggtgggaagcaatttgcttatgcttttgaaatggttgattttggcatgtcttttaatgtctagcggaaagcagagaacagagaatgtattgcggatattcttagaccctcttctgg

SEQ ID NO: 334374 - DNA, 5203 bp, Homo sapiens
atggagtgggtgctcgcggaagcgctgctctcgcagagccgggacccccgggccctgcttggggcgctgtgccaaggggaggcatccgcggagcgcgtggagacgctgcgcttccttctgcagcggctcgaggacgaggaggcgcgcggcagcgggggcgcaggcgcgctcccggaggcggcgcgcgaggtggctgcagggtacctcgtgccactgctgcggagcctgcgcggacgccccgcgggcggcccggaccccagtctgcagcctcgccaccgccggcgcgtgctgagggcggcgggcgcggccctgcgctcgtgcgtccgcctggccgggcgtccgcagctggcggccgcgctggctgaggaggcgctgcgcgatctgctcgccgggtggcgcgcgcctggcgccgaggctgccgtggaagtgctagcagccgtcgggccatgtttgcggccccgcgaggacgggccgctactggagcgggtggcggggaccgccgtcgccctggcgctgggcgggggcggggacggggatgaggccgggcctgccgaggacgcggcggcgctggtggccgggcgactgctgccagtgctggtccaatgtggcggggcggcgctgcgggccgtgtggggcgggctggccgcgcctggggcgtccctggggtccggccgcgtagaggagaagctgctggtcctgagcgccctggccgagaagctgttgcccgagcccggcggcgaccgcgcccgcggcgcgcgcgaggcgggcccggacgcccggcgctgctggcgcttctggaggacggtgcaggcggggctgggccaggcggacgccctgacgcgcaagcgagcgcgctacctgctgcagagggcggtggaggtgtcggcggagctgggggccgactgcacctgcgggccccaggaaggaaacggcccaagtctgttttggtggtctgagaggaaaaaagatgagcttctaaagttttgggaaaattatattttaattatggagactttagaaggaaatcagatacatgttataaagccagttttaccaaagctaaacaatctgtttgaatatgcggtgtcagaggaaaatggatgttggctctttcacccatcctggcatatgtgtatttataaaagaatgtttgaaagtgaaaacaaaatcctgtccaaagaaggtgttatccattttttggagctgtatgaaacaaagattcttccattttcaccagaattttctgagtttattattggaccattaatggatgcgctttcagagagctctctgtatagcaggtccccaggccagccaataggaagctgttctccattgggactgaaattacagaagtttttagtcacttatatttctcttcttccagaagaaataaagagtagcttcctattgaagtttattcggaagatgacaagtaggcattggtgtgctgttcccattttgtttctatctaaggctttggcaaatgtcccaagacataaggccctgggtatagatgggcttcttgctctcagggatgttattcattgcactatgatcacacatcagattctcctgagaggggcagcccaatgctaccttcttcaaacagctatgaatttgctagatgtggagaaagtgtcactttctgatgtctcaacttttctcatgtctctgagacaagaggaatccttaggacgaggaacttcattgtggacagagctgtgtgactggctacgtgttaatgaaagctattttaagccatcccctacgtgtagctccattggacttcacaagacatctttaaatgcttatgtaaagagcattgttcaagagtatgttaagtcatctgcttgggaaacaggagaaaactgctttatgcctgattggtttgaagccaagcttgtttctctgatggtcttgctggctgtggatgtggaaggaatgaagactcagtatagcggaaagcagagaacagagaatgtattgcggatattcttagaccctcttctggatgtgcttatgaagtttagtaccaatgcctacatgcccttgctgaagactgacagatgcctccagctgctgttgaagctgttgaacacatgcaggttgaaaggttccagtgcccaagatgatgaggtgtctactgttcttcagaactttttcatgtctactacagagagcatttctgaatttattctcagaagacttactatgaatgagctaaatagtgtttcagatctggatcgttgccatttatacctgatggtgttaactgagcttataaatctgcatttgaaggttgggtggaaaaggggtaaccctatctggagagttatttctcttttgaaaaatgcatccattcagcatcttcaagagatggacagtggacaggagccaacagttggaagtcagattcagagagtagtgagcatggctgccttggccatggtgtgtgaggccatagaccagaagcctgagctgcagctggactctctccatgctgggcccctggaaagcttcctttcctctcttcagctcaatcagacgctgcagaagccccacgcagaggagcagagcagttatgctcaccccttggagtgcagcagtgttttggaagaatcgtcatcttcccaaggatggggaaaaatagttgcacaatatattcatgatcaatgggtgtgcctctctttcctgttgaaaaaatatcacacccttataccaaccacagggagtgaaattctggaaccgtttctacctgccgttcagatgccaataaggactttgcagtctgcactagaagccctcacagttctttcttctgatcaagttttaccagtgttccattgcttgaaagtgttggttcccaagcttctgacttcctctgaatcactctgcatagagtcttttgacatggcgtggaaaattatatcttctttaagcaacactcagctgatattctgggctaatttaaaagcttttgttcagtttgtttttgataacaaagttcttaccattgctgccaaaatcaagggccaggcatatttcaaaataaaagagattatgtacaagataattgaaatgtctgctataaagactggagtcttcaatacactgataagttactgctgtcagtcttggatagtgtctgcttcaaatgtgtcccaaggatctttatcaagtgctaaaaattatagcgaacttatccttgaggcttgtatatttggaactgtgtttaggcgtgatcaaagacttgttcaggatgtacagaccttcatagaaaaccttggacatgactgtgcggcaaatattgttatggaaaatactaagagagaagaccattatgtgagaatttgtgctgtcaaattcctgtgtttattagatggctccaatatgtcccacaagttgtttattgaggatcttgcaatcaagctattagataaagatgaattagtgtccaagtccaaaaaacgctactatgtgaattctctacagcacagagtgaaaaaccgagtgtggcagactctgctggtacttttccctagacttgaccagaatttcttgaatggaattattgacaggattttccaggctggtttcaccaacaatcaagcatccataaaatattttatagaatggattattatattgattcttcataaattccctcaatttcttccaaagttctgggattgtttttcttatggtgaagaaaatcttaaaacaagcatttgtacgtttttagcagttttatcacatttagacattattactcaaaatattccagaaaagaaactaattctgaagcaagcccttatagttgtgctgcagtggtgtttcaatcacaattttagtgttcgactgtatgctttagttgctcttaagaaactctggactgtgtgtaaagtgttaagtgttgaagaatttgatgccctgactcctgtgattgaatccagcctccatcaagtggaaagcatgcacggagcagggaatgccaagaagaattggcaacgcattcaggagcatttcttttttgcaacatttcacccactcaaggattattgtctagaggcagtgtctggcttgtaaacaatggaagggaatatttaactctaaacagaaatctgttctgacattaaaaggaaatgagtgagaacatttgtgcagaccatattttacatccttccacgcctttcaggccttattgaagatgaatggatcaccattgataaatttaccagattcactgatgttcctttagctgcgggatttcagtggtacctttctcaaactcaacttagtaaactaaaaccaggtgactggtctcagcaagacataggtactaatttggttgaagcagataaccaagcagagtggaccgacgttcagaagaagattatcccgtggaacagtcgtgtttccgacttagacctggagctcctgtttcaggatcgtgctgccagacttggaaagtcaattagtagactcatcgttgtggcctcgctcatcgacaaaccgaccaatttaggaggactgtgcaggacctgtgaggtatttggggcttcagtgctcgttgttggcagccttcagtgtatcagcgacaaacagtttcagcacctcagtgtctctgcagaacagtggcttcctctagtggaggtaaaaccacctcagctaattgattatctgcagcagaagaaaacagaaggttataccatcattggagtggaacaaactgccaaaagtttagacctaacccaatattgctttcctgagaaatctctgctcttgttgggaaatgaacgtgagggaattccagcaaatctgatccaacagttggacgtttgtgtggaaattcctcaacagggcattatccgctccctgaatgtccatgtgagtggagccctgctgatctgggagtacaccaggcagcagctgctctcgcacggagataccaagccatgatgtgccttccttagtgaactgctgctgctgttcagacttttttaaaaaaaactatttggactaaagaaacagattctgaaatttattgtgataatttgtatttcttttttcttgcaatttaatgccaaaagtttgccatgtgccttaaacatattactatatattttcccctttaataaacactttttgttaaattgtattcttcctttaataaaatattttaagcaattgtggaaataaa

SEQ ID NO: 334375 - DNA, 1872 bp, Homo sapiens
ataactggtgggccaattatatcaatataataagaagagggaagggaaacctagtcggcaatgactctcttaattttccccgctacagtactaagagagaagaccattatgtgagaatttgtgctgtcaaattcctgtgtttattagatggctccaatatgtcccacaagttgtttattgaggatcttgcaatcaagctattagataaagatgaattagtgtccaagtccaaaaaacgctactatgtgaattctctacagcacagagtgaaaaaccgagtgtggcagactctgctggtacttttccctagacttgaccagaatttcttgaatggaattattgacaggattttccaggctggtttcaccaacaatcaagcatccataaaatattttatagaatggattattatattgattcttcataaattccctcaatttcttccaaagttctgggattgtttttcttatggtgaagaaaatcttaaaacaagcatttgtacgtttttagcagttttatcacatttagacattattactcaaaatattccagaaaagaaactaattctgaagcaagcccttatagttgtgctgcagtggtgtttcaatcacaattttagtgttcgactgtatgctttagttgctcttaagaaactctggactgtgtgtaaagtgttaagtgttgaagaatttgatgccctgactcctgtgattgaatccagcctccatcaagtggaaagcatgcacggagcagggaatgccaagaagaattggcaacgcattcaggagcatttcttttttgcaacatttcacccactcaaggattattgtctagagaccatattttacatccttccacgcctttcaggccttattgaagatgaatggatcaccattgataaatttaccagattcactgatgttcctttagctgcgggatttcagtggtacctttctcaaactcaacttagtaaactaaaaccaggtgactggtctcagcaagacataggtactaatttggttgaagcagataaccaagcagagtggaccgacgttcagaagaagattatcccgtggaacagtcgtgtttccgacttagacctggagctcctgtttcaggatcgtgctgccagacttggaaagtcaattagtagactcatcgttgtggcctcgctcatcgacaaaccgaccaatttaggaggactgtgcaggacctgtgaggtatttggggcttcagtgctcgttgttggcagccttcagtgtatcagcgacaaacagtttcagcacctcagtgtctctgcagaacagtggcttcctctagtggaggtaaaaccacctcagctaattgattatctgcagcagaagaaaacagaaggttataccatcattggagtggaacaaactgccaaaagtttagacctaacccaatattgctttcctgagaaatctctgctcttgttgggaaatgaacgtgagggaattccagcaaatctgatccaacagttggacgtttgtgtggaaattcctcaacagggcattatccgctccctgaatgtccatgtgagtggagccctgctgatctgggagtacaccaggcagcagctgctctcgcacggagataccaagccatgatgtgccttccttagtgaactgctgctgctgttcagacttttttaaaaaaaactatttggactaaagaaacagattctgaaatttattgtgataatttgtatttcttttttcttgcaatttaatgccaaaagtttgccatgtgccttaaacatattactatatattttcccctttaataaacactttttgttaaattgtattcttcctttaataaaatattttaagcaattgtggaaataaa

SEQ ID NO: 334376 - DNA, 1922 bp, Homo sapiens
aaccatgtgattttagaaagcaagggattgcttgacatctccaggctgtgaagactaaagttcacaggaaaagactacaaggaaatttaaacagttttattattttccccctcatttcttaattttcctgccactactcagtactgtgtgggtccaggatcaccattagggaagacagagtagctcagaaatcagtagtgaggaggaggacagcactttgtgtggtatcttgctctaggagcattttcaagccatcagaagtgggactcttgaagactatttctgactttctcagcacaaattaagataataggagatggaggctccatttgaaaaacattttggttgtataatggttagcataaaacatacttttttcaagttaactcaggtactagagtatggggggcggggggaaatgtactgcagcattaatgaaaactagagctgggagaatgtgtttttccttgagtaaattgcaaatgcctgtgcaccgcatttgaccaggagggaagaatgagaggccctggtagcaaagccagtggaagaagttttactaggagcagttgtatcattcgtgtactttttttgtgtcatacaagtgagaaaactaattctgaagcaagcccttatagttgtgctgcagtggtgtttcaatcacaattttagtgttcgactgtatgctttagttgctcttaagaaactctggactgtgtgtaaagtgttaagtgttgaagaatttgatgccctgactcctgtgattgaatccagcctccatcaagtggaaagcatgcacggagcagggaatgccaagaagaattggcaacgcattcaggagcatttcttttttgcaacatttcacccactcaaggattattgtctagagaccatattttacatccttccacgcctttcaggccttattgaagatgaatggatcaccattgataaatttaccagattcactgatgttcctttagctgcgggatttcagtggtacctttctcaaactcaacttagtaaactaaaaccaggtgactggtctcagcaagacataggtactaatttggttgaagcagataaccaagcagagtggaccgacgttcagaagaagattatcccgtggaacagtcgtgtttccgacttagacctggagctcctgtttcaggatcgtgctgccagacttggaaagtcaattagtagactcatcgttgtggcctcgctcatcgacaaaccgaccaatttaggaggactgtgcaggacctgtgaggtatttggggcttcagtgctcgttgttggcagccttcagtgtatcagcgacaaacagtttcagcacctcagtgtctctgcagaacagtggcttcctctagtggaggtaaaaccacctcagctaattgattatctgcagcagaagaaaacagaaggttataccatcattggagtggaacaaactgccaaaagtttagacctaacccaatattgctttcctgagaaatctctgctcttgttgggaaatgaacgtgagggaattccagcaaatctgatccaacagttggacgtttgtgtggaaattcctcaacagggcattatccgctccctgaatgtccatgtgagtggagccctgctgatctgggagtacaccaggcagcagctgctctcgcacggagataccaagccatgatgtgccttccttagtgaactgctgctgctgttcagacttttttaaaaaaaactatttggactaaagaaacagattctgaaatttattgtgataatttgtatttcttttttcttgcaatttaatgccaaaagtttgccatgtgccttaaacatattactatatattttcccctttaataaacactttttgttaaattgtattcttcctttaataaaatattttaagcaattgtggaaataaa

SEQ ID NO: 334377 - DNA, 3836 bp, Homo sapiens
atggagtgggtgctcgcggaagcgctgctctcgcagagccgggacccccgggccctgcttggggcgctgtgccaaggggaggcatccgcggagcgcgtggagacgctgcgcttccttctgcagcggctcgaggacgaggaggcgcgcggcagcgggggcgcaggcgcgctcccggaggcggcgcgcgaggtggctgcagggtacctcgtgccactgctgcggagcctgcgcggacgccccgcgggcggcccggaccccagtctgcagcctcgccaccgccggcgcgtgctgagggcggcgggcgcggccctgcgctcgtgcgtccgcctggccgggcgtccgcagctggcggccgcgctggctgaggaggcgctgcgcgatctgctcgccgggtggcgcgcgcctggcgccgaggctgccgtggaagtgctagcagccgtcgggccatgtttgcggccccgcgaggacgggccgctactggagcgggtggcggggaccgccgtcgccctggcgctgggcgggggcggggacggggatgaggccgggcctgccgaggacgcggcggcgctggtggccgggcgactgctgccagtgctggtccaatgtggcggggcggcgctgcgggccgtgtggggcgggctggccgcgcctggggcgtccctggggtccggccgcgtagaggagaagctgctggtcctgagcgccctggccgagaagctgttgcccgagcccggcggcgaccgcgcccgcggcgcgcgcgaggcgggcccggacgcccggcgctgctggcgcttctggaggacggtgcaggcggggctgggccaggcggacgccctgacgcgcaagcgagcgcgctacctgctgcagagggcggtggaggtgtcggcggagctgggggccgactgcacctgcgggccccaggaaggaaacggcccaagtctgttttggtggtctgagaggaaaaaagatgagcttctaaagttttgggaaaattatattttaattatggagactttagaaggaaatcagatacatgttataaagccagttttaccaaagctaaacaatctgtttgaatatgcggtgtcagaggaaaatggatgttggctctttcacccatcctggcatatgtgtatttataaaagaatgtttgaaagtgaaaacaaaatcctgtccaaagaaggtgttatccattttttggagctgtatgaaacaaagattcttccattttcaccagaattttctgagtttattattggaccattaatggatgcgctttcagagagctctctgtatagcaggtccccaggccagccaataggaagctgttctccattgggactgaaattacagaagtttttagtcacttatatttctcttcttccagaagaaataaagagtagcttcctattgaagtttattcggaagatgacaagtaggcattggtgtgctgttcccattttgtttctatctaaggctttggcaaatgtcccaagacataaggccctgggtatagatgggcttcttgctctcagggatgttattcattgcactatgatcacacatcagattctcctgagaggggcagcccaatgctaccttcttcaaacagctatgaatttgctagatgtggagaaagtgtcactttctgatgtctcaacttttctcatgtctctgagacaagaggaatccttaggacgaggaacttcattgtggacagagctgtgtgactggctacgtgttaatgaaagctattttaagccatcccctacgtgtagctccattggacttcacaagacatctttaaatgcttatgtaaagagcattgttcaagagtatgttaagtcatctgcttgggaaacaggagaaaactgctttatgcctgattggtttgaagccaagcttgtttctctgatggtcttgctggctgtggatgtggaaggaatgaagactcagtatagcggaaagcagagaacagagaatgtattgcggatattcttagaccctcttctggatgtgcttatgaagtttagtaccaatgcctacatgcccttgctgaagactgacagatgcctccagctgctgttgaagctgttgaacacatgcaggttgaaaggttccagtgcccaagatgatgaggtgtctactgttcttcagaactttttcatgtctactacagagagcatttctgaatttattctcagaagacttactatgaatgagctaaatagtgtttcagatctggatcgttgccatttatacctgatggtgttaactgagcttataaatctgcatttgaaggttgggtggaaaaggggtaaccctatctggagagttatttctcttttgaaaaatgcatccattcagcatcttcaagagatggacagtggacaggagccaacagttggaagtcagattcagagagtagtgagcatggctgccttggccatggtgtgtgaggccatagaccagaagcctgagctgcagctggactctctccatgctgggcccctggaaagcttcctttcctctcttcagctcaatcagacgctgcagaagccccacgcagaggagcagagcagttatgctcaccccttggagtgcagcagtgttttggaagaatcgtcatcttcccaaggatggggaaaaatagttgcacaatatattcatgatcaatgggtgtgcctctctttcctgttgaaaaaatatcacacccttataccaaccacagggagtgaaattctggaaccgtttctacctgccgttcagatgccaataaggactttgcagtctgcactagaagccctcacagttctttcttctgatcaagttttaccagtgttccattgcttgaaagtgttggttcccaagcttctgacttcctctgaatcactctgcatagagtcttttgacatggcgtggaaaattatatcttctttaagcaacactcagctgatattctgggctaatttaaaagcttttgttcagtttgtttttgataacaaagttcttaccattgctgccaaaatcaagggccaggcatatttcaaaataaaagagattatgtacaagataattgaaatgtctgctataaagactggagtcttcaatacactgataagttactgctgtcagtcttggatagtgtctgcttcaaatgtgtcccaaggatctttatcaagtgctaaaaattatagcgaacttatccttgaggcttgtatatttggaactgtgtttaggcgtgatcaaagacttgttcaggatgtacagaccttcatagaaaaccttggacatgactgtgcggcaaatattgttatggaaaatactaagagagaagaccattatgtgagaatttgtgctgtcaaattcctgtgtttattagatggctccaatatgtcccacaagttgtttattgaggatcttgcaatcaagctattagataaagatgaattagtgtccaagtccaaaaaacgctactatgtgaattctctacagcacagagtgaaaaaccgagtgtggcagactctgctggtacttttccctagacttgaccagaatttcttgaatggaattattgacaggattttccaggctggtttcaccaacaatcaagcatccataaaatattttatagaatggattattatattgattcttcataaattccctcaatttcttccaaagttctgggattgtttttcttatggtgaagaaaatcttaaaacaagcatttgtacgtttttagcagttttatcacatttagacattattactcaaaatattccagaaaaggtaagtttgtttgtaagaatttaaacttgactgtaaaaaaagaa

SEQ ID NO: 334378 - DNA, 833 bp, Homo sapiens
caggggatgggaaatgaatttccccaagttgaaaaccctgtacccttactttccttcccataaatttttctgtagttctaggtaaataataataataataaaaatgcaaattaggtgctttagaaggagtatgtaatatctgggactttttctaagttggtagacctaaaaaatgttttcaaaaatatatctagctgcatttctactgctgtcattccttaaagctcttcctccaaaaactccatatgaatgaatacatttaccaactcagtgattactaaataatagtactttatacttatacacagtaatacctttcatctaaggatctcaaatgccaatatattagtcatcaccctgtaaggtggatgacatattattcccattattccaatgggaaaattgggccatagaaaactgaggagcaaatgactcatctacaggaattaaatggaaaaaacaggctaggatttctcagcacactttaggagtgaatgaaaacttacaggcttcagttctactgctggccaccattggatttgtaagatccaggatgtgtattgaccacatgtgtccagacccaggcttagggcatctggaatgagagtggtgggctggtgtgtgggtctgaggatctggatgggagactgcattttcttctctgtgcaaaatatggaagtgtgaccttgaaggtgggcttagtctatggccttccccactcctgcttgaactgaagctggagagaatgggcatttttaaatgttacggcatatgctaatataatattatggcattaaataaaaacaagaagagaactgactaaaaccaaaaaa

SEQ ID NO: 334379 - DNA, 647 bp, Homo sapiens
gtgcacagggcagggaatggtagtggatagcagcaaacacttcggaagcacttcctatagaccagggcactctattaaatgatacatacgcacatgcgtgccagcacacacacgtctggttttcacaataacattatgaggtaggcagtattatcagcctcattttatagataaggacattgagacagagagtttaagtagtttgtcccagtcacacagctaagtgttggagctggtatttgaaacctggaggtctggttccatagcgatgactaataaccacttctctacggtgaggccctgattgagcttcagaacgcatttaataacatggcatgagctttttgattatgatgtgtgagtccaataacttctctgagtgctcagagccagtcccctgaggaaacttcttgcttcactaagaaacccctgtccggctgggcatggtggctcaagcctgtaatcccagcactttgggaggccgaggtgggtagatcacaaggtcaggagttcaagaccagcctggccaatatggtgaaaccccgtctccactaaaaatacaaaaattagctgggcgtggtggtgcaggcctgtagtcccagctgctcgggaggctaagcaggagaatcgcttgaacccaggaggcg

SEQ ID NO: 334380 - DNA, 286 bp, Homo sapiens
ttctgtcctcttaaaaggcctggacctagattccctggagtgtagtatgcaccgatcgcagaaatgttgagacatttcagatgttccccaaagctgcaaaactaaatagatacaccacaccacaatgtctctttgcgtacactcacagctagaagctaataactattaccttgttgctttttaaatatgtgtgcactcaagctttacagtaacttttgtgagcttcagtttggtcagagacggaagagaaaatattccaaacaaggccttggagtggaagaaggaa

SEQ ID NO: 334381 - DNA, 121 bp, Homo sapiens
atcagtattactgtcacgttttacaatgtatctcttaggaaatggtgagagccatccacacaatgtgcatttaaaggagactctactataatttcagctttcctactctttatagaaacca

SEQ ID NO: 334382 - DNA, 394 bp, Homo sapiens
ttagagtgggcatggctagagatatggagtctgaacaatacttttagtaagagaggcctagagcctaaactgtaggacagggtggatggacactggggagacagaattggtaggatttagtatctgattaggtatgagggggttggggacccagagggagaataatttagaatggtttccatattcctggcttagaagagaaacaggtgtgtaggctagaataactggatttggacattcaaccagctgtggatcatacaggtagagatatccatcaggaatctgcagctcagcaaagaggtctgagctgaaaataaaactcgcttaaattatgcacataaaagtggtggtcacagaaagcaggtagaagaagaagaaaagggggttaaggaca

SEQ ID NO: 334383 - DNA, 555 bp, Homo sapiens
acaaacaaacaaacaaacaaacaaacaaacaaaggcatatttagaagaaatgtgacaaggagtacaggccagacctctggatctgtagcaaggtacaacatgggtatgtttttactatttgtgtggcaccttagtgctctgtggtaggttgtaagtgctcagtaaatgtttattgtggctattatcattactagtattatttagaattcaatgggaaaggttagtatggagagttcacagttgggttagaatatactctaaaatctttatttttttaaattgtggagatttactttaaggctataaacaaattgtctctagttaaaacaagcagttagttaatcctttctatagcttagtcctaatatagtagtgtgacactagtaattgcttttagtcttagaggttagtaagtaggactgtttcttattaacttgttagggcagcatgaaatgccttgcctacccagggtgcattccattggactaagcaattagaaattagaacaggattactggtagttcatttcttctatactactgctaaagttctgat

SEQ ID NO: 334384 - DNA, 128 bp, Homo sapiens
aaaaatcctgtgcatgagtcgctaagtccagcccatactccaggggatggcaattgggtgccacctcctgaaggagcattagaggatttgtggacctacactgaaaccagtacagcacctctgggtgg

SEQ ID NO: 334385 - DNA, 473 bp, Homo sapiens
aggattcctcatcttccagatgtgcaggctgaaatatttatggatgaaattgtcagatgcctagcatttgctccatgataatctgaggtaaggaagacagtggcaatagctaccttaactttacttccatcttcatgaaatagtacattcttttacttctaattctaattcatcaaggtgaaaaacatcacttattcaccatccagtggttttaggcactatgctgagctacacatacagaaaatgcagagacttggttcttgtggtcaagttactcagtctggcagggaggcagggagacaggcagacccactactgtgaggagtgatgtacctggtgctttccaccagttgccatggggctgatcctcctactgaccttgtaatactaatgttctgaattttgatgggaaatattgtttttaacattgtgtgaaaagccacttccttattgtacagaaaccactaacatac

SEQ ID NO: 334386 - DNA, 215 bp, Homo sapiens
aggattcctcatcttccagatgtgcaggctgaaatatttatggatgaaattgtcagatgcctagcatttgctccatgataatctgagagaaaaggccatgtgaagacacagtgagaaggccgccatttaaaagtgaagaagagaggccttaggagaaaccaataccagcagcacttggatcctggactccaagtctccagaactgtgagaaatac

SEQ ID NO: 334387 - DNA, 472 bp, Homo sapiens
aacaccaggagagctggcatctgacgatgtctgtgggacacagtgcataggtagattttaacacactgagattgctatttggtataatgacatgtttatcctgaagaaatgaagttaggaattttctgagctacagaatgaattttttggttctcatcgaaaggtctgttgctcttggaactcaattctcaaaggtctgtttcacaaataatcatcctcgttctgatgtttattcaaatctttgcccaccctcgagtctccttaaattcctcatattccacaaatgatgtgtgttatctgaatccagaaaaccctcatgggtttgcagatataactgccaacaactgatatagaaatagagagtgtagaaaatatttcttgacaataaaagtcagaaggaagattcgagttatcctatccccatgaaaggaaggggataggatacacgttcgcgaggggatcctcagagtgc

SEQ ID NO: 334388 - DNA, 293 bp, Homo sapiens
aagagcagtcccaggaacctggaaggagggggagagacagggcatgaaggtgggatcctaaatcccagaatcgtcggcaacataataaatggcaacaccaggagagctggcatctgacgatgtctgtgggacacagtgcataggtagattttaacacactgagattgctatttggtataatgacatgtttatcctgaagaaatgaagttaggaattttctgagctacagaatgaattttttggttctcatcgaaaggtctgttgctcttggaactcaattctcaaaggtctgt

SEQ ID NO: 334389 - DNA, 409 bp, Homo sapiens
ttcattggtcactaactttcagcattgctatctgcttttgatatctgataagagtttttcatggacattcctcatttatgcccatccacagttccctagtaatggctccactctcctcccaatttcccaagcaggaaaccataggggtgattttgtcttctttttctctcagcccagatccaataggtaccaggaccttcaaggtaaggtctgaaattcaaacctgttttatctctcccctgctctgcttccactgctggaccctgcttccagtcctcatcgaaactttggcacagatactctgattaatatcttaattaccttactttctcatatcccctataccagtccattttatatcctcaagccaatgttgacttcctacttcacaattctgcttctgtttctc

SEQ ID NO: 334390 - DNA, 285 bp, Homo sapiens
gcactaacaagacttgaattttttgaaagagcactctggccatactgtggaggatgggtgtgaggacagtaaggcgagcctgctaaatctaagcctaggctgaagggggcctgtggtggcaatgggtactaagaaaaatctgtattgatggcatgcatttcttgaacttcagatctttatgggctgacccttggtgcttctttaatatcctatcaaacttccatctggccttcttgaccaaagaggaaaaagaccaaatcctctggggccctgctggatgggatg

SEQ ID NO: 334391 - DNA, 163 bp, Homo sapiens
ctcccatttctctcaggtaaaggaaatctggaggtaggctgtccacaaatggtatggtatcttcgggttgtcattgagcactcagtctcatgttttcatcctaccatacacagcacacagctttcattttcaaggtcacatcatgatccagattcgctggtgg

SEQ ID NO: 334392 - DNA, 322 bp, Homo sapiens
gcctattcttatttcagggcacaaaagggagcaatcatttatattaacatcttccagaacagttatagaattaaccaaattcctagatccatctttaaatgaaggtatttcctttgttttcaaaattatgtacatgaataaatttcttctttgaagcacacatcccactgagttttatattccaatcaaaaccagttggagttaagtctaaataacatcttcatccaactcctaagactcattcttgtccccttatttatccattcacacatttattcaacaaatacatacttaaacaaatacttttcacaagacattaaac

SEQ ID NO: 334393 - DNA, 264 bp, Homo sapiens
atggagcaggaaatgacccggttacatcggagagtgtcagaggtggaggctgtgcttagtcagaaggaggtggagctgaaggcctctgagactcagagatccctcctggagcaggaccttgctacctacatcacagaatgcagtagcttaaagcgaagtttggagcaagcacggatggaggtgtcccaggaggatgacaaagcactgcagcttctccatgatatcagagagcagagccggaagctccaagaaatcaaagagcag

SEQ ID NO: 334394 - DNA, 307 bp, Homo sapiens
tgcttctgctcccctgtgtgtgccctcctcatcctccagcctgtgctcaggtatcacctcctccaaggagccttatctgattctgtgtagcttctctctcaagagcacttcccttcctctctccctgctcaccctctggtgtagcagcactcattgttccagttgcttccctgcctcacagataggcttcagtttcattgaggacaggagtcttgtcctgttcagcacccactgcagagcctgtcagagcacaagtgttgggagaaataaatgaattgttacggctcacaggtcccattttctttgc

SEQ ID NO: 334395 - DNA, 886 bp, Homo sapiens
gggatgatatctatctcctagtgttgtagaaagtaagagttaatatacgtgaacaaatgatggctggcattcaagtgtcgctctgtgaccctcagaaggtgttcacatccatgagctcatctgaacttcacagcagggcaggcattattataatttccattggcagacaagaaacctgaggttcagagaatacaaatgacctgatagagatcacctgactattaaggtagagctggatctggagcccagcctgacgtctgccactgtcttttgctgtccacttaaaagagcagcttgcacacgtgcagggctacatagggttcaaaggcctttcatgcccattaactgcttattcttcctagaaggatgcataagcccaaagttttgctatatatgaagacatgattttcatgagattcctgcagccaatgaagaaacaagccttcagtaatcatgtggatccatggtttagttgtcccttatgggtgacaggtgatgggttatgaggattagataagagctgtttgtaagaatgtctacaaggtgcagtgacaggctctggtcagatattttgatcatgctacagtgcatgaaattgttcataagaattgtatgtgcatctgtatctaacaggatctgcttatatcttcagaaaactttgtcataaatttaaattacttaaagtgtctgatcttcagatactttaagtagtgcatttgagaatgggaatgttgattacagtgcgtatagggaaatagatgaatattccattaataactattaaaatctgctaaagcttaggctaagctgaatatatttagttgtaataaaattgggtgaacacattccaacttcagcctgattaagggaaagggtgtaggggtga

SEQ ID NO: 334396 - DNA, 507 bp, Homo sapiens
gggatgatatctatctcctagtgttgtagaaagtaagagttaatatacgtgaacaaatgatggctggcattcaagtgtcgctctgtgaccctcagaaggtgttcacatccatgagctcatctgaacttcacagcagggcaggcattattataatttccattggcagacaagaaacctgaggttcagagaatacaaatgacctgatagagatcacctgactattaaggtagagctggatctggagcccagcctgacgtctgccactgtcttttgctgtccacttaaaagagcagcttgcacacgtgcagggctacatagggttcaaaggcctttcatgcccattaactgcttattcttcctagaaggatgcataagcccaaagttttgctatatagtcacttatgagccacaaccacatgaccactctacgtaacacatgccatctgtccccattcccaccatgctcatttctttctttttgtaacaaggtcattgcatttattgccc

SEQ ID NO: 334397 - DNA, 367 bp, Homo sapiens
tcctcaaaggtctactcattggagtctccacatctgtgaaaggaggggatgatatctatctcctagtgttgtagaaagtaagagttaatatacgtgaacaaatgatggctggcattcaagtgtcgctctgtgaccctcagaaggtgttcacatccatgagctcatctgaacttcacagcagggcaggcattattataatttccattggcagacaagaaacctgaggttcagagaatacaaatgacctgatagagatcacctgactattaaggtagagctggatctggagcccagcctgacgtctgccactgtcttttgctgtccacttaaaagagcagcttgcacacgtgcagggctacatagggtt

SEQ ID NO: 334398 - DNA, 479 bp, Homo sapiens
caagttccctgagatggcaggagggacacacagcatggatgaatttgtaattttgtgctccaagcagcactgaggtattcatgtatgtgattctcttcacaacttcttaattgctgcaaaacacctgctttgaaaggatactgagacatcagtcatctagacaaatgcctctaaactgttgagatcatgtgcccatctcaacagaaaattttgagcagttccttaatgtacatgtaagagaaaatggaaaatgaccctgatgaacagccagtacattaaggtagcaattgaacctaaaggctcatagactagaaataatattagacaaatgcactctgcgaccacatttggacaagacagagacaaggccacaatacttaatgtctccctcttctgactgacatgtgtgacagttgctcattcaccaataacaactctagcctcgctttcattctctcgcctttcagatagaaattata

SEQ ID NO: 334399 - DNA, 582 bp, Homo sapiens
cccagcagggctcttaaccctgaacaaagactgagatccttgagccaaaagctaaatctcaccaagtaggaacagaaaaggccaaatacaaggaaaatgcaattgggaagatgtaggaataaagtaatcttacatacatctttcattaaaaaactgctgcaatgaacaggaaaaaaagtcataagagagaatcaagccaaaacattagctatgaaaaatttaagatttaaaaaataaaagacataatagatggcctgaatatcaggatggatacaactgaagaatttgcgagtagataggatgatcagattgagaattatccccaaaagcaacagggaaagaaacagagacaacacatagaaaagagaagctgagagaggccaggcgcagtggctcacgcctgtaatcccagcacttggggaggctgaggcaggcagatcatttgagatcaggagtttgataccagcctggccaatatggtgaaaccccatcactactaaaaatacaaaaattagctcggtgtggtggtgggcgcctgtaattccagctactcgggaggctgaggcaagagaagaatcactt

SEQ ID NO: 334400 - DNA, 530 bp, Homo sapiens
ccatgttggtcaggctggtcttgaactcctgacctcaagtgatccacccgcctcggcctcccaaagtgctggggttacgggcgtgagccaccgtgcttggccatctcacttgttttgaatcaggatgcctaggtcagtgagagcctgtgtgagccaaaaacagccacgttcatctttgaaaaaacttaggccgacaaatcaagtttttaattacaggaaataatcaccaactactggagatgcaattaaaggcatttttctctgagagtagcttgtttgtcttttatatttttccccaaagctcattataaaaaatactatgttctttcatacttacagtctcaactctatcacttcctgctgtgagtatggaaatgaattttgttgaaatcaaagaaattagttaataagattttttttagcctgttagtagaagtggcttaaagtttataaagaatatttgctttgctcataatttaactgaatgagacatctgacctctgctgtctatcaaattcattaccgctttc

SEQ ID NO: 334401 - DNA, 403 bp, Homo sapiens
ctgctccttgcctgggtggtgcttaagaaaaattgcctgacattgttcccagtcatccttaaataaaagttcaggcacagtcagctcttcttgattccccatcagtctctcacattctctcaccaactgtctgaaatctttacaagtttcctcaaacactcaacctaacactcagcaaactgtctgttatgatcctttcaaggaactagagtccattaggcatgcgacctattaatttcgttcatctccatgtcaaagtttaactaattaatcagccatcctttcttccttttttcttatctcacaggaaaaaagattaacctcctttctttttttcttttctttttcttttttttcttttttgagacaaagtctcactctgtcgtccaggctggagtgcagt

SEQ ID NO: 334402 - DNA, 302 bp, Homo sapiens
gagtttaaatattttctatgtagaattggaagtcattaaaaggtttaagcagggaaaagacatgaactggttttgttttgtgttttaaagatcactctagctactctctgatgaatggattgttgggatggggttgcagcagagagatcagcgaggcagccactgcaataagatgggcagtagataagatgacttgggttgggatggtagcaagaggagaccaggagaataaaacagcttaaggtgcattttagatgtagaatcaacaggacttgctcatagactgaataacaggaatgaag

SEQ ID NO: 334403 - DNA, 1096 bp, Homo sapiens
  misc_feature (1094)..(1095): n is a, c, g, or t
gcatctgcaggtgattttgatgcccagccatgtttggggaaaaaagtttgggttctgagtgaaaatagaaaacgtaatgacatggaaaggaagtcaggggataagaaaagctctatggccagccatggtggctcacacctgtaatcccagcactttgggaggctgagatgggcagatggcttgggctcacgagtttgagaccagcctaggcaacatggcaaaaccatgttcctattcaggaacaaagaatagatcacaaattaaactctgtgggttttcataagtggaaagttggctttcgttgttctgtatttggggtgcttagtggacaggagttatctaaaagaagtaattatagttgtaatgcgggaccctccaaagttggaaagtagattgaaatcccattattttacaaggtggcccttacctatttatagtttgactgtaggtatggcagtgagagataaaattactttttcctagctttgcaaaacgcccaaacgtctttgaaattaagagtaaaaggggtttaaaatatgtactgctttataaagcaggaaaaccccactggaacattttgggtgtttacagaaatgggtattccatgggagagaacgtggtaacctatgttttgtcatcatttgtttaatcactgaaaatatattaacaggccaggcatggtagctcatgcctgtaatcccagcgctttggcaggctgaggtgggaggattgcttgagcccaggagtttgagatcagcttgggaaacacagtgagactccatttctacaaaaaaagaaaaaagaaaaaaaagtcacatgtggtggcacacccctgtggtcccagctactttggaggctaaggtgggaggatagctcgagccccagagatcaaggccgccgtgaactgtgatcgcaccactgcactccaggctgagcaacagatcaagactcttgtataaaaaagaaaaaaaaattttttaaaaatataaatatagattaacaaagtaacagggaatataatattttcaggttggtcatatagaggaaatactatattgtgttattcagcttaataaaatataaaacaaaaaaanna

SEQ ID NO: 334404 - DNA, 167 bp, Homo sapiens
ctactgacacttctcctctatagtgagccacagtgagggggaggccagtcagcagccatatggagtggggttctgcttccctgatccaaataggttgttttctctgtgtacaaactagacctttatagagcttcaagctgttctttactaaagagtcaagtgaacat

SEQ ID NO: 334405 - DNA, 377 bp, Homo sapiens
accccagaatggtggatccactggcagtttgcaccctgaatctggaaaagccacaggcactcaactctatcatgtgagagaagccacaggggcaacatcctccaaagccacaagggtagagttttccaaggccttgggagcccaccccctgcaccaatgtgccctggatatgggacatgaagtcaaaggagattaccttggagctttaagatttaatgactgccctgctggatttctgacatatatggggcatgtagatcctttctttttgccaacttctcccttgtggaatgggaatgtttacgcaatgtctgcactctcattgtattttgggagtcaataatttgtgtttgatttcataggctgataggtggaag

SEQ ID NO: 334406 - DNA, 334 bp, Homo sapiens
gtacaaataagcacaacagaaatgcccgtcaaagataacgtccttctacttagtagccataatcctaagcttattctcttttttccttaactcttttaccattgccaataaggagaagttaaatagattataatcttaaaatgcacttttattcttggttgattaagctgggcaacaaaaatccccatgtgggccaggcacagtgactcaggcctctaattccagcactttgagagggccatgtgggtggatcacttgaggtcaggagttcgagaccagcctatgctctactgtttaatgagaacacacatgttgtagcaaagaccccaaaagg

SEQ ID NO: 334407 - DNA, 579 bp, Homo sapiens
tagcagttctttttaaagaactcaaaaacatgatgcaggattactgcatttttcgatgttatcctttattgagtaaattacactagtaatttaattctagggggaaaagtcctaatctattttcctatcttgtccatattcaatattgcatttttctttgtttctagatatgctattatcctaacacaaccctttgaacctacttaatattccctagagaataatagtatatcactttctcctgtcaattattttatataccaggcaacaatattatttcttgatcctcagtacaagacttccgagttacagtgctaagtaaacatttacagaattccttaatttctcaaaccaaaataaaagttctaagtcaagcaattgttttctaagttctagattttaatacaaacagccaaaaggagattgtactttccttttgctttgccaaaatctgcaaaaattttgccaaaaatattccaggcaataatctcatgaaatatatactcaacttaccaaagtacagtatttttacagtgctcaggcttgagaaattaaatatgaatcataaatgctgagagc

SEQ ID NO: 334408 - DNA, 112 bp, Homo sapiens
taggcactgtgagaaaatgggcacagcagtgaacaaaatgcacgtcagtgaacaaaatgccgggcgcggtggcacgtgcctgtagtcccagctacttgggaggctgaggctg

SEQ ID NO: 334409 - DNA, 1201 bp, Homo sapiens
cttgattgttgggggccttggaattctactcaaagtcatttctgggtggctacaacatccccaagcttagatgcctcttggcttgcttgtggaagcctgtgtgccctgtacggtgagagggagaaaccaagattctctttgagctttctgtggctcctcttccaactgggaaaccttaataagactcagtctccacctctatgtggtgagaagaatggtatcttccctactgacctctctaggtcaagtgatatgttgcttttgaaagttcttggaaaagtttagagagcaactcaaaaagaggccctcgccaagctcagtctcctcagccccagagatctggaagcccctcccaacagaggctctccccacaaggccagcagcccctgagcccccagtccggatctccacagcagcaaaggtcaccaggctctccgcagctatcccgggcatccagtggcagctccccaaaccaggcctccaagccaggtgccaccctcgcctcacagccccggccccctgtgcagggccgtagtacctcccagcagggtgaagagtccaagaagccagcaccaccccatccgcatctcaacaaatctcagtccctgactaacagcctcagcacatccgacacctcccagcgtgggaccccaagtgaagacgaggccaaggctgaaaccatccgcaacctgaggaagtcttttgccagcctgttctctgactaacgccatccaggctgggaggggaagagtgctctgctacactcgtccccctcctgcctcatcttccttctcagccttggttcctgatgggaacagaatggagggcctgagaacatactttctaaatgcctttgacccaggaaccgattatctatatttgttcccattttccttcaccgtgacattccagcattgtctgactgtgaggtgggcctttgagagcctccaggttcctcaaaacaggcctgagcgatgggcatcacaccctctgcctacccacgtgcctgcttacctgccagataaccaagtgagatgtctgcgagtggctagttttcacattcttactagtgtttggctcacctttgggcaaaggccccctctaggccttgccccacctccatcaaacgcagacactgtagtcagacctcagcaatataggaggcaataatcttttaacagtgttttgcaaacaaacaaaa

SEQ ID NO: 334410 - DNA, 1203 bp, Homo sapiens
agcggacttttgggatgtgatgcccaaccgccatctctcctggcatgggggtccctcagctctcccttcctccccacaggtaatggacagctcaatgccgctgattggagagcatgtggaagaggacagacagctgatggccgaccttgttgtctccaaaatgagccagctcccgatgccaggaggcacagcgccctcccccctcagaccttgggctccacagattaaatcagcgaaatccccagggcaagcccagctggggcctcagctaggccagccccagccacgcccacctccgcaaggaggccctcgccaagctcagtctcctcagccccagagatctggaagcccctcccaacagaggctctccccacaaggccagcagcccctgagcccccagtccggatctccacagcagcaaaggtcaccaggctctccgcagctatcccgggcatccagtggcagctccccaaaccaggcctccaagccaggtgccaccctcgcctcacagccccggccccctgtgcagggccgtagtacctcccagcagggtgaagagtccaagaagccagcaccaccccatccgcatctcaacaaatctcagtccctgactaacagcctcagcacatccgacacctcccagcgtgggaccccaagtgaagacgaggccaaggctgaaaccatccgcaacctgaggaagtcttttgccagcctgttctctgactaacgccatccaggctgggaggggaagagtgctctgctacactcgtccccctcctgcctcatcttccttctcagccttggttcctgatgggaacagaatggagggcctgagaacatactttctaaatgcctttgacccaggaaccgattatctatatttgttcccattttccttcaccgtgacattccagcattgtctgactgtgaggtgggcctttgagagcctccaggttcctcaaaacaggcctgagcgatgggcatcacaccctctgcctacccacgtgcctgcttacctgccagataaccaagtgagatgtctgcgagtggctagttttcacattcttactagtgtttggctcacctttgggcaaaggccccctctaggccttgccccacctccatcaaacgcagacactgtagtcagacctcagcaatataggaggcaataatcttttaacagtgttttgcaaacaaacaaaa

SEQ ID NO: 334411 - DNA, 2460 bp, Homo sapiens
tcccgggacccggagcggatcgactggcgggcgccgcgccgaggcaccaccgggcgccgagttcctggcggctcgcacgcaggtaaataaaggcagctaaagctgactgctggttgcgcaaaatccccctggctcttctggctaaagtcctaccactccctgtacctggcagcagcctgtcttctgggcctcacctacacacgtctgggtaggagccagtcatctccatccatccacagccatgaatttcctccggcgacgtctctctgacagcagcttcatggccaacctgcctaatggctatatgacggacctgcaacgcccagatagctccaccagctcacctgcttcccccgccatggagaggaggcacccccagcccctggctgcctccttctcctctccaggatccagcctttttagctccctctccagtgccatgaagcaggcccctcaggccacctcaggactgatggagcctccaggtccctccacgcccattgttcaaagacccaggatcctgttggtgatcgatgatgcccatacagactggtcgaagtatttccatgggaagaaggtgaatggagagattgagatccgagtggagcaggctgaattctcagagttgaacctagctgcctatgtgaccgggggctgcatggtggacatgcaggtcgtgagaaatgggaccaaagtggtgagcagatccttcaagccagacttcatcctggtccgccagcatgcctacagcatggccctgggggaagactaccgcagcctggtcatcggcctgcagtatggagggctgcctgctgtcaactctctctactccgtctacaacttctgcagcaagccctgggtgttctctcagctcattaagatcttccattccctgggtcctgagaagttcccgcttgtggagcaaacatttttccccaaccataagccaatggtcacagccccacacttcccggtggtagtcaagctgggacatgcccacgctggaatgggaaagatcaaagtggaaaaccagcttgacttccaggacatcaccagcgtggtcgccatggccaaaacatacgccaccaccgaggcgttcatcgactccaagtacgacatccgcatccagaaaattggatccaactacaaggcttacatgagaacctccatctctgggaactggaaggccaacacaggctctgccatgctggagcaggtggccatgacagagaggtacaggctgtgggtggacagctgctcggaaatgtttggcggcctggacatctgtgccgtcaaggctgtccacagcaaggatggcagagattacatcatcgaggtaatggacagctcaatgccgctgattggagagcatgtggaagaggacagacagctgatggccgaccttgttgtctccaaaatgagccagctcccgatgccaggaggcacagcgccctcccccctcagaccttgggctccacagattaaatcagcgaaatccccagggcaagcccagctggggcctcagctaggccagccccagccacgcccacctccgcaaggaggccctcgccaagctcagtctcctcagccccagagatctggaagcccctcccaacagaggctctccccacaaggccagcagcccctgagcccccagtccggatctccacagcagcaaaggtcaccaggctctccgcagctatcccgggcatccagtggcagctccccaaaccaggcctccaagccaggtgccaccctcgcctcacagccccggccccctgtgcagggccgtagtacctcccagcagggtgaagagtccaagaagccagcaccaccccatccgcatctcaacaaatctcagtccctgactaacagcctcagcacatccgacacctcccagcgtgggaccccaagtgaagacgaggccaaggctgaaaccatccgcaacctgaggaagtcttttgccagcctgttctctgactaacgccatccaggctgggaggggaagagtgctctgctacactcgtccccctcctgcctcatcttccttctcagccttggttcctgatgggaacagaatggagggcctgagaacatactttctaaatgcctttgacccaggaaccgattatctatatttgttcccattttccttcaccgtgacattccagcattgtctgactgtgaggtgggcctttgagagcctccaggttcctcaaaacaggcctgagcgatgggcatcacaccctctgcctacccacgtgcctgcttacctgccagataaccaagtgagatgtctgcgagtggctagttttcacattcttactagtgtttggctcacctttgggcaaaggccccctctaggccttgccccacctccatcaaacgcagacactgtagtcagacctcagcaatataggaggcaataatcttttaacagtgttttgcaaacaaacaaaa

SEQ ID NO: 334412 - DNA, 1224 bp, Homo sapiens
tcccgggacccggagcggatcgactggcgggcgccgcgccgaggcaccaccgggcgccgagttcctggcggctcgcacgcaggtaaataaaggcagctaaagctgactgctggttgcgcaaaatccccctggctcttctggctaaagtcctaccactccctgtacctggcagcagcctgtcttctgggcctcacctacacacgtctgggtaggagccagtcatctccatccatccacagccatgaatttcctccggcgacgtctctctgacagcagcttcatggccaacctgcctaatggctatatgacggacctgcaacgcccagatagctccaccagctcacctgcttcccccgccatggagaggaggcacccccagcccctggctgcctccttctcctctccaggatccagcctttttagctccctctccagtgccatgaagcaggcccctcaggccacctcaggactgatggagcctccaggtccctccacgcccattgttcaaagacccaggatcctgttggtgatcgatgatgcccatacagactggtcgaagtatttccatgggaagaaggtgaatggagagattgagatccgagtggagcaggctgaattctcagagttgaacctagctgcctatgtgaccgggggctgcatggtggacatgcaggtcgtgagaaatgggaccaaagtggtgagcagatccttcaagccagacttcatcctggtccgccagcatgcctacagcatggccctgggggaagactaccgcagcctggtcatcggcctgcagtatggagggctgcctgctgtcaactctctctactccgtctacaacttctgcagcaagccctgggtgttctctcagctcattaagatcttccattccctgggtcctgagaagttcccgcttgtggagcaaacatttttccccaaccataagccaatggtctcaccctccttaccctagtcctggccctgatcatccagctctgttcccctccagggtacatgctcttaaccaccccactatgtggcctctcccagtcaagggcaccatcaggattcaaagagctttgaaggaggtgacttatactgggagctggacgagaaggaagattgcaaagaggctcccaggggatggctctggcaaaatacaaagaaaaaagtttataaagcgtttaaataaacctgtgaaagacaagaaagatagtaagagaa

SEQ ID NO: 334413 - DNA, 720 bp, Homo sapiens
agcggacttttgggatgtgatgcccaaccgccatctctcctggcatgggggtccctcagctctcccttcctccccacaggtaatggacagctcaatgccgctgattggagagcatgtggaagaggacagacagctgatggccgaccttgttgtctccaaaatgagccagctcccgatgccaggaggcacagcgccctcccccctcagaccttgggaggccctcgccaagctcagtctcctcagccccagagatctggaagcccctcccaacagaggctctccccacaaggccagcagcccctgagcccccagtccggatctccacagcagcaaaggtcaccaggctctccgcagctatcccgggcatccagtggcagctccccaaaccaggcctccaagccaggtgccaccctcgcctcacagccccggccccctgtgcagggccgtagtacctcccagcagggtgaagagtccaagaagccagcaccaccccatccgcatctcaagtctgttgcctcccctcctatgactgagcctcctgaggcagggcctgaatcatattcgtcttacacccctgtcccctagcacaggggaagtgctcagcaagcagttgctacaggctggcatttaggaagcactcagaatggcatctgccattcaaaaagatggcactaaaagaattccaaaagcgggtgggggacagaattagccataaagaca

SEQ ID NO: 334414 - DNA, 1266 bp, Homo sapiens
ctaaacaggtgtctgtggagggcacacctgcttagcaggacacggggcccattcctaaccttgggggctcccagtctggtggtggagacatagtaagcaaggggtgacagtgccgtggataagctgtcccgtgtgaaaccaggtaatggacagctcaatgccgctgattggagagcatgtggaagaggacagacagctgatggccgaccttgttgtctccaaaatgagccagctcccgatgccaggaggcacagcgccctcccccctcagaccttgggctccacagattaaatcagcgaaatccccagggcaagcccagctggggcctcagctaggccagccccagccacgcccacctccgcaaggaggccctcgccaagctcagtctcctcagccccagagatctggaagcccctcccaacagaggctctccccacaaggccagcagcccctgagcccccagtccggatctccacagcagcaaaggtcaccaggctctccgcagctatcccgggcatccagtggcagctccccaaaccaggcctccaagccaggtgccaccctcgcctcacagccccggccccctgtgcagggccgtagtacctcccagcagggtgaagagtccaagaagccagcaccaccccatccgcatctcaacaaatctcagtccctgactaacagcctcagcacatccgacacctcccagcgtgggaccccaagtgaagacgaggccaaggctgaaaccatccgcaacctgaggaagtcttttgccagcctgttctctgactaacgccatccaggctgggaggggaagagtgctctgctacactcgtccccctcctgcctcatcttccttctcagccttggttcctgatgggaacagaatggagggcctgagaacatactttctaaatgcctttgacccaggaaccgattatctatatttgttcccattttccttcaccgtgacattccagcattgtctgactgtgaggtgggcctttgagagcctccaggttcctcaaaacaggcctgagcgatgggcatcacaccctctgcctacccacgtgcctgcttacctgccagataaccaagtgagatgtctgcgagtggctagttttcacattcttactagtgtttggctcacctttgggcaaaggccccctctaggccttgccccacctccatcaaacgcagacactgtagtcagacctcagcaatataggaggcaataatcttttaacagtgttttgcaaacaaacaaaa

SEQ ID NO: 334415 - DNA, 1292 bp, Homo sapiens
tcccgggacccggagcggatcgactggcgggcgccgcgccgaggcaccaccgggcgccgagttcctggcggctcgcacgcaggtaaataaaggcagctaaagctgactgctggttgcgcaaaatccccctggctcttctggctaaagtcctaccactccctgtacctggcagcagcctgtcttctgggcctcacctacacacgtctgggtaggagccagtcatctccatccatccacagccatgaatttcctccggcgacgtctctctgacagcagcttcatggccaacctgcctaatggctatatgacggacctgcaacgcccagatagctccaccagctcacctgcttcccccgccatggagaggaggcacccccagcccctggctgcctccttctcctctccaggatccagcctttttagctccctctccagtgccatgaagcaggcccctcaggccacctcaggactgatggagcctccaggtccctccacgcccattgttcaaagacccaggatcctgttggtgatcgatgatgcccatacagactggtcgaagtatttccatgggaagaaggtgaatggagagattgagatccgagtggagcaggctgaattctcagagttgaacctagctgcctatgtgaccgggggctgcatggtggacatgcaggtcgtgagaaatgggaccaaagtggtgagcagatccttcaagccagacttcatcctggtccgccagcatgcctacagcatggccctgggggaagactaccgcagcctggtcatcggcctgcagtatggagggctgcctgctgtcaactctctctactccgtctacaacttctgcagcaagccctgggtgttctctcagctcattaagatcttccattccctgggtcctgagaagttcccgcttgtggagcaaacatttttccccaaccataagccaatggtgagtgcccttttttactctgtttctttgcatgatgcggaatgaatacagatgacttgtcctcggtctctttggatggaggaggtggactctaggggttgtacactgaccacgcagactctaaggcggagtcacagtgtcctgtgggagtgcctggatttcctaagggaagtcgtctctccaggtgaaattcaggcaatagggcaaataacaaaggtgaaccacattccttggaacttggagattttcagcaaatcaggggacacgttctgggggcatgttagaaccagaggctgattataaaggtaaaagatgttttcaaggtgggatgttgttttac

SEQ ID NO: 334416 - DNA, 1240 bp, Homo sapiens
ggaagcagaggagcagcagggtcagggtgctgggttcctaaggtgcaaggatgcagaacagaactggcctcattctctgtgctcttgccctcctgatgggtttcctgatggtctgcctgggggccttcttcatttcctggggctccatattcgactgtcaggggagcctgattgcggcctatttgcttctgcctctggggtttgtgatccttctgagtggaattttctggagcaactatcgccaggtgactgaaagcaaaggagtgttgaggcacatgctccgacaacaccttgctcatggggccctgcccgtggccacagtagacaggccagacttttaccctccagcttatgaagagagccttgaggtggaaaagcagagctgtcctgcagagagagaggcctctggcattcctccacctctatatacagagacgggcctggaattccaggatggaaatgactcccacccagaggccccaccatcttatagagagtccatagccggcctggtggtgacagcaatctcagaggacgcccagaggcgaggccaagagtgctgaggcagagaaagctctccagcactcatgatgccaccactgtggggagcagctactgataataaaggcaaacgagggactgtgggaggaaaagccacaccagggaccccacaagagagcttggggaggggatgacagccctgaattccagacataactggccatgccagggcagggcaggccaggggccctggaagggtgtggccaacaccaagcagacatttcagaggattcacactaatcttaaccccggctggccttgggtccccaaaggtgtcactctgagagctctgcttacagagattctttctgctgtcactcaatttccctcccatcacctcaactccagccagggaggaatagatgctggttgtcaggacagccacatgccttcctgttctatatcacctagtaatctcaaagcgaaggtttgttgtttaatttattgattgttcagccttttgttttgttagcttgtttcctagttacctccagctgaccatactaccagagtgaggcagtacttcacatcctgggagatatgccctcggaacccatgaatgttattttgtattattttattttcatgatatgtattttttctatgtaaaaggaaaatgactgtaatatttgccttcaagatggttcaaacacaaaatattaaatgagctgtttcttaa

SEQ ID NO: 334417 - DNA, 604 bp, Homo sapiens
ggaagcagaggagcagcagggtcagggtgctgggttcctaaggtgcaaggatgcagaacagaactggcctcattctctgtgctcttgccctcctgatgggtttcctgatggtctgcctgggggccttcttcatttcctggggctccatattcgactgtcaggggagcctgattgcggcctatttgcttctgcctctggggtttgtgatccttctgagtggaattttctggagcaactatcgccaggtgactgaaagcaaaggagtgttgaggcacatgctccgacaacaccttgctcatggggccctgcccgtggccacagtagacagtgctgctcttctgaaaatcatgtgtaagcaattgctttaaaaagaaaaatgaagaacccttctgacaagaaacaaaagacctgaaaaaggaatttgatttcatgaatacaaacataatcatttccctttcatgtttggttgcaatcaaaagctatggagttcaacctcagaagcctcatgctggagatttccagagagatttgatatttttttccctaaaacttcacaattcatctatgtatacaaatatacacaaatacaaatgtaattttgaaa

SEQ ID NO: 334418 - DNA, 1083 bp, Homo sapiens
ggcatcagaaaaccattctggtgaggtccacacccataagtcaccatgtacaaggactgcatcgagtccactggagactattttcttctctgtgacgccgaggggccatggggcatcattctggagtccctggccatacttggcatcgtggtcacaattctgctactcttagcatttctcttcctcatgcgaaagatccaagactgcagccagtggaatgtcctccccacccagctcctcttcctcctgagtgtcctggggctcttcggactcgcttttgccttcatcatcgagctcaatcaacaaactgcccccgtacgctactttctctttggggttctctttgctctctgtttctcatgcctcttagctcatgcctccaatctagtgaagctggttcggggttgtgtctccttctcctggacgacaattctgtgcattgctattggttgcagtctgttgcaaatcattattgccactgagtatgtgactctcatcatgaccagaggtatgatgtttgtgaatatgacaccctgccagctcaatgtggactttgttgtactcctggtctatgtcctcttcctgatggccctcacattcttcgtctccaaagccaccttctgtggcccgtgtgagaactggaagcagcatggaaggctcatctttatcactgtgctcttctccatcatcatctgggtggtgtggatctccatgctcctgagaggcaacccgcagttccagcgacagccccagtgggacgacccggtcgtctgcattgctctggtcaccaacgcatgggttttcctgctgctgtacatcgtccctgagctctgcattctctacagatcgtgtagacaggagtgccctttacaaggcaatgcctgccccgtcacagcctaccaacacagcttccaagtggagaaccaggagctctccagagcccgagacagtgatggagctgaggaggatgtagcattaacttcatatggtactcccattcagccgcagactgttgatcccacacaagagtgtttcatcccacaggctaaactaagcccccagcaagatgcaggaggagtataa

SEQ ID NO: 334419 - DNA, 774 bp, Homo sapiens
agatggggtttcaccatgttggccaggctggtcttgaactcctgacttcaagtgatccacccaccttggcctcctaaagtgctaggattacaagcatgagccactgtaccctgccttgttttttgctttttgagacagagtctcactctgtcacccaggctggagtacagtggggcaatctcggctcaatgtaaactctgtctcctgggttcaagcgattctcctgcctcagcctcccgagtagctgagattacaagtgtgcaccaccacacccggctaatctttgtatttttagtagagatggggtttcaccatgttggctaggctggtcttgaactgctgacctcaagtgatcggcccgcctcagccttccaaagtgctgggataacaggagtgagccaccgcacccagccttcttgccattacttttaatagcaaaaagcacaattacttttgcaccaacctaagagatgcagagttgtcaatttgtctcatcctttttctgcagggcatcagaaaaccattctggtgaggtccacacccataagtcaccatgtacaaggactgcatcgagtccactggagactattttcttctctgtgacgccgaggggccatggggcatcattctggagtccctggccatacttggcatcgtggtcacaattctgctactcttagcatttctcttcctcatgcgaaagatccaagactgcagccagtggaatgtcctccccacccagctcctcttcctcctgagtgtcctggggctctt

SEQ ID NO: 334420 - DNA, 188 bp, Homo sapiens
tgaggcctctccccatcatgtcatgcacacatcatgaagccgcacattttcatgcctgctgcgaagtgcctactgtgcggggctgctgtgctacacactgctcacactccacccgggacacagtgcagccctgtatctccacactgcatgaatggaagaagcaatgatcggagaggtctcacagtaag

SEQ ID NO: 334421 - DNA, 383 bp, Homo sapiens
tccatcagttagattaacaagataagaagtgaagagaattgtaggcattcactcagaccattacttgcagaagtcagaggcaaactgagttattttccacgaagaagcagtgggtcacaaatatatatatgatacacatttcatgcaaagacagaaaagtgtgtgttttccatcaaccgcgaatacttttaatagtagaaaagtaagtgtattctagcttattgtttaaaaagatttgtattgttctcgtgttatatcaatggtgaatagcaattatcttttatattaaacttcaggagataagaatgtagtagtgctaaaaacaagaactattaaagcaaataattccaaactgactatggtgttttatgaaatatttacca

SEQ ID NO: 334422 - DNA, 175 bp, Homo sapiens
ttacccactgttgatgtcatcagtcctgagacttttcccaaggatatcaccatcactcatatatccacccacatcgacctcagaagacatgtccaggtcactgcttgctttctcactcatgtcaatctgtgacatgtttcccagcctagagacagcagctcgacggagaggcgtg

SEQ ID NO: 334423 - DNA, 1092 bp, Homo sapiens
caattatttagttggtttgggtatcttaatatcaaacggttagactttcaagagaaaaagaggacaatttttaatgacagcaaaatcaagtcatcaaaagtacataatgatcaaatgaaactgtttacaaatataacttcatagtaaaactgacatactgaagggagaaattgataaccccaccatggtagttgaaaacgtcaacatttatctctcagtatttggtaaaataagtagacaaaaaaattagtaacaatatagaaaacttggacaattcttttaatcagctccacctactttgtatgtgtacatgtgtatttttttttttgagatagaatctcactccattgtccaggtgggagtgcactggcaccatcatagctcactgtaacctcaaactcctgggctcaagtgattgtcctgccttgcctcccaagtagctaaaactacaggtgcagaggaccgcaactggtttattttttaaacttttggtagagatggggtctcactgtcttgcccaggctggtctcaaacccctggcctcaagcaatcctcctgcttcaacctccgaaagtgcctagttgttatttataatacagtaaatgtttgtattagaaatggtgaatggcttaaaatcagtgatattgcttctttattagataaggatagcaaaatgtacctagagtaagcagaagaaataatagagtggatatcagtgctatagagtatgaacaaataaattcataaagttggtgaaaccaacagttggttctctgaaaatagtaacaataaaattaataaattgtaactagggtggtcagaaaaaaatgtggaaacacaaataactaataatgagaatgaaagaggtggcattactactaattccacagacattaaaaggataataagataatattattaaaaatcataaaacatacaaaacattaaaaaaaattagccgggtgtgatgggacatccctatagtcctagctactcaggaggctgaggcaggaggataccttgagtgacctacgatcgtgccactgcactccagcctgggtggcagagaaggtgcctgtctcttaaaaagaa

SEQ ID NO: 334424 - DNA, 1038 bp, Homo sapiens
caattatttagttggtttgggtatcttaatatcaaacggttagactttcaagagaaaaagaggacaatttttaatgacagcaaaatcaagtcatcaaaagtacataatgatcaaatgaaactgtttacaaatataacttcatagtaaaactgacatactgaagggagaaattgataaccccaccatggtagttgaaaacgtcaacatttatctctcagtatttggtaaaataagtagacaaaaaaattagtaacaatatagtatttttttttttgagatagaatctcactccattgtccaggtgggagtgcactggcaccatcatagctcactgtaacctcaaactcctgggctcaagtgattgtcctgccttgcctcccaagtagctaaaactacaggtgcagaggaccgcaactggtttattttttaaacttttggtagagatggggtctcactgtcttgcccaggctggtctcaaacccctggcctcaagcaatcctcctgcttcaacctccgaaagtgcctagttgttatttataatacagtaaatgtttgtattagaaatggtgaatggcttaaaatcagtgatattgcttctttattagataaggatagcaaaatgtacctagagtaagcagaagaaataatagagtggatatcagtgctatagagtatgaacaaataaattcataaagttggtgaaaccaacagttggttctctgaaaatagtaacaataaaattaataaattgtaactagggtggtcagaaaaaaatgtggaaacacaaataactaataatgagaatgaaagaggtggcattactactaattccacagacattaaaaggataataagataatattattaaaaatcataaaacatacaaaacattaaaaaaaattagccgggtgtgatgggacatccctatagtcctagctactcaggaggctgaggcaggaggataccttgagtgacctacgatcgtgccactgcactccagcctgggtggcagagaaggtgcctgtctcttaaaaagaa

SEQ ID NO: 334425 - DNA, 448 bp, Homo sapiens
aaacagacgaacaacaacaaaaaaaccccaataaaaacacaaaacactgacaataccaaaagctagctagaatgtggagcatcaggaactgtaatccactgaacaatggtatagccactttggaagatagtttggcagtttcttacaatgttacatatgggcttaccatatgatccagcaatcatgcacctaggtatttactcaaaaacttatgtacacacaaaacctgtatacaaatgctgatagcagctttattcataatggccaaacacaggaaaatgtccttcaattggcaagatttgccttcataagtgagtgaataaacatactgtggtacatccagagtgaaatataattcagtgatgaaaagaaatgatctataaggtcacaaaaagacatagaggaatcttacatggatattgtaaagtaaaagaacagtctgaaaagg

SEQ ID NO: 334426 - DNA, 351 bp, Homo sapiens
ccaggtatgaatgccatagtttgtcattcttttaattttttttctatggtctttgttatttagagtagttttaggttcacagcaaaattgaacagaaagtacaaagttcccatacattctctctcaacacacacagccctccccacccctaacatcccacatcagtagggaacatttgttagaatcaatgaaccaacactgatgcatcattatcacccaaagtccatagtacacatacgtatgtattagcatacataggttcactcttgatgtgctttctcttgagttgtgacaaatgtctaatgacatgtatccacacagaatagtttctgctgccctaaaaatcctctg

SEQ ID NO: 334427 - DNA, 283 bp, Homo sapiens
gctggtctcaaacttctgggcagtctttccacctcagccttgcagagtggtacgattacaggcatgagccactgtgctcagccccaaatggaatattttagagggtatttacaacaacagcattagctaccagtccctttccattcacttttgtaacttctatcttacaagacagattgttcttttttttttgagacagtcttactctgccacccaggctggagtgcagtgtcgtgatcttggctcactgcagcctctgcctcgagggttcaagggattctca

SEQ ID NO: 334428 - DNA, 302 bp, Homo sapiens
tctttgcttacaatgcacataattcagccgcactggtcttttcgatttcccagttctggctgcctcttatcttaggatctttgctgtcacttccgttaagaatgcgctctcccaccttcattctccacccgttaacctctcttatgaaatcctcctgagtagtcacgatttccttcacaagcacttaccacatctggaatgacacagttctgactgattgttaaagaccggaagctccatgtgagcacagacagcatcttttctgctcatcaccgcatatacttgagcaaagaccccaaaag

SEQ ID NO: 334429 - DNA, 2137 bp, Homo sapiens
ggatttttaaaaatgagtgacaccacatggttctcttcaaagatgtaaactgctagggtgtttggatgcaagctgaaatcacctttaagaagcccatgcctaccaaggtggttttcatgagcctatgcaaaagtttctgggactgtgggcttgtagccctggatgacattacaatacaattgggaagctgctcatcttcagagaaacttccacctccacctggagagtgtactttcgagcaagatgaatgtacatttactcaggagaaaagaaaccggagcagctggcacaggaggaggggagaaactcccacttcctacacaggaccaaagggagatcacactactggggtaggctactacatgtacattgaggcctcccatatggtgtatggacaaaaagcacgcctcttgtccaggcctctgcgaggagtctctggaaaacactgcttgacctttttctaccacatgtatggagggggcactggcctgctgagtgtttatctgaaaaaggaagaagacagtgaagagtccctcttatggaggagaagaggtgaacagagcatttcctggctacgagcactgattgaatacagctgtgagaggcaacaccagataatttttgaagccattcgaggagtatcaataagaagtgatattgccattgatgatgttaaatttcaggcaggaccctgtggagaaatggaagatacaactcaacaatcatcaggatattctgaggacttaaatgaaattgagtattaagaaatgatctgcattggatttactagacgaaaaccatacctctcttcaatcaaaatgaaaacaaagcaaatgaatactggacagtcttaacaattttataagttataaaatgactttagagcaccctccttcattacttttgcaaaaacatactgactcagggctctttttttctttttgcatatgacaactgttactagaaatacaggctactggttttgcatagatcattcatcttaattttggtaccagttaaaaatacaaatgtactatattgtagtcattttaaagtacacaaagggcacaatcaaaatgagatgcactcatttaaatctgcattcagtgaatgtattgggagaaaaataggtcttgcaggtttccttttgaattttaagtatcataaatattttttaagtaaataatacggggtgtcagtaatatctgcagaatgaatgcagtctttcatgctaatgagttagtctggaaaaataaagtcttattttctatgttttattcatagaaatggagtattaatttttaatattttcaccatatgtgataacaaaggatctttcatgaatgtccaagggtaagtcagtattaattaatgctgtattacaaggcaatgctaccttctttattccccctttgaactacctttgaagtcactatgagcacatggatagaaatttaacttttttttgtaaagcaagcttaaaatgtttatgtatacatacccagcaacttttataaatgtgttaaacaattttactgatttttataataaatattttggtaagattttgaataatatgaattcaggcagatatactaaactgcttttatttacttgtttagaaaattgtatatatatgtttgtgtatcctaacagctgctatgaaattataaaattacctaataaaaataatttgaaaatcttaaaaaaaaaaaaaaaaaaaaaaaaaaaaaaaaaaaaaaaaaaaaaaaaaaaaaaaaaaaaaaaaaaaaaaaaaaaaaaaaaaaaaaaaaaaaaaaaaaaaacaaaaaaaaagaaaaaaagacgaacaaaaaaaaagacaaaacaaaagagagggggagagaagagagcatactactcaggagggcggcaggcggcagaaacacgcgagagataacatgagcataaatagtatgagagggaggaggcaatagtaggctggagagataacaaagtaagggagaagaatgagaaacacagaaatcataccagaaggaactagatactgaagatgggaaagagggtagaagcactgaaactatttgtgtgtaggaatagggagatagagagcaccatcaaggatagagatgggggggagagaaaaaaaaaaagtaag

SEQ ID NO: 334430 - DNA, 2461 bp, Homo sapiens
gtcgaccctttcactgactgagtcagcctacccaggtatctaggataatttcccttatgtaaagtcaaatgataggccagatgtggtggttcatgcctgtaatcctagcactttcagaggctgaggcaggagaatcacttgaacccagtaggcagaggttgcagtgagccaagatcgtaccactacactccagccttggcgacagagcgagactccatctcaaaaattaacaataataataaaagtaattccagggttttatgcagatggtaaccattcttcttcctactgtgttctgttgttcatacggacgctgaagagctgcttgtagtttgcctatgctcgcctgctgtgctaagtgaatcccaggttgttaggagtttccagttttcagttaacagaattcatagctttatttttatgaatttcaggtggttttcatgagcctatgcaaaagtttctgggactgtgggcttgtagccctggatgacattacaatacaattgggaagctgctcatcttcagagaaacttccacctccacctggagagtgtactttcgagcaagatgaatgtacatttactcaggagaaaagaaaccggagcagctggcacaggaggaggggagaaactcccacttcctacacaggaccaaagggagatcacactactggggtaggctactacatgtacattgaggcctcccatatggtgtatggacaaaaagcacgcctcttgtccaggcctctgcgaggagtctctggaaaacactgcttgacctttttctaccacatgtatggagggggcactggcctgctgagtgtttatctgaaaaaggaagaagacagtgaagagtccctcttatggaggagaagaggtgaacagagcatttcctggctacgagcactgattgaatacagctgtgagaggcaacaccagataatttttgaagccattcgaggagtatcaataagaagtgatattgccattgatgatgttaaatttcaggcaggaccctgtggagaaatggaagatacaactcaacaatcatcaggatattctgaggacttaaatgaaattgagtattaagaaatgatctgcattggatttactagacgaaaaccatacctctcttcaatcaaaatgaaaacaaagcaaatgaatactggacagtcttaacaattttataagttataaaatgactttagagcaccctccttcattacttttgcaaaaacatactgactcagggctctttttttctttttgcatatgacaactgttactagaaatacaggctactggttttgcatagatcattcatcttaattttggtaccagttaaaaatacaaatgtactatattgtagtcattttaaagtacacaaagggcacaatcaaaatgagatgcactcatttaaatctgcattcagtgaatgtattgggagaaaaataggtcttgcaggtttccttttgaattttaagtatcataaatattttttaagtaaataatacggggtgtcagtaatatctgcagaatgaatgcagtctttcatgctaatgagttagtctggaaaaataaagtcttattttctatgttttattcatagaaatggagtattaatttttaatattttcaccatatgtgataacaaaggatctttcatgaatgtccaagggtaagtcagtattaattaatgctgtattacaaggcaatgctaccttctttattccccctttgaactacctttgaagtcactatgagcacatggatagaaatttaacttttttttgtaaagcaagcttaaaatgtttatgtatacatacccagcaacttttataaatgtgttaaacaattttactgatttttataataaatattttggtaagattttgaataatatgaattcaggcagatatactaaactgcttttatttacttgtttagaaaattgtatatatatgtttgtgtatcctaacagctgctatgaaattataaaattacctaataaaaataatttgaaaatcttaaaaaaaaaaaaaaaaaaaaaaaaaaaaaaaaaaaaaaaaaaaaaaaaaaaaaaaaaaaaaaaaaaaaaaaaaaaaaaaaaaaaaaaaaaaaaaaaaaaaacaaaaaaaaagaaaaaaagacgaacaaaaaaaaagacaaaacaaaagagagggggagagaagagagcatactactcaggagggcggcaggcggcagaaacacgcgagagataacatgagcataaatagtatgagagggaggaggcaatagtaggctggagagataacaaagtaagggagaagaatgagaaacacagaaatcataccagaaggaactagatactgaagatgggaaagagggtagaagcactgaaactatttgtgtgtaggaatagggagatagagagcaccatcaaggatagagatgggggggagagaaaaaaaaaaagtaag

SEQ ID NO: 334431 - DNA, 844 bp, Homo sapiens
gtcgaccctttcactgactgagtcagcctacccaggtatctaggataatttcccttatgtaaagtcaaatgataggccagatgtggtggttcatgcctgtaatcctagcactttcagaggctgaggcaggagaatcacttgaacccagtaggcagaggttgcagtgagccaagatcgtaccactacactccagccttggcgacagagcgagactccatctcaaaaattaacaataataataaaagtaattccagggttttatgcagatggtaaccattcttcttcctactgtgttctgttgttcatacggacgctgaagagctgcttgtagtttgcctatgctcgcctgctgtgctaagtgaatcccaggttgttaggagtttccagttttcagttaacagaattcatagctttatttttatgaatttcaggtggttttcatgagcctatgcaaaagtttctgggactgtgggcttgtagccctggatgacattacaatacaattgggaagctgctcatcttcagagaaacttccacctccacctggagagtgtactttcgagcaagatgaatgtacatttactcaggagaaaagaaaccggagcagctggcacaggaggaggggagaaactcccacttcctacacaggaccaaagggagatcacactactggggtaggtgagttatgccacgtggtgctgtttcctaaggaaagcttctaaaatagcattctaggaatcgtttactgcattttgaaatgtgcaaaattatgtcttgtgtctataatgaaatgcacttgtgattctacacacacaggatgatttgatatgggcattgaatatct

SEQ ID NO: 334432 - DNA, 1704 bp, Homo sapiens
ggatttttaaaaatgagtgacaccacatggttctcttcaaagatgtaaactgctagggtgtttggatgcaagctgaaatcacctttaagaagcccatgcctaccaaggtggttttcatgagcctatgcaaaagtttctgggactgtgggcttgtagccctggatgacattacaatacaattgggaagctgctcatcttcagagaaacttccacctccacctggagagtgtactttcgagcaagatgaatgtacatttactcaggagaaaagaaaccggagcagctggcacaggaggaggggagaaactcccacttcctacacaggaccaaagggagatcacactactggggtaggctactacatgtacattgaggcctcccatatggtgtatggacaaaaagcacgcctcttgtccaggcctctgcgaggagtctctggaaaacactgcttgacctttttctaccacatgtatggagggggcactggcctgctgagtgtttatctgaaaaaggaagaagacagtgaagagtccctcttatggaggagaagaggtgaacagagcatttcctggctacgagcactgattgaatacagctgtgagaggcaacaccagataatttttgaagccattcgaggagtatcaataagaagtgatattgccattgatgatgttaaatttcaggcaggaccctgtggagaaatggaagatacaactcaacaatcatcaggatattctgaggacttaaatgaaattgagtattaagaaatgatctgcattggatttactagacgaaaaccatacctctcttcaatcaaaatgaaaacaaagcaaatgaatactggacagtcttaacaattttataagttataaaatgactttagagcaccctccttcattacttttgcaaaaacatactgactcagggctctttttttctttttgcatatgacaactgttactagaaatacaggctactggttttgcatagatcattcatcttaattttggtaccagttaaaaatacaaatgtactatattgtagtcattttaaagtacacaaagggcacaatcaaaatgagatgcactcatttaaatctgcattcagtgaatgtattgggagaaaaataggtcttgcaggtttccttttgaattttaagtatcataaatattttttaagtaaataatacggggtgtcagtaatatctgcagaatgaatgcagtctttcatgctaatgagttagtctggaaaaataaagtcttattttctatgttttattcatagaaatggagtattaatttttaatattttcaccatatgtgataacaaaggatctttcatgaatgtccaagggtaagtcagtattaattaatgctgtattacaaggcaatgctaccttctttattccccctttgaactacctttgaagtcactatgagcacatggatagaaatttaacttttttttgtaaagcaagcttaaaatgtttatgtatacatacccagcaacttttataaatgtgttaaacaattttactgatttttataataaatattttggtaagattttgaataatatgaattcaggcagatatactaaactgcttttatttacttgtttagaaaattgtatatatatgtttgtgtatcctaacagctgctatgaaattataaaattacctaataaaaataatttgaaaatctt

SEQ ID NO: 334433 - DNA, 2296 bp, Homo sapiens
ggtattacctgctagccaacacaaagttcacatctcagcctggctacattggaaggctctatgggccctccctaccaggaaacttgcagtattgtctgcgttttcattatgccatctatggatttttaaaaatgagtgacaccctagcagtttacatctttgaagagaaccatgtggttcaagagaagatctggtctgtgttggagtccccaaggggtgtttggatgcaagctgaaatcacctttaagaagcccatgcctaccaaggtggttttcatgagcctatgcaaaagtttctgggactgtgggcttgtagccctggatgacattacaatacaattgggaagctgctcatcttcagagaaacttccacctccacctggagagtgtactttcgagcaagatgaatgtacatttactcaggagaaaagaaaccggagcagctggcacaggaggaggggagaaactcccacttcctacacaggaccaaagggagatcacactactggggtaggctactacatgtacattgaggcctcccatatggtgtatggacaaaaagcacgcctcttgtccaggcctctgcgaggagtctctggaaaacactgcttgacctttttctaccacatgtatggagggggcactggcctgctgagtgtttatctgaaaaaggaagaagacagtgaagagtccctcttatggaggagaagaggtgaacagagcatttcctggctacgagcactgattgaatacagctgtgagaggcaacaccagataatttttgaagccattcgaggagtatcaataagaagtgatattgccattgatgatgttaaatttcaggcaggaccctgtggagaaatggaagatacaactcaacaatcatcaggatattctgaggacttaaatgaaattgagtattaagaaatgatctgcattggatttactagacgaaaaccatacctctcttcaatcaaaatgaaaacaaagcaaatgaatactggacagtcttaacaattttataagttataaaatgactttagagcaccctccttcattacttttgcaaaaacatactgactcagggctctttttttctttttgcatatgacaactgttactagaaatacaggctactggttttgcatagatcattcatcttaattttggtaccagttaaaaatacaaatgtactatattgtagtcattttaaagtacacaaagggcacaatcaaaatgagatgcactcatttaaatctgcattcagtgaatgtattgggagaaaaataggtcttgcaggtttccttttgaattttaagtatcataaatattttttaagtaaataatacggggtgtcagtaatatctgcagaatgaatgcagtctttcatgctaatgagttagtctggaaaaataaagtcttattttctatgttttattcatagaaatggagtattaatttttaatattttcaccatatgtgataacaaaggatctttcatgaatgtccaagggtaagtcagtattaattaatgctgtattacaaggcaatgctaccttctttattccccctttgaactacctttgaagtcactatgagcacatggatagaaatttaacttttttttgtaaagcaagcttaaaatgtttatgtatacatacccagcaacttttataaatgtgttaaacaattttactgatttttataataaatattttggtaagattttgaataatatgaattcaggcagatatactaaactgcttttatttacttgtttagaaaattgtatatatatgtttgtgtatcctaacagctgctatgaaattataaaattacctaataaaaataatttgaaaatcttaaaaaaaaaaaaaaaaaaaaaaaaaaaaaaaaaaaaaaaaaaaaaaaaaaaaaaaaaaaaaaaaaaaaaaaaaaaaaaaaaaaaaaaaaaaaaaaaaaaaacaaaaaaaaagaaaaaaagacgaacaaaaaaaaagacaaaacaaaagagagggggagagaagagagcatactactcaggagggcggcaggcggcagaaacacgcgagagataacatgagcataaatagtatgagagggaggaggcaatagtaggctggagagataacaaagtaagggagaagaatgagaaacacagaaatcataccagaaggaactagatactgaagatgggaaagagggtagaagcactgaaactatttgtgtgtaggaatagggagatagagagcaccatcaaggatagagatgggggggagagaaaaaaaaaaagtaag

SEQ ID NO: 334434 - DNA, 401 bp, Homo sapiens
ctgcctttccaacagcatctagcgtcaaatatacaggaggctgagctgttattcctgtttttgttcaatccatctgagttgcaagtgaaaataatatttatactgcccaccattcatggactaaagaggaacggggaagagctgtcgcatctgtagagttgctactgaagaatggcaagtcagaaaaatggtaacattcacacgcacacttgcacacacacacactcaccatgcagttggcctgggagcacacacacacactcaccatgcagttggcctgggagggagtgcggactgagaggtgaaggatgcggggtggtcgcagggagttgatggaagtcagaaagggctccacagagggcatggtggcacgtgcctgtaattccagctacttgggaagc

SEQ ID NO: 334435 - DNA, 278 bp, Homo sapiens
ccgccaccgaggacaccttgtgtggccccagtcctggcactggcctggctcccagtgagggtggccagaccctgggcagggcttcatcggctgagctgcctcctggctggtgggcctcagcctgcttctgagggaggagcagcccaggtgtccctcagcctgtttcagctccagccgctccctcgtgttctgtctgcacttagtccccccacatgctgcccacctcacacacaccgctgccttcctggctgctggaagctgggtgagacagcctgccc

SEQ ID NO: 334436 - DNA, 404 bp, Homo sapiens
taggggaagaataaggtaaagactggattctttataaacagaatacaaattccctggatttctaatactttaaaatattttagccaagtactgggtacaaattggcacccaataactaacaccagattaggccgggcatggtggctcccacctgtaatcccagcactttaggaggccaaggcaggtggataacttgtgttcaggattttgaaactagcctggccaatatggtgaaatctcgtctccactaaaaattcaaaaattagccaggcatgatagaacacacctgcagtcccagctacttgagaggctgaggcaggagaatcacttgaacccgggaggcagaggttgcagtgagccgatattgtgccactgcactccaacctgggcgacagagcaagact

SEQ ID NO: 334437 - DNA, 264 bp, Homo sapiens
tcttcaaaaaatagtgtgacacactgtggaagtcagatcaaaggcctcctaaggaaccatgcctgcgggtactcacacccttgtacagagccctctccttgatcctgaacctctcaggttcacaaaagcaactctcagacttgcttttgtccaacagaatgcgtggatgtgatggtgctgacttcaagaccagctcacgagaagccttgcagcttggcccaggtctctaaaatgcactatctgggggacactagctaatacgta

SEQ ID NO: 334438 - DNA, 496 bp, Homo sapiens
gacaggaacagaatggttttcgagaaaaccacatagaggtaaaagcgggatcatgagattggaggaaggaaataaaaaaccctggaaaagataggagggagaaagagaacagagccttgggatttgccatatttagggagagaagcaacggactgaagacagagaaaggcccgaaagtagtgaataaaaaatagtaaaaggttcattcaatccagggtcacatcagaaaagaaacaagatagtctgaatcagaggtgtagattagctgtgatgtccaatttaaacatacaacactaaattcattgatattaaaggaactcataacatgaaattacatagcaaatcaaactgcaatttctagaatgaactgcacttatcttctacttaattcttccattcagtattgactcaagatctatcaaggggaaacaaagacagttaaaagggggctatataccataacaaattctacttgacgtcgttattgtccgtcatt

SEQ ID NO: 334439 - DNA, 485 bp, Homo sapiens
ttatgttaagtaaaataagccaggcacagaaagataaatactgcatattctcactcatatgtgggagttaaaaaatgtggatctcatgaaggtagaaagtcgaatggtggtttccagaggctgggaagggaaggagtttggggaatgaagagaagtgggttaatggttataaacatacagctagagagaaggaaaaagttttagtattcaatagtacagtagggagactacagttaacaataattatatatttcaaaatggcttgaagtaaaaaattggaatgtttctaacacaaagaaaagataaatgttagaggtgatgaatatcccagttaccctgatttgatcattacacattgtatacgtgtatcaaaatatcacatataccccccaaatatgtacagctattatatatcaatttttgaaaagggagaaaagtagaacacctgataggcttggtgtgaagagaaattaagctaatatatg

SEQ ID NO: 334440 - DNA, 229 bp, Homo sapiens
cacctgcacaaaaggcagaatgtgaaccatctccacgttttacatgcactacctgggaaataataatatttggatagactgcattaaatagattatatgaaaattgactttatgggtttattttttaaaagctttttaaaatgtgattaccggtaaatctaagatttcttacatggcttctgtttgtggctaacattatacacctatcggacagcactggtgtgaaggg

SEQ ID NO: 334441 - DNA, 289 bp, Homo sapiens
caatatttagaccattcctccaggtatctcttggcctaatcccttctagtttaaagtacaggctttggattctcctggccttggacctaggcataacttcctgttgaatgctctttatcaccctccctatctcagtgattctatagtagaaacccatcttggcttcattcagcctttgaagcagccctttttatacaatgctcccaaaacagcttctctctttgggtattagggagtaatacccaaagtcatagtgacaaggcacatgaccccaattctggatgtgaga

SEQ ID NO: 334442 - DNA, 190 bp, Homo sapiens
tgtgccacccacttagagaggcctcccttgagcacactacctaaggagagcccctcccttttattctttatctcagtctcttgtttcctttatagcccatgcacatttaattttattaattttctgcatgtgtttagtttttagaattttaacagctttattgagatataattcacacaccatacagttt

SEQ ID NO: 334443 - DNA, 233 bp, Homo sapiens
agtgaaattcgggtataaggctaatgtgacctcatttaaaatcacaggctggagaggcccagggactttgggtatctatttacatagccaagataacatcagattcaaattttatttagtgctttttgtatctatgactgtcaaacattgtcacagtttaacagctacataatactccatcaaaaggatattatatgaagtgtggtggctcacacctgtaatccccacatttt

SEQ ID NO: 334444 - DNA, 539 bp, Homo sapiens
tgtcttatcccaagtacaggtatgatccaaagtagaagtaggaagctttccaagagctactgtgaagaagaatgtgtgtctgtactagcagttgatctctgcaacatgtattcatgttaaaattggggaagtcaaggatagagtcttggttgagaaactatttttctcctcttgtcagcctacttcaatgtatttatttctgtcttggatggttggagtggttcagctcttggtccctagagtttatgatttactattgtacagcctaatgttcttagaaaatggacatctacaaatgtctttgcagaagtactaaaggccaggaaataccttcgggagtatgtgttgtgcgttttcctctttctagaataattctttcctgcatttcattctctcgttttctacagactgcctttatctgatgtgagtagtttttaaaacatgtcatataatgctggtgccacaggtaaatgcttccaggaataccaaaatattctttaacaacgtggtgctatgttcaccacaggataattcgatgg

SEQ ID NO: 334445 - DNA, 342 bp, Homo sapiens
catggctacgaataaactatccaatctaaccacagaagctgagcatttggtttggggttaatccacatcacatgactcaccattgagaaagcggctctcaccatgcttaatgggcacagcacctctgcaaacaaatccttccctggctaatcattccctctgagaggtttcctcagtaaagagattagaactatctcttgtcatttccaacttttaaaaaattgacctttttggaaatctaccaccaccaactaattcttgacagacttgtagagaatgaccctcaaagaaatatcattcgagacacatattcaagcagactggccatggtggctcatgcct

SEQ ID NO: 334446 - DNA, 1561 bp, Homo sapiens
cggggagagagtatggactgaagcagctaaagaattgcagcatctaatggacaggaagaggggcagcgacagcgatggagcctgagaaggagggtgcagtgtccccaagccatgtggagaggttctgagattaaacagatcacacacatagcgcagagcatgctgcccagcagacatcctccaacctgctcaggggtggtgggcagggtcctgctcattccaggtgagaccgtgggctgagggctccaggtgctggcaggctctgagctgaggaaggcccgtacgttccacagagatctcatgccttgccctgtgctctgccagatgggcagaaggacttagccctataggaggcttgcccccgctccgtctggcctgttcagaaatggccaacagctcccgagttggtacagccccctcaggacctgccctgccgactgggtatgccactggccctcagcatcctgacctgcccccaccttgtcctgcaggaggtgtttcatagagaactaaggagcaactccatgaagacctggggcctgcgggcagctggctggatggccatgttcatgggcctcaaccttatgacacggatcctctacaccttggtggactggtttcctgttttccgagacctggtcaacattggcctgaaagcctttgccttctgtgtggccacctcgctgaccctgctgaccgtggcggctggctggctcttctaccgacccctgtgggccctcctcattgccggcctggcccttgtgcccatccttgttgctcggacacgggtgccagccaaaaagttggagtgaaaagaccctggcacccgcccgacacctgcgtgagccctaggatccaggtcctctctcacctctgacccagctccatgccagagcaggagccccggtcaattttggactctgcaccccctctcctcttcaggggccagacttggcagcatgtgcaccaggttggtgttcaccagctcatgtcttccccacatctcttcttgccagtaagcagctttggtgggcagcagcagctcatgaatggcaagctgacagcttctcctgctgtttccttcctctcttggactgagtgggtacggccagccactcagcccattggcagctgacaacgcagacacgctctacggaggcctgctgataaagggctcagccttgccgtgtgctgcttctcatcactgcacacaagtgccatgctttgccaccaccaccaagcacatctgtgatcctgaagggcggccgttagtcgttactgctgagtcctgggtcaccagcagacacactgggcatggacccctcaaagcaggcacacccaaaacacaagtctgtggctagaacctgatgtggtgtttaaaagagaagaaacactgaagatgtcctgaggagaaaagctggacatatactgggcttcacacttatcttatggcttggcacgctttggtgggataacgctggttttcttgaatgggttgatcgtggtatgggtcatcaggccgtgttctatggcgtgccccaacagttcgaaggtgatttgg

SEQ ID NO: 334447 - DNA, 348 bp, Homo sapiens
gccaccaccaccaagcacatctgtgatcctgaagggcggccgttagtcgttactgctgagtcctgggtcaccagcagacacactgggcatggacccctcaaagcaggcacacccaaaacacaagtctgtggctagaacctgatgtggtgtttaaaagagaagaaacactgaagatgtcctgaggagaaaagctggacatatactgggcttcacacttatcttatggcttggcagaatctttgtagtgtgtgggatctctgaaggccctatttaagtttttcttcgttactttgctgcttcatgtgtactttcctaccccaagaggaagttttctgaaataagattttt

SEQ ID NO: 334448 - DNA, 461 bp, Homo sapiens
tgaaaagaccctggcacccgcccgacacctgcgtgagccctaggatccaggtcctctctcacctctgacccagctccatgccagagcaggagccccggtcaattttggactctgcaccccctctcctcttcaggggccagacttggcagcatgtgcaccaggttggtgttcaccagctcatgtcttccccacatctcttcttgccagtaagcagctttggtgggcagcagcagctcatgaatggcaagctgacagcttctcctgctgtttccttcctctcttggactgagtgggtacggccagccactcagcccattggcagctgacaacgcagacacgctctacggaggcctgctgataaagggctcagccttgccgtgtgctgcttctcatcactgcacacaagtgccatgctttgccaccaccaccaagcacatctgtgatcctgaagggcggccgtt

SEQ ID NO: 334449 - DNA, 1300 bp, Homo sapiens
tcattcgccgtggagactttttctaccacagcgaaaatcccaagtatccagaggtgggagacttgcgtgtctccttttcctatgctggactgagcggcgatgaccctgacctgggcccagctcacgtggtcactgtgattgcccggcagcggggtgaccagctagtcccattctccaccaagtctggggataccttactgctcctgcaccacggggacttctcagcagaggaggtgtttcatagagaactaaggagcaactccatgaagacctggggcctgcgggcagctggctggatggccatgttcatgggcctcaaccttatgacacggatcctctacaccttggtggactggtttcctgttttccgagacctggtcaacattggcctgaaagcctttgccttctgtgtggccacctcgctgaccctgctgaccgtggcggctggctggctcttctaccgacccctgtgggccctcctcattgccggcctggcccttgtgcccatccttgttgctcggacacgggtgccagccaaaaagttggagtgaaaagaccctggcacccgcccgacacctgcgtgagccctaggatccaggtcctctctcacctctgacccagctccatgccagagcaggagccccggtcaattttggactctgcaccccctctcctcttcaggggccagacttggcagcatgtgcaccaggttggtgttcaccagctcatgtcttccccacatctcttcttgccagtaagcagctttggtgggcagcagcagctcatgaatggcaagctgacagcttctcctgctgtttccttcctctcttggactgagtgggtacggccagccactcagcccattggcagctgacaacgcagacacgctctacggaggcctgctgataaagggctcagccttgccgtgtgctgcttctcatcactgcacacaagtgccatgctttgccaccaccaccaagcacatctgtgatcctgaagggcggccgttagtcgttactgctgagtcctgggtcaccagcagacacactgggcatggacccctcaaagcaggcacacccaaaacacaagtctgtggctagaacctgatgtggtgtttaaaagagaagaaacactgaagatgtcctgaggagaaaagctggacatatactgggcttcacacttatcttatggcttggcacgctttggtgggataacgctggttttcttgaatgggttgatcgtggtatgggtcatcaggccgtgttctatggcgtgccccaacagttcgaaggtgatttgg

SEQ ID NO: 334450 - DNA, 945 bp, Homo sapiens
tcattcgccgtggagactttttctaccacagcgaaaatcccaagtatccagaggtgggagacttgcgtgtctccttttcctatgctggactgagcggcgatgaccctgacctgggcccagctcacgtggtcactgtgattgcccggcagcggggtgaccagctagtcccattctccaccaagtctggggataccttactgctcctgcaccacggggacttctcagcagaggaggtgtttcatagagaactaaggagcaactccatgaagacctggggcctgcgggcagctggctggatggccatgttcatgggcctcaaccttatgacacggatcctctacaccttggtggactggtttcctgttttccgagacctggtcaacattggcctgaaagcctttgccttctgtgtggccacctcgctgaccctgctgaccgtggcggctggctggctcttctaccgacccctgtgggccctcctcattgccggcctggcccttgtgcccatccttgttgctcggacacgggtgccagccaaaaagttggagtgaaaagaccctggcacccgcccgacacctgcgtgagccctaggatccaggtcctctctcacctctgacccagctccatgccagagcaggagccccggtcaattttggactctgcaccccctctcctcttcaggggccagacttggcagcatgtgcaccaggttggtgttcaccagctcatgtcttccccacatctcttcctacataaattcaccacacctacgtcacagacttctaagttcccaataagctccaccctttacagctacgatgtgtcaccccattctacacgatctcgtgcccttccgccattcgaaacggtaggccgtgggaagatcctcccttccttggtctacggggtcacttttgccacattgccccttgccggcgccgtccg

SEQ ID NO: 334451 - DNA, 222 bp, Homo sapiens
taggccatccagaaccgccgctaccatggtgccagctgcagtggggaggccagcggttgtggcaggagaggctgcaggggcagcaataacggtggtgggacccctgtcccccatgtctccaaggcaggcaactgagccacccccacctttgcatgaccaggcccataaaaaccccagagtcggccaaactggagcagaggatggagagacaaagggagatga

SEQ ID NO: 334452 - DNA, 431 bp, Homo sapiens
tgaccttctcctcatccaacctcaaacacatcaatcaaaattgatttctttctactatcatcattttgtcaatcatagggaaattgtttactgagatgaaacatacacaaaaaagttacgtttctatactttaataaaatatatgctttttttttttaaatccaagcaacactgtcaaaaggcaacaagtaaggaacagttcctgcccctgaaacatgagtatggcttctatcacagctggcccccagttttaaagtatacaactatgtagcaataagtgaccaaactttcagaaactagagaactggaagtcccacctaaaagtaacactttggttacagaaagagcctgctgcttgacttctaaagagggagggaaagagcagagagctgcctgacgtaattcctttctttgatacactactctaagct

SEQ ID NO: 334453 - DNA, 1015 bp, Homo sapiens
tcccagctacttgggaggctgaggcaggagaatggcctgaacctgggaggcggagcttgcagtgagctgagattgtgccactgcactccagcctgggcgaccgagggggactccctttccaaaaaaaaaaaaaagaaaagaaactacatctcaataataataataatttcaattataggttggaatttagagttcggttacatttactattggatgtgatcctttaaaaactcaagtagaggcttttccagcccattcataacattagaagttgggccgcctgtccagaggagaagctttcaagtaacactgaggctgattaaatacttttgtaaaataaagaataaatcacaagctcattggcacttgaaacttagcattgcagtgcagatgcagcagaaaatacttgtagcagttttctcagtgaaagagaaactagtcaagtagcttagagacattaaaacaagccacaagccctttgtgctagagatcatggttaaaagtcccctgaagatgtttttccacagtagaaattttgtttatatttatgtctgagagtgaaaaaagaaaatggaatcaataagtaaccatgttctgcaggagtttgaggttttgttgttacattgggatgtagtgagagaagaaaacgtattaattcttttctgttggtactttcttgaattacatttttaataaacttattgtgagattctgaacattgctcctgtgataatttctgaagtgctgatgagtagaaggttttctggttagacttctgttcagcacatctgagcttcgagattatttgtagttctcctggggcttttaaaatctctttgtatataatagataaatgctagtttcccatcagagaaggatttctttttccttttgtctgattgagcaagtgtcttgagattaagaaaatggatgtcagtgaattcaagtgttgtgctctgtcagtttgcagcaggtgaccagagagcaaaaacaccagagtagattctgtccctac

SEQ ID NO: 334454 - DNA, 631 bp, Homo sapiens
gagttattgttaaagtaaatgaattaactaacatttgttaaacacttaggaaagtacttgatccgtagtaaatatctaccatagtcaccagtatttatcatgagtgcctaatttaataataccctccaatatctaagaaaatctgagccttacatttttatgactccttgttctgctaaacaggtcagtgatttttaaatactctcctggatcttagaaacacccaaaacgtttaggttaaacaatcctaccttctccgtgaccctgtataacactatcagagtaagaattcagtaagcattagatttattcagtggcttagtttaccattagagtattctctttatatctcagtgtacttctatgtgtaatacacaaatgacatgttgtcagaagttatgtatgctgatcagagtcccaagctaagaacacagactaaataccatgtaactttcagcttgatttgaaataaacaagtatgaaagttacctagattgatttgacgtagagctgtgtagttgtcctttctatactctgagcctacaacatgccaatcacccaggaccctagagttttatgaaattagaaaaatgcctgaaatggtattttgcattgctctaagtctacagat

SEQ ID NO: 334455 - DNA, 267 bp, Homo sapiens
cactgggaaaattactggagcccacagctgcaacagcacatccccaagggaacatgctggagagtggcaacttctcctatctggttttaaacgtccccaactcctatacattcccttcccaggccccttccaggcagaagaggggactgcagtttccatactgctcacacaaaattaagcatctctttccagccagctcccaacagcctccctggtaagctggaaaatcagcttgggggatctgagttaagaagaacaacaagaaga

SEQ ID NO: 334456 - DNA, 385 bp, Homo sapiens
tcatctcatctcatgagcataaactcaaaagtttgatccaagggatcatgaatatcaaagactcttctattacctgggaaattccaaggatatagattctgtcttccaggaaccaggttcaaaggccagttaaattctttattatgcaacaaaagatttccctgaaaccagacttagaagtcttgaaagagatgggggattcaatttccacacaatccctgggctctagaacaaaggctgtcatcactgtcctcccctggtccaccattttgggttgtggtccctctctctccttgggaactttttcaagaatcagtattcagtcttccaggggctcttcattttacttctataccttgagatttatcacctgacggtgcctatt

SEQ ID NO: 334457 - DNA, 1351 bp, Homo sapiens
gcacaaaggctcattcaacaaacatttacagactgtctggcgttagtaacactgtagtgatcaagacatggcattgttgtccggaagcactagcagaggagttgccagattcaggctcgtgtcctgccctgccaccttcaagccatgtgacttggggcagagccacttcctctctatgggcctcacagattcatctgtaaaaaaggacccttgccccaatcccacacagaacctatgaagctaatggagtagaaaaggttttgcaaaccaaaatacataggataaatataggggcataagctggctatttagaatataataataataatgactttctgagtgcttgctatgtgcgaggcatcattttaaggatgttacatgcctcatctcgtttaattctcataacaccagttgggcattatttttaatattcctgatttacagatgagaaactggagggcaagagaaacttaagagttcagtctcccagcaagttagtggtagagctggaacttaactccatgttgtctgactccaagtccaacacactgtgcacgccactctgcccttgggaatctttcccttcagacagctctcttggccctaccttaaattctaattgctagatcttcctggaattgtcccctgacttactgcccccgatctggcgccagggcccagctgcctgcttctacctcctactttctgcaccatctcagggctcagccttgtctgtccaggggcccagaactgtgtccattctgcaggtcctcagtggcctgacctctgattctggtccaggcatggcactagatctggacttctgcctaccaagggacaggtgagaaaagaaactcgctgactttcccctgccgctcccacacctgcatcctgctgaggctgccagcagcctggttccttggtactgcaccacaaggcacgttcccagatgcacctgcagttccagaatgtggcccagcagcaggcttcccaagggcagcttccgggctcaatgcttcctttccccttaacagccactaacccctatgaatcctagcatcattctgggaagttctcccttaaagcctcttattctctcattgttctgtctttcccagggcaaagcctcacctccaccttcacactaaaaacagaggccaccactagggacatcagtcattcaaaacgaggcaccctctgctcctcccttcctctcctgtatccttggccagtcccgtcacctgcctccaggaggagtggttcctctccctgaccaaggcaaactcagccctctcttcctccacattcaggctctcctcacttgccacccgctctctgggccacctcggct

SEQ ID NO: 334458 - DNA, 293 bp, Homo sapiens
attatcttgatctgggtggtagttatggaggtgtgtaaaacacataaaaacacttcagtgtgtgtaagacttagctcaatttaaaaatgaagaacatggctgggcatggtggctcacgcctgtaatcccagcactttgggaggccaaggtgccggatcacctgaggtcaagagtttgagaccagcctgaccaacgtggagaaacctcatctctaataaaaatacaaaattagccaggcgtggtagcacatgcctgtaatcccagctattcaggaggctgaggcaggagaatca

SEQ ID NO: 334459 - DNA, 486 bp, Homo sapiens
aacaaaaaaaacccagggcaacatgccatgaaccacccgggtcccagagcacccagatgtacagctggctgctgtagccatgcccacaaaccgcccgggtccctggaatacccagggcaacatgccgtgaaccgcccgggtccccagagcacccagatgtacagctggctgctgtagccatgcccacgaaccacccgggtccctggaatacccggggcaacatgccgagaaccgcccggggttcctgacaccagcctcccaccgtgacaccagacgcaaaggctccatgtgcacgcagtgccagcctggtcccccaggaccttcaagacaagctcggcagcaactgcttcctttcagaccaacatgggaggactttctgcccatgttctgtggcaacgattacagcgcttccttctaaataacagatgaaaaaatcccacagagactatttaaaaatattcccctcctcagtttaaagacgttata

SEQ ID NO: 334460 - DNA, 450 bp, Homo sapiens
agtggctcacgcctgtaattccagcactttgggaagccaaggtgggcggatcacttgaggttaggagctggagaccagcctgaccaatgatggtgaaacctcatctctactaaaaatacaaaaattagccaggcgtggtggcgggcgcctgcaatcccagctacttgagaggctgaggcggagaatcgcttgaacccacgaggtggaggttgcagtgagccgagatcatgccactgtactccagcctgagtgacagagctagactctgtctcaaaaatgaatgaatgaatgaatgaatggagtgactgaatccataggacgaatacttttgtatttgtatacacagacagataggtaaaataactttgttattctctagcctcagataattataaataattttcctactgccactataaaaatgactggcagaacactcaaagataatgc

SEQ ID NO: 334461 - DNA, 480 bp, Homo sapiens
cccataaatatgcacaattattatgtcaactggaaacatgacttcatcttaaaaaggcacttgatgcttgtaaggccccctaataggtgtgaggagatccatgtgagtcagccacagccctacccctacagactcccaaatccaggttttatcatggcgagggtctttgtgtaggagaattaggtggaagtggaaccaagagtcagggaatttatatcctcacttcagctcctttataaggaccaatgccaagacacataattatatcttcatttttctaagaataagataggacttaattacctcaaaggaatgacatgaaaactaactaccaaagccctctaatgtctttaaaacttgctacattcacgcatggggttattactgtcactgtgtgtgcgtgcagacctggctgcaggaggggcacagagacaaaagcatggggctccccatcctgccgtctccccgcggacttacctg

SEQ ID NO: 334462 - DNA, 434 bp, Homo sapiens
gtggggaagagggatgactccaagtggcggtaatggtggtggccacgttgaagtctgcgtgataactatggtgctggagttgtttctagtgtcatgatttcaaacttgggttaagcagctttcttcaattttcactgactctccagtctctgccccctgcccacaaacttcctgcacccatccctgcccctttatcactcaccctacccccagtaagtacaaggagaagggctgagattagatctgtggggaggggcgctggggaggctgcagaccctgcctgggcccagacagggttcactagtgtgcctgtgtgtatttgcatgtgtgtgggcctgtgggtgtgtatgtgtaaaagccccaggcagccacagagccaggagtcgctaatagtttacattagaaaggtgaatgtcagccaaaaataaaattct

SEQ ID NO: 334463 - DNA, 1276 bp, Homo sapiens
cgcttgcgcagaagagactcccgggctcttaacgtcgggtatcaggagtttcttcccggagcaaggacccccaagacggaagaggatggccgcggcggctctgaggagattttggtcccggcgccgcgcagaggcgggcgacgcggtagtggcgaagccgggagtgtgggcgcggctggggtcctgggcccgcgcgctgctccgggactacgccgaggcctgcagggacgcttcggcggaggctagggcccggccggggcgcgccgctgtgtatgtgggtctgctgggcggcgcggcggcctgcttcacgctggcgcccagcgagggtgccttcgaggaggcgctgctggaggcgtcggggaccctcctgctgctggcgccggccacccgcaaccgcgagtccgaagccttcgtgcagaggctgctctggctgcggggccgtggccgcctgcgctacgtcaacctggggctctgctcgctggtgtacgaggcgcccttcgacgcccaggccagcctctaccaggcgcgttgccgctacctgcagccccgctggaccgacttccccggccgggtcctggacgtgggcttcgtgggtcgctggtgggtgctgggggcctggatgcgcgactgcgacatcaacgacgacgaattcctgcacctgccggcgcatttgcgggtggtcgggccccagcagctgcattccgagaccaacgagcggctcttcgatgagaagtacaagcctgtcgtgctcaccgacgatcaggtggaccaggcgctgtgggaggagcaggtcttgcagaaggagaagaaggacaggctcgccctgagccaggcccactcgctggtgcaggcggaggccccgagatgaaaccctgaggcccccgagtcctggcaaactgcttgcctggggtggtgcagttctgagagcagaacgacttgacacatgttcatcactggcagagctggtcatgagccttttatataagcctttttcatcgggcctcagaggccctccttaaggaggtaccacattggtcagctgacttgcaaactcttctaaggccacttagattttctttttcaagtttgggttgtggcctggcatggtgatgtctgtaatcccagcagtttgcaaactgaggcaagagaatcgcttgaggccaggagtttgaggccagctagagtgacatagcaagactccgatgctacaaaaaagaataataatagtaattaactaaataaaatttgagctgaaatgtttttattctatgaccta

SEQ ID NO: 334464 - DNA, 846 bp, Homo sapiens
ataaggctgtagaaaagacctaaaggattaagaaaatattatgccacattttctttggtggctttacagttttttttctttaaacctttatcttaattatgtctgaatttggggggcagtatgatgtgaggtaggtagctttatcatttggtacggtatagacagtagaggggtctctttactaaatttccatatagaccgggggtggtttctgaatcctctagtctatttcatggacttaacggtcccaaaccagatatattaatatttccttatggtagctgtacctttttaatactggggaaggcaactccctacccagcggaggaccatcgtggcaacgatgtgcctcacctgcagaacagctgagacagatgatgtgcaaagtgttttctcactggatttgcacaagtttggggagcctttctgccccccgtctttgttctttattagctgaagctaattcagagccacctgggtccgggagttggggacagcagaacgacttgacacatgttcatcactggcagagctggtcatgagccttttatataagcctttttcatcgggcctcagaggccctccttaaggaggtaccacattggtcagctgacttgcaaactcttctaaggccacttagattttctttttcaagtttgggttgtggcctggcatggtgatgtctgtaatcccagcagtttgcaaactgaggcaagagaatcgcttgaggccaggagtttgaggccagctagagtgacatagcaagactccgatgctacaaaaaagaataataatagtaattaactaaataaaatttgagctgaaatgtttttattctatgaccta

SEQ ID NO: 334465 - DNA, 1427 bp, Homo sapiens
cgcttgcgcagaagagactcccgggctcttaacgtcgggtatcaggagtttcttcccggagcaaggacccccaagacggaagaggatggccgcggcggctctgaggagattttggtcccggcgccgcgcagaggcgggcgacgcggtagtggcgaagccgggagtgtgggcgcggctggggtcctgggcccgcgcgctgctccgggactacgccgaggcctgcagggacgcttcggcggaggctagggcccggccggggcgcgccgctgtgtatgtgggtctgctgggcggcgcggcggcctgcttcacgctggcgcccagcgagggtgccttcgaggaggcgctgctggaggcgtcggggaccctcctgctgctggcgccggccacccgcaaccgcgagtccgaagccttcgtgcagaggctgctctggctgcggggccgtggccgcctgcgctacgtcaacctggggctctgctcgctggtgtacgaggcgcccttcgacgcccaggccagcctctaccaggcgcgttgccgctacctgcagccccgctggaccgacttccccggccgggtcctggacgtgggcttcgtgggtcgctggtgggtgctgggggcctggatgcgcgactgcgacatcaacgacgacgaattcctgcacctgccggcgcatttgcgggtggtcgggccccagcagctgcattccgagaccaacgagcggctcttcgatgagaagtacaagcctgtcgtgctcaccgacgatcaggtggaccaggcgctgtgggaggagcaggtcttgcagaaggagaagaaggacaggctcgccctgagccaggcccactcgctggtgcaggcggaggccccgagatgaaaccctgaggcccccgagtcctggcaaactgcttgcctggggtggtgcagttctgagtgtgcctcacctgcagaacagctgagacagatgatgtgcaaagtgttttctcactggatttgcacaagtttggggagcctttctgccccccgtctttgttctttattagctgaagctaattcagagccacctgggtccgggagttggggacagcagaacgacttgacacatgttcatcactggcagagctggtcatgagccttttatataagcctttttcatcgggcctcagaggccctccttaaggaggtaccacattggtcagctgacttgcaaactcttctaaggccacttagattttctttttcaagtttgggttgtggcctggcatggtgatgtctgtaatcccagcagtttgcaaactgaggcaagagaatcgcttgaggccaggagtttgaggccagctagagtgacatagcaagactccgatgctacaaaaaagaataataatagtaattaactaaataaaatttgagctgaaatgtttttattctatgaccta

SEQ ID NO: 334466 - DNA, 446 bp, Homo sapiens
ttgcataaaagtaccttttgggaaaggtaaaacgcagcaataaacatcctgagattagcaacatgaaattattttagatgacaggattatttgacatagaaaggatataatcaatgtgttcctattcctgataagcctgattatattcttagcaggttgttgttgggtatgattaggtattctctttagtaaagaaacataagagaactccagagtttatccatctatttatttctgtgtggttgaggtaaacagcttttacagactatattatgtaaagatatgccttacttggcagcaaaaatgcaatatgaagaaaataaacctagttttatccaattcagaggaaaacaagtacatttaaaaggataaaatctggccaggtgcagtggctcatgcctgtaatcccagcactttgggaggccgaggcgggcagatcacctgag

SEQ ID NO: 334467 - DNA, 493 bp, Homo sapiens
aatcactagtaggaagatgaatgtctattataaactcctgattactcatctcaaaaaaatcctagctattgcccagtgaccctaccatttatctctattagctcactctctcattctgctcaaagactttttcacatgttctagacattccttgaacatcttcctcttcctcttatctccccttactcttagccgatgactttggctttctctttggagggaacagaagccatatagcaggcgggtcctttgtcccactctctaagaatgcaattctatctgcacgtgtactcaattcctttttccctcctgtttcaatggagagatgtcccttgttttggagggcattgccctcttatgagatctgacaccctgctcttcctccaactcatgatcaaccatgtttatagccacacccagggccttgctatcctgggagccaggaaagtccaactcacagattttaaacccagtcattccattccttccccca

SEQ ID NO: 334468 - DNA, 500 bp, Homo sapiens
tgatgccctaaattaaaaaaatttttcttcaaacatgaacagaaaggtactgaactcctatgtacccatcacttagtttcagcagttatcactcagccaatcttgtttcatctgtactactcctcccccagttggattatttaggcttgtgtcactgatgtcattcgtctgtaaatatttcagtatctacttttgaagtataaagattttacaaaaatatccacaatatatagtgagttaattgtagtttgaatcttgtttaggaaaatttcttactgtgatgctataaaagtattcttttttattttctcctaaaatcttaaaattttaatctcttataattaagtccctaatccaaatgaaagttgtctcaataacatttactgaatagttcattctttttccattgatctgccataccatttctgacatgtattaaataatgctgcagcagatgtcttgtacatgtctgttaggctcttgtgtggatttctcttggg

SEQ ID NO: 334469 - DNA, 295 bp, Homo sapiens
aagagatgctagaagtgtggaattttatgtgaaatctcccaattttcagaagttggcttacatttttaaaacagtttataggacaaacaaaacaagtttgcagactggaattggctgcaggccaccaagttgcaggttctgacagctccactgtcactgggaggcatctggagctgattccaagctgctacgcccagcatcaggaagtgtcaactgtatgttcaccttccagctttcggctgccacacgctgtgtgctctagttacatgctctgacccgccacagaccacggtgg

SEQ ID NO: 334470 - DNA, 541 bp, Homo sapiens
ctctaggttgcttgtaagttttagaaattatgaataaaaagctgctataaacactggtgtgcaagtttttgtgttgacataagtctgaagttcctttgggtgaatgtcaaaggacacaactgctggattgtacagtaagagtaggtttgctcttgcaagaaactgcccacctgttttccaaacaggctgcacctatttttatattttcaccagcaacaaataagagttcctgttgctccacatcctcccagcatttgatgtgtggcagtgttatgaattttggccattctaataggtgtgtggtgcaaggatgcatcttcatcattgcaaatcagtggttttcaatatcggcatcactgaggaatttgttaaaaatgcagattcctgatccaaccctaaaccaactgaatgataaacatgggatagaagccagtcaggatcttttcacaagtcctccaggtgattctgatatacactgtcattactgaagtacgttaaagtttaagaataagtgcactaaggcaatcaatccatgaaaatc

SEQ ID NO: 334471 - DNA, 179 bp, Homo sapiens
ttaccaattcctgaccagaaaggatgccaagagatgctaaaaattgtttccaggaaaaagtaggacttgaatctcatggggatgaggctgagacttcttccaaggagcaatcagcttgcttcattattatgtctttctcaggagtttttcctgatctccgctcatcatggggaaaggca

SEQ ID NO: 334472 - DNA, 180 bp, Homo sapiens
ataggccgattggttttgactatctaggtttaccaataggtgaaaatcagattgtttttcccaagatgaaattatcttttcctggcttccttccgagttaagatctccagcttctggtccacattgcgtgagttaaaatcttggctctatcagttgctagcactgcgttactttgacgcg

SEQ ID NO: 334473 - DNA, 464 bp, Homo sapiens
agcgatctagaggatcccagtgcctcaccgcagaatgaaaaaggaaatgaggcgttaagtggccacagtaatttgtatttaaaaataaacttccttctgctgagggtttattagacacacaagtcaaaggaagtttaaacatttcctttaacaaaataggcaattatttttcagagacaatttaggtgtaaccttaacaggaaccacaaggtagaacagattcttctattatttgcacttatcaaggacagggattttggaagtgatcagagagccagcaaagagaaaaggttatttttgtagggagacagttacataagagagaacacgagtccacagatctgctcatctgaaggagttgggaaaatccagacagtgcatggacaggtggcacagcccaggtcactaccagcatggttgaagatgccttagacccattagacaggacaaagaaacgggtgctg

SEQ ID NO: 334474 - DNA, 313 bp, Homo sapiens
tccgtttttgtacaaatcccagtactgattccattcattttatagccctgcacttgtttttctttcactcccactttccatttgtgccactctgactcaccagatgagtctttgtaagcctcctaaaatccctctggaacaaggcgaggcacagaaaatagttttatagctgggcaatggatctgaagtggatctgaaagtaccttgtaaaaactgcatgggcataaactgctagtgtacaaaatgtgcaggtatgtaagacacctttcaatttcacagcgatttctttttagtgtgtgtgtgtgtgtgtgtg

SEQ ID NO: 334475 - DNA, 2273 bp, Homo sapiens
tcagaggagcaggaactggaaccctggccgagtccgaaaaaagccagatctggaaggtggctgcggaacggttttaagcggaagatggaggagccggaggaaccggcggacagtgggcagtcgctggtcccggtttatatctatagtcccgagtatgtcagtatgtgtgactccctggccaagatccccaaacgggccagtatggtgcattctttgattgaagcatatgcactgcataagcagatgaggatagttaagcctaaagtggcctccatggaggagatggccaccttccacactgatgcttatctgcagcatctccagaaggtcagccaagagggcgatgatgatcatccggactccatagaatatgggctaggttatgactgcccagccactgaagggatatttgactatgcagcagctataggaggggctacgatcacagctgcccaatgcctgattgacggaatgtgcaaagtagcaattaactggtctggagggtggcatcatgcaaagaaagatgaagcatctggtttttgttatctcaatgatgctgtcctgggaatattacgattgcgacggaaatttgagcgtattctctacgtggatttggatctgcaccatggagatggtgtagaagacgcattcagtttcacctccaaagtcatgaccgtgtccctgcacaaattctccccaggatttttcccaggaacaggtgacgtgtctgatgttggcctagggaagggacggtactacagtgtaaatgtgcccattcaggatggcatacaagatgaaaaatattaccagatctgtgaaaggtacgaacctcctgccccaaatccaggcctgtagaagcagctgccgcagcttgtcttccccatttgcatagccttgtctgaaaactagactgctgaatactgaaggatcaggtttctcatcaagaaaactgcattttaaatgaatatcttgtatgtttatagggaagttactaatgtagtataaagagatgcctgtcctccccctcctttctggataagagattttatactttcacaaaacgaaaaattaatgatttgcagtgtagcaaacagtactgttacagtggttagggaaactttcccaaaagcaatctggagtgacatttcattcatgtattcatttaatgactatttattgaatgcctactatgtataaagtattgattctaccctcgaggaagttagtggaaatttttaaatgttagataaataaatagagattgattttcatattcacacacatttaaataaataaaacatagaaaattgtaagaaccataagagatagaatgctgtgggtattcaaagagagaaaatacttcagaaaaaggcgtaattgaggaggtaacatttgatctggtttctaaagggtagctaattactctatctttacaaagtgtgtgaatgtatatgagtgtttataaaatctgggtcaagtttgaatatacagagattgtagggaaggatgttctacacacagggtacagcaagatcaaagttgggagagactgagctatgtacaaagaatagcagtggttttagtttggctggactgtaaagtgcatggaggagaagttgcaaagaagattggaaacctgggtgggaaccacatcacggaagagctggaattcttagctatgaaaatttgtaccatattctgtaaacattttgggagccactgaaggttttagaatgagggaatcataagatcaaagcttgcttgggaagattaacactcttcccagtaaagttttggcaacagcatctgctgttatattgacataatgtgggtaaagtggctgacatagtatctgatgcataggagctcagtaagtcatggaagcagatatactgtagtggtttagagcaaaaactctggtgcctggatgcctgggttcaaaaaccagctctgccacttaatagctgtgtgattttgtacagatttcttaacctctctgtatggcagtttccccatctgtaaaataggattaaaaataatacctgttatgaattattatgagggtcaaatgagttaagacatgtaaaatacatagaacagtgctctattctgaataaagttctcaataaatgttagctgttgtcatcattattatcattctcattcatggaggagataaaatttaagctagcctttaaagaatggctgtgatgtagacatgtagaaaggtaactttcaggcacaagtaagtacacgacaaaaggcatacttgc

SEQ ID NO: 334476 - DNA, 1973 bp, Homo sapiens
tcagaggagcaggaactggaaccctggccgagtccgaaaaaagccagatctggaaggtggctgcggaacggttttaagcggaagatggaggagccggaggaaccggcggacagtgggcagtcgctggtcccggtttatatctatagtcccgagtatgtcagtatgtgtgactccctggccaagatccccaaacgggccagtatggtgcattctttgattgaagcatatgcactgcataagcagatgaggatagttaagcctaaagtggcctccatggaggagatggccaccttccacactgatgcttatctgcagcatctccagaaggtcagccaagagggcgatgatgatcatccggactccatagaatatgggctaggttatgactgcccagccactgaagggatatttgactatgcagcagctataggaggggctacgatcacagctgcccaatgcctgattgacggaatgtgcaaagtagcaattaactggtctggagggtggcatcatgcaaagaagtacgaacctcctgccccaaatccaggcctgtagaagcagctgccgcagcttgtcttccccatttgcatagccttgtctgaaaactagactgctgaatactgaaggatcaggtttctcatcaagaaaactgcattttaaatgaatatcttgtatgtttatagggaagttactaatgtagtataaagagatgcctgtcctccccctcctttctggataagagattttatactttcacaaaacgaaaaattaatgatttgcagtgtagcaaacagtactgttacagtggttagggaaactttcccaaaagcaatctggagtgacatttcattcatgtattcatttaatgactatttattgaatgcctactatgtataaagtattgattctaccctcgaggaagttagtggaaatttttaaatgttagataaataaatagagattgattttcatattcacacacatttaaataaataaaacatagaaaattgtaagaaccataagagatagaatgctgtgggtattcaaagagagaaaatacttcagaaaaaggcgtaattgaggaggtaacatttgatctggtttctaaagggtagctaattactctatctttacaaagtgtgtgaatgtatatgagtgtttataaaatctgggtcaagtttgaatatacagagattgtagggaaggatgttctacacacagggtacagcaagatcaaagttgggagagactgagctatgtacaaagaatagcagtggttttagtttggctggactgtaaagtgcatggaggagaagttgcaaagaagattggaaacctgggtgggaaccacatcacggaagagctggaattcttagctatgaaaatttgtaccatattctgtaaacattttgggagccactgaaggttttagaatgagggaatcataagatcaaagcttgcttgggaagattaacactcttcccagtaaagttttggcaacagcatctgctgttatattgacataatgtgggtaaagtggctgacatagtatctgatgcataggagctcagtaagtcatggaagcagatatactgtagtggtttagagcaaaaactctggtgcctggatgcctgggttcaaaaaccagctctgccacttaatagctgtgtgattttgtacagatttcttaacctctctgtatggcagtttccccatctgtaaaataggattaaaaataatacctgttatgaattattatgagggtcaaatgagttaagacatgtaaaatacatagaacagtgctctattctgaataaagttctcaataaatgttagctgttgtcatcattattatcattctcattcatggaggagataaaatttaagctagcctttaaagaatggctgtgatgtagacatgtagaaaggtaactttcaggcacaagtaagtacacgacaaaaggcatacttgc

SEQ ID NO: 334477 - DNA, 442 bp, Homo sapiens
tcagaggagcaggaactggaaccctggccgagtccgaaaaaagccagatctggaaggtggctgcggaacggttttaagcggaagatggaggagccggaggaaccggcggacagtgggcagtcgctggtcccggtttatatctatagtcccgagtatgtcagtatgtgtgactccctggccaagatccccaaacgggccagtatggtgcattctttgattgaagcatatgcactgcataagcagatgagaagctggatgagagcagtcaccagtttgtagggcaggaggcagctgagaggcagggtttgggcctcaggaccatccaggtggagccctgggagagagggtactgatcagcagactgggaggtggggagaagtccgctggtgttgttttagtgttatatatctttggtttttttaataaaatctttgaaaaccta

SEQ ID NO: 334478 - DNA, 1752 bp, Homo sapiens
ccatgggctttgggggtgggggtgggggcggtggacgaaagagcgttaggaagcggagaggacactgggctgggggaaatcttcagaaatttcgagtagctgtatcagatacctaaagctgtatcagaaggaagtgttctcatatcgtttctgagagcgcagcatgtctcttcgggacgtccaatggacaggccagtatggtgcattctttgattgaagcatatgcactgcataagcagatgaggatagttaagcctaaagtggcctccatggaggagatggccaccttccacactgatgcttatctgcagcatctccagaaggtcagccaagagggcgatgatgatcatccggactccatagaatatgggctaggttatgactgcccagccactgaagggatatttgactatgcagcagctataggaggggctacgatcacagctgcccaatgcctgattgacggaatgtgcaaagtagcaattaactggtctggagggtggcatcatgcaaagaaagatgaagcatctggtttttgttatctcaatgatgctgtcctgggaatattacgattgcgacggaaatttgagcgtattctctacgtggatttggatctgcaccatggagatggtgtagaagacgcattcagtttcacctccaaagtcatgaccgtgtccctgcacaaattctccccaggatttttcccaggaacaggtgacgtgtctgatgttggcctagggaagggacggtactacagtgtaaatgtgcccattcaggatggcatacaagatgaaaaatattaccagatctgtgaaagtgtactaaaggaagtataccaagcctttaatcccaaagcagtggtcttacagctgggagctgacacaatagctggggatcccatgtgctcctttaacatgactccagtgggaattggcaagtgtcttaagtacatccttcaatggcagttggcaacactcattttgggaggaggaggctataaccttgccaacacggctcgatgctggacatacttgaccggggtcatcctagggaaaacactatcctctgagatcccagatcatgagtttttcacagcatatggtcctgattatgtgctggaaatcacgccaagctgccggccagaccgcaatgagccccaccgaatccaacaaatcctcaactacatcaaagggaatctgaagcatgtggtctagttgacagaaagagatcaggtttccagagctgaggagtggtgcctataatgaagacagcgtgtttatgcaagcagtttgtggaatttgtgactgcagggaaaatttgaaagaaattacttcctgaaaatttccaaggggcatcaagtggcagctggcttcctggggtgaagaggcaggcaccccagagtcctcaactggacctaggggaagaaggagatatcccacatttaaagttcttatttaaaaaaacacacacacacaaatgaaatttttaatctttgaaaattatttttaagcgaattggggaggggagtattttaatcatcttaaatgaaacagatcagaagctggatgagagcagtcaccagtttgtagggcaggaggcagctgagaggcagggtttgggcctcaggaccatccaggtggagccctgggagagagggtactgatcagcagactgggaggtggggagaagtccgctggtgttgttttagtgttatatatctttggtttttttaataaaatctttgaaaaccta

SEQ ID NO: 334479 - DNA, 1483 bp, Homo sapiens
tcagaggagcaggaactggaaccctggccgagtccgaaaaaagccagatctggaaggtggctgcggaacggttttaagcggaagatggaggagccggaggaaccggcggacagtgggcagtcgctggtcccggtttatatctatagtcccgagtatgtcagtatgtgtgactccctggccaagatccccaaacgggccagtatggtgcattctttgattgaagcatatgcactgcataagcagatgagagatgaagcatctggtttttgttatctcaatgatgctgtcctgggaatattacgattgcgacggaaatttgagcgtattctctacgtggatttggatctgcaccatggagatggtgtagaagacgcattcagtttcacctccaaagtcatgaccgtgtccctgcacaaattctccccaggatttttcccaggaacaggtgacgtgtctgatgttggcctagggaagggacggtactacagtgtaaatgtgcccattcaggatggcatacaagatgaaaaatattaccagatctgtgaaagtgtactaaaggaagtataccaagcctttaatcccaaagcagtggtcttacagctgggagctgacacaatagctggggatcccatgtgctcctttaacatgactccagtgggaattggcaagtgtcttaagtacatccttcaatggcagttggcaacactcattttgggaggaggaggctataaccttgccaacacggctcgatgctggacatacttgaccggggtcatcctagggaaaacactatcctctgagatcccagatcatgagtttttcacagcatatggtcctgattatgtgctggaaatcacgccaagctgccggccagaccgcaatgagccccaccgaatccaacaaatcctcaactacatcaaagggaatctgaagcatgtggtctagttgacagaaagagatcaggtttccagagctgaggagtggtgcctataatgaagacagcgtgtttatgcaagcagtttgtggaatttgtgactgcagggaaaatttgaaagaaattacttcctgaaaatttccaaggggcatcaagtggcagctggcttcctggggtgaagaggcaggcaccccagagtcctcaactggacctaggggaagaaggagatatcccacatttaaagttcttatttaaaaaaacacacacacacaaatgaaatttttaatctttgaaaattatttttaagcgaattggggaggggagtattttaatcatcttaaatgaaacagatcagaagctggatgagagcagtcaccagtttgtagggcaggaggcagctgagaggcagggtttgggcctcaggaccatccaggtggagccctgggagagagggtactgatcagcagactgggaggtggggagaagtccgctggtgttgttttagtgttatatatctttggtttttttaataaaatctttgaaaaccta

SEQ ID NO: 334480 - DNA, 776 bp, Homo sapiens
tcagaggagcaggaactggaaccctggccgagtccgaaaaaagccagatctggaaggtggctgcggaacggttttaagcggaagatggaggagccggaggaaccggcggacagtgggcagtcgctggtcccggtttatatctatagtcccgagtatgtcagtatgtgtgactccctggccaagatccccaaacgggccagtatggtgcattctttgattgaagcatatgcactgcataagcagatgaggatagttaagcctaaagtggcctccatggaggagatggccaccttccacactgatgcttatctgcagcatctccagaaggtcagccaagagggcgatgatgatcatccggactccatagaatatgggctaggttatgactgcccagccactgaagggatatttgactatgcagcagctataggaggggctacgatcacagctgcccaatgcctgattgacggaatgtgcaaagtagcaattaactggtctggagggtggcatcatgcaaagaactcatcttccacatgaatgagaacatacgacgtttggttttccattcctgagttacttcacttagaataatagtctccaattccatccatgttgctatgaatgccattatctcattcctttttatggctgagtagtattccatggtgtatatataaaacattttctttatccacttgttgattgatgggcatttgggctggttccatatttttgcatttgcaaattgtgctgctataaacatgcgtgtgcaagta

SEQ ID NO: 334481 - DNA, 1756 bp, Homo sapiens
tcagaggagcaggaactggaaccctggccgagtccgaaaaaagccagatctggaaggtggctgcggaacggttttaagcggaagatggaggagccggaggaaccggcggacagtgggcagtcgctggtcccggtttatatctatagtcccgagtatgtcagtatgtgtgactccctggccaagatccccaaacgggccagtatggtgcattctttgattgaagcatatgcactgcataagcagatgaggatagttaagcctaaagtggcctccatggaggagatggccaccttccacactgatgcttatctgcagcatctccagaaggtcagccaagagggcgatgatgatcatccggactccatagaatatgggctaggttatgactgcccagccactgaagggatatttgactatgcagcagctataggaggggctacgatcacagctgcccaatgcctgattgacggaatgtgcaaagtagcaattaactggtctggagggtggcatcatgcaaagaaagatgaagcatctggtttttgttatctcaatgatgctgtcctgggaatattacgattgcgacggaaatttgagcgtattctctacgtggatttggatctgcaccatggagatggtgtagaagacgcattcagtttcacctccaaagtcatgaccgtgtccctgcacaaattctccccaggatttttcccaggaacaggtgacgtgtctgatgttggcctagggaagggacggtactacagtgtaaatgtgcccattcaggatggcatacaagatgaaaaatattaccagatctgtgaaagtgtactaaaggaagtataccaagcctttaatcccaaagcagtggtcttacagctgggagctgacacaatagctggggatcccatgtgctcctttaacatgactccagtgggaattggcaagtgtcttaagtacatccttcaatggcagttggcaacactcattttgggaggaggaggctataaccttgccaacacggctcgatgctggacatacttgaccggggtcatcctagggaaaacactatcctctgagatcccagatcatgagtttttcacagcatatggtcctgattatgtgctggaaatcacgccaagctgccggccagaccgcaatgagccccaccgaatccaacaaatcctcaactacatcaaagggaatctgaagcatgtggtctagttgacagaaagagatcaggtttccagagctgaggagtggtgcctataatgaagacagcgtgtttatgcaagcagtttgtggaatttgtgactgcagggaaaatttgaaagaaattacttcctgaaaatttccaaggggcatcaagtggcagctggcttcctggggtgaagaggcaggcaccccagagtcctcaactggacctaggggaagaaggagatatcccacatttaaagttcttatttaaaaaaacacacacacacaaatgaaatttttaatctttgaaaattatttttaagcgaattggggaggggagtattttaatcatcttaaatgaaacagatcagaagctggatgagagcagtcaccagtttgtagggcaggaggcagctgagaggcagggtttgggcctcaggaccatccaggtggagccctgggagagagggtactgatcagcagactgggaggtggggagaagtccgctggtgttgttttagtgttatatatctttggtttttttaataaaatctttgaaaaccta

SEQ ID NO: 334482 - DNA, 740 bp, Homo sapiens
tcagaggagcaggaactggaaccctggccgagtccgaaaaaagccagatctggaaggtggctgcggaacggttttaagcggaagatggaggagccggaggaaccggcggacagtgggcagtcgctggtcccggtttatatctatagtcccgagtatgtcagtatgtgtgactccctggccaagatccccaaacgggccagtatggtgcattctttgattgaagcatatgcactgcataagcagatgaggatagttaagcctaaagtggcctccatggaggagatggccaccttccacactgatgcttatctgcagcatctccagaaggtcagccaagagggcgatgatgatcatccggactccatagaatatgggctaggttatgactgcccagccactgaagggatatttgactatgcagcagctataggaggggctacgatcacagctgcccaatgcctgattgacggaatgtgcaaagtagcaattaactggtctggagggtggcatcatgcaaagaaagagagacgtgtgtgtatgtggcactttacaaggcattctgaagaaatccaagtgaaatagaaaaaagattacctaatatagtggaaagcacactgctcaaagtcaggacacctgggctctacacctagtttttctaacttggctaactgacttggactgattaccctccctaggcctcagtttcttcatcaataaaatgaacaaaggatacaactaga

SEQ ID NO: 334483 - DNA, 1678 bp, Homo sapiens
tcagaggagcaggaactggaaccctggccgagtccgaaaaaagccagatctggaaggtggctgcggaacggttttaagcggaagatggaggagccggaggaaccggcggacagtgggcagtcgctggtcccggtttatatctatagtcccgagtatgtcagtatgtgtgactccctggccaagatccccaaacgggccagtatggtgcattctttgattgaagcatatgcactgcataagcagatgaggatagttaagcctaaagtggcctccatggaggagatggccaccttccacactgatgcttatctgcagcatctccagaaggtcagccaagagggcgatgatgatcatccggactccatagaatatgggctaggttatgactgcccagccactgaagggatatttgactatgcagcagctataggaggggctacgatcacagctgcccaatgcctgattgacggaatgtgcaaagtagcaattaactggtctggagggtggcatcatgcaaagaaagatgaagcatctggtttttgttatctcaatgatgctgtcctgggaatattacgattgcgacggaaatttgagcgtattctctacgtggatttggatctgcaccatggagatggaacaggtgacgtgtctgatgttggcctagggaagggacggtactacagtgtaaatgtgcccattcaggatggcatacaagatgaaaaatattaccagatctgtgaaagtgtactaaaggaagtataccaagcctttaatcccaaagcagtggtcttacagctgggagctgacacaatagctggggatcccatgtgctcctttaacatgactccagtgggaattggcaagtgtcttaagtacatccttcaatggcagttggcaacactcattttgggaggaggaggctataaccttgccaacacggctcgatgctggacatacttgaccggggtcatcctagggaaaacactatcctctgagatcccagatcatgagtttttcacagcatatggtcctgattatgtgctggaaatcacgccaagctgccggccagaccgcaatgagccccaccgaatccaacaaatcctcaactacatcaaagggaatctgaagcatgtggtctagttgacagaaagagatcaggtttccagagctgaggagtggtgcctataatgaagacagcgtgtttatgcaagcagtttgtggaatttgtgactgcagggaaaatttgaaagaaattacttcctgaaaatttccaaggggcatcaagtggcagctggcttcctggggtgaagaggcaggcaccccagagtcctcaactggacctaggggaagaaggagatatcccacatttaaagttcttatttaaaaaaacacacacacacaaatgaaatttttaatctttgaaaattatttttaagcgaattggggaggggagtattttaatcatcttaaatgaaacagatcagaagctggatgagagcagtcaccagtttgtagggcaggaggcagctgagaggcagggtttgggcctcaggaccatccaggtggagccctgggagagagggtactgatcagcagactgggaggtggggagaagtccgctggtgttgttttagtgttatatatctttggtttttttaataaaatctttgaaaaccta

SEQ ID NO: 334484 - DNA, 830 bp, Homo sapiens
tcagaggagcaggaactggaaccctggccgagtccgaaaaaagccagatctggaaggtggctgcggaacggttttaagcggaagatggaggagccggaggaaccggcggacagtgggcagtcgctggtcccggtttatatctatagtcccgagtatgtcagtatgtgtgactccctggccaagatccccaaacgggccagtatggtgcattctttgattgaagcatatgcactgcataagcagatgaggatagttaagcctaaagtggcctccatggaggagatggccaccttccacactgatgcttatctgcagcatctccagaaggtcagccaagagggcgatgatgatcatccggactccatagaatatgggctaggttatgactgcccagccactgaagggatatttgactatgcagcagctataggaggggctacgatcacagctgcccaatgcctgattgacggaatgtgcaaagtagcaattaactggtctggagggtggcatcatgcaaagaagtaagaaaatgacctttctgttttctgactctttccttgagtcagtttctcagttatgtaaactcttatgcttattgtattgacatttacagagagacgtgtgtgtatgtggcactttacaaggcattctgaagaaatccaagtgaaatagaaaaaagattacctaatatagtggaaagcacactgctcaaagtcaggacacctgggctctacacctagtttttctaacttggctaactgacttggactgattaccctccctaggcctcagtttcttcatcaataaaatgaacaaaggatacaactaga

SEQ ID NO: 334485 - DNA, 319 bp, Homo sapiens
ctggacaattcctttagagaaggtatcaaatagctcgttaaaccggattatcttcaaaatcacttccaatcttgagattataagatcctgggacaacgagtacttctaaaaagaattttgagactcctaaagaaatgatatcttgaccaatatttaggtcctctacctcctgacactcttttcagacaactatgaagaaatttaaaaggtataaccccataaggaggagacaacaatggaggacaggtggcaacaagtttctgtataatggaaagcagacagtggacttccaaggtgagatggcagattgaacacacac

SEQ ID NO: 334486 - DNA, 529 bp, Homo sapiens
tggtaattgttaaaaaaactgctgaggcaatttcaatgcccaacgagaggggctggcataacctattagagaccacgcattccacgcagtgccctgtggcctttcaaacagcttgtggaagaactggagacccacggggtgttaaattagaaaagtaaaattccagaatatacatggtatgatcttatacagaaacaaaacaaaaggggaaatccccgcccctccaggatgtgacgttctaccgctctcggcctcctggtctcccggccctggcctctgtgtcctctcacttcccatattaactctttcagcaagtcctgccagctctgcttgcaagccacagtctgtgtctctcctcctgtggcgctgatgcctggggaagccactgtcaccactgcctacttcagcccctgcagcccactctgcccagccgccagagggaaattttcaacgttaacaggctcacgttagtagccacacaccttccccagctccctactgtgcagaggacacagagactgggtggggg

SEQ ID NO: 334487 - DNA, 398 bp, Homo sapiens
ggtgagtgaatggcaggctattggttgaatgagtaggctgatggtttcgataataactagtatggggataaggggtgtaggtgtgccttgtggtaagaagtgggctagggcatttttaatcttagagcgaaggcctataatcactgcgcccgctcataaggggatggccatggctaggtttatagatagttgggtggttggtgtaaatgagcaaggcaggagtccgaggagggccattctacgcctccgcggaggcgttgaatggcctcaggaacacaagtgtctgaggattcatttactacttaaaggagcggaggctttttcaggtacttatgcagacttggctcagcatctttctgaaaagccaagagaaggtctcttaaagaccatcatcttgt

SEQ ID NO: 334488 - DNA, 427 bp, Homo sapiens
accgcgcctggtgagcaaagcttctaacctgactggcacacacagactgctcgtgctttgagtcccagttccagattctcaggagacagcttggccaggtgaaatctccctcatccagccagtttttgctaggatagtgttctctgagaaaagagggcacaggccagtccagctaaagaatattaccaccgcagacgtggctctcggtgggatgcatttgaccacttgcctgggaatccctatgtgctctgttaaacttcaggttcccgggccccaccccagacctaccacatcagaatccctggaagcattgcctcgacatggagtccgtgcccttcacttcaccactgtcccctccctggctaacttctgcctccaccctgcagccagcccccatgctgccgcagatgttgcaacataatggcac

SEQ ID NO: 334489 - DNA, 116 bp, Homo sapiens
gaccttagaacttagccaattaaaattctgagtttgagggacgtgtcagacaaaatcagtgtaaatgcggcatacattcatcatatttttatttataaagagtacaaactttccca

SEQ ID NO: 334490 - DNA, 307 bp, Homo sapiens
ataactcagaattctccctgagaaactaggaaggtatggcggcatgaattaaactggaatctggaagcaggtttgagtagaagacgatgaattcagaattggacaattgaaattgaagtgtctatgggacatctaaatggctatgtcttcagcctacacatctgagcctgaaacagaggttagtgatcgagctgtgaattgtgattgaagaataccctgaagttagaggtgtgaaaatgtgtgcagtcacctaaggagagcatgcagagcagggacccttagcctgagggccatgggtaggctccag

SEQ ID NO: 334491 - DNA, 287 bp, Homo sapiens
agggcttttctttctttcgtgtttaaaaattcttttactgtgagctgctgactttcctggttactttatctgtgggacttctttaaggcctggttgaagcaccttaatctctccagagaatatctgcttctgtcagttgcctaggaggactaccatccctgaacactttaaacgtaaatatccaaatgggtcttttcagatcacacaggtaatgtgaattcagactggaaatctgcctggaacctggtttgaggtaacaacttctaagggcaggtttttttcccctt

SEQ ID NO: 334492 - DNA, 544 bp, Homo sapiens
acctcagtttctctcaggcctatgagctgccccatctggtaaataggtggagagaacagagccggcaggggcctccagcagatactccagcccacagtctttgtccctgggtggctcactagagccagaagagaaggctcactaggacttgaatcctggcctggtcaccttccagctttgagaccttggacaaggcacttcatctcccacagtttccgaaagccgaattcatgagacggttgtgaggatttggggtccccagtctatgtgaggatctcctgtcttctgttgaccagccactgaaaattgccagagacaaggtggtgggaaaggattaccttttgtgtgactacaacagagatggggactcctataggtcaccatggagtaacaagtatgaccctcccttggaggcaggcgcctcattaggtccaaggcacagtccagctgctgatcactcatggtggcggcggcggcggcggtcccggtcccggcgtcagtggctcccccccccgatacagcgaccaggggatccatcaagagt

SEQ ID NO: 334493 - DNA, 1714 bp, Homo sapiens
gtaaccggtacgcgaagggccttggggtgggcgaaaattccggactactgcagggggtgtggaaagggaagtggaagcgccgggccctgctgcgggggggagagccactgacgccgggaccgggaccgccgccgccgccgccaccatgagtgatcagcagctggactgtgccttggacctaatgaggcgcctgcctccccagcaaatcgagaaaaacctcagcgacctgatcgacctggtccccagtctatgtgaggatctcctgtcttctgttgaccagccactgaaaattgccagagacaaggtggtgggaaaggattaccttttgtgtgactacaacagagatggggactcctataggtcaccatggagtaacaagtatgaccctcccttggaggatggggccatgccgtcagctcggctgagaaagctggaggtggaagccaacaatgcctttgaccagtatcgagacctgtattttgaaggtggcgtctcatctgtctacctctgggatctggatcatggctttgctggagtgatcctcataaagaaggctggagatggatcaaagaagatcaaaggctgctgggattccatccacgtggtagaagtgcaggagaaatccagcggtcgcaccgcccattacaagttgacctccacggtgatgctgtggctgcagaccaacaaatctggctctggcaccatgaacctcggaggcagccttaccagacagatggagaaggatgaaactgtgagtgactgctccccacacatagccaacatcgggcgcctggtagaggacatggaaaataaaatcagaagtacgctgaacgagatctactttggaaaaacaaaggatatcgtcaatgggctgaggtctgtgcagacttttgcagacaaatcaaaacaagaagctctgaagaatgacctggtggaggctttgaagagaaagcagcaatgctaaacctctgtttcatgctaaccagacacgccgtgcactcgttagattcctttcttagaaaactcgttttctgctcccttccctcgtcccttccctccccgacaggtcacataacagctgcatcattgaccgcacagcgccatctctccctgagaataaagccgatagccaccctcctccggctccgagcctgcttctgccacacctcgctctcagttctctccacatttccatagagaccgtgtggtttttgttcacccgggccccccgtcttcctccctgtccccccatttataggcataaaatccactgtctgccagcctcccttccctcccacctttttggtacattggtgtaaaaaatgtaaaacaaaaaaattttatgaactaactgtggtgtgtgaaagagagaagaaaaactggaaatcttattccgtgtgtgtttgggagttgcttggggttgggggtcgtggggacaggggacagctctgggagcagaggtggccctcggtgccgtcctgcgcagactctcccgtcccacggaggccgcggggtgggggctggggggggtgccgccgaccgttccgctcttccggccaggtgcttttctgtcaatttctatggaatgcaaaaggaggtttttgttttattttgtttttttgtaaagcttaagaaaaaaatctacatcttatacttgagcctccatacttaaaaaaagaaaagaaaagaaatcaataaaaagaaactggggcgc

SEQ ID NO: 334494 - DNA, 2056 bp, Homo sapiens
agctggcggcgtggggggcgggcccgggccgggccggggcggggaaggaaggtggcggcggcccggcgcggggggaggggggtgctgacccggatgttcactcctgggcacccggggaagtggaagcgccgggccctgctgcgggggggagagccactgacgccgggaccgggaccgccgccgccgccgccaccatgagtgatcagcagctggactgtgccttggacctaatgaggcgcctgcctccccagcaaatcgagaaaaacctcagcgacctgatcgacctggtccccagtctatgtgaggatctcctgtcttctgttgaccagccactgaaaattgccagagacaaggtggtgggaaaggattaccttttgtgtgactacaacagagatggggactcctataggtcaccatggagtaacaagtatgaccctcccttggaggatggggccatgccgtcagctcggctgagaaagctggaggtggaagccaacaatgcctttgaccagtatcgagacctgtattttgaaggtggcgtctcatctgtctacctctgggatctggatcatggctttgctggagtgatcctcataaagaaggctggagatggatcaaagaagatcaaaggctgctgggattccatccacgtggtagaagtgcaggagaaatccagcggtcgcaccgcccattacaagttgacctccacggtgatgctgtggctgcagaccaacaaatctggctctggcaccatgaacctcggaggcagccttaccagacagatggagaaggatgaaactgtgagtgactgctccccacacatagccaacatcgggcgcctggtagaggacatggaaaataaaatcagaagtacgctgaacgagatctactttggaaaaacaaaggatatcgtcaatgggctgaggtctgtgcagacttttgcagacaaatcaaaacaagaagctctgaagaatgacctggtggaggctttgaagagaaagcagcaatgctaaacctctgtttcatgctaaccagacacgccgtgcactcgttagattcctttcttagaaaactcgttttctgctcccttccctcgtcccttccctccccgacaggtcacataacagctgcatcattgaccgcacagcgccatctctccctgagaataaagccgatagccaccctcctccggctccgagcctgcttctgccacacctcgctctcagttctctccacatttccatagagaccgtgtggtttttgttcacccgggccccccgtcttcctccctgtccccccatttataggcataaaatccactgtctgccagcctcccttccctcccacctttttggtacattggtgtaaaaaatgtaaaacaaaaaaattttatgaactaactgtggtgtgtgaaagagagaagaaaaactggaaatcttattccgtgtgtgtttgggagttgcttggggttgggggtcgtggggacaggggacagctctgggagcagaggtggccctcggtgccgtcctgcgcagactctcccgtcccacggaggccgcggggtgggggctggggggggtgccgccgaccgttccgctcttccggccaggtgcttttctgtcaatttctatggaatgcaaaaggaggtttttgttttattttgtttttttgtaaagcttaagaaaaaaatctacatcttatacttgagcctccatacttaaaaaaagaaaagaaaagaaatcaataaaaagaaactggggcgcaaaaatcaacacacagccccacactcaaaccacacacgggccgcgccccgcaccaaaagaaccccagcaagggggcgcccccaaggctcacccgcctgttacacgcagatgtcccgtcgtggtcacacactggggtgtgcccccttatatgtctgcactctctacttttcaaagcgcctccgcacactcgtgccccacctatttgttaaccaccggttgtagcgctctctgcactaatgcgccaacctagcgacacctctctgagacggctccccttatcctgccggcagaca

SEQ ID NO: 334495 - DNA, 1715 bp, Homo sapiens
agctggcggcgtggggggcgggcccgggccgggccggggcggggaaggaaggtggcggcggcccggcgcggggggaggggggtgctgacccggatgttcactcctgggcacccggggaagtggaagcgccgggccctgctgcgggggggagagccactgacgccgggaccgggaccgccgccgccgccgccaccatgagtgatcagcagctggactgtgccttggacctaatgaggcgcctgcctccccagcaaatcgagaaaaacctcagcgacctgatcgacctggtccccagtctatgtgaggatctcctgtcttctgttgaccagccactgaaaattgccagagacaaggtggtgggaaaggattaccttttgtgtgactacaacagagatggggactcctataggtcaccatggagtaacaagtatgaccctcccttggaggatggggccatgccgtcagctcggctgagaaagctggaggtggaagccaacaatgcctttgaccagtatcgagacctgtattttgaaggtggcgtctcatctgtctacctctgggatctggatcatggctttgctggagtgatcctcataaagaaggctggagatggatcaaagaagatcaaaggctgctgggattccatccacgtggtagaagtgcaggagaaatccagcggtcgcaccgcccattacaagttgacctccacggtgatgctgtggctgcagaccaacaaatctggctctggcaccatgaacctcggaggcagccttaccagacagatggagaaggatgaaactgtgagtgactgctccccacacatagccaacatcgggcgcctggtagaggacatggaaaataaaatcagaagtacgctgaacgagatctactttggaaaaacaaaggatatcgtcaatgggctgaggtctgtgcagacttttgcagacaaatcaaaacaagaagctctgaagaatgacctggtggaggctttgaagagaaagcagcaatgctaaacctctgtttcatgctaaccagacacgccgtgcactcgttagattcctttcttagaaaactcgttttctgctcccttccctcgtcccttccctccccgacaggtcacataacagctgcatcattgaccgcacagcgccatctctccctgagaataaagccgatagccaccctcctccggctccgagcctgcttctgccacacctcgctctcagttctctccacatttccatagagaccgtgtggtttttgttcacccgggccccccgtcttcctccctgtccccccatttataggcataaaatccactgtctgccagcctcccttccctcccacctttttggtacattggtgtaaaaaatgtaaaacaaaaaaattttatgaactaactgtggtgtgtgaaagagagaagaaaaactggaaatcttattccgtgtgtgtttgggagttgcttggggttgggggtcgtggggacaggggacagctctgggagcagaggtggccctcggtgccgtcctgcgcagactctcccgtcccacggaggccgcggggtgggggctggaggagggatcttattcagctaatgttctcattctgcaagactcccctggaacttttgtagtattccctttgactgtgctacagatcggatttttggatcaagctttatagggtacctttgacctattcaccattatttgttt

SEQ ID NO: 334496 - DNA, 1750 bp, Homo sapiens
tgccctcctgccacttgacccttctgcaggacaggcccagcacttaggttggaagggccagagaacttcttcctgacaggatcaagggatttttggagcatgtttgtatgtggactttgggcctcaaagtgttttgaggaccatggttccttgtttagtcaagggatgttgctgctgaacgaggagtgatcagcagctggactgtgccttggacctaatgaggcgcctgcctccccagcaaatcgagaaaaacctcagcgacctgatcgacctggtccccagtctatgtgaggatctcctgtcttctgttgaccagccactgaaaattgccagagacaaggtggtgggaaaggattaccttttgtgtgactacaacagagatggggactcctataggtcaccatggagtaacaagtatgaccctcccttggaggatggggccatgccgtcagctcggctgagaaagctggaggtggaagccaacaatgcctttgaccagtatcgagacctgtattttgaaggtggcgtctcatctgtctacctctgggatctggatcatggctttgctggagtgatcctcataaagaaggctggagatggatcaaagaagatcaaaggctgctgggattccatccacgtggtagaagtgcaggagaaatccagcggtcgcaccgcccattacaagttgacctccacggtgatgctgtggctgcagaccaacaaatctggctctggcaccatgaacctcggaggcagccttaccagacagatggagaaggatgaaactgtgagtgactgctccccacacatagccaacatcgggcgcctggtagaggacatggaaaataaaatcagaagtacgctgaacgagatctactttggaaaaacaaaggatatcgtcaatgggctgaggtctgtgcagacttttgcagacaaatcaaaacaagaagctctgaagaatgacctggtggaggctttgaagagaaagcagcaatgctaaacctctgtttcatgctaaccagacacgccgtgcactcgttagattcctttcttagaaaactcgttttctgctcccttccctcgtcccttccctccccgacaggtcacataacagctgcatcattgaccgcacagcgccatctctccctgagaataaagccgatagccaccctcctccggctccgagcctgcttctgccacacctcgctctcagttctctccacatttccatagagaccgtgtggtttttgttcacccgggccccccgtcttcctccctgtccccccatttataggcataaaatccactgtctgccagcctcccttccctcccacctttttggtacattggtgtaaaaaatgtaaaacaaaaaaattttatgaactaactgtggtgtgtgaaagagagaagaaaaactggaaatcttattccgtgtgtgtttgggagttgcttggggttgggggtcgtggggacaggggacagctctgggagcagaggtggccctcggtgccgtcctgcgcagactctcccgtcccacggaggccgcggggtgggggctggggggggtgccgccgaccgttccgctcttccggccaggtgcttttctgtcaatttctatggaatgcaaaaggaggtttttgttttattttgtttttttgtaaagcttaagaaaaaaatctacatcttatacttgagcctccatacttaaaaaaagaaaagaaaagaaatcaataaaaagaaactggggcgc

SEQ ID NO: 334497 - DNA, 1629 bp, Homo sapiens
ggctggtactggtcccgaatcggtaggatcgggaccgggaccgccgccgccgccgccaccatgagtgatcagcagctggactgtgccttggacctaatgaggcgcctgcctccccagcaaatcgagaaaaacctcagcgacctgatcgacctggtccccagtctatgtgaggatctcctgtcttctgttgaccagccactgaaaattgccagagacaaggtggtgggaaaggattaccttttgtgtgactacaacagagatggggactcctataggtcaccatggagtaacaagtatgaccctcccttggaggatggggccatgccgtcagctcggctgagaaagctggaggtggaagccaacaatgcctttgaccagtatcgagacctgtattttgaaggtggcgtctcatctgtctacctctgggatctggatcatggctttgctggagtgatcctcataaagaaggctggagatggatcaaagaagatcaaaggctgctgggattccatccacgtggtagaagtgcaggagaaatccagcggtcgcaccgcccattacaagttgacctccacggtgatgctgtggctgcagaccaacaaatctggctctggcaccatgaacctcggaggcagccttaccagacagatggagaaggatgaaactgtgagtgactgctccccacacatagccaacatcgggcgcctggtagaggacatggaaaataaaatcagaagtacgctgaacgagatctactttggaaaaacaaaggatatcgtcaatgggctgaggtctgtgcagacttttgcagacaaatcaaaacaagaagctctgaagaatgacctggtggaggctttgaagagaaagcagcaatgctaaacctctgtttcatgctaaccagacacgccgtgcactcgttagattcctttcttagaaaactcgttttctgctcccttccctcgtcccttccctccccgacaggtcacataacagctgcatcattgaccgcacagcgccatctctccctgagaataaagccgatagccaccctcctccggctccgagcctgcttctgccacacctcgctctcagttctctccacatttccatagagaccgtgtggtttttgttcacccgggccccccgtcttcctccctgtccccccatttataggcataaaatccactgtctgccagcctcccttccctcccacctttttggtacattggtgtaaaaaatgtaaaacaaaaaaattttatgaactaactgtggtgtgtgaaagagagaagaaaaactggaaatcttattccgtgtgtgtttgggagttgcttggggttgggggtcgtggggacaggggacagctctgggagcagaggtggccctcggtgccgtcctgcgcagactctcccgtcccacggaggccgcggggtgggggctggggggggtgccgccgaccgttccgctcttccggccaggtgcttttctgtcaatttctatggaatgcaaaaggaggtttttgttttattttgtttttttgtaaagcttaagaaaaaaatctacatcttatacttgagcctccatacttaaaaaaagaaaagaaaagaaatcaataaaaagaaactggggcgc

SEQ ID NO: 334498 - DNA, 2177 bp, Homo sapiens
tggatgaggcggagcagacctggccttggaatctggccccgcgcttaagcgaggatggtcttcgtggcctttctgagcttggcttcctctgagtggcgggaagcctcattggtcatttttcagagccccttggtccactcctcggcactaagacacttgagaaaggctcctctcttcactcagcatgctatggggttacttaagtttatttcttaattgaattttctcattaaaacctgctttcccagatctgtttggcagcaggacagtttcgaggtggtagaagagaggcccagcttcctctgtatttcctttccctgactttctggaggcattatcgaagtacgctaagccgcacgtagctgaagtgcacaactggatggcttgtgtttgtttcagtgataacacacaacatctgcctccctgctctccccagcctcccgtctctgatcgcgcactccctagttttccagcctcttcttaagcagcgattccagctggcagcgccgtgacaagtgtttccgtaagcattcccacgatcctctaagtgaggagcatgacctcggaaccatgtgcccggtcccctcccctgacgtaggaggtagtgggagagtgatcagcagctggactgtgccttggacctaatgaggcgcctgcctccccagcaaatcgagaaaaacctcagcgacctgatcgacctggtccccagtctatgtgaggatctcctgtcttctgttgaccagccactgaaaattgccagagacaaggtggtgggaaaggattaccttttgtgtgactacaacagagatggggactcctataggtcaccatggagtaacaagtatgaccctcccttggaggatggggccatgccgtcagctcggctgagaaagctggaggtggaagccaacaatgcctttgaccagtatcgagacctgtattttgaaggtggcgtctcatctgtctacctctgggatctggatcatggctttgctggagtgatcctcataaagaaggctggagatggatcaaagaagatcaaaggctgctgggattccatccacgtggtagaagtgcaggagaaatccagcggtcgcaccgcccattacaagttgacctccacggtgatgctgtggctgcagaccaacaaatctggctctggcaccatgaacctcggaggcagccttaccagacagatggagaaggatgaaactgtgagtgactgctccccacacatagccaacatcgggcgcctggtagaggacatggaaaataaaatcagaagtacgctgaacgagatctactttggaaaaacaaaggatatcgtcaatgggctgaggtctgtgcagacttttgcagacaaatcaaaacaagaagctctgaagaatgacctggtggaggctttgaagagaaagcagcaatgctaaacctctgtttcatgctaaccagacacgccgtgcactcgttagattcctttcttagaaaactcgttttctgctcccttccctcgtcccttccctccccgacaggtcacataacagctgcatcattgaccgcacagcgccatctctccctgagaataaagccgatagccaccctcctccggctccgagcctgcttctgccacacctcgctctcagttctctccacatttccatagagaccgtgtggtttttgttcacccgggccccccgtcttcctccctgtccccccatttataggcataaaatccactgtctgccagcctcccttccctcccacctttttggtacattggtgtaaaaaatgtaaaacaaaaaaattttatgaactaactgtggtgtgtgaaagagagaagaaaaactggaaatcttattccgtgtgtgtttgggagttgcttggggttgggggtcgtggggacaggggacagctctgggagcagaggtggccctcggtgccgtcctgcgcagactctcccgtcccacggaggccgcggggtgggggctggggggggtgccgccgaccgttccgctcttccggccaggtgcttttctgtcaatttctatggaatgcaaaaggaggtttttgttttattttgtttttttgtaaagcttaagaaaaaaatctacatcttatacttgagcctccatacttaaaaaaagaaaagaaaagaaatcaataaaaagaaactggggcgc

SEQ ID NO: 334499 - DNA, 1665 bp, Homo sapiens
gagtccgtggggctgccccaaaccggtcctgacaggcgtccttccatcgctggctgagcctttctccctttccctccacagtacatcgacgccaccatgagtgatcagcagctggactgtgccttggacctaatgaggcgcctgcctccccagcaaatcgagaaaaacctcagcgacctgatcgacctggtccccagtctatgtgaggatctcctgtcttctgttgaccagccactgaaaattgccagagacaaggtggtgggaaaggattaccttttgtgtgactacaacagagatggggactcctataggtcaccatggagtaacaagtatgaccctcccttggaggatggggccatgccgtcagctcggctgagaaagctggaggtggaagccaacaatgcctttgaccagtatcgagacctgtattttgaaggtggcgtctcatctgtctacctctgggatctggatcatggctttgctggagtgatcctcataaagaaggctggagatggatcaaagaagatcaaaggctgctgggattccatccacgtggtagaagtgcaggagaaatccagcggtcgcaccgcccattacaagttgacctccacggtgatgctgtggctgcagaccaacaaatctggctctggcaccatgaacctcggaggcagccttaccagacagatggagaaggatgaaactgtgagtgactgctccccacacatagccaacatcgggcgcctggtagaggacatggaaaataaaatcagaagtacgctgaacgagatctactttggaaaaacaaaggatatcgtcaatgggctgaggtctgtgcagacttttgcagacaaatcaaaacaagaagctctgaagaatgacctggtggaggctttgaagagaaagcagcaatgctaaacctctgtttcatgctaaccagacacgccgtgcactcgttagattcctttcttagaaaactcgttttctgctcccttccctcgtcccttccctccccgacaggtcacataacagctgcatcattgaccgcacagcgccatctctccctgagaataaagccgatagccaccctcctccggctccgagcctgcttctgccacacctcgctctcagttctctccacatttccatagagaccgtgtggtttttgttcacccgggccccccgtcttcctccctgtccccccatttataggcataaaatccactgtctgccagcctcccttccctcccacctttttggtacattggtgtaaaaaatgtaaaacaaaaaaattttatgaactaactgtggtgtgtgaaagagagaagaaaaactggaaatcttattccgtgtgtgtttgggagttgcttggggttgggggtcgtggggacaggggacagctctgggagcagaggtggccctcggtgccgtcctgcgcagactctcccgtcccacggaggccgcggggtgggggctggggggggtgccgccgaccgttccgctcttccggccaggtgcttttctgtcaatttctatggaatgcaaaaggaggtttttgttttattttgtttttttgtaaagcttaagaaaaaaatctacatcttatacttgagcctccatacttaaaaaaagaaaagaaaagaaatcaataaaaagaaactggggcgc

SEQ ID NO: 334500 - DNA, 1992 bp, Homo sapiens
agctctccatcagggatggggtggtcccggtgctgtgccttctcagttgccgcttctagggaggccgcctaggagccagcgagggaagggcgggcatcggtgtgcccagaaggcagcgcgctgctctgcgggcccttctcgaggctgccgccgtgggtgctgtgcgtgcgaagcattctgcagggcaggccggggtccacggcgcccgggcctgagtgggagccgaggggcgaggatgggtggcccacaggacaaggatgaacgcacaatcgcccttgtgaggccgtggccttggggggccaccaggccctggatccagcatatggcctggacacgatgcacccaagcaggcgcagcctccccttccctctgaactgtcagcttgcaagggttggaactgctgattatggaagtccctcggatcagagtgatcagcagctggactgtgccttggacctaatgaggcgcctgcctccccagcaaatcgagaaaaacctcagcgacctgatcgacctggtccccagtctatgtgaggatctcctgtcttctgttgaccagccactgaaaattgccagagacaaggtggtgggaaaggattaccttttgtgtgactacaacagagatggggactcctataggtcaccatggagtaacaagtatgaccctcccttggaggatggggccatgccgtcagctcggctgagaaagctggaggtggaagccaacaatgcctttgaccagtatcgagacctgtattttgaaggtggcgtctcatctgtctacctctgggatctggatcatggctttgctggagtgatcctcataaagaaggctggagatggatcaaagaagatcaaaggctgctgggattccatccacgtggtagaagtgcaggagaaatccagcggtcgcaccgcccattacaagttgacctccacggtgatgctgtggctgcagaccaacaaatctggctctggcaccatgaacctcggaggcagccttaccagacagatggagaaggatgaaactgtgagtgactgctccccacacatagccaacatcgggcgcctggtagaggacatggaaaataaaatcagaagtacgctgaacgagatctactttggaaaaacaaaggatatcgtcaatgggctgaggtctgtgcagacttttgcagacaaatcaaaacaagaagctctgaagaatgacctggtggaggctttgaagagaaagcagcaatgctaaacctctgtttcatgctaaccagacacgccgtgcactcgttagattcctttcttagaaaactcgttttctgctcccttccctcgtcccttccctccccgacaggtcacataacagctgcatcattgaccgcacagcgccatctctccctgagaataaagccgatagccaccctcctccggctccgagcctgcttctgccacacctcgctctcagttctctccacatttccatagagaccgtgtggtttttgttcacccgggccccccgtcttcctccctgtccccccatttataggcataaaatccactgtctgccagcctcccttccctcccacctttttggtacattggtgtaaaaaatgtaaaacaaaaaaattttatgaactaactgtggtgtgtgaaagagagaagaaaaactggaaatcttattccgtgtgtgtttgggagttgcttggggttgggggtcgtggggacaggggacagctctgggagcagaggtggccctcggtgccgtcctgcgcagactctcccgtcccacggaggccgcggggtgggggctggggggggtgccgccgaccgttccgctcttccggccaggtgcttttctgtcaatttctatggaatgcaaaaggaggtttttgttttattttgtttttttgtaaagcttaagaaaaaaatctacatcttatacttgagcctccatacttaaaaaaagaaaagaaaagaaatcaataaaaagaaactggggcgc

SEQ ID NO: 334501 - DNA, 1730 bp, Homo sapiens
acctcagtttctctcaggcctatgagctgccccatctggtaaataggtggagagaacagagccggcaggggcctccagcagatactccagcccacagtctttgtccctgggtggctcactagagccagaagagaaggctcactaggacttgaatcctggcctggtcaccttccagctttgagaccttggacaaggcacttcatctcccacagtttccgaaagccgaattcatgagacggttgtgaggatttggggtccccagtctatgtgaggatctcctgtcttctgttgaccagccactgaaaattgccagagacaaggtggtgggaaaggattaccttttgtgtgactacaacagagatggggactcctataggtcaccatggagtaacaagtatgaccctcccttggaggatggggccatgccgtcagctcggctgagaaagctggaggtggaagccaacaatgcctttgaccagtatcgagacctgtattttgaaggtggcgtctcatctgtctacctctgggatctggatcatggctttgctggagtgatcctcataaagaaggctggagatggatcaaagaagatcaaaggctgctgggattccatccacgtggtagaagtgcaggagaaatccagcggtcgcaccgcccattacaagttgacctccacggtgatgctgtggctgcagaccaacaaatctggctctggcaccatgaacctcggaggcagccttaccagacagatggagaaggatgaaactgtgagtgactgctccccacacatagccaacatcgggcgcctggtagaggacatggaaaataaaatcagaagtacgctgaacgagatctactttggaaaaacaaaggatatcgtcaatgggctgaggtctgtgcagacttttgcagacaaatcaaaacaagaagctctgaagaatgacctggtggaggctttgaagagaaagcagcaatgctaaacctctgtttcatgctaaccagacacgccgtgcactcgttagattcctttcttagaaaactcgttttctgctcccttccctcgtcccttccctccccgacaggtcacataacagctgcatcattgaccgcacagcgccatctctccctgagaataaagccgatagccaccctcctccggctccgagcctgcttctgccacacctcgctctcagttctctccacatttccatagagaccgtgtggtttttgttcacccgggccccccgtcttcctccctgtccccccatttataggcataaaatccactgtctgccagcctcccttccctcccacctttttggtacattggtgtaaaaaatgtaaaacaaaaaaattttatgaactaactgtggtgtgtgaaagagagaagaaaaactggaaatcttattccgtgtgtgtttgggagttgcttggggttgggggtcgtggggacaggggacagctctgggagcagaggtggccctcggtgccgtcctgcgcagactctcccgtcccacggaggccgcggggtgggggctggggggggtgccgccgaccgttccgctcttccggccaggtgcttttctgtcaatttctatggaatgcaaaaggaggtttttgttttattttgtttttttgtaaagcttaagaaaaaaatctacatcttatacttgagcctccatacttaaaaaaagaaaagaaaagaaatcaataaaaagaaactggggcgc

SEQ ID NO: 334502 - DNA, 1531 bp, Homo sapiens
agctggcggcgtggggggcgggcccgggccgggccggggcggggaaggaaggtggcggcggcccggcgcggggggaggggggtgctgacccggatgttcactcctgggcacccggggaagtggaagcgccgggccctgctgcgggggggagagccactgacgccgggaccgggaccgccgccgccgccgccaccatgagtgatcagcagctggactgtgccttggacctaatgaggcgcctgcctccccagcaaatcgagaaaaacctcagcgacctgatcgacctggtccccagtctatgtgaggatctcctgtcttctgttgaccagccactgaaaattgccagagacaaggtggtgggaaaggattaccttttgtgtgactacaacagagatggggactcctataggtcaccatggagtaacaagtatgaccctcccttggaggatggggccatgccgtcagctcggctgagaaagctggaggtggaagccaacaatgcctttgaccagtatcgagacctgtattttgaaggtggcgtctcatctgtctacctctgggatctggatcatggctttgctggagtgatcctcataaagaaggctggagatggatcaaagaagatcaaaggctgctgggattccatccacgtggtagaagtgcaggagaaatccagcggtcgcaccgcccattacaagttgacctccacggtgatgctgtggctgcagaccaacaaatctggctctggcaccatgaacctcggaggcagccttaccagacagatggagaaggatgaaactgtgagtgactgctccccacacatagccaacatcgggcgcctggtagaggacatggaaaataaaatcagaagtacgctgaacgagatctactttggaaaaacaaaggatatcgtcaatgggctgaggtctgtgcagacttttgcagacaaatcaaaacaagaagctctgaagaatgacctggtggaggctttgaagagaaagcagcaatgctaaacctctgtttcatgctaaccagacacgccgtgcactcgttagattcctttcttagaaaactcgttttctgctcccttccctcgtcccttccctccccgacaggtcacataacagctgcatcattgaccgcacagcgccatctctccctgagaataaagccgatagccaccctcctccggctccgagcctgcttctgccacacctcgctctcagttctctccacatttccatagagaccgtgtggtttttgttcacccgggccccccgtcttcctccctgtccccccatttataggcataaaatccactgtctgccagccatcttatacttgagcctccatacttaaaaaaagaaaagaaaagaaatcaataaaaagaaactggggcgccaaaaaaaaacacactaacaactcccccacgaacaaaagaaaccctcaccacaagggggcgcccccctttaaatttcccctcgggggccccagttttggcgctccccaccttcttgtcccaaggggccca

SEQ ID NO: 334503 - DNA, 1716 bp, Homo sapiens
agctggcggcgtggggggcgggcccgggccgggccggggcggggaaggaaggtggcggcggcccggcgcggggggaggggggtgctgacccggatgttcactcctgggcacccggggaagtggaagcgccgggccctgctgcgggggggagagccactgacgccgggaccgggaccgccgccgccgccgccaccatgagtgatcagcagctggactgtgccttggacctaatgaggcgcctgcctccccagcaaatcgagaaaaacctcagcgacctgatcgacctggtccccagtctatgtgaggatctcctgtcttctgttgaccagccactgaaaattgccagagacaaggtggtgggaaaggattaccttttgtgtgactacaacagagatggggactcctataggtcaccatggagtaacaagtatgaccctcccttggaggatggggccatgccgtcagctcggctgagaaagctggaggtggaagccaacaatgcctttgaccagtatcgagacctgtattttgaaggtggcgtctcatctgtctacctctgggatctggatcatggctttgctggagtgatcctcataaagaaggctggagatggatcaaagaagatcaaaggctgctgggattccatccacgtggtagaagtgcaggagaaatccagcggtcgcaccgcccattacaagttgacctccacggtgatgctgtggctgcagaccaacaaatctggctctggcaccatgaacctcggaggcagccttaccagacagatggagaaggatgaaactgtgagtgactgctccccacacatagccaacatcgggcgcctggtagaggacatggaaaataaaatcagaagtacgctgaacgagatctactttggaaaaacaaaggatatcgtcaatgggctgaggtctgtgcagacttttgcagacaaatcaaaacaagaagctctgaagaatgacctggtggaggctttgaagagaaagcagcaatgctaaacctctgtttcatgctaaccagacacgccgtgcactcgttagattcctttcttagaaaactcgttttctgctcccttccctcgtcccttccctccccgacaggtcacataacagctgcatcattgaccgcacagcgccatctctccctgagaataaagccgatagccaccctcctccggctccgagcctgcttctgccacacctcgctctcagttctctccacatttccatagagaccgtgtggtttttgttcacccgggccccccgtcttctcccttccctcccacctttttggtacattggtgtaaaaaatgtaaaacaaaaaaattttatgaactaactgtggtgtgtgaaagagagaagaaaaactggaaatcttattccgtgtgtgtttgggagttgcttggggttgggggtcgtggggacaggggacagctctgggagcagaggtggccctcggtgccgtcctgcgcagactctcccgtcccacggaggccgcggggtgggggctggggggggtgccgccgaccgttccgctcttccggccaggtgcttttctgtcaatttctatggaatgcaaaaggaggtttttgttttattttgtttttttgtaaagcttaagaaaaaaatctacatcttatacttgagcctccatacttaaaaaaagaaaagaaaagaaatcaataaaaagaaactggggcgc

SEQ ID NO: 334504 - DNA, 1396 bp, Homo sapiens
cattgtgtgtttgcagctgcattgtgtgtttgcagctgcattgtgtgtttgagtgatcagcagctggactgtgccttggacctaatgaggcgcctgcctccccagcaaatcgagggaggtggaagccaacaatgcctttgaccagtatcgagacctgtattttgaaggtggcgtctcatctgtctacctctgggatctggatcatggctttgctggagtgatcctcataaagaaggctggagatggatcaaagaagatcaaaggctgctgggattccatccacgtggtagaagtgcaggagaaatccagcggtcgcaccgcccattacaagttgacctccacggtgatgctgtggctgcagaccaacaaatctggctctggcaccatgaacctcggaggcagccttaccagacagatggagaaggatgaaactgtgagtgactgctccccacacatagccaacatcgggcgcctggtagaggacatggaaaataaaatcagaagtacgctgaacgagatctactttggaaaaacaaaggatatcgtcaatgggctgaggtctgtgcagacttttgcagacaaatcaaaacaagaagctctgaagaatgacctggtggaggctttgaagagaaagcagcaatgctaaacctctgtttcatgctaaccagacacgccgtgcactcgttagattcctttcttagaaaactcgttttctgctcccttccctcgtcccttccctccccgacaggtcacataacagctgcatcattgaccgcacagcgccatctctccctgagaataaagccgatagccaccctcctccggctccgagcctgcttctgccacacctcgctctcagttctctccacatttccatagagaccgtgtggtttttgttcacccgggccccccgtcttcctccctgtccccccatttataggcataaaatccactgtctgccagcctcccttccctcccacctttttggtacattggtgtaaaaaatgtaaaacaaaaaaattttatgaactaactgtggtgtgtgaaagagagaagaaaaactggaaatcttattccgtgtgtgtttgggagttgcttggggttgggggtcgtggggacaggggacagctctgggagcagaggtggccctcggtgccgtcctgcgcagactctcccgtcccacggaggccgcggggtgggggctggggggggtgccgccgaccgttccgctcttccggccaggtgcttttctgtcaatttctatggaatgcaaaaggaggtttttgttttattttgtttttttgtaaagcttaagaaaaaaatctacatcttatacttgagcctccatacttaaaaaaagaaaagaaaagaaatcaataaaaagaaactggggcgc

SEQ ID NO: 334505 - DNA, 1318 bp, Homo sapiens
ttgctttttcctatgtgtaaaacccggcgcaacccgccggtctcttacttggaaaaaccttgccgagtatcgagacctgtattttgaaggtggcgtctcatctgtctacctctgggatctggatcatggctttgctggagtgatcctcataaagaaggctggagatggatcaaagaagatcaaaggctgctgggattccatccacgtggtagaagtgcaggagaaatccagcggtcgcaccgcccattacaagttgacctccacggtgatgctgtggctgcagaccaacaaatctggctctggcaccatgaacctcggaggcagccttaccagacagatggagaaggatgaaactgtgagtgactgctccccacacatagccaacatcgggcgcctggtagaggacatggaaaataaaatcagaagtacgctgaacgagatctactttggaaaaacaaaggatatcgtcaatgggctgaggtctgtgcagacttttgcagacaaatcaaaacaagaagctctgaagaatgacctggtggaggctttgaagagaaagcagcaatgctaaacctctgtttcatgctaaccagacacgccgtgcactcgttagattcctttcttagaaaactcgttttctgctcccttccctcgtcccttccctccccgacaggtcacataacagctgcatcattgaccgcacagcgccatctctccctgagaataaagccgatagccaccctcctccggctccgagcctgcttctgccacacctcgctctcagttctctccacatttccatagagaccgtgtggtttttgttcacccgggccccccgtcttcctccctgtccccccatttataggcataaaatccactgtctgccagcctcccttccctcccacctttttggtacattggtgtaaaaaatgtaaaacaaaaaaattttatgaactaactgtggtgtgtgaaagagagaagaaaaactggaaatcttattccgtgtgtgtttgggagttgcttggggttgggggtcgtggggacaggggacagctctgggagcagaggtggccctcggtgccgtcctgcgcagactctcccgtcccacggaggccgcggggtgggggctggggggggtgccgccgaccgttccgctcttccggccaggtgcttttctgtcaatttctatggaatgcaaaaggaggtttttgttttattttgtttttttgtaaagcttaagaaaaaaatctacatcttatacttgagcctccatacttaaaaaaagaaaagaaaagaaatcaataaaaagaaactggggcgc

SEQ ID NO: 334506 - DNA, 1291 bp, Homo sapiens
tgtgtcggtgacaagtgtagtggagcaacatgctttgacagtatcgagactgtattttgaaggtggcgtctcatctgtctacctctgggatctggatcatggctttgctggagtgatcctcataaagaaggctggagatggatcaaagaagatcaaaggctgctgggattccatccacgtggtagaagtgcaggagaaatccagcggtcgcaccgcccattacaagttgacctccacggtgatgctgtggctgcagaccaacaaatctggctctggcaccatgaacctcggaggcagccttaccagacagatggagaaggatgaaactgtgagtgactgctccccacacatagccaacatcgggcgcctggtagaggacatggaaaataaaatcagaagtacgctgaacgagatctactttggaaaaacaaaggatatcgtcaatgggctgaggtctgtgcagacttttgcagacaaatcaaaacaagaagctctgaagaatgacctggtggaggctttgaagagaaagcagcaatgctaaacctctgtttcatgctaaccagacacgccgtgcactcgttagattcctttcttagaaaactcgttttctgctcccttccctcgtcccttccctccccgacaggtcacataacagctgcatcattgaccgcacagcgccatctctccctgagaataaagccgatagccaccctcctccggctccgagcctgcttctgccacacctcgctctcagttctctccacatttccatagagaccgtgtggtttttgttcacccgggccccccgtcttcctccctgtccccccatttataggcataaaatccactgtctgccagcctcccttccctcccacctttttggtacattggtgtaaaaaatgtaaaacaaaaaaattttatgaactaactgtggtgtgtgaaagagagaagaaaaactggaaatcttattccgtgtgtgtttgggagttgcttggggttgggggtcgtggggacaggggacagctctgggagcagaggtggccctcggtgccgtcctgcgcagactctcccgtcccacggaggccgcggggtgggggctggggggggtgccgccgaccgttccgctcttccggccaggtgcttttctgtcaatttctatggaatgcaaaaggaggtttttgttttattttgtttttttgtaaagcttaagaaaaaaatctacatcttatacttgagcctccatacttaaaaaaagaaaagaaaagaaatcaataaaaagaaactggggcgc

SEQ ID NO: 334507 - DNA, 1616 bp, Homo sapiens
gtaaccggtacgcgaagggccttggggtgggcgaaaattccggactactgcagggggtgtggaaagggaagtggaagcgccgggccctgctgcgggggggagagccactgacgccgggaccgggaccgccgccgccgccgccaccatgagtgatcagcagctggactgtgccttggacctaatgaggcgcctgcctccccagcaaatcgagaaaaacctcagcgacctgatcgacctggtccccagtctatgtgaggatctcctgtcttctgttgaccagccactgaaaattgccagagacaaggtggtgggaaaggattaccttttgtgtgactacaacagagatggggactcctataggtcaccatggagtaacaagtatgaccctcccttggaggatggggccatgccgtcagctcggctgagaaagctctggagtgatcctcataaagaaggctggagatggatcaaagaagatcaaaggctgctgggattccatccacgtggtagaagtgcaggagaaatccagcggtcgcaccgcccattacaagttgacctccacggtgatgctgtggctgcagaccaacaaatctggctctggcaccatgaacctcggaggcagccttaccagacagatggagaaggatgaaactgtgagtgactgctccccacacatagccaacatcgggcgcctggtagaggacatggaaaataaaatcagaagtacgctgaacgagatctactttggaaaaacaaaggatatcgtcaatgggctgaggtctgtgcagacttttgcagacaaatcaaaacaagaagctctgaagaatgacctggtggaggctttgaagagaaagcagcaatgctaaacctctgtttcatgctaaccagacacgccgtgcactcgttagattcctttcttagaaaactcgttttctgctcccttccctcgtcccttccctccccgacaggtcacataacagctgcatcattgaccgcacagcgccatctctccctgagaataaagccgatagccaccctcctccggctccgagcctgcttctgccacacctcgctctcagttctctccacatttccatagagaccgtgtggtttttgttcacccgggccccccgtcttcctccctgtccccccatttataggcataaaatccactgtctgccagcctcccttccctcccacctttttggtacattggtgtaaaaaatgtaaaacaaaaaaattttatgaactaactgtggtgtgtgaaagagagaagaaaaactggaaatcttattccgtgtgtgtttgggagttgcttggggttgggggtcgtggggacaggggacagctctgggagcagaggtggccctcggtgccgtcctgcgcagactctcccgtcccacggaggccgcggggtgggggctggggggggtgccgccgaccgttccgctcttccggccaggtgcttttctgtcaatttctatggaatgcaaaaggaggtttttgttttattttgtttttttgtaaagcttaagaaaaaaatctacatcttatacttgagcctccatacttaaaaaaagaaaagaaaagaaatcaataaaaagaaactggggcgc

SEQ ID NO: 334508 - DNA, 1659 bp, Homo sapiens
agctggcggcgtggggggcgggcccgggccgggccggggcggggaaggaaggtggcggcggcccggcgcggggggaggggggtgctgacccggatgttcactcctgggcacccggggaagtggaagcgccgggccctgctgcgggggggagagccactgacgccgggaccgggaccgccgccgccgccgccaccatgagtgatcagcagctggactgtgccttggacctaatgaggcgcctgcctccccagcaaatcgagaaaaacctcagcgacctgatcgacctggtccccagtctatgtgaggatctcctgtcttctgttgaccagccactgaaaattgccagagacaaggtggtgggaaaggattaccttttgtgtgactacaacagagatggggactcctataggtcaccatggagtaacaagtatgaccctcccttggaggatggggccatgccgtcagctcggctgagaaagctggaggtggaagccaacaatgcctttgaccagtatcgagacctgtattttgaaggtggcgtctcatctgtctacctctgggatctggatcatggctttgctggagtgatcctcataaagaaggctggagatggatcaaagaagatcaaaggctgctgggattccatccacgtggtagaagtgcaggagaaatccagcggtcgcaccgcccattacaagttgacctccacggtgatgctgtggctgcagaccaacaaatctggctctggcaccatgaacctcggaggcagccttaccagacagatggagaaggatgaaactgtgagtgactgctccccacacatagccaacatcgggcgcctggtagaggacatggaaaataaaatcagaagtacgctgaacgagatctactttggaaaaacaaaggatatcgtcaatgggctgaggtctgtgcagacttttgcagacaaatcaaaacaagaagctctgaagaatgacctggtggaggctttgaagagaaagcagcaatgctaaacctctgtttcatgctaaccagacacgccgtgcactcgttagattcctttcttagaaaactcgttttctgctcccttccctcgtcccttccctccccgacaggtcacataacagctgcatcattgaccgcacagcgccatctctccctgagaataaagccgatagccaccctcctccggctccgagcctgcttctgccacacctcgctctcagtttcccttccctcccacctttttggtacattggtgtaaaaaatgtaaaacaaaaaaattttatgaactaactgtggtgtgtgaaagagagaagaaaaactggaaatcttattccgtgtgtgtttgggagttgcttggggttgggggtcgtggggacaggggacagctctgggagcagaggtggccctcggtgccgtcctgcgcagactctcccgtcccacggaggccgcggggtgggggctggggggggtgccgccgaccgttccgctcttccggccaggtgcttttctgtcaatttctatggaatgcaaaaggaggtttttgttttattttgtttttttgtaaagcttaagaaaaaaatctacatcttatacttgagcctccatacttaaaaaaagaaaagaaaagaaatcaataaaaagaaactggggcgc

SEQ ID NO: 334509 - DNA, 1440 bp, Homo sapiens
agctggcggcgtggggggcgggcccgggccgggccggggcggggaaggaaggtggcggcggcccggcgcggggggaggggggtgctgacccggatgttcactcctgggcacccggggaagtggaagcgccgggccctgctgcgggggggagagccactgacgccgggaccgggaccgccgccgccgccgccaccatgagtgatcagcagctggactgtgccttggacctaatgaggcgcctgcctccccagcaaatcgagaaaaacctcagcgacctgatcgacctggtccccagtctatgtgaggatctcctgtcttctgttgaccagccactgaaaattgccagagacaaggtggtgggaaaggattaccttttgtgtgactacaacagagatggggactcctataggtcaccatggagtaacaagtatgaccctcccttggaggatggggccatgccgtcagctcggctgagaaagctggaggtggaagccaacaatgcctttgaccagtatcgagacctgtattttgaaggtggcgtctcatctgtctacctctgggatctggatcatggctttgctggagtgatcctcataaagaaggctggagatggatcaaagaagatcaaaggctgctgggattccatccacgtggtagaagtgcaggagaaatccagcggtcgcaccgcccattacaagttgacctccacggtgatgctgtggctgcagaccaacaaatctggctctggcaccatgaacctcggaggcagccttaccagacagatggagaaggatgaaactgtgagtgactgctccccacacatagccaacatcgggcgcctggtagaggacatggaaaataaaatcagaagtacgctgaacgagatctactttggaaaaacaaaggatatcgtcaatgggctgaggtctgtgcagacttttgcagacaaatcaaaacaagaagctctgaagaatgacctggtggaggctttgaagagaaagcagcaatgctaaacctctgtttcatgctaaccagacacgccgtgcactcgttagattcctttcttagaaaactcgttttctgctcccttccctcgtcccttccctccccgacaggtcacataacagctgcatcattgaccgcacagcgccatctctccctgagaataaagccgatagccaccctcctccggctccgagcctgcttctgccacacctcgctctcagttctctccacatttccatagagacggggggtgccgccgaccgttccgctcttccggccaggtgcttttctgtcaatttctatggaatgcaaaaggaggtttttgttttattttgtttttttgtaaagcttaagaaaaaaatctacatcttatacttgagcctccatacttaaaaaaagaaaagaaaagaaatcaataaaaagaaactggggcgc

SEQ ID NO: 334510 - DNA, 1679 bp, Homo sapiens
acctcagtttctctcaggcctatgagctgccccatctggtaaataggtggagagaacagagccggcaggggcctccagcagatactccagcccacagtctttgtccctgggtggctcactagagccagaagagaaggctcactaggacttgaatcctggcctggtcaccttccagctttgagaccttggacaaggcacttcatctcccacagtttccgaaagccgaattcatgagacggttgtgaggatttggggtccccagtctatgtgaggatctcctgtcttctgttgaccagccactgaaaattgccagagacaaggtggtgggaaaggattaccttttgtgtgactacaacagagatggggactcctataggtcaccatggagtaacaagtatgaccctcccttggaggatggggccatgccgtcagctcggctgagaaagctggaggtggaagccaacaatgcctttgaccagtatcgagacctgtattttgaaggtggcgtctcatctgtctacctctgggatctggatcatggctttggctgctgggattccatccacgtggtagaagtgcaggagaaatccagcggtcgcaccgcccattacaagttgacctccacggtgatgctgtggctgcagaccaacaaatctggctctggcaccatgaacctcggaggcagccttaccagacagatggagaaggatgaaactgtgagtgactgctccccacacatagccaacatcgggcgcctggtagaggacatggaaaataaaatcagaagtacgctgaacgagatctactttggaaaaacaaaggatatcgtcaatgggctgaggtctgtgcagacttttgcagacaaatcaaaacaagaagctctgaagaatgacctggtggaggctttgaagagaaagcagcaatgctaaacctctgtttcatgctaaccagacacgccgtgcactcgttagattcctttcttagaaaactcgttttctgctcccttccctcgtcccttccctccccgacaggtcacataacagctgcatcattgaccgcacagcgccatctctccctgagaataaagccgatagccaccctcctccggctccgagcctgcttctgccacacctcgctctcagttctctccacatttccatagagaccgtgtggtttttgttcacccgggccccccgtcttcctccctgtccccccatttataggcataaaatccactgtctgccagcctcccttccctcccacctttttggtacattggtgtaaaaaatgtaaaacaaaaaaattttatgaactaactgtggtgtgtgaaagagagaagaaaaactggaaatcttattccgtgtgtgtttgggagttgcttggggttgggggtcgtggggacaggggacagctctgggagcagaggtggccctcggtgccgtcctgcgcagactctcccgtcccacggaggccgcggggtgggggctggggggggtgccgccgaccgttccgctcttccggccaggtgcttttctgtcaatttctatggaatgcaaaaggaggtttttgttttattttgtttttttgtaaagcttaagaaaaaaatctacatcttatacttgagcctccatacttaaaaaaagaaaagaaaagaaatcaataaaaagaaactggggcgc

SEQ ID NO: 334511 - DNA, 1667 bp, Homo sapiens
  misc_feature (1204)..(1204): n is a, c, g, or t
agctggcggcgtggggggcgggcccgggccgggccggggcggggaaggaaggtggcggcggcccggcgcggggggaggggggtgctgacccggatgttcactcctgggcacccggggaagtggaagcgccgggccctgctgcgggggggagagccactgacgccgggaccgggaccgccgccgccgccgccaccatgagtgatcagcagctggactgtgccttggacctaatgaggcgcctgcctccccagcaaatcgagaaaaacctcagcgacctgatcgacctggtccccagtctatgtgaggatctcctgtcttctgttgaccagccactgaaaattgccagagacaaggtggtgggaaaggattaccttttgtgtgactacaacagagatggggactcctataggtcaccatggagtaacaagtatgaccctcccttggaggatggggccatgccgtcagctcggctgagaaagctggaggtggaagccaacaatgcctttgaccagtatcgagacctgtattttgaaggtggcgtctcatctgtctacctctgggatctggatcatggctttgctggagtgatcctcataaagaaggctggagatggatcaaagaagatcaaaggctgctgggattccatccacgtggtagaagtgcaggagaaatccagcggtcgcaccgcccattacaagttgacctccacggtgatgctgtggctgcagaccaacaaatctggctctggcaccatgaacctcggaggcagccttaccagacagatggagaaggatgaaactgtgagtgactgctccccacacatagccaacatcgggcgcctggtagaggacatggaaaataaaatcagaagtacgctgaacgagatctactttggaaaaacaaaggatatcgtcaatgggctgaggtctgtgcagacttttgcagacaaatcaaaacaagaagctctgaagaatgacctggtggaggctttgaagagaaagcagcaatgctaaacctctgtttcatgctaaccagacacgccgtgcactcgttagattcctttcttagaaaactcgttttctgctcccttccctcgtcccttccctccccgacaggtcacataacagctgcatcattgaccgcacagcgccatctctccctgagaataaagccgatagaaaaaaaaaaaaaagaaaaaaaaaanaaagaaaaacaaaaaagaaaaaaaaaacacgaataagaaagcaaccacaaacgaataaataaattacatcacaagaagatactgaactcatgagctgtccccacatcaggcttaaaaacagatgcaattcccggacgtctaaacaaacactgtcaccgctacaccgacgggggtatactaaggcaagctctgaaatctgtggagcaaaacccaacaagtagcaatggaccaatcgtgccttagaacttaaatcgccctaaaaaagtcttcgaaaataagggaccggaatatacccctataaggaacccactcaaccccgtctagaggcgagagaagcgagcgtgtacgggcgagaaagtacacaaagatcgatactacaacaaagaaagggaggcaacaaacaaacaagaggcacagaagacagaacagacggcgcaaagggagaacaagaggggaaagagaa

SEQ ID NO: 334512 - DNA, 1309 bp, Homo sapiens
agctggcggcgtggggggcgggcccgggccgggccggggcggggaaggaaggtggcggcggcccggcgcggggggaggggggtgctgacccggatgttcactcctgggcacccggggaagtggaagcgccgggccctgctgcgggggggagagccactgacgccgggaccgggaccgccgccgccgccgccaccatgagtgatcagcagctggactgtgccttggacctaatgaggcgcctgcctccccagcaaatcgagaaaaacctcagcgacctgatcgacctggtccccagtctatgtgaggatctcctgtcttctgttgaccagccactgaaaattgccagagacaaggtggtgggaaaggattaccttttgtgtgactacaacagagatggggactcctataggtcaccatggagtaacaagtatgaccctcccttggaggatggggccatgccgtcagctcggctgagaaagctggaggtggaagccaacaatgcctttgaccagtatcgagacctgtattttgaaggtggcgtctcatctgtctacctctgggatctggatcatggctttgctggagtgatcctcataaagaaggctggagatggatcaaagaagatcaaaggctgctgggattccatccacgtggtagaagtgcaggagaaatccagcggtcgcaccgcccattacaagttgacctccacggtgatgctgtggctgcagaccaacaaatctggctctggcaccatgaacctcggaggcagccttaccagacagatggagaaggatgaaactgtgagtgactgctccccacacatagccaacatcgggcgcctggtagaggacatggaaaataaaatcagaagtacgctgaacgagatctactttggaaaaacaaaggatatcgtcaatgggctgaggtctgtgcagacttttgcagacaaatcaaaacaagaagctctgaagaatgacctggtggaggctttgaagagaaagcagcaatgctaaacctctgtttcatgctaaccagacacgccgtgcactcgttagattcctttcttagaaaactcgttttctgctcccttccctcgtcccttccctccccgacaggtcacataacagctgcatcattgaccgcacagcgccatctctccctgagaataaagccgatagtatctccaattgcgtgacggctactgagcactagcatgtgccacatatcgctatcagtacccaccacagctccatagccgccctgctgagtgagtctgttcaccaggacccccgtcattcgcccacctaac

SEQ ID NO: 334513 - DNA, 1032 bp, Homo sapiens
gtgatacggtatcactgatagcttacgagtacactgaccagacagattgatatggagaaggatgaaactgtgagtgactgctccccacacatagccaacatcgggcgcctggtagaggacatggaaaataaaatcagaagtacgctgaacgagatctactttggaaaaacaaaggatatcgtcaatgggctgaggtctgtgcagacttttgcagacaaatcaaaacaagaagctctgaagaatgacctggtggaggctttgaagagaaagcagcaatgctaaacctctgtttcatgctaaccagacacgccgtgcactcgttagattcctttcttagaaaactcgttttctgctcccttccctcgtcccttccctccccgacaggtcacataacagctgcatcattgaccgcacagcgccatctctccctgagaataaagccgatagccaccctcctccggctccgagcctgcttctgccacacctcgctctcagttctctccacatttccatagagaccgtgtggtttttgttcacccgggccccccgtcttcctccctgtccccccatttataggcataaaatccactgtctgccagcctcccttccctcccacctttttggtacattggtgtaaaaaatgtaaaacaaaaaaattttatgaactaactgtggtgtgtgaaagagagaagaaaaactggaaatcttattccgtgtgtgtttgggagttgcttggggttgggggtcgtggggacaggggacagctctgggagcagaggtggccctcggtgccgtcctgcgcagactctcccgtcccacggaggccgcggggtgggggctggggggggtgccgccgaccgttccgctcttccggccaggtgcttttctgtcaatttctatggaatgcaaaaggaggtttttgttttattttgtttttttgtaaagcttaagaaaaaaatctacatcttatacttgagcctccatacttaaaaaaagaaaagaaaagaaatcaataaaaagaaactggggcgc

SEQ ID NO: 334514 - DNA, 1155 bp, Homo sapiens
agctggcggcgtggggggcgggcccgggccgggccggggcggggaaggaaggtggcggcggcccggcgcggggggaggggggtgctgacccggatgttcactcctgggcacccggggaagtggaagcgccgggccctgctgcgggggggagagccactgacgccgggaccgggaccgccgccgccgccgccaccatgagtgatcagcagctggactgtgccttggacctaatgaggcgcctgcctccccagcaaatcgagaaaaacctcagcgacctgatcgacctggtccccagtctatgtgaggatctcctgtcttctgttgaccagccactgaaaattgccagagacaaggtggtgggaaaggattaccttttgtgtgactacaacagagatggggactcctataggtcaccatggagtaacaagtatgaccctcccttggaggatggggccatgccgtcagctcggctgagaaagctggaggtggaagccaacaatgcctttgaccagtatcgagacctgtattttgaaggtggcgtctcatctgtctacctctgggatctggatcatggctttgctggagtgatcctcataaagaaggctggagatggatcaaagaagatcaaaggctgctgggattccatccacgtggtagaagtgcaggagaaatccagcggtcgcaccgcccattacaagttgacctccacggtgatgctgtggctgcagaccaacaaatctggctctggcaccatgaacctcggaggcagccttaccagacagatggagaaggatgaaactgtgagtgactgctccccacacatagccaacatcgggcgcctggtagaggacatggaaaataaaatcagaagtacgctgaacgagatctactttggaaaaacaaaggatatcgtcaatgggctgaggtctgtgcagacttttgcagacaaatcaaaacaagaagctctgaagaatgacctggtggaggctttgaagagaaagcagcaatgctaaacctctgtttcatgctaaccagacacgccgtgcactcgttagattcctttcttagaaaactcgttttctgctcccttccctcgtcccaaaagccatttgatcctagcagcccagcctggccaaacgacaaaggtctcgaggg

SEQ ID NO: 334515 - DNA, 2558 bp, Homo sapiens
catctcccgctggccatgttgacctcccgctgtgagcttggcaagaagcccctggggaatcggctgagatttggagcctgggggccgtgggggctgatgcctttggccgccgcagagccagggacagtcctgggaagatactcagaaacgtgtatttccccagcatgaaccaaatgtctgcgtttctcctgggagttttttcagttgtatgcagcttgcttccaggtcttgtcttatggcacctgctgagtattttgagggctcttcctgtgacttgtagggattcggtagccagaactcagtctgggtgctgttgcttctcctgggccctgcttcacttccatttgcccatttttgcttctggggattgatttttctgattcttccttcccatggctggtgtgaatcaaacgtgagagtccggctgagtgcactctccgtagcactcttcttgagcagccctctacccactctttccactgcttctaaactgttataaaacctacatttaggaagtctttgcctaaccaatatgttgggtaaatttgacaaaatgattaaagaattgctaggggggcattcctctgagcctcagtttcctcatctgtaaattgggttgatagcttttttcttttttaagccttgacttcgctttttgttgttgtcgttgtagagatggggtctcactatgttgcccaggctggtcttgaactcctggccttaaatgatcctcctgccttggcctcccaaagtgctgggattacaggcttgagccaccacatccggccgggttgatagttgagacttccccaggatgcccgtgaaaattaaatgagataatatatgtgaaaggcgttttgtaaactgtgaaatctccataagccttcattgtttctggctttgttgatgagcgtccccacacatacgtgaatgcggtcgccctgaacgtttccccacaaatccagaatttgacagcagggatcccaggggcacttggctgtcctgtgccgccctttgcaatccgggctgaggggttttctgggccaagttaacagcggatggtgcctcacagcagaggcctgaaagcacctgctgcgtgggccataaacacagtgtgctcagacacgcagagacactggttcttacccactcccaagggtgggataacgctgcaccttgcacttgtgggatgaggaatgaggctcttctgctgggcagggcctgggcaagggagaagcttttatagaggaacccgcatggccccggagtcctcccctcttagcccctggcctgagtccccagccagcaacccagggtagctgttctgaagcagaggggctttgttccattgtgtttggaagcccagaagccaccttgtggcttagggtgacatagggacctacacacagaggagtgaacttagggttctagggactatggccgggtcaccggtggccaggggcagagatgagcacctgtccatgtaagccatatgccacccccacagggcctggcaaggtgcagagggtgcaggtctcggccatgtacccctttgcccctttctgagaggggcagatgcccagcccagtgacccagagcctcaccccaggaagcgggtccatgcagcaaatcagccaggcactggcatggtggcccccaggcctccaccgcctcaccagtccctgttcaatctgctgataacgcctttcctcccttgcaggtctgtgcagacttttgcagacaaatcaaaacaagaagctctgaagaatgacctggtggaggctttgaagagaaagcagcaatgctaaacctctgtttcatgctaaccagacacgccgtgcactcgttagattcctttcttagaaaactcgttttctgctcccttccctcgtcccttccctccccgacaggtcacataacagctgcatcattgaccgcacagcgccatctctccctgagaataaagccgatagccaccctcctccggctccgagcctgcttctgccacacctcgctctcagttctctccacatttccatagagaccgtgtggtttttgttcacccgggccccccgtcttcctccctgtccccccatttataggcataaaatccactgtctgccagcctcccttccctcccacctttttggtacattggtgtaaaaaatgtaaaacaaaaaaattttatgaactaactgtggtgtgtgaaagagagaagaaaaactggaaatcttattccgtgtgtgtttgggagttgcttggggttgggggtcgtggggacaggggacagctctgggagcagaggtggccctcggtgccgtcctgcgcagactctcccgtcccacggaggccgcggggtgggggctggggggggtgccgccgaccgttccgctcttccggccaggtgcttttctgtcaatttctatggaatgcaaaaggaggtttttgttttattttgtttttttgtaaagcttaagaaaaaaatctacatcttatacttgagcctccatacttaaaaaaagaaaagaaaagaaatcaataaaaagaaactggggcgc

SEQ ID NO: 334516 - DNA, 876 bp, Homo sapiens
accgcgaaagtccatactgctcagtatggagcaggtcgtggtggacgaagttgttgctgcacacgccgagaaaccacactgaagaatgacctggtggaggctttgaagagaaagcagcaatgctaaacctctgtttcatgctaaccagacacgccgtgcactcgttagattcctttcttagaaaactcgttttctgctcccttccctcgtcccttccctccccgacaggtcacataacagctgcatcattgaccgcacagcgccatctctccctgagaataaagccgatagccaccctcctccggctccgagcctgcttctgccacacctcgctctcagttctctccacatttccatagagaccgtgtggtttttgttcacccgggccccccgtcttcctccctgtccccccatttataggcataaaatccactgtctgccagcctcccttccctcccacctttttggtacattggtgtaaaaaatgtaaaacaaaaaaattttatgaactaactgtggtgtgtgaaagagagaagaaaaactggaaatcttattccgtgtgtgtttgggagttgcttggggttgggggtcgtggggacaggggacagctctgggagcagaggtggccctcggtgccgtcctgcgcagactctcccgtcccacggaggccgcggggtgggggctggggggggtgccgccgaccgttccgctcttccggccaggtgcttttctgtcaatttctatggaatgcaaaaggaggtttttgttttattttgtttttttgtaaagcttaagaaaaaaatctacatcttatacttgagcctccatacttaaaaaaagaaaagaaaagaaatcaataaaaagaaactggggcgc

SEQ ID NO: 334517 - DNA, 933 bp, Homo sapiens
  misc_feature (5)..(5): n is a, c, g, or t
aagcngcaatgctaaacctctgtttcatgctaaccagacacgccgtgcactcgttagattcctttcttagaaaactcgttttctgctcccttccctcgtcccttccctccccgacaggtcacataacagctgcatctgaagaatgacctggtggaggctttgaagagaaagcagcaatgctaaacctctgtttcatgctaaccagacacgccgtgcactcgttagattcctttcttagaaaactcgttttctgctcccttccctcgtcccttccctccccgacaggtcacataacagctgcatcattgaccgcacagcgccatctctccctgagaataaagccgatagccaccctcctccggctccgagcctgcttctgccacacctcgctctcagttctctccacatttccatagagaccgtgtggtttttgttcacccgggccccccgtcttcctccctgtccccccatttataggcataaaatccactgtctgccagcctcccttccctcccacctttttggtacattggtgtaaaaaatgtaaaacaaaaaaattttatgaactaactgtggtgtgtgaaagagagaagaaaaactggaaatcttattccgtgtgtgtttgggagttgcttggggttgggggtcgtggggacaggggacagctctgggagcagaggtggccctcggtgccgtcctgcgcagactctcccgtcccacggaggccgcggggtgggggctggggggggtgccgccgaccgttccgctcttccggccaggtgcttttctgtcaatttctatggaatgcaaaaggaggtttttgttttattttgtttttttgtaaagcttaagaaaaaaatctacatcttatacttgagcctccatacttaaaaaaagaaaagaaaagaaatcaataaaaagaaactggggcgc

SEQ ID NO: 334518 - DNA, 954 bp, Homo sapiens
agctggcggcgtggggggcgggcccgggccgggccggggcggggaaggaaggtggcggcggcccggcgcggggggaggggggtgctgacccggatgttcactcctgggcacccggggaagtggaagcgccgggccctgctgcgggggggagagccactgacgccgggaccgggaccgccgccgccgccgccaccatgagtgatcagcagctggactgtgccttggacctaatgaggcgcctgcctccccagcaaatcgagaaaaacctcagcgacctgatcgacctggtccccagtctatgtgaggatctcctgtcttctgttgaccagccactgaaaattgccagagacaaggtggtgggaaaggattaccttttgtgtgactacaacagagatggggactcctataggtcaccatggagtaacaagtatgaccctcccttggaggatggggccatgccgtcagctcggctgagaaagctggaggtggaagccaacaatgcctttgaccagtatcgagacctgtattttgaaggtggcgtctcatctgtctacctctgggatctggatcatggctttgctggagtgatcctcataaagaaggctggagatggatcaaagaagatcaaaggctgctgggattccatccacgtggtagaagtgcaggagaaatccagcggtcgcaccgcccattacaagttgacctccacggtgatgctgtggctgcagaccaacaaatctggctctggcaccatgaacctcggaggcagccttaccagacagatggagaaggatgaaactgtgagtgactgctccccacacatagccaacatcgggcgcctggtagaggacatggaaaataaaatcagaagtacgctgaacgagatctactttggaaaaacaaaggatatcgtcaatgggctgagctgcctgagatgggatcctctagacgaca

SEQ ID NO: 334519 - DNA, 1017 bp, Homo sapiens
gtaaccggtacgcgaagggccttggggtgggcgaaaattccggactactgcagggggtgtggaaagggaagtggaagcgccgggccctgctgcgggggggagagccactgacgccgggaccgggaccgccgccgccgccgccaccatgagtgatcagcagctggactgtgccttggacctaatgaggcgcctgcctccccagcaaatcgagaaaaacctcagcgacctgatcgacctggtccccagtctatgtgaggatctcctgtcttctgttgaccagccactgaaaattgccagagacaaggtggtgggaaaggattaccttttgtgtgactacaacagagatggggactcctataggtcaccatggagtaacaagtatgaccctcccttggaggatggggccatgccgtcagctcggctgagaaagctccaccctcctccggctccgagcctgcttctgccacacctcgctctcagttctctccacatttccatagagaccgtgtggtttttgttcacccgggccccccgtcttcctccctgtccccccatttataggcataaaatccactgtctgccagcctcccttccctcccacctttttggtacattggtgtaaaaaatgtaaaacaaaaaaattttatgaactaactgtggtgtgtgaaagagagaagaaaaactggaaatcttattccgtgtgtgtttgggagttgcttggggttgggggtcgtggggacaggggacagctctgggagcagaggtggccctcggtgccgtcctgcgcagactctcccgtcccacggaggccgcggggtgggggctggggggggtgccgccgaccgttccgctcttccggccaggtgcttttctgtcaatttctatggaatgcaaaaggaggtttttgttttattttgtttttttgtaaagcttaagaaaaaaatctacatcttatacttgagcctccatacttaaaaaaagaaaagaaaagaaatcaataaaaagaaactggggcgc

SEQ ID NO: 334520 - DNA, 661 bp, Homo sapiens
ccgatagccaccctcctccggctttattctcaggaagagatggcgctgtgcggtcaatgatgcagctgttatgtgaccaccctcctccggctccgagcctgcttctgccacacctcgctctcagttctctccacatttccatagagaccgtgtggtttttgttcacccgggccccccgtcttcctccctgtccccccatttataggcataaaatccactgtctgccagcctcccttccctcccacctttttggtacattggtgtaaaaaatgtaaaacaaaaaaattttatgaactaactgtggtgtgtgaaagagagaagaaaaactggaaatcttattccgtgtgtgtttgggagttgcttggggttgggggtcgtggggacaggggacagctctgggagcagaggtggccctcggtgccgtcctgcgcagactctcccgtcccacggaggccgcggggtgggggctggggggggtgccgccgaccgttccgctcttccggccaggtgcttttctgtcaatttctatggaatgcaaaaggaggtttttgttttattttgtttttttgtaaagcttaagaaaaaaatctacatcttatacttgagcctccatacttaaaaaaagaaaagaaaagaaatcaataaaaagaaactggggcgc

SEQ ID NO: 334521 - DNA, 822 bp, Homo sapiens
tcgagctcggcacctattcgcaagggctgaggtctgtgcagacttttgcagacaaatcaaaacaagaagctctgaagaatgacctggtggaggctttgaagagaaagcagcaatgctaaacctctgtttcatgctaaccagacacgccgtgcactcgttagattcctttcttagaaaactcgttttctgctcccttccctcgtcccttccctccccgacaggtcacataacagctgcatcattgaccgcacagcgccatctctccctgagaataaagccgatagccaccctcctccggctccgagcctgcttctgccacacctcgctctcagttctctccacatttccatagagaccgtgtggtttttgttcacccgggccccccgtcttctcccttccctcccacctttttggtacattggtgtaaaaaatgtaaaacaaaaaaattttatgaactaactgtggtgtgtgaaagagagaagaaaaactggaaatcttattccgtgtgtgtttgggagttgcttggggttgggggtcgtggggacaggggacagctctgggagcagaggtggccctcggtgccgtcctgcgcagactctcccgtcccacggaggccgcggggtgggggctggggggggtgccgccgaccgttccgctcttccggccaggtgcttttctgtcaatttctatggaatgcaaaaggaggtttttgttttattttgtttttttgtaaagcttaagaaaaaaatctacatcttatacttgagcctccatacttaaaaaaagaaaagaaaagaaatcaataaaaagaaactggggcgc

SEQ ID NO: 334522 - DNA, 1233 bp, Homo sapiens
gtaaccggtacgcgaagggccttggggtgggcgaaaattccggactactgcagggggtgtggaaagggaagtggaagcgccgggccctgctgcgggggggagagccactgacgccgggaccgggaccgccgccgccgccgccaccatgagtgatcagcagctggactgtgccttggacctaatgaggcgcctgcctccccagcaaatcgagaaaaacctcagcgacctgatcgacctggtccccagtctatgtgaggatctcctgtcttctgttgaccagccactgaaaattgccagagacaaggtggtgggaaaggattaccttttgtgtgactacaacagagatggggactcctataggtcaccatggagtaacaagtatgaccctcccttggaggatggggccatgccgtcagctcggctgagaaagctggaggtggaagccaacaatgcctttgaccagtatcgagacctgtgcttctgaattgttggatcctgatgaatcgcaatcaggactatgtttggcttgagctccagcctcatgaccaccaaccccatcgaatgactgagagctgccaggctcctgccacgttggagctcagaatcctcccgtggggacactgtgctgcagccagcctccagggagccgcttgttttatggcctaaaaagtctctttatgctgagaaggtcacactggactttgctcacacagagatttgacccaagaaaaggaataaagaggccttggataccctgtcttgcccctgttcctgcccccgccgtaccctgctggctcatgccagaagactggacttgctgtctgtgggcatgtttgttgtcggctgacgtagcacccacaggcactggccgtgtgtgtgccacagtcaggaacgaggtgcctgccccccacccattaacccattagctttgtccttactccttgaggccctgcttgaaaagattaatggtgctttgggaggctgaggcaggaggattgcttgaggccgggagctcgagaccagcctgggcgacatagcaagaccctgtacctccaaaaaataaaatataaacattagtcaggcatagaggcacacacacacataggcctagctactcagctgaggtaggaggattgcttgagcccaggagttcaaggttacagtgagctatagtcatgccatcatacactcagcctgggtgacagagtgagtccttgtctctggaaaaaaaaa

SEQ ID NO: 334523 - DNA, 800 bp, Homo sapiens
gtaaccggtacgcgaagggccttggggtgggcgaaaattccggactactgcagggggtgtggaaagggaagtggaagcgccgggccctgctgcgggggggagagccactgacgccgggaccgggaccgccgccgccgccgccaccatgagtgatcagcagctggactgtgccttggacctaatgaggcgcctgcctccccagcaaatcgagaaaaacctcagcgacctgatcgacctggtccccagtctatgtgaggatctcctgtcttctgttgaccagccactgaaaattgccagagacaaggtggtgggaaaggattaccttttgtgtgactacaacagagatggggactcctataggtcaccatggagtaacaagtatgaccctcccttggaggatggggccatgccgtcagctcggctgagaaagctggaggtggaagccaacaatgcctttgaccagtatcgagacctgtgcttctgaattgttggatcctgatgaatcgcaatcaggactatgtttggcttgagctccagcctcatgaccaccaaccccatcgaatgactgagagctgccaggctcctgccacgttggagctcagaatcctcccgtggggacactgtgctgcagccagcctccagggagccgcttgttttatggcctaaaaagtctctttatgctgagaaggtcacactggactttgctcacacagagatttgacccaagaaaaggaataaagagtgacgcggccggctccaactccctccatctatcccctacgccatcctcacactcaccc

SEQ ID NO: 334524 - DNA, 1763 bp, Homo sapiens
agctggcggcgtggggggcgggcccgggccgggccggggcggggaaggaaggtggcggcggcccggcgcggggggaggggggtgctgacccggatgttcactcctgggcacccggggaagtggaagcgccgggccctgctgcgggggggagagccactgacgccgggaccgggaccgccgccgccgccgccaccatgagtgatcagcagctggactgtgccttggacctaatgaggcgcctgcctccccagcaaatcgagaaaaacctcagcgacctgatcgacctggtccccagtctatgtgaggatctcctgtcttctgttgaccagccactgaaaattgccagagacaaggtggtgggaaaggattaccttttgtgtgactacaacagagatggggactcctataggtcaccatggagtaacaagtatgaccctcccttggaggatggggccatgccgtcagctcggctgagaaagctggaggtggaagccaacaatgcctttgaccagtatcgagacctgtattttgaaggtggcgtctcatctgtctacctctgggatctggatcatggctttgctggagtgatcctcataaagaaggctggagatggatcaaagaagatcaaaggctgctgggattccatccacgtggtagaagtgcaggagaaatccagcggtcgcaccgcccattacaagttgacctccacggtgatgctgtggctgcagaccaacaaatctggctctggcaccatgaacctcggaggcagccttaccagacagatggagaaggatgaaactgtgagtgactgctccccacacatagccaacatcgggcgcctggtagaggacatggaaaataaaatcagaagtacgctgaacgagatctactttggaaaaacaaaggatatcgtcaatgggctgaggtctgtgcagacttttgcagacaaatcaaaacaagaagctctgaagaatgacctggtggaggctttgaagagaaagcagcaatgctaaacctctgtttcatgctaaccagacacgccgtgcactcgttagattcctttcttagaaaactcgttttctgctcccttccctcgtcccttccctccccgacaggtcacataacagctgcatcattgaccgcacagcgccatctctccctgagaataaagccgatagccaccctcctccggctccgagcctgcttctgccacacctcgctctcagttctctccacatttccatagagaccgtgtggtttttgttcacccgggccccccgtcttcctccctgtccccccatttataggcataaaatccactgtctgccagcctcccttccctcccacctttttggtacattggtgtaaaaaatgtaaaacaaaaaaattttatgaactaactgtggtgtgtgaaagagagaagaaaaactggaaatcttattccgtgtgtgtttgggagttgcttggggttgggggtcgtggggacaggggacagctctgggagcagaggtggccctcggtgccgtcctgcgcagactctcccgtcccacggaggccgcggggtgggggctggggggggtgccgccgaccgttccgctcttccggccaggtgcttttctgtcaatttctatggaatgcaaaaggaggtttttgttttattttgtttttttgtaaagcttaagaaaaaaatctacatcttatacttgagcctccatacttaaaaaaagaaaagaaaagaaatcaataaaaagaaactggggcgc

SEQ ID NO: 334525 - DNA, 1893 bp, Homo sapiens
agctggcggcgtggggggcgggcccgggccgggccggggcggggaaggaaggtggcggcggcccggcgcggggggaggggggtgctgacccggatgttcactcctgggcacccggggaagtggaagcgccgggccctgctgcgggggggagagccactgacgccgggaccgggaccgccgccgccgccgccaccatgagtgatcagcagctggactgtgccttggacctaatgaggcgcctgcctccccagcaaatcgagaaaaacctcagcgacctgatcgacctggtccccagtctatgtgaggatctcctgtcttctgttgaccagccactgaaaattgccagagacaaggtggtgggaaaggattaccttttgtgtgactacaacagagatggggactcctataggtcaccatggagtaacaagtatgaccctcccttggaggatggggccatgccgtcagctcggctgagaaagctggaggtggaagccaacaatgcctttgaccagtatcgagacctgtattttgaaggtggcgtctcatctgtctacctctgggatctggatcatggctttgctggagtgatcctcataaagaaggctggagatggatcaaagaagatcaaaggctgctgggattccatccacgtggtagaagtgcaggagaaatccagcggtcgcaccgcccattacaagttgacctccacggtgatgctgtggctgcagaccaacaaatctggctctggcaccatgaacctcggaggcagccttaccagacagatggagaaggatgaaactgtgagtgactgctccccacacatagccaacatcgggcgcctggtagaggacatggaaaataaaatcagaagtacgctgaacgagatctactttggaaaaacaaaggatatcgtcaatgggctgaggtctgtgcagacttttgcagacaaatcaaaacaagaagctctgaagaatgacctggtggaggctttgaagagaaagcagcaatgctaaacctctgtttcatgctaaccagacacgccgtgcactcgttagattcctttcttagaaaactcgttttctgctcccttccctcgtcccttccctccccgacaggtcacataacagctgcatcattgaccgcacagcgccatctctccctgagaataaagccgatagccaccctcctccggctccgagcctgcttctgccacacctcgctctcagttctctccacatttccatagagaccgtgtggtttttgttcacccgggccccccgtcttcctccctgtccccccatttataggcataaaatccactgtctgccagcctcccttccctcccacctttttggtacattggtgtaaaaaatgtaaaacaaaaaaattttatgaactaactgtggtgtgtgaaagagagaagaaaaactggaaatcttattccgtgtgtgtttgggagttgcttggggttgggggtcgtggggacaggggacagctctgggagcagaggtggccctcggtgccgtcctgcgcagactctcccgtcccacggaggccgcggggtgggggctggggggggtgccgccgaccgttccgctcttccggccaggtgcttttctgtcaatttctatggaatgcaaaaggaggtttttgttttattttgtttttttgtaaagcttaagaaaaaaatctacatcttatacttgagcctccatacttaaaaaaagaaaagaaaagaaatcaataaaaagaaactggggcgccaaaaaaaaacacactaacaactcccccacgaacaaaagaaaccctcaccacaagggggcgcccccctttaaatttcccctcgggggccccagttttggcgctccccaccttcttgtcccaaggggccca

SEQ ID NO: 334526 - DNA, 1720 bp, Homo sapiens
  misc_feature (1559)..(1559): n is a, c, g, or t
agctggcggcgtggggggcgggcccgggccgggccggggcggggaaggaaggtggcggcggcccggcgcggggggaggggggtgctgacccggatgttcactcctgggcacccggggaagtggaagcgccgggccctgctgcgggggggagagccactgacgccgggaccgggaccgccgccgccgccgccaccatgagtgatcagcagctggactgtgccttggacctaatgaggcgcctgcctccccagcaaatcgagaaaaacctcagcgacctgatcgacctggtccccagtctatgtgaggatctcctgtcttctgttgaccagccactgaaaattgccagagacaaggtggtgggaaaggattaccttttgtgtgactacaacagagatggggactcctataggtcaccatggagtaacaagtatgaccctcccttggaggatggggccatgccgtcagctcggctgagaaagctggaggtggaagccaacaatgcctttgaccagtatcgagacctgtattttgaaggtggcgtctcatctgtctacctctgggatctggatcatggctttgctggagtgatcctcataaagaaggctggagatggatcaaagaagatcaaaggctgctgggattccatccacgtggtagaagtgcaggagaaatccagcggtcgcaccgcccattacaagttgacctccacggtgatgctgtggctgcagaccaacaaatctggctctggcaccatgaacctcggaggcagccttaccagacagatggagaaggatgaaactgtgagtgactgctccccacacatagccaacatcgggcgcctggtagaggacatggaaaataaaatcagaagtacgctgaacgagatctactttggaaaaacaaaggatatcgtcaatgggctgaggtctgtgcagacttttgcagacaaatcaaaacaagaagctctgaagaatgacctggtggaggctttgaagagaaagcagcaatgctaaacctctgtttcatgctaaccagacacgccgtgcactcgttagattcctttcttagaaaactcgttttctgctcccttccctcgtcccttccctccccgacaggtcacataacagctgcatcattgaccgcacagcgccatctctccctgagaataaagccgatagccaccctcctccggctccgagcctgcttctgccacacctcgctctcagttctctccacatttccatagagaccgtgtggtttttgttcacccgggccccccgtcttcctccctgtccccccatttataggcataaaatccactgtctgccagcctcccttccctcccacctttttggtacattggtgtaaaaaatgtaaaacaaaaaaattttatgaactaactgtggtgtgtgaaagagagaagaaaaactggaaatcttattccgtgtgtgtttgggagttgcttggggttgggggtcgtggggacaggggacagctctgggagcagaggtggccctcggtgccgtcctgcgcagactctcccgtcccacggagccccntggtccccacacatcatatcctccccatactcttgcagggcccagggctcgtgagcaacagttgggacacccgggccttggaggatgcaccccgtgttaggctttgcccaccggccaccaacactcctgtaattccaataaagcagttcattttttgagaa

SEQ ID NO: 334527 - DNA, 1965 bp, Homo sapiens
agctggcggcgtggggggcgggcccgggccgggccggggcggggaaggaaggtggcggcggcccggcgcggggggaggggggtgctgacccggatgttcactcctgggcacccggggaagtggaagcgccgggccctgctgcgggggggagagccactgacgccgggaccgggaccgccgccgccgccgccaccatgagtgatcagcagctggactgtgccttggacctaatgaggcgcctgcctccccagcaaatcgagaaaaacctcagcgacctgatcgacctggtccccagtctatgtgaggatctcctgtcttctgttgaccagccactgaaaattgccagagacaaggtggtgggaaaggattaccttttgtgtgactacaacagagatggggactcctataggtcaccatggagtaacaagtatgaccctcccttggaggatggggccatgccgtcagctcggctgagaaagctggaggtggaagccaacaatgcctttgaccagtatcgagacctgtattttgaaggtggcgtctcatctgtctacctctgggatctggatcatggctttgctggagtgatcctcataaagaaggctggagatggatcaaagaagatcaaaggctgctgggattccatccacgtggtagaagtgcaggagaaatccagcggtcgcaccgcccattacaagttgacctccacggtgatgctgtggctgcagaccaacaaatctggctctggcaccatgaacctcggaggcagccttaccagacagatggagaaggatgaaactgtgagtgactgctccccacacatagccaacatcgggcgcctggtagaggacatggaaaataaaatcagaagtacgctgaacgagatctactttggaaaaacaaaggatatcgtcaatgggctgaggtctgtgcagacttttgcagacaaatcaaaacaagaagctctgaagaatgacctggtggaggctttgaagagaaagcagcaatgctaaacctctgtttcatgctaaccagacacgccgtgcactcgttagattcctttcttagaaaactcgttttctgctcccttccctcgtcccttccctccccgacaggtcacataacagctgcatcattgaccgcacagcgccatctctccctgagaataaagccgatagccaccctcctccggctccgagcctgcttctgccacacctcgctctcagttctctccacatttccatagagaccgtgtggtttttgttcacccgggccccccgtcttcctccctgtccccccatttataggcataaaatccactgtctgccagcctcccttccctcccacctttttggtacattggtgtaaaaaatgtaaaacaaaaaaattttatgaactaactgtggtgtgtgaaagagagaagaaaaactggaaatcttaaaaaaaacaaaaattaaaataatctcttataaataaaaaaacattctaaaaaatcaatatactaatcctaaaaaattaattggccgacatttaacaattttggaattggaaaaaccttggcgtaccccattaaatccctttgaaacaaattcccttttacccagttggctaaaaaccaaaaaggtctcaaccaatcgtcttttacaacatttgtcaaccttaaatggtaaatggcaaattttaacgctttattattttttaaaaaatcccctataaatttttttaaaatcactttaatttttaaaccaaatggctcaaaatctgaaacttcttaataactcaaagaattccaccagaaaaggttagatgattttccattctggaacaaaatttacttttaaataacttggtcttcaattaaaaggtcaccttttataagggcaatgcccacaattaaaccatcctctaactaagtttttgggctccagtcctctaagcctatctcaccctggggcccctcttttc

SEQ ID NO: 334528 - DNA, 1646 bp, Homo sapiens
gcggccgcccccggggagcccggcgggcgccggcgcgccccccccacccccaccccacgtctcgccgcgccgccaccatgagtgatcagcagctggactgtgccttggacctaatgaggcgcctgcctccccagcaaatcgagaaaaacctcagcgacctgatcgacctggtccccagtctatgtgaggatctcctgtcttctgttgaccagccactgaaaattgccagagacaaggtggtgggaaaggattaccttttgtgtgactacaacagagatggggactcctataggtcaccatggagtaacaagtatgaccctcccttggaggatggggccatgccgtcagctcggctgagaaagctggaggtggaagccaacaatgcctttgaccagtatcgagacctgtattttgaaggtggcgtctcatctgtctacctctgggatctggatcatggctttgctggagtgatcctcataaagaaggctggagatggatcaaagaagatcaaaggctgctgggattccatccacgtggtagaagtgcaggagaaatccagcggtcgcaccgcccattacaagttgacctccacggtgatgctgtggctgcagaccaacaaatctggctctggcaccatgaacctcggaggcagccttaccagacagatggagaaggatgaaactgtgagtgactgctccccacacatagccaacatcgggcgcctggtagaggacatggaaaataaaatcagaagtacgctgaacgagatctactttggaaaaacaaaggatatcgtcaatgggctgaggtctgtgcagacttttgcagacaaatcaaaacaagaagctctgaagaatgacctggtggaggctttgaagagaaagcagcaatgctaaacctctgtttcatgctaaccagacacgccgtgcactcgttagattcctttcttagaaaactcgttttctgctcccttccctcgtcccttccctccccgacaggtcacataacagctgcatcattgaccgcacagcgccatctctccctgagaataaagccgatagccaccctcctccggctccgagcctgcttctgccacacctcgctctcagttctctccacatttccatagagaccgtgtggtttttgttcacccgggccccccgtcttcctccctgtccccccatttataggcataaaatccactgtctgccagcctcccttccctcccacctttttggtacattggtgtaaaaaatgtaaaacaaaaaaattttatgaactaactgtggtgtgtgaaagagagaagaaaaactggaaatcttattccgtgtgtgtttgggagttgcttggggttgggggtcgtggggacaggggacagctctgggagcagaggtggccctcggtgccgtcctgcgcagactctcccgtcccacggaggccgcggggtgggggctggggggggtgccgccgaccgttccgctcttccggccaggtgcttttctgtcaatttctatggaatgcaaaaggaggtttttgttttattttgtttttttgtaaagcttaagaaaaaaatctacatcttatacttgagcctccatacttaaaaaaagaaaagaaaagaaatcaataaaaagaaactggggcgc

SEQ ID NO: 334529 - DNA, 1739 bp, Homo sapiens
  misc_feature (21)..(21): n is a, c, g, or t
  misc_feature (23)..(23): n is a, c, g, or t
  misc_feature (26)..(26): n is a, c, g, or t
  misc_feature (33)..(33): n is a, c, g, or t
  misc_feature (52)..(53): n is a, c, g, or t
  misc_feature (65)..(65): n is a, c, g, or t
gacgtaaagaggctcgactgntntgntccaaanaagaaggccacggcgtttnntatataacgaancggcatacttacgtctagtacagctgtgcgatcgcacgagaccggagtgagcgcggctgctgcggggggaagcactgacgccgggaccgggacgcgcgccgccacatgagtgatcagcagctggactgtgccttggacctaatgaggcgcctgcctccccagcaaatcgagaaaaacctcagcgacctgatcgacctggtccccagtctatgtgaggatctcctgtcttctgttgaccagccactgaaaattgccagagacaaggtggtgggaaaggattaccttttgtgtgactacaacagagatggggactcctataggtcaccatggagtaacaagtatgaccctcccttggaggatggggccatgccgtcagctcggctgagaaagctggaggtggaagccaacaatgcctttgaccagtatcgagacctgtattttgaaggtggcgtctcatctgtctacctctgggatctggatcatggctttgctggagtgatcctcataaagaaggctggagatggatcaaagaagatcaaaggctgctgggattccatccacgtggtagaagtgcaggagaaatccagcggtcgcaccgcccattacaagttgacctccacggtgatgctgtggctgcagaccaacaaatctggctctggcaccatgaacctcggaggcagccttaccagacagatggagaaggatgaaactgtgagtgactgctccccacacatagccaacatcgggcgcctggtagaggacatggaaaataaaatcagaagtacgctgaacgagatctactttggaaaaacaaaggatatcgtcaatgggctgaggtctgtgcagacttttgcagacaaatcaaaacaagaagctctgaagaatgacctggtggaggctttgaagagaaagcagcaatgctaaacctctgtttcatgctaaccagacacgccgtgcactcgttagattcctttcttagaaaactcgttttctgctcccttccctcgtcccttccctccccgacaggtcacataacagctgcatcattgaccgcacagcgccatctctccctgagaataaagccgatagccaccctcctccggctccgagcctgcttctgccacacctcgctctcagttctctccacatttccatagagaccgtgtggtttttgttcacccgggccccccgtcttcctccctgtccccccatttataggcataaaatccactgtctgccagcctcccttccctcccacctttttggtacattggtgtaaaaaatgtaaaacaaaaaaattttatgaactaactgtggtgtgtgaaagagagaagaaaaactggaaatcttattccgtgtgtgtttgggagttgcttggggttgggggtcgtggggacaggggacagctctgggagcagaggtggccctcggtgccgtcctgcgcagactctcccgtcccacggaggccgcggggtgggggctggggggggtgccgccgaccgttccgctcttccggccaggtgcttttctgtcaatttctatggaatgcaaaaggaggtttttgttttattttgtttttttgtaaagcttaagaaaaaaatctacatcttatacttgagcctccatacttaaaaaaagaaaagaaaagaaatcaataaaaagaaactggggcgc

SEQ ID NO: 334530 - DNA, 1749 bp, Homo sapiens
acctcagtttctctcaggcctatgagctgccccatctggtaaataggtggagagaacagagccggcaggggcctccagcagatactccagcccacagtctttgtccctgggtggctcactagagccagaagagaaggctcactaggacttgaatcctggcctggtcaccttccagctttgagaccttggacaaggcacttcatctcccacagtttccgaaagccgaattcatgagacggttgtgaggatttggggtgcgtgtaaactgcagatgtccccagtctatgtgaggatctcctgtcttctgttgaccagccactgaaaattgccagagacaaggtggtgggaaaggattaccttttgtgtgactacaacagagatggggactcctataggtcaccatggagtaacaagtatgaccctcccttggaggatggggccatgccgtcagctcggctgagaaagctggaggtggaagccaacaatgcctttgaccagtatcgagacctgtattttgaaggtggcgtctcatctgtctacctctgggatctggatcatggctttgctggagtgatcctcataaagaaggctggagatggatcaaagaagatcaaaggctgctgggattccatccacgtggtagaagtgcaggagaaatccagcggtcgcaccgcccattacaagttgacctccacggtgatgctgtggctgcagaccaacaaatctggctctggcaccatgaacctcggaggcagccttaccagacagatggagaaggatgaaactgtgagtgactgctccccacacatagccaacatcgggcgcctggtagaggacatggaaaataaaatcagaagtacgctgaacgagatctactttggaaaaacaaaggatatcgtcaatgggctgaggtctgtgcagacttttgcagacaaatcaaaacaagaagctctgaagaatgacctggtggaggctttgaagagaaagcagcaatgctaaacctctgtttcatgctaaccagacacgccgtgcactcgttagattcctttcttagaaaactcgttttctgctcccttccctcgtcccttccctccccgacaggtcacataacagctgcatcattgaccgcacagcgccatctctccctgagaataaagccgatagccaccctcctccggctccgagcctgcttctgccacacctcgctctcagttctctccacatttccatagagaccgtgtggtttttgttcacccgggccccccgtcttcctccctgtccccccatttataggcataaaatccactgtctgccagcctcccttccctcccacctttttggtacattggtgtaaaaaatgtaaaacaaaaaaattttatgaactaactgtggtgtgtgaaagagagaagaaaaactggaaatcttattccgtgtgtgtttgggagttgcttggggttgggggtcgtggggacaggggacagctctgggagcagaggtggccctcggtgccgtcctgcgcagactctcccgtcccacggaggccgcggggtgggggctggggggggtgccgccgaccgttccgctcttccggccaggtgcttttctgtcaatttctatggaatgcaaaaggaggtttttgttttattttgtttttttgtaaagcttaagaaaaaaatctacatcttatacttgagcctccatacttaaaaaaagaaaagaaaagaaatcaataaaaagaaactggggcgc

SEQ ID NO: 334531 - DNA, 1885 bp, Homo sapiens
  misc_feature (1422)..(1422): n is a, c, g, or t
agctggcggcgtggggggcgggcccgggccgggccggggcggggaaggaaggtggcggcggcccggcgcggggggaggggggtgctgacccggatgttcactcctgggcacccggggaagtggaagcgccgggccctgctgcgggggggagagccactgacgccgggaccgggaccgccgccgccgccgccaccatgagtgatcagcagctggactgtgccttggacctaatgaggcgcctgcctccccagcaaatcgagaaaaacctcagcgacctgatcgacctggtccccagtctatgtgaggatctcctgtcttctgttgaccagccactgaaaattgccagagacaaggtggtgggaaaggattaccttttgtgtgactacaacagagatggggactcctataggtcaccatggagtaacaagtatgaccctcccttggaggatggggccatgccgtcagctcggctgagaaagctggaggtggaagccaacaatgcctttgaccagtatcgagacctgtattttgaaggtggcgtctcatctgtctacctctgggatctggatcatggctttgctggagtgatcctcataaagaaggctggagatggatcaaagaagatcaaaggctgctgggattccatccacgtggtagaagtgcaggagaaatccagcggtcgcaccgcccattacaagttgacctccacggtgatgctgtggctgcagaccaacaaatctggctctggcaccatgaacctcggaggcagccttaccagacagatggagaaggatgaaactgtgagtgactgctccccacacatagccaacatcgggcgcctggtagaggacatggaaaataaaatcagaagtacgctgaacgagatctactttggaaaaacaaaggatatcgtcaatgggctgaggtctgtgcagacttttgcagacaaatcaaaacaagaagctctgaagaatgacctggtggaggctttgaagagaaagcagcaatgctaaacctctgtttcatgctaaccagacacgccgtgcactcgttagattcctttcttagaaaactcgttttctgctcccttccctcgtcccttccctccccgacaggtcacataacagctgcatcattgaccgcacagcgccatctctccctgagaataaagccgatagccaccctcctccggctccgagcctgcttctgccacacctcgctctcagttctctccacatttccatagagaccgtgtggtttttgttcacccgggccccccgtcttcctccctgtccccccatttataggcataaaatccactgtctgccagcctcccttccctcccacctttttggtacattggtgtaaaaaatgtaaaacaaaaaaattttatgaaaaaaaaaaaaaaaagaaaaaaaaaanaaagaaaaacaaaaaagaaaaaaaaaacacgaataagaaagcaaccacaaacgaataaataaattacatcacaagaagatactgaactcatgagctgtccccacatcaggcttaaaaacagatgcaattcccggacgtctaaacaaacactgtcaccgctacaccgacgggggtatactaaggcaagctctgaaatctgtggagcaaaacccaacaagtagcaatggaccaatcgtgccttagaacttaaatcgccctaaaaaagtcttcgaaaataagggaccggaatatacccctataaggaacccactcaaccccgtctagaggcgagagaagcgagcgtgtacgggcgagaaagtacacaaagatcgatactacaacaaagaaagggaggcaacaaacaaacaagaggcacagaagacagaacagacggcgcaaagggagaacaagaggggaaagagaa

SEQ ID NO: 334532 - DNA, 1771 bp, Homo sapiens
agctctccatcagggatggggtggtcccggtgctgtgccttctcagttgccgcttctagggaggccgcctaggagccagcgagggaagggcgggcatcggtgtgcccagaaggcagcgcgctgctctgcgggcccttctcgaggctgccgccgtgggtgctgtgcgtgcgaagcattctgcagggcaggccggggtccacggcgcccgggcctgagtgggagccgaggggcgaggatgggtggcccacaggacaaggatgaacgcacaatcgcccttgtgaggccgtggccttggggggccaccaggccctggatccagcatatggcctggacacgatgcacccaagcaggcgcagcctccccttccctctgaactgtcagcttgcaagggttggaactgctgattatggaagtccctcggatcagagtgatcagcagctggactgtgccttggacctaatgaggcgcctgcctccccagcaaatcgagggaggtggaagccaacaatgcctttgaccagtatcgagacctgtattttgaaggtggcgtctcatctgtctacctctgggatctggatcatggctttgctggagtgatcctcataaagaaggctggagatggatcaaagaagatcaaaggctgctgggattccatccacgtggtagaagtgcaggagaaatccagcggtcgcaccgcccattacaagttgacctccacggtgatgctgtggctgcagaccaacaaatctggctctggcaccatgaacctcggaggcagccttaccagacagatggagaaggatgaaactgtgagtgactgctccccacacatagccaacatcgggcgcctggtagaggacatggaaaataaaatcagaagtacgctgaacgagatctactttggaaaaacaaaggatatcgtcaatgggctgaggtctgtgcagacttttgcagacaaatcaaaacaagaagctctgaagaatgacctggtggaggctttgaagagaaagcagcaatgctaaacctctgtttcatgctaaccagacacgccgtgcactcgttagattcctttcttagaaaactcgttttctgctcccttccctcgtcccttccctccccgacaggtcacataacagctgcatcattgaccgcacagcgccatctctccctgagaataaagccgatagccaccctcctccggctccgagcctgcttctgccacacctcgctctcagttctctccacatttccatagagaccgtgtggtttttgttcacccgggccccccgtcttcctccctgtccccccatttataggcataaaatccactgtctgccagcctcccttccctcccacctttttggtacattggtgtaaaaaatgtaaaacaaaaaaattttatgaactaactgtggtgtgtgaaagagagaagaaaaactggaaatcttattccgtgtgtgtttgggagttgcttggggttgggggtcgtggggacaggggacagctctgggagcagaggtggccctcggtgccgtcctgcgcagactctcccgtcccacggaggccgcggggtgggggctggggggggtgccgccgaccgttccgctcttccggccaggtgcttttctgtcaatttctatggaatgcaaaaggaggtttttgttttattttgtttttttgtaaagcttaagaaaaaaatctacatcttatacttgagcctccatacttaaaaaaagaaaagaaaagaaatcaataaaaagaaactggggcgc

SEQ ID NO: 334533 - DNA, 1306 bp, Homo sapiens
cctagaggatcccggattgagataagcacggtggaagcaacaatgcctttgaccagtatcgagactgtattttgaaggtggcgtctcatctgtctacctctgggatctggatcatggctttgctggagtgatcctcataaagaaggctggagatggatcaaagaagatcaaaggctgctgggattccatccacgtggtagaagtgcaggagaaatccagcggtcgcaccgcccattacaagttgacctccacggtgatgctgtggctgcagaccaacaaatctggctctggcaccatgaacctcggaggcagccttaccagacagatggagaaggatgaaactgtgagtgactgctccccacacatagccaacatcgggcgcctggtagaggacatggaaaataaaatcagaagtacgctgaacgagatctactttggaaaaacaaaggatatcgtcaatgggctgaggtctgtgcagacttttgcagacaaatcaaaacaagaagctctgaagaatgacctggtggaggctttgaagagaaagcagcaatgctaaacctctgtttcatgctaaccagacacgccgtgcactcgttagattcctttcttagaaaactcgttttctgctcccttccctcgtcccttccctccccgacaggtcacataacagctgcatcattgaccgcacagcgccatctctccctgagaataaagccgatagccaccctcctccggctccgagcctgcttctgccacacctcgctctcagttctctccacatttccatagagaccgtgtggtttttgttcacccgggccccccgtcttcctccctgtccccccatttataggcataaaatccactgtctgccagcctcccttccctcccacctttttggtacattggtgtaaaaaatgtaaaacaaaaaaattttatgaactaactgtggtgtgtgaaagagagaagaaaaactggaaatcttattccgtgtgtgtttgggagttgcttggggttgggggtcgtggggacaggggacagctctgggagcagaggtggccctcggtgccgtcctgcgcagactctcccgtcccacggaggccgcggggtgggggctggggggggtgccgccgaccgttccgctcttccggccaggtgcttttctgtcaatttctatggaatgcaaaaggaggtttttgttttattttgtttttttgtaaagcttaagaaaaaaatctacatcttatacttgagcctccatacttaaaaaaagaaaagaaaagaaatcaataaaaagaaactggggcgc

SEQ ID NO: 334534 - DNA, 1291 bp, Homo sapiens
agttcataaaatttttttgttttacattttttacaccaatgtaccaaaaaggtattttgaaggtggcgtctcatctgtctacctctgggatctggatcatggctttgctggagtgatcctcataaagaaggctggagatggatcaaagaagatcaaaggctgctgggattccatccacgtggtagaagtgcaggagaaatccagcggtcgcaccgcccattacaagttgacctccacggtgatgctgtggctgcagaccaacaaatctggctctggcaccatgaacctcggaggcagccttaccagacagatggagaaggatgaaactgtgagtgactgctccccacacatagccaacatcgggcgcctggtagaggacatggaaaataaaatcagaagtacgctgaacgagatctactttggaaaaacaaaggatatcgtcaatgggctgaggtctgtgcagacttttgcagacaaatcaaaacaagaagctctgaagaatgacctggtggaggctttgaagagaaagcagcaatgctaaacctctgtttcatgctaaccagacacgccgtgcactcgttagattcctttcttagaaaactcgttttctgctcccttccctcgtcccttccctccccgacaggtcacataacagctgcatcattgaccgcacagcgccatctctccctgagaataaagccgatagccaccctcctccggctccgagcctgcttctgccacacctcgctctcagttctctccacatttccatagagaccgtgtggtttttgttcacccgggccccccgtcttcctccctgtccccccatttataggcataaaatccactgtctgccagcctcccttccctcccacctttttggtacattggtgtaaaaaatgtaaaacaaaaaaattttatgaactaactgtggtgtgtgaaagagagaagaaaaactggaaatcttattccgtgtgtgtttgggagttgcttggggttgggggtcgtggggacaggggacagctctgggagcagaggtggccctcggtgccgtcctgcgcagactctcccgtcccacggaggccgcggggtgggggctggggggggtgccgccgaccgttccgctcttccggccaggtgcttttctgtcaatttctatggaatgcaaaaggaggtttttgttttattttgtttttttgtaaagcttaagaaaaaaatctacatcttatacttgagcctccatacttaaaaaaagaaaagaaaagaaatcaataaaaagaaactggggcgc

SEQ ID NO: 334535 - DNA, 1663 bp, Homo sapiens
gtaaccggtacgcgaagggccttggggtgggcgaaaattccggactactgcagggggtgtggaaagggaagtggaagcgccgggccctgctgcgggggggagagccactgacgccgggaccgggaccgccgccgccgccgccaccatgagtgatcagcagctggactgtgccttggacctaatgaggcgcctgcctccccagcaaatcgagaaaaacctcagcgacctgatcgacctggtccccagtctatgtgaggatctcctgtcttctgttgaccagccactgaaaattgccagagacaaggtggtgggaaaggattaccttttgtgtgactacaacagagatggggactcctataggtcaccatggagtaacaagtatgaccctcccttggaggatggggccatgccgtcagctcggctgagaaagctggaggtggaagccaacaatgcctttgaccagtatcgagacctgtattttgaaggtggcgtctcatctgtctacctctgggatctggatcatggctttggctgctgggattccatccacgtggtagaagtgcaggagaaatccagcggtcgcaccgcccattacaagttgacctccacggtgatgctgtggctgcagaccaacaaatctggctctggcaccatgaacctcggaggcagccttaccagacagatggagaaggatgaaactgtgagtgactgctccccacacatagccaacatcgggcgcctggtagaggacatggaaaataaaatcagaagtacgctgaacgagatctactttggaaaaacaaaggatatcgtcaatgggctgaggtctgtgcagacttttgcagacaaatcaaaacaagaagctctgaagaatgacctggtggaggctttgaagagaaagcagcaatgctaaacctctgtttcatgctaaccagacacgccgtgcactcgttagattcctttcttagaaaactcgttttctgctcccttccctcgtcccttccctccccgacaggtcacataacagctgcatcattgaccgcacagcgccatctctccctgagaataaagccgatagccaccctcctccggctccgagcctgcttctgccacacctcgctctcagttctctccacatttccatagagaccgtgtggtttttgttcacccgggccccccgtcttcctccctgtccccccatttataggcataaaatccactgtctgccagcctcccttccctcccacctttttggtacattggtgtaaaaaatgtaaaacaaaaaaattttatgaactaactgtggtgtgtgaaagagagaagaaaaactggaaatcttattccgtgtgtgtttgggagttgcttggggttgggggtcgtggggacaggggacagctctgggagcagaggtggccctcggtgccgtcctgcgcagactctcccgtcccacggaggccgcggggtgggggctggggggggtgccgccgaccgttccgctcttccggccaggtgcttttctgtcaatttctatggaatgcaaaaggaggtttttgttttattttgtttttttgtaaagcttaagaaaaaaatctacatcttatacttgagcctccatacttaaaaaaagaaaagaaaagaaatcaataaaaagaaactggggcgc

SEQ ID NO: 334536 - DNA, 1876 bp, Homo sapiens
agctggcggcgtggggggcgggcccgggccgggccggggcggggaaggaaggtggcggcggcccggcgcggggggaggggggtgctgacccggatgttcactcctgggcacccggggaagtggaagcgccgggccctgctgcgggggggagagccactgacgccgggaccgggaccgccgccgccgccgccaccatgagtgatcagcagctggactgtgccttggacctaatgaggcgcctgcctccccagcaaatcgagaaaaacctcagcgacctgatcgacctggtccccagtctatgtgaggatctcctgtcttctgttgaccagccactgaaaattgccagagacaaggtggtgggaaaggattaccttttgtgtgactacaacagagatggggactcctataggtcaccatggagtaacaagtatgaccctcccttggaggatggggccatgccgtcagctcggctgagaaagctggaggtggaagccaacaatgcctttgaccagtatcgagacctgtattttgaaggtggcgtctcatctgtctacctctgggatctggatcatggctttgctggagtgatcctcataaagaaggctggagatggatcaaagaagatcaaaggctgctgggattccatccacgtggtagaagtgcaggagaaatccagcggtcgcaccgcccattacaagttgacctccacggtgatgctgtggctgcagaccaacaaatctggctctggcaccatgaacctcggaggcagccttaccagacagatggagaaggatgaaactgtgagtgactgctccccacacatagccaacatcgggcgcctggtagaggacatggaaaataaaatcagaagtacgctgaacgagatctactttggaaaaacaaaggatatcgtcaatgggctgagatctattgatgctatccctgacaaccaaaagtttaagcagttgcagagggagctctctcaagtgctgacccagcgccagatctacatccagcctgataattaagccgatccaggtctgtgcagacttttgcagacaaatcaaaacaagaagctctgaagaatgacctggtggaggctttgaagagaaagcagcaatgctaaacctctgtttcatgctaaccagacacgccgtgcactcgttagattcctttcttagaaaactcgttttctgctcccttccctcgtcccttccctccccgacaggtcacataacagctgcatcattgaccgcacagcgccatctctccctgagaataaagccgatagccaccctcctccggctccgagcctgcttctgccacacctcgctctcagttctctccacatttccatagagaccgtgtggtttttgttcacccgggccccccgtcttcctccctgtccccccatttataggcataaaatccactgtctgccagcctcccttccctcccacctttttggtacattggtgtaaaaaatgtaaaacaaaaaaattttatgaactaactgtggtgtgtgaaagagagaagaaaaactggaaatcttattccgtgtgtgtttgggagttgcttggggttgggggtcgtggggacaggggacagctctgggagcagaggtggccctcggtgccgtcctgcgcagactctcccgtcccacggaggccgcggggtgggggctggggggggtgccgccgaccgttccgctcttccggccaggtgcttttctgtcaatttctatggaatgcaaaaggaggtttttgttttattttgtttttttgtaaagcttaagaaaaaaatctacatcttatacttgagcctccatacttaaaaaaagaaaagaaaagaaatcaataaaaagaaactggggcgc

SEQ ID NO: 334537 - DNA, 1040 bp, Homo sapiens
ctcggtacccggtggctatcgtggcaccatgaacctcggaggcagcccttaccagacagatggagaaggatgaaactgtgagtgactgctccccacacatagccaacatcgggcgcctggtagaggacatggaaaataaaatcagaagtacgctgaacgagatctactttggaaaaacaaaggatatcgtcaatgggctgaggtctgtgcagacttttgcagacaaatcaaaacaagaagctctgaagaatgacctggtggaggctttgaagagaaagcagcaatgctaaacctctgtttcatgctaaccagacacgccgtgcactcgttagattcctttcttagaaaactcgttttctgctcccttccctcgtcccttccctccccgacaggtcacataacagctgcatcattgaccgcacagcgccatctctccctgagaataaagccgatagccaccctcctccggctccgagcctgcttctgccacacctcgctctcagttctctccacatttccatagagaccgtgtggtttttgttcacccgggccccccgtcttcctccctgtccccccatttataggcataaaatccactgtctgccagcctcccttccctcccacctttttggtacattggtgtaaaaaatgtaaaacaaaaaaattttatgaactaactgtggtgtgtgaaagagagaagaaaaactggaaatcttattccgtgtgtgtttgggagttgcttggggttgggggtcgtggggacaggggacagctctgggagcagaggtggccctcggtgccgtcctgcgcagactctcccgtcccacggaggccgcggggtgggggctggggggggtgccgccgaccgttccgctcttccggccaggtgcttttctgtcaatttctatggaatgcaaaaggaggtttttgttttattttgtttttttgtaaagcttaagaaaaaaatctacatcttatacttgagcctccatacttaaaaaaagaaaagaaaagaaatcaataaaaagaaactggggcgc

SEQ ID NO: 334538 - DNA, 1166 bp, Homo sapiens
agctggcggcgtggggggcgggcccgggccgggccggggcggggaaggaaggtggcggcggcccggcgcggggggaggggggtgctgacccggatgttcactcctgggcacccggggaagtggaagcgccgggccctgctgcgggggggagagccactgacgccgggaccgggaccgccgccgccgccgccaccatgagtgatcagcagctggactgtgccttggacctaatgaggcgcctgcctccccagcaaatcgagaaaaacctcagcgacctgatcgacctggtccccagtctatgtgaggatctcctgtcttctgttgaccagccactgaaaattgccagagacaaggtggtgggaaaggattaccttttgtgtgactacaacagagatggggactcctataggtcaccatggagtaacaagtatgaccctcccttggaggatggggccatgccgtcagctcggctgagaaagctggaggtggaagccaacaatgcctttgaccagtatcgagacctgtattttgaaggtggcgtctcatctgtctacctctgggatctggatcatggctttgctggagtgatcctcataaagaaggctggagatggatcaaagaagatcaaaggctgctgggattccatccacgtggtagaagtgcaggagaaatccagcggtcgcaccgcccattacaagttgacctccacggtgatgctgtggctgcagaccaacaaatctggctctggcaccatgaacctcggaggcagccttaccagacagatggagaaggatgaaactgtgagtgactgctccccacacatagccaacatcgggcgcctggtagaggacatggaaaataaaatcagaagtacgctgaacgagatctactttggaaaaacaaaggatatcgtcaatgggctgaggtctgtgcagacttttgcagacaaatcaaaacaagaagctctgaagaatgacctggtggaggctttgaagagaaagcagcaatgctaaacctctgtttcatgctaaccagacacgccgtgcactcgttagattcctttcttagaaaactcgttttctgctcccttccctcgtcccgctctatgtgcatctcttcatctgtatccaatgcgatatcctttataataaaccggtaaacataaa

SEQ ID NO: 334539 - DNA, 1852 bp, Homo sapiens
  misc_feature (21)..(21): n is a, c, g, or t
  misc_feature (23)..(23): n is a, c, g, or t
  misc_feature (26)..(26): n is a, c, g, or t
  misc_feature (33)..(33): n is a, c, g, or t
  misc_feature (52)..(53): n is a, c, g, or t
  misc_feature (65)..(65): n is a, c, g, or t
gacgtaaagaggctcgactgntntgntccaaanaagaaggccacggcgtttnntatataacgaancggcatacttacgtctagtacagctgtgcgatcgcacgagaccggagtgagcgcggctgctgcggggggaagcactgacgccgggaccgggacgcgcgccgccacatgagtgatcagcagctggactgtgccttggacctaatgaggcgcctgcctccccagcaaatcgagaaaaacctcagcgacctgatcgacctggtccccagtctatgtgaggatctcctgtcttctgttgaccagccactgaaaattgccagagacaaggtggtgggaaaggattaccttttgtgtgactacaacagagatggggactcctataggtcaccatggagtaacaagtatgaccctcccttggaggatggggccatgccgtcagctcggctgagaaagctggaggtggaagccaacaatgcctttgaccagtatcgagacctgtattttgaaggtggcgtctcatctgtctacctctgggatctggatcatggctttgctggagtgatcctcataaagaaggctggagatggatcaaagaagatcaaaggctgctgggattccatccacgtggtagaagtgcaggagaaatccagcggtcgcaccgcccattacaagttgacctccacggtgatgctgtggctgcagaccaacaaatctggctctggcaccatgaacctcggaggcagccttaccagacagatggagaaggatgaaactgtgagtgactgctccccacacatagccaacatcgggcgcctggtagaggacatggaaaataaaatcagaagtacgctgaacgagatctactttggaaaaacaaaggatatcgtcaatgggctgagatctattgatgctatccctgacaaccaaaagtttaagcagttgcagagggagctctctcaagtgctgacccagcgccagatctacatccagcctgataattaagccgatccaggtctgtgcagacttttgcagacaaatcaaaacaagaagctctgaagaatgacctggtggaggctttgaagagaaagcagcaatgctaaacctctgtttcatgctaaccagacacgccgtgcactcgttagattcctttcttagaaaactcgttttctgctcccttccctcgtcccttccctccccgacaggtcacataacagctgcatcattgaccgcacagcgccatctctccctgagaataaagccgatagccaccctcctccggctccgagcctgcttctgccacacctcgctctcagttctctccacatttccatagagaccgtgtggtttttgttcacccgggccccccgtcttcctccctgtccccccatttataggcataaaatccactgtctgccagcctcccttccctcccacctttttggtacattggtgtaaaaaatgtaaaacaaaaaaattttatgaactaactgtggtgtgtgaaagagagaagaaaaactggaaatcttattccgtgtgtgtttgggagttgcttggggttgggggtcgtggggacaggggacagctctgggagcagaggtggccctcggtgccgtcctgcgcagactctcccgtcccacggaggccgcggggtgggggctggggggggtgccgccgaccgttccgctcttccggccaggtgcttttctgtcaatttctatggaatgcaaaaggaggtttttgttttattttgtttttttgtaaagcttaagaaaaaaatctacatcttatacttgagcctccatacttaaaaaaagaaaagaaaagaaatcaataaaaagaaactggggcgc

SEQ ID NO: 334540 - DNA, 1096 bp, Homo sapiens
agctggcggcgtggggggcgggcccgggccgggccggggcggggaaggaaggtggcggcggcccggcgcggggggaggggggtgctgacccggatgttcactcctgggcacccggggaagtggaagcgccgggccctgctgcgggggggagagccactgacgccgggaccgggaccgccgccgccgccgccaccatgagtgatcagcagctggactgtgccttggacctaatgaggcgcctgcctccccagcaaatcgagaaaaacctcagcgacctgatcgacctggtccccagtctatgtgaggatctcctgtcttctgttgaccagccactgaaaattgccagagacaaggtggtgggaaaggattaccttttgtgtgactacaacagagatggggactcctataggtcaccatggagtaacaagtatgaccctcccttggaggatggggccatgccgtcagctcggctgagaaagctggaggtggaagccaacaatgcctttgaccagtatcgagacctgtattttgaaggtggcgtctcatctgtctacctctgggatctggatcatggctttgctggagtgatcctcataaagaaggctggagatggatcaaagaagatcaaaggctgctgggattccatccacgtggtagaagtgcaggagaaatccagcggtcgcaccgcccattacaagttgacctccacggtgatgctgtggctgcagaccaacaaatctggctctggcaccatgaacctcggaggcagccttaccagacagatggagaaggatgaaactgtgagtgactgctccccacacatagccaacatcgggcgcctggtagaggacatggaaaataaaatcagaatctcccgtcccacggaggccgcggggtgggggctggggggggtgccgccgaccgttccgctcttccggccaggtgcttttctgtcaatttctatggaatgcaaaaggaggtttttgttttattttgtttttttgtaaagcttaagaaaaaaatctacatcttatacttgagcctccatacttaaaaaaagaaaagaaaagaaatcaataaaaagaaactggggcgc

SEQ ID NO: 334541 - DNA, 1164 bp, Homo sapiens
gtaaccggtacgcgaagggccttggggtgggcgaaaattccggactactgcagggggtgtggaaagggaagtggaagcgccgggccctgctgcgggggggagagccactgacgccgggaccgggaccgccgccgccgccgccaccatgagtgatcagcagctggactgtgccttggacctaatgaggcgcctgcctccccagcaaatcgagaaaaacctcagcgacctgatcgacctggtccccagtctatgtgaggatctcctgtcttctgttgaccagccactgaaaattgccagagacaaggtggtgggaaaggattaccttttgtgtgactacaacagagatggggactcctataggtcaccatggagtaacaagtatgaccctcccttggaggatggggccatgccgtcagctcggctgagaaagctggaggtggaagccaacaatgcctttgaccagtatcgagacctgtattttgaaggtggcgtctcatctgtctacctctgggatctggatcatggctttgctggagtgatcctcataaagaaggctggagatggatcaaagaagatcaaaggctgctgggattccatccacgtggtagaagtgcagatggagaaggatgaaactgtgagtgactgctccccacacatagccaacatcgggcgcctggtagaggacatggaaaataaaatcagaagtacgctgaacgagatctactttggaaaaacaaaggatatcgtcaatgggctgaggtctgtgcagacttttgcagacaaatcaaaacaagaagctctgaagaatgacctggtggaggctttgaagagaaagcagcaatgctaaacctctgtttcatgctaaccagacacgccgtgcactcgttagattcctttcttagaaaactcgttttctgctcccttccctcgtcccttccctccccgacaggtcacataacagctgcaaaatatttcctaacacaagccacagcctccatgatactaataatagccatcatcattaacctcctatattctggccaatggaccattacaaaaatattcaacccagtagcaataacaataataactctggccctagccataaaactaggactctcacctttccacttctgagtcccagaagtaacccccgatcagcat

SEQ ID NO: 334542 - DNA, 444 bp, Homo sapiens
agttcataaaatttttttgttttacattttttacaccaatgtaccaaaaaggtgggagggaagggaggctggcagacctaactgtggtgtgtgaaagagagaagaaaaactggaaatcttattccgtgtgtgtttgggagttgcttggggttgggggtcgtggggacaggggacagctctgggagcagaggtggccctcggtgccgtcctgcgcagactctcccgtcccacggaggccgcggggtgggggctggggggggtgccgccgaccgttccgctcttccggccaggtgcttttctgtcaatttctatggaatgcaaaaggaggtttttgttttattttgtttttttgtaaagcttaagaaaaaaatctacatcttatacttgagcctccatacttaaaaaaagaaaagaaaagaaatcaataaaaagaaactggggcgc

SEQ ID NO: 334543 - DNA, 372 bp, Homo sapiens
caggagggctgcacaggtgcagctgccactttcagaccacacacttcaagctagagcttggcctgcgcccctggtggttgggggttggaagagcagactgtgttgacagggtctttaattcacgattccaggtgcttctgaattgttggatcctgatgaatcgcaatcaggactatgtttggcttgagctccagcctcatgaccaccaaccccatcgaatgactgagagctgccaggctcctgccacgttggagctcagaatcctcccgtggggacactgtgctgcagccagcctccagggagccgcttgttttatggcctaaaaagtctctttatgctgagaaggtcacactggactttgctcacacagag

SEQ ID NO: 334544 - DNA, 474 bp, Homo sapiens
cctggtttaactgcctttatttgtcagtttctgtagaagaatgaagaaggtgatggcacccacgttacagggctgttcacgggaggtttaagtgagatcttacagagaaagcgcttagcaggtgccccaggtccagagtgtggggttggctgggagtcgtgtgcatctcctgccctgaccccctctgcaaacttgttcctgagtgcttgagtgaggcacacttgacctgcttatgtggttcccatggcaccatgatgtggggaatgtttcccaacaaggcaccttatcaagcgctctctctccactctgctgttcctaccacatatccctgggcaggtcaccctgcctttcttgttttcttttgaagacaggtctcgctcgatcacccaggccagagtacagtggcaaaatcatagctcactgcagctcctggactcaagggatcctcctgcctcagcctcctgaatagttggg

SEQ ID NO: 334545 - DNA, 98 bp, Homo sapiens
tttggagaatttgagctacagaatgcagtatttcaaagtaacttctacacacctgattactttacatcaaaaatggatattggttactttctgggcac

SEQ ID NO: 334546 - DNA, 438 bp, Homo sapiens
attttttctgtctgccagatgaaaaaaagaaattggatagacgcgttatggtagtggcaggtggtaatgtctgtcactctgaagacaaaaatctttctctcaatagagatttgaagggattttaaaatcccttagaaaaaaacaaaaacaactttaaaaactgttgcttaatttgggctgaaacacaattttccaaaacactatttctcgagatggcaagaagtttttaaaaactaatattttagcactttatgactcaaactctcaaatgtgaaatgcagctcttacttaaaattgttttcacagaaattttattttggaataaccacactggaattgttgctgctaaaaattgcctaaacccttgtcgtacctttttccatatacctgttgaggagcagaaggtggactggctaccacctgccccaagttgttctg

SEQ ID NO: 334547 - DNA, 541 bp, Homo sapiens
agactctatcgtacaaaaaaaaaataaaataaattaaagaagtaaataaataaatgatggcttatttcataatagttgtgactttgtaaagcttttaaatctgctttccccagagtctagcttttaaataaaatacaggatataaaaggtgggagcctcttgaatggaatgtgggggctttttctctctccccataggatagatatattctgtttcctgtcccccaccgagtcaagaataatttaagttttggcataagaaactgctgaaggaaagtgggttgaatcggctaatatttttcttctttttgcaggatatagaagacttagatcactgtgagatgaaagaagagcctactagtgagaagaagttggaggatgaaggaactgaaaaagaaaactgggcaatattagagaaaattaggaagactgaaaggcaaggccatttaaatgtgttgaccctgatagtcctttgcacagtgatcttcagatcttaaaagaaaaagaagagataggagacattttgcttatgttttaaggta

SEQ ID NO: 334548 - DNA, 654 bp, Homo sapiens
tcaggttttccttgttcccgcatgttcagccaatcgtgtttaaggagaaactaacaatgaaaacgggcttgttgatggaggaaaagttggaatgcagcctctggtgctgtttgagcgatccctctatcccgggtcgctgctgtgttctggaaaggcacattgtaccctggatgcagcagcttcatcagcaatggaagtggctgatatgtggactctgcagattatataaccttcctaagcacccgaatgttgagatgccagatcaaccactacccatgggtcagaatgggacaacagaagaagtgacttcaaaagaagaggaagaagaagagatggatgaagatatagaagacttagatcactgtgagatgaaagaagagcctactagtgagaagaagttggaggatgaaggaactgaaaaagaaaactgggcaatattagagaaaattaggaagactgaaaggcaaggccatttaaatgtgctgcagtgtctgggtcagtgcaagcttcagatagacttaagaaagagttcagggacttatacagatcacagagttataagacaggttgaccctgatagtcctttgcacagtgatcttcagatcttaaaagaaaaagaagagataggagacattttgcttatgttttaaggta

SEQ ID NO: 334549 - DNA, 635 bp, Homo sapiens
tcaggttttccttgttcccgcatgttcagccaatcgtgtttaaggagaaactaacaatgaaaacgggcttgttgatggaggaaaagttggaatgcagcctctggtgctgtttgagcgatccctctatcccgggtcgctgctgtgttctggaaaggcacattgtaccctggatgcagcagcttcatcagcaatggaagtggctgatatgtggactctgcagattatataaccttcctaagcacccgaatgttgagatgccagatcaaccactacccatgggtcagaatgggacaacagaagaagtgacttcaaaagaaaaaaaaaaaggaaaaggaggcggagcctgaggaacagggggaggattcatccagggacccccggttacggcgtttacagaaccgtattagtgaagatgtggaagagagattgcctcgacatcgaaaaataggggaacctgaagtggtaggagagagtgactcaaaagtagaaggagatgcttggcgcatggaacgagaagacagcagtgaagaagagggggaggaaattgatgatgaggaaatagagcggcggcgtggcatgatgcgtcagcgagcacaggagagaaaaattgaagagatggaagtcatggaagtgga

SEQ ID NO: 334550 - DNA, 538 bp, Homo sapiens
gttggctcagaaagtcaaggtggccctcatgtcttgatcccccagagtctgcatgtgtgagggctggagatgggggctgcagggcaggactcaggttttcactctgactgagcaggcctggtacatcatcactcaatgtccagagcgcaagatggtccatatttttggttgaggaagttatgggctcaagagattaaatcactttctggagcacagcatagttatctctccctctctctcttttatgggtaaaattatgagcataattctcaacccagctctgtaatagtagagaatgtgctctcatctgctccatggccagtgacattttggggctgaaatgctcagagtggaacaggtcagtggacctctggctccatccatgcctggtttggaacaaaggactggggaaggaaggaaggaaggaaggaaagaaggagggggacctccaccccaccaccctccgctgacatcatacactctgagaagctcctgactcaggccccctctgaggcactcctccccactactccactac

SEQ ID NO: 334551 - DNA, 489 bp, Homo sapiens
cagagtcagaaagcttgcaggtgggcaagtgtccaggagaagaaatgttggctcagaaagtcaaggtggccctcatgtcttgatcccccagagtctgcatgtgtgagggctggagatgggggctgcagggcaggactcaggttttcactctgactgagcaggcctggtacatcatcactcaatgtccagagcgcaagatggtccatatttttggttgaggaagttatgggctcaagagattaaatcactttctggagcacagcatagttatctctccctctctctcttttatgggtaaaattatgagcataattctcaacccagctctgtaatagtagagaatgtgctctcatctgctccatggccagtgacattttggggctgaaatgctcagagtggaacaggtcagtggacctctggctccatccatgcctggtttggaacaaaggactggggaaggaaggaaggaaggaaggaaagaaggagggg

SEQ ID NO: 334552 - DNA, 397 bp, Homo sapiens
attatagatatctacccaatcatcaaaataataaatgatctctgacactgcacaattaatgaatctatagaccttattcaaatcttccctatcttcccactgatgtcctttttctggaccatgatccaatttaggatcacaaattgcatctctttgttctgtcctctcagtctcctttaatctgggatagtgccgaaaatttctttagagttcatgaccttaacatttttgaagagtattggcgagttattttgtagaataaccctcagtttaggcttttctaattttttctcataattaaactcaggttatgcactttgggcaagaataccacagaggtgatgctgcgcgttattcatccatcatattaggatgccctaagatgtccatgtcactg

SEQ ID NO: 334553 - DNA, 190 bp, Homo sapiens
ccttttcttgaaaatgattacctatgttaggctttctgctagcaagagttctttaacagaaggtgactgtatatacacatttaactcacagcagcagcccaacgatagccaacctccaaccagggcctataaatacagtcctaaccctatatattccttagaagacaatttggaaatagagaactgatga

SEQ ID NO: 334554 - DNA, 222 bp, Homo sapiens
gatcacttgagtgcagaggtacgagaccagcctgggcaaacccccatctctaaaacagttagctaagcatggtggcacatgcctgtagtcccagctactcaagaggctgaggcaggaggatcgttagagcccaggaagttgaggctgcagtgagcagtgttcttgccactgcactctagccactgcactctagcctgggtcacaaagtgagaccttgtccct

SEQ ID NO: 334555 - DNA, 219 bp, Homo sapiens
ggttttctttcttctatgctgtcttgccacttctaatgttgcctcttctaatccctcttctgttatttatgcatatgggggaaggaaggaagagggaggtagtacgtgggtaaaggtaagaaacctcaaaatggaatgtggacttagggccgtatctacatcaggaatacaaaactttgtttaattttactttctaatatcatcatttttttttttttt

SEQ ID NO: 334556 - DNA, 154 bp, Homo sapiens
aagaaggcccgggccagtgtccttagggtttgggtaaagttgcaggtagtgagattgagaaggagccactggagggtaggaggaaatctagaggaatttgattttaaggaggttggtaatgacctttatagactattgtgtgtttggtctgaaa

SEQ ID NO: 334557 - DNA, 416 bp, Homo sapiens
agttcttagaggatccccttacaaccccacgatcaccaggctcctgccgtcccctcctcctccccttctccctctcgcggtctacactccagcctgggtaacaagagcgaaactccatctcaaaaaaaaagaagtgatgctagaaagagctggacagaagggaacaccaagacacctgtccatcttcacttagccaaatccagggccctgacaagatgggttttcaccaggacattttatggggctcctggctccccactatttctgacagtaggattcctaggtctgtgtcacctgtgagacagaaggggagccacattctggtggcagggacagaaccacacgcatggacactgatgtgccatcctggtccccacaggtcccctgaccagtacagctcctagaataggtcttct

SEQ ID NO: 334558 - DNA, 718 bp, Homo sapiens
ctgacacatacgccgtctggaaggatttgaggcaagacagacacatcagctggggaccctgacctggaggaagggtccgccacaggggcactataacaggtgtcagccccctctgacagtggcccagtccgagtctcccaaatcccaccactctagaggttggccacccaaccttgtcccctcctctgattcccaccattgttcccagtacctccaggaccaaggaatcctggcagcagttgaataagcaccttgctcccaccatctgggctgccactggtacggcaaagtgaggttgtcgaggcccccctgactgcactccgcccggaagccctggacaggctcctgccgtcccctcctcctccccttctccctctcgcggtctacactccagcctgggtaacaagagcgaaactccatctcaaaaaaaaagaagtgatgctagaaagagctggacagaagggaacaccaagacacctgtccatcttcacttagccaaatccagggccctgacaagatgggttttcaccaggacattttatggggctcctggctccccactatttctgacagtaggattcctaggtctgtgtcacctgtgagacagaaggggagccacattctggtggcagggacagaaccacacgcatggacactgatgtgccatcctggtccccacaggtcccctgaccagtacagctcctagaataggtcttct

SEQ ID NO: 334559 - DNA, 322 bp, Homo sapiens
ttccccatatccagtggcaaaaaaatgagggagagggaaggaaggaaggacggaaggagggaaggaaggagagagggaaggaaggaagtagggagggaggtagggatggaaggaaggaaggagagatggaagggaggaatgaaggaaggagggaaggagggcaggaaggaatgaaggaaaggaggaagtaaggaaagggaaggagggagggagggaaggaaggaaggtgagagggaaggaaggagagagggaaggaaagagagagggaaggaaggagagggaaggaaggaaagagggaaggaaggaaggagagaaggaagga

SEQ ID NO: 334560 - DNA, 133 bp, Homo sapiens
ctgggcatggtggtatgcactggtacttggaggcctgaggtgggatcacttgagcccaggagtttcaggttgcaatgagctatcatcacaccactgtccagaagctgggcaacagagtgggaccttgtcttca

SEQ ID NO: 334561 - DNA, 329 bp, Homo sapiens
aggcaattagaagtgtgcacctcatggaattcactgaattgtacgcttcaacaatagattttagcatacgtagcaccttctaatagaattaggaagaagttaaagataatcttaagaaatcacagaataattttgaccttatgccatgataaaaagttattttctcttattttctatcttctttattctcatgtaacgttcacatatatttaagtaatcaaataaattatggatactttggaatcccaaaatattagatctggtaaggatgtttagaatttatctagttcagcctgtttgctttactgaaaagaaactgaaacccagag

SEQ ID NO: 334562 - DNA, 205 bp, Homo sapiens
tctgatctgatcattcatataaaggcacagtttaagaagaagaatggctcttttctgcacaagcatcctattaatctgagggcccatctctcaacttctccgcatgagagccatactccctaggtggcagcacagatgcctgggatagcagtcactacctgagtccaccaggcacgctgcacatccgaggccacatgctaggctg

SEQ ID NO: 334563 - DNA, 156 bp, Homo sapiens
acatgggagtgtgagaaaggattcaaggcagaaaagtacacgctagttcagactttgaacctgagtctcaccactttcaaaccatgagtgggaaagtctctctaaaagactgttgctgtctgggtacagtggctcacacctgtaatcccagcactt

SEQ ID NO: 334564 - DNA, 531 bp, Homo sapiens
ggtttcaccatattgcacaggatggtttcgaacttctgaacccaagcaatccaccctccttggcatcccaaagtgttgggattacagaggcttacagctgcaggcttctttggcctcccatggcagcggcgcagccgaatggatggggcgtgtctctggaatgtgtgtccttgcatagcgtttatatcagaaagagctcctgagaagatccaaaaatgtttttatctcttacttccctgacaggttgaagccccaccccaatgtggctatttggagattaggcctttgggagataattagggttggatgaggtcatgaaggtggaaccctcgtgatgggataatggcttgataagaagaggaagagggagaggtcgctgtccctttccgccatgtaagcacacagcaggaaagcgactgtctacaagccaggaagagggcccttatcaggaaccaagtcggccaccactgtgatctgggactttgcagccttcagaactatggaaataaatgcctgttgcttaacccactc

SEQ ID NO: 334565 - DNA, 248 bp, Homo sapiens
acacgctcccaccgtcgactacagacgcctgcggttagaaagccctcggcatctgttcagcagacggtcctgccaggctcccctcattcagaggggacagaattctcctcctgacagactttctttttttttcctttttgggagggagtctccctctgtctcccaggctggagtgcagtggcgcgatctcggctcactgtaagctccgcctcccgggttcaggccattcctgcctcagcctcctgagt

SEQ ID NO: 334566 - DNA, 525 bp, Homo sapiens
gcagaggaatatataaagctggaatcttagggagagatctgggctggaaacatacattggagaagcatcagtatatagttgatatttaaagccatgagactggatgaagttacccagagagcaagaatcaattgcaaagatgttcaaggaccaagttctggagcacttcaatgtttacaggcttgggatatgaagaggaatcagcctagactgagcaaaagcctgcgaagtagtgatgatgaagttctggagcctaaagatggaagtgtttcaggaatagaggatatgggttgggcgtggtgtctcacatctgtattcacagcatttggggaggccaaggcaggtggattgcttgagcccaggagttcaagaccagcctggatgacatggtgaaaccccatctctaccaaaaaatgcaaaaattagctgcacgtggtggagtgcacctatagtagatccagcctggtcaacagagtgagaccttgtcttaaaaaaaaaaagagaatagagaaatgaccctctgtt

SEQ ID NO: 334567 - DNA, 238 bp, Homo sapiens
ccctccaaatgcgtatgtgagacagagcagataaacaaacacacattcaataacagaaatatacttatattaaggctgaacatacaaaatcaccatttttgtaggtcaaaagtagagtcaaatatcagcaatattgtatggttgtgcataataaaaatcatcaaaatgcagtgagagggtggatggctaagaggctgagctgacaaacacccccatcccatatcccatacacagctac

SEQ ID NO: 334568 - DNA, 624 bp, Homo sapiens
ttctgcttttccagaatcctgccctttccaaaaggaagacggtatgattaagttccagggtgaaattcaacagaaatgcttttggataaagatgttcaggcccacaaacaggcccctgtggacaaattgtgaaggaggtatgtagctttttctgctttacagctatcttattaagtaatcaaatgggaggtttgcctgacacagttcccagcttgacttttccctctggcttggtgatttgggggtcccgagatttatttttctttcacactttgcaagactatggatgcttaataggatgagattagcaattgaaagagaaaaaattttgattcctaaagtcttcaccctttccctcaaactcttttaaccttgttcttcttctaatggacatttgtgcatgattgaggtgtagtatcttaggtgctgtaggaaacagtaatattcaagaatgtgctgtgatctgcactaaggagaaggtgatgctactgaacaaggccaaaataaacctacctatggagaagtattcttgccgaaaacgatgaaccttaatctcatctgctttctaaatctaaattgtagtttaccagagccacagaagatattcaagaaaatgttaactga

SEQ ID NO: 334569 - DNA, 372 bp, Homo sapiens
ttgtccttgagtgttcacaactgtgtggcctttaatgggatgtctgcttgaaacagagtaagagcaggaagtgtctaaggggccaagccccatgttaataacaagtttgctgcttgaacattcagctaatttgaaaattagttcatttttaaatgccttttagcaatttgagtacttagaaaatttcttcggggaacttaacaacaaaaattcccacaaaaatgtcctaagggatggaaaaaaatctcccaattctcttagaatacttttaacttttcagcagaggtatccaaacatagagtgtgaatgttgaataaatatagtttaggacaaaaatagaaaatggagacttgttctcctagtgcgaaaaca

SEQ ID NO: 334570 - DNA, 333 bp, Homo sapiens
ccgttgtttagaagtttcaatagcagaggcagtgaaagaaaaatggctccctagttttagaagtttcaatagcatgttttggtcccacctcatctccctcctcacagttatccactcttcaaagcagaggaaacaagcccctaccgctgtcagtgctttgacctgactctactccaccatggtcaccaacaacctcctaatgatcaaaaccagcaatcttctcttcatttccatgtctccacacttgctcctgaagtgtagtcttgtcataaaaactactcacctcaccttggaatctttgactctgtttatcttacgtattccactattgct

SEQ ID NO: 334571 - DNA, 314 bp, Homo sapiens
tgggattattgccagtgggccactggccccctgtgcctggcccatttcttcatattgattgaattaaatgaattctaagcccagatgccactagagtggtcagaaattcaacctcagccctttctccactgtcctgtctcatcccagctcctaaagttgttccaaaggcaaaggtccatgactgtgagcaaaggagaacatgcatggtggcttctctggttttcctccctggtcatccttactagatcattgtcttggcccacctggtaccttaaagagatctgtgtgctgctcacaggatgcaccaccccttt

SEQ ID NO: 334572 - DNA, 770 bp, Homo sapiens
tgttgttacatagattgcctgtgatttaaggaaacacgatagccactatttactatttaccctgtgtcaagaatgtgatcctcccagcaacgcaatgagtcatattgcatgaccctcatcttatgaatgaagaaacagaagctcccagaggtgccactcgcccgtggtcacagagctggtgggagaatcactgagtgagtctgaggacagagaatgacacactgtggtttccaagagagaacatcaatgtttttgaccaactcgtaatttcaaagactggaaaaaccatgcttatatgcgcagcctcttttctgaggaacagactagaggatgtttgtttatgccagcagaaagcaaagccacttctagatcagatcacctgctgctgacagtcagatcaaatcaacagcactgaatgagctcctcccagggacagtgcagctgcctggaatttgaatgtggtatctggagcttcagtagtcatccaggactgtaagtgtgaaagccatgcactgagagtggtggaacagaaccctgttttctttagacgctgactcctgctgtctaccagatcctcgtggtacaatgactggtgtagactggcttgttgaagtcactctctggatctgagcaacgctggctgagccgtgatgaaagtattcctatccatcccactatgcttcacagtgggaatcttctcactgttcatcaccgtgccctagcagcgaggccttctcctcttcagatggactgcgggggccacgaaactc

SEQ ID NO: 334573 - DNA, 399 bp, Homo sapiens
accctggttgaaggaacctgttgttcttatggtggagggcagaaacccaagagggctggagccaatccatctgcctggaatttgaatgtggtatctggagcttcagtagtcatccaggactgtaagtgtgaaagccatgcactgagagtggtggaacagaaccctgttttctttagacgctgactcctgctgtctaccagatcctcgtggtacaatgactggtgtagactggcttgttgaagtcactctctggatctgagcaacgctggctgagccgtgatgaaagtattcctatccatcccactatgcttcacagtgggaatcttctcactgttcatcaccgtgccctagcagcgaggccttctcctcttcagatggactgcgggggccacgaaactc

SEQ ID NO: 334574 - DNA, 478 bp, Homo sapiens
gcgcctcggcagcccgccggctcccagtccggctccacgggcgctgcaggtgacccggcggcgcattccagcactccccgccgcccgggccaccgccgccaccgccaccgcaggcgccccggccgcgactcagccacaggaaagcggagagcgcccgagccggtgcgtgcgcggggctgggcgggggcgggggacccacgaatccagcagcccggaccccgggctcggaaacgcgacccggcctggggctcctgccttccggattcccggagatcccaggctgggggcagggagaggggagtcggggttccccaggccagacagaggagattccccctcgacctggggcggcgctgagacccaacgcgggccactctgcggactccgggccgcgatcgaaggagccacgccaggggcgatggggatccccgcacagggtcaggatccgcgtgcttgctagtccaccttaccgccggat

SEQ ID NO: 334575 - DNA, 731 bp, Homo sapiens
tacccataagtagtcattccccttccccagccccagtcaagccctaatcaaatttctgtctctatggatttgcctattctgcacatttcacgtaaacagaatcatatttaaatgacaatatgtggccttttgtgactagcttcttaaatttggcataatcatttcatagttcatccatgttatggcatgtaacagaacgatatttctttttattgcagaagagcagtttgctggatggataaaccacattttgtttacccatttgtcagttcatgaacatttgcataggtttcactttttggctattatgaataatgctgccatgaacaagattttatgtggacatatgctttcacttctaatggtatgtaagtaggggagggattgctgagtcataaggcaactaactttctgaggaactgccaaactgctttgtacagctgctgcaccattttatgttcccactcgcagtgtatgagggctccaatttctccacatcctcatcaacacttgctatggcctattttattttggccaccccagcccactctgtggttttgctttgcatttccctgatggctaatgatatccagcattttcatgcgcatattggtcacttgtatatcttctattcaaatcctttgcccatttttaaattgagttgtctttttgttgttgaattttaagagttcttaaatatgctggatacgagttcctgctcagacaaatat

SEQ ID NO: 334576 - DNA, 1120 bp, Homo sapiens
tgatagaatggagatgagaaggcagagccatcgcctcagtcttggtcttcactttggaagcatgacaaggacatggaagaagacagagcttcctcatcctctggaacaattgttcaggaagcatatgggaaaataagcacctctgataattccatggcacaaatcctcacaccagactcactaaacactgagcaaggcccagaatgttccctaaggcccaaccaaacagaagagggcaccacacctcctattgaggctgacactctggactcttctgacgcgcaaggaggtttggagcccagggtggagaaaactaggccggagcccacagaagtcctgcatgcctgcaagacccaggtggccgagctggagctgtggctgcaacaagccaacgtggcagttgagccggaaacattaaacgcagacatgcagcaggtgctggaacagcagctggtagggtgccaggctatgctaacagagattgagcacaaggttgcctttctgttagagacttgcaaagatcagggcctgggagataatggagccactcaacatgaggctgaagcgctttccctgaaactgaaaacagtgaagtgcaatttagaaaaagtccagatgatgcttcaggagaagcacagtgaagatcagcatcctaccattctaaagaaatcctcagagccagagcatcaagaagctctccaaccagttaacctttctgaattggaatccattgtaactgaaaggccacaattcagcagacaaaaagatttccagcagcaacaggttctggagttaaaaccaatggaacagaaagatttcatcaaattcatagaatttaatgctaagaaaatgtggccccagtattgccaacatgataacgatacaactcaggaatcatctgcaagcaaccaggcatccagccctgaaaatgacgttccagactcgatcttgtcaccccagggccaaaatggagataagtggcaatatctgcatcatgaactctcatcaaaaataaagctcccactccctcagcttgtggagcctcaggtttccacaaatatgggtattctacccagcgtgactatatggatgccccccaccctaccacaaaaaaaaaaaa

SEQ ID NO: 334577 - DNA, 1020 bp, Homo sapiens
gtagcataattttatgctctgtttttcccacttaactaggacatactgtttcatctgtcgccacacgtttcatgattttcattttaacagctacaagttgatatcccatgattcacttaccaatttccctcttgttacccctttgtttctagttcttcacttttgtaatcaatgcttctataattatttttctcatttgggattattttcagaaggtaaattaaaagtaatggtactggccgggcacggtggctcatgcctgcaatcacagctacttggggggctgaggcaggagaatcccttgaacccaagaggtggaggttgcagtgagccaagatcatgcccttgcactccagcctgggcaacaagtgcgaaactccatctcaaaaaacaaaaacaaaaaattatagtatataattatagcaaataacaaaataccatcatttatttcatgtaaaatttttctatgtagtcccattattagaattgagataaagtggagtttatttttaaaaataaatagcctgccattatgaaatgttttgcagcatcctaccattctaaagaaatcctcagagccagagcatcaagaagctctccaaccagttaacctttctgaattggaatccattgtaactgaaaggccacaattcagcagacaaaaagatttccagcagcaacaggttctggagttaaaaccaatggaacagaaagatttcatcaaattcatagaatttaatgctaagaaaatgtggccccagtattgccaacatgataacgatacaactcaggaatcatctgcaagcaaccaggcatccagccctgaaaatgacgttccagactcgatcttgtcaccccagggccaaaatggagataagtggcaatatctgcatcatgaactctcatcaaaaataaagctcccactccctcagcttgtggagcctcaggtttccacaaatatgggtattctacccagcgtgactatatggatgccccccaccctaccacaaaaaaaaaaaa

SEQ ID NO: 334578 - DNA, 1134 bp, Homo sapiens
tgatagaatggagatgagaaggcagagccatcgcctcagtcttggtcttcactttggaagcatgacaaggacatggaagaagacagagcttcctcatcctctggaacaattgttcaggaagcatatgggaaaataagcacctctgataattccatggcacaaatcctcacaccagactcactaaacactgagcaaggcccagaatgttccctaaggcccaaccaaacagaagagggcaccacacctcctattgaggctgacactctggactcttctgacgcgcaaggaggtttggagcccagggtggagaaaactaggccggagcccacagaagtcctgcatgcctgcaagacccaggtggccgagctggagctgtggctgcaacaagccaacgtggcagttgagccggaaacattaaacgcagacatgcagcaggtgctggaacagcagctggtagggtgccaggctatgctaacagagattgagcacaaggttgcctttctgttagagacttgcaaagatcagggcctgggagataatggagccactcaacatgaggctgaagcgctttccctgaaactgaaaacagtgaagtgcaatttagaaaaagtccagatgatgcttcaggagaagcacagtgaagatcagcatcctaccattctaaagaaatcctcagagccagagcatcaagaagctctccaaccagttaacctttctgaattggaatccattgtaactgaaaggccacaattcagcagacaaaaagatttccagcagcaacaggttctggagttaaaaccaatggaacagaaagatttcatcaaattcatagaatttaatgctaagaaaatgtggccccagtattgccaacatgataacgatacaactcaggaatcatctgcaagcaaccaggcatccagccctgaaaatgacgttccagactcgatcttgtcaccccagggccaaaatggagataagtggcaatatctgcatcatgaactctcatcaaaaataaagctcccactccctcagcttgtggagcctcaggtcagtctgtatctacatggtgcaaatagcctgtttatctttgaaaatccaacaagcattcattaaataaacatgtatattctccag

SEQ ID NO: 334579 - DNA, 178 bp, Homo sapiens
catagaatttaatgctaagaaaatgtggccccagtattgccaacatgataacgatacaactcaggaatcatctgcaaggtaaaacatttaaaaatagagttggtcattcagtggttttatgactgggagaattaagagtgtttcttttaaaaattgctcatagaactgtgaatgtaat

SEQ ID NO: 334580 - DNA, 1155 bp, Homo sapiens
catagttttagaagtttcatagcaatgcgattgaaacttctaaaactcccaggcagcaatgatagactggattaagaaaatgtggcacatatacaccatggaatactatgcagccataaaaaatgatgagttcatgtcctttgtagggacatggatgaaattgaaaatcatcattctctgataattccatggcacaaatcctcacaccagactcactaaacactgagcaaggcccagaatgttccctaaggcccaaccaaacagaagagggcaccacacctcctattgaggctgacactctggactcttctgacgcgcaaggaggtttggagcccagggtggagaaaactaggccggagcccacagaagtcctgcatgcctgcaagacccaggtggccgagctggagctgtggctgcaacaagccaacgtggcagttgagccggaaacattaaacgcagacatgcagcaggtgctggaacagcagctggtagggtgccaggctatgctaacagagattgagcacaaggttgcctttctgttagagacttgcaaagatcagggcctgggagataatggagccactcaacatgaggctgaagcgctttccctgaaactgaaaacagtgaagtgcaatttagaaaaagtccagatgatgcttcaggagaagcacagtgaagatcagcatcctaccattctaaagaaatcctcagagccagagcatcaagaagctctccaaccagttaacctttctgaattggaatccattgtaactgaaaggccacaattcagcagacaaaaagatttccagcagcaacaggttctggagttaaaaccaatggaacagaaagatttcatcaaattcatagaatttaatgctaagaaaatgtggccccagtattgccaacatgataacgatacaactcaggaatcatctgcaagcaaccaggcatccagccctgaaaatgacgttccagactcgatcttgtcaccccagggccaaaatggagataagtggcaatatctgcatcatgaactctcatcaaaaataaagctcccactccctcagcttgtggagcctcaggtttccacaaatatgggtattctacccagcgtgactatatggatgccccccaccctaccacaaaaaaaaaaaa

SEQ ID NO: 334581 - DNA, 313 bp, Homo sapiens
tgtctctagctacacctttgaccttgaatggccaaccgtgtgtctgggtactaccctggcatctgctctagtgggtccatatccgaatgcctggcctctgggactgcgcctgcaactttgaatcaccgcacactggcttctgcatgaatcgcagtgttgaccttgactgtcatatccggtcctgtgattatgtctgaattacttcggccatatttgtttctcaaatctgaatatccacagatgctatgtatctcccacccatctaacctttacagcaacctccaatttacagacgaaatggaggcacagtgag

SEQ ID NO: 334582 - DNA, 339 bp, Homo sapiens
ccaccccttctgccagcatcttgcacatcatgggagctcagtgtacactgacaggacttgcaggacacatacagcctttgaagctaaactaccctttggagaatcgtgactccctccacctctagccttcctgctttcagccatgataggcctaaagtctgagcagagctgctcaccaaggaaggactaagaggagccacaaggagcagctttatttaaagggagagatacaactgatcagcagcttttcctccttgcccctcatcttttcattgtcagtttcaaaacaggccagtgctagggccagagctaatagcagtggtggaagtggtcttggtt

SEQ ID NO: 334583 - DNA, 644 bp, Homo sapiens
aaccataatcgtacagaagtaataataaccataatagaaaaaataagccgggcatggtagcacgtgtctgtggtctcagctactcaggaggctgaggcaggaggatcacttgatcccaggagttctgtgctgatcaggtgtcctcattaagtttggcatccatgtggtgacctcccaggagtgggggaccaccaggttgcaaagcagcccaggttggaaatggagcaggtcaaagctctcttactgatcagtagtgggatcacatctgtgaagaggcattgcactccagcctgggcaacatagcgagaccccgcctctaaaaagaaagaaagaaaaaagaaaaataatagtgacaataacaattaaaaataaagagtatgccaggcgcggtggctcacgcctgtaatcccaacactttgggaggccaaggcgggtggatcacctgaggtcaggagtttgagaccagcctggccaacatggtgaaaccctgtctctactaaaaatacaaaaattagctgagcatggtggcaggcacctgtaatcatagctacttgggaggctgaggcaggagaatcccttgagcccaggaggcagaggttacagtgagctgagatcgtgccattgtactccagcctgggggacaa

SEQ ID NO: 334584 - DNA, 519 bp, Homo sapiens
ttctgtactcagatgtcacctccagggaatctttttcaaaaccctacacctctctgtcccctttccctgttttatttttcttcccagtatttatcactagctaacatcatatcagatacttctttgtttcttgtttctttgcctgctttatttactgctgtatgctagcacctagtatctagttgattggtagatgctttataaatatttattgcatgaatgaaggaaggaagtacctgcgccatttgtaaagtcaaaagagagacaggaagtttgcattctgggagaatggacacatgtcacaagcagaaaagctgtaagtcaatttagctattaaaatctgtattggttgttatataacaatgataaggctttagcacattttctaataatgggcatacttttactgaccttctctaaaattatgctttgaatgcgaaaataaattataattttaaatgtatttgtcaaccacttttatgaatagtatgcaagtttgagacctaaaattgcggtcat

SEQ ID NO: 334585 - DNA, 473 bp, Homo sapiens
tgtctactacagtagcccttaagccatatgtagctattgagcacttgacatgttgcaagagtgaattggagactgattttaattttatttaattttaatgtaagtagtcgcacatgacccgtggctactatggtagatggcatagttttagacaagggcagtagtcttgggtagatacttgatttacttagaacatttctttacctagctgtaacaaggttctaatagctgattaaaggacaacatttttagcatgtaatatacagtaaggaactaatgttaattactgccaagatgtataaacattatgaaaccttaaacaaggatgaacacagaagcagtggcccttctttgtaaataaggggtcagttacttcctaataggtgtcttagttttagttaataatctaatagcacccccaaaaagcaaactgttaatttgttattagccatcctgtaaagacaagggagaaa

SEQ ID NO: 334586 - DNA, 421 bp, Homo sapiens
cctagattctttggattgagtttcatctttctcctgaatgttgatgatcttcattcctattcacattctgaattctatttctgacattgcagtcatttaagcctggttaagaaccattgctggggaaccagtgtggtcacttggaaggaagaagacactggctttttgagtagctagagttcttgcactggttttttcacatgtgtgggctgatgttccttcagtctctgaagttgttgttctttggatgtgtttttttttcttatatcttctttgatgcccttgatggtttgattgtggtataagctgggttcactcaactcgctttgattctagtctgttcgtgggtcttgtaggagccccctccgattactgtctccatgcctgtatttcttttcttgggtgttctggtgcacagggc

SEQ ID NO: 334587 - DNA, 4224 bp, Homo sapiens
  misc_feature (2415)..(2415): n is a, c, g, or t
  misc_feature (2636)..(2636): n is a, c, g, or t
gaagagtggtgtttttttcttcttcttcttcttttgtggtttcacatagcaaatgagtgacagtctctacttacagacaaagtgagacgtcaggcattgagacatagctccatagaattcagtttctgagaaccagccagaagcatgcagtgacattgcacaatctgcctctgaagctggagatactagctgcagagctcaggggagctgctccacatcaccgacatgaagggaacaggcatcatggactgtgcgcccaaggcactcctggccagggcactttatgacaactgccctgactgctctgacgagctggctttcagcagaggggacatcctgaccattctggagcaacacgtgccagaaagcgagggttggtggaagtgtttgctccatgggaggcaaggcctggcccctgccaaccgcctccaaatcctcacggaggtcgctgcagacaggccgtgccccccattcctgagaggcctggaagaagctcctgccagctcagaggagacctatcaggtgcccactctaccccgccctcccactccaggccccgtttatgagcagatgaggagttgggcggaggggccccagccccctactgcccaagtctatgaattccccgaccctcccaccagtgccagaatcatctgtgaaaagactctcagctttccaaaacaggccatcctcacgcttcccagacctgtccgggcctcactgccgactctgccttcccaggtgtatgacgtgcctacccagcaccggggccccgtggtcctgaaggagccagagaagcagcagttatatgacataccagccagccccaagaaggcaggactccatcccccagacagccaagcaagtgggcagggtgttcccctgatatcagtgactaccttaagaagaggcggttacagcacattaccaaatcctcagaaatcggaatggatttatgacactccagtgtctccaggaaaggccagcgtcagaaacacgcctctcaccagctttgcggaagaatcaaggccccacgctctccccagttccagctccactttctacaatcctccaagtggcagatccaggtccctcactccacaactgaataacaatgtgcccatgcagaaaaaactcagccttccagaaattccttcttatggctttcttgtacccagaggcacatttcctttggatgaagatgtcagcaacaaggttccttcaagcttctctgattccccgagtggacagcagaacaccaagcccaatatagacatccctaaagcaacgtcgagtgtttctcaggctgggaaggagctggagaaagccaaggaggtgtcagagaattccgcgggccataattcctcatggttctccagacggacaacttccccatctcctgaaccggacagattatcaggttccagttctgacagcagagctagcatcgtttcctcgtgctccaccacatccaccgacgactcctccagctcttcctcggaggagtcagcaaaggagctctccttggacctggatgtggccaaggagacagtgatggctctgcagcacaaggtggtcagctctgtcgctggcctgatgctctttgtcagcaggaagtggagattccgagactatctggaggccaacattgatgcaatccacaggtccactgatcacatagaagcctctgtaagagaatttctggattttgcccgaggagtccatgggactgcctgtaacctcactgacagtaaccttcagaacagaattcgggaccagatgcagaccatctccaactcctaccgcatcctgcttgaaacaaaggaaagcttggataatcgcaattggcctctggaagttcttgtgactgacagtgtccagaacagcccagatgaccttgagaggtttgtcatggtggcacggatgcttccagaagacatcaagaggtttgcctccattgtcattgccaatggaaggctcctttttaagcggaactgtgaaaaggaagagactgtgcagttgaccccaaatgcagaatttaagtgtgaaaaatacatccagcctccccaaagagaaactgaatcacaccaaaagagtaccccttccactaagcaaagggaagatgaacactcttctgaactattaaagaaaaatagagcaaatatctgtggacagaatcctggccctcttatacctcagccttcgagtcaacagactcctgagaggaaaccccgcttatctgaacactgccggctgtactttggggcgctcttcaaagccatcagcgcatttcacggcagcctcagcagcagccagcccgcggagatcatcactcagagcaagctggtcatcatggtgggacagaagctggtggacacgctgtgcatggagacccaggagagggacgtgcgcaangagatcctccgcggcagcagtcacctctgcagcctgctcaaggacgtagcgctggccactaagaatgccgtgctcacataccccagccctgccgcgctggggcacctccaggcggaggctgagaagctggagcaacacacgcggcagttcagagggacactgggatgaggactgtctacctcccttcctcctctgctcacctctcagcttcacacccacancttgtgcaactctgccctatgggaaaagccagccggggcatacaccaatgagctgaaacagacctggtgcccaaagctggtagtaccaagtggctaagcaaccccagggcattgacttaccccgcagggggtcaggaaagagagtcaggtatgaggtaaagaccttgtgaagtttagcatatatggagtatgcagtatcagcttgaagtgacttcgcagaaataatattttatattgattaaatgtgtgcatgttttgtttgttttttgagacaaagtctcactctgtcacacaggctggagtgcagtggcgcgatctcagctcactgcaacctccgccttctgggttgaagcaattctcccgcctcagcctccagagtagctggtactacaggtgtgcgccaccatgcccagctaatttttgtatttttttttaatgaaaggtctcacatatttattactgaacccagccaaccaatgcattcataacagattcagaaagaaaaaatatattcccaataaaacatgtacaattctccagagagcggtgacattttcagcttgatgtggtaacatgactgtgaccttcagacagcataaatatgtgtgccctctcatgtgcaattccttatagggctagcttggttcttcttcaatgtctccttttggagttgtacctgattttattaccagttttcatctgaatccactggggagtggggcgattttgttttaatttctcggtcaggaatcacttaatcctggaagtcttatgagaagacatggcaagaagcagagtcaagcacacaccacaatggcagagaaaggaagagctaatttttgtatttttagtagagtcggggtttcaccatattagccaggctggtctggaactcctgacctcaggccatcccccgcctcggcctcccaaagtgctgggattacaggcctgagccaccattcctggcatgtacgtgttttaaattcactcatttaacacttatgtattggatgcctactacatgccaagttctaggtgctggagacatagcagtgtttcagagggcttgccctcttggaacttatgatctagtaggggagtcaggcagtaaagcggtgaagaaatacatacacagtatagcaggtgccaggaaaaacgtaagtaggggaagtgcaagagaacttatcttcaaatggttaatttttattgcatccattagataatagagtaagtttttgttgttttgaattgaattagttctgtgagattggtacaaattatgtatgtgtcttgcacccataaatatatatttttgctatgttactttaacctaaagatagatgttatatttacaacataacatgatctgttgggttctctattaatttatttcatacattatagattctgggttgataaattctgctcaatttgaaaaattttatattttgtctcaaatctgttacaatttatattggttggtgcaaaagtaattgcggtttttgccgtagacagtaatggcaaaaaccacaattgcttttgcaccaccctaataatattaaatataatcatgactttaaacatcatt

SEQ ID NO: 334588 - DNA, 2889 bp, Homo sapiens
  misc_feature (1080)..(1080): n is a, c, g, or t
  misc_feature (1301)..(1301): n is a, c, g, or t
attttactcttatcgtgctttccagaaagtttgcctgctgggagagtctttttgatcgtttcccatgtgttgtcagatagctccatagaattcagtttctgagaaccagccagaagcatgcagtgacattgcacaatctgcctctgaagctggagatactagctgcagagctcaggggagctgctccacatcaccgacatgaagggaacaggcatcatggactgtgcgcccaaggcactcctggccagggcactttatgacaactgccctgactgctctgacgagctggctttcagcagaggggacatcctgaccattctggagcaacacgtgccagaaagcgagggttggtggaagtgtttgctccatgggaggcaaggcctggcccctgccaaccgcctccaaatcctcacggaggtcgctgcagacaggccgtgccccccattcctgagaggcctggaagaagctcctgccagctcagaggagacctatcaggtgcccactctaccccgccctcccactccaggccccgtttatgagcagatgaggagttgggcggaggggccccagccccctactgcccaagtctatgaattccccgaccctcccaccagtgccagaatcatctgtgaaaagactctcagctttccaaaacaggccatcctcacgcttcccagacctgtccgggcctcactgccgactctgccttcccaggtgtatgacgtgcctacccagcaccggggccccgtggtcctgaaggagccagagaagcagcagttatatgacataccagccagccccaagaaggcaggactccatcccccagacagccaagcaagtaatcctggccctcttatacctcagccttcgagtcaacagactcctgagaggaaaccccgcttatctgaacactgccggctgtactttggggcgctcttcaaagccatcagcgcatttcacggcagcctcagcagcagccagcccgcggagatcatcactcagagcaagctggtcatcatggtgggacagaagctggtggacacgctgtgcatggagacccaggagagggacgtgcgcaangagatcctccgcggcagcagtcacctctgcagcctgctcaaggacgtagcgctggccactaagaatgccgtgctcacataccccagccctgccgcgctggggcacctccaggcggaggctgagaagctggagcaacacacgcggcagttcagagggacactgggatgaggactgtctacctcccttcctcctctgctcacctctcagcttcacacccacancttgtgcaactctgccctatgggaaaagccagccggggcatacaccaatgagctgaaacagacctggtgcccaaagctggtagtaccaagtggctaagcaaccccagggcattgacttaccccgcagggggtcaggaaagagagtcaggtatgaggtaaagaccttgtgaagtttagcatatatggagtatgcagtatcagcttgaagtgacttcgcagaaataatattttatattgattaaatgtgtgcatgttttgtttgttttttgagacaaagtctcactctgtcacacaggctggagtgcagtggcgcgatctcagctcactgcaacctccgccttctgggttgaagcaattctcccgcctcagcctccagagtagctggtactacaggtgtgcgccaccatgcccagctaatttttgtatttttttttaatgaaaggtctcacatatttattactgaacccagccaaccaatgcattcataacagattcagaaagaaaaaatatattcccaataaaacatgtacaattctccagagagcggtgacattttcagcttgatgtggtaacatgactgtgaccttcagacagcataaatatgtgtgccctctcatgtgcaattccttatagggctagcttggttcttcttcaatgtctccttttggagttgtacctgattttattaccagttttcatctgaatccactggggagtggggcgattttgttttaatttctcggtcaggaatcacttaatcctggaagtcttatgagaagacatggcaagaagcagagtcaagcacacaccacaatggcagagaaaggaagagctaatttttgtatttttagtagagtcggggtttcaccatattagccaggctggtctggaactcctgacctcaggccatcccccgcctcggcctcccaaagtgctgggattacaggcctgagccaccattcctggcatgtacgtgttttaaattcactcatttaacacttatgtattggatgcctactacatgccaagttctaggtgctggagacatagcagtgtttcagagggcttgccctcttggaacttatgatctagtaggggagtcaggcagtaaagcggtgaagaaatacatacacagtatagcaggtgccaggaaaaacgtaagtaggggaagtgcaagagaacttatcttcaaatggttaatttttattgcatccattagataatagagtaagtttttgttgttttgaattgaattagttctgtgagattggtacaaattatgtatgtgtcttgcacccataaatatatatttttgctatgttactttaacctaaagatagatgttatatttacaacataacatgatctgttgggttctctattaatttatttcatacattatagattctgggttgataaattctgctcaatttgaaaaattttatattttgtctcaaatctgttacaatttatattggttggtgcaaaagtaattgcggtttttgccgtagacagtaatggcaaaaaccacaattgcttttgcaccaccctaataatattaaatataatcatgactttaaacatcatt

SEQ ID NO: 334589 - DNA, 303 bp, Homo sapiens
cacggccagtggttggtgggtttcaaaactctttgtcttttttctgtagaacttttaccctaaagaaattccattctaaatgccaatatgtaaaatagatcaaaggcttgattagaagagagttggagagctggggtcccaccaatccccaaggatggggaacctgagggttctgtggatcacttgagagtggaaacacaggaacatgactagggaaaggaggggttcacagaaatgaaagaggggcaaacaacatcccactttaaacatgaaagctgaaaatcttcaacccattcttagttg

SEQ ID NO: 334590 - DNA, 361 bp, Homo sapiens
ggccgttgctgaacttcaacattggccaccaatatctgctgtctgtgcttaaaggatcaaaaatgcagacctcagtcaggcgcagtggttcacgcctgtaatcccagcactttgggaggccaaggtgggcagatcacttgaggtaaggagttcaagaccagtttggccaatatgatgaaaccctgtctctacaaattagacaggcgtggtggtgggtgcctgaaatcccagctacctgggaggctgaggcaggagaattgcttgaatccagaaggcagaggctacagtgagttgagattgcgcctctgcactccagcctgtgcaacatgtgcaacagaacaagaccctatctacaaaaaaa

SEQ ID NO: 334591 - DNA, 924 bp, Homo sapiens
cgatagcacctgcccgcctgcctgtcctccagcaggaagtagcaagtccccagacttttgcaggcgggaaccatgtctcaggctgcaaaggcctcggcctcggccacagtggcggtgaacccagggcctgacaccaaggggaagggggccccacctgcaggaacatcccctagtcccggcactaccctggccccaacaaccgtgcctattaccagcgccaaggcggcggaactgcctcctgggaactacaggctggtggtcttcgaactggaaaacttccagggccgtcgagcagaattctcgggggagtgctcaaatctggcagaccgtggcttcgaccgtgtgcgcagcatcattgtctccgcgggaccctgggtcgcctttgagcagtccaacttccgcggggagatgttcatcctggagaagggcgagtaccctcgctggaacacatggtcgagcagctaccgcagtgatcggctcatgtccttccggcccatcaaaatggatgcccaggagcacaaaatctccctgtttgaaggggccaacttcaagggcaacaccatagagatccagggggacgacgcacccagtctctgggtctacggcttcagtgaccgcgtgggcagcgtgaaggtctccagtggaacatgggttggctatcagtatcctggctaccgcgggtaccagtacctcctagagcctggtgacttccggcactggaatgagtggggagccttccagccacagatgcagtccctgcgtcgcctgcgtgacaagcagtggcacctcgaggggtccttccctgtcctggccacagagccccccaagtgagtccacacctcactctgctaccttgccccaacccttcttcatgttcaattatttcccccatttttcccaggcaaataaaattccctaaagcca

SEQ ID NO: 334592 - DNA, 497 bp, Homo sapiens
tctagagaaacagtgtgctcagataatcacacacatttatctcacttaatccttcaccaactccaaggaaacaggcatatgagtgtagatgagaaacaaaggctcagagagctgggtcgcctttgagcagtccaacttccgcggggagatgttcatcctggagaagggcgagtaccctcgctggaacacatggtcgagcagctaccgcagtgatcggctcatgtccttccggcccatcaaaatggatgcccaggagcacaaaatctccctgtttgaaggggccaacttcaagggcaacaccatagagatccagcttgccccaacccttcttcatgttcaattatttcccccatttttcccaggcaaataaaattccctaaagccaaaatttctcctggatctgtaaacagatgtgtgccttgaggtcccccatagttactgggatgtgacttcctcgctcttaataattacaacgataataaaagcagcaaacactg

SEQ ID NO: 334593 - DNA, 1036 bp, Homo sapiens
cgatagcacctgcccgcctgcctgtcctccagcaggaagtagcaagtccccagacttttgcaggcgggaaccatgtctcaggctgcaaaggcctcggcctcggccacagtggcggtgaacccagggcctgacaccaaggggaagggggccccacctgcaggaacatcccctagtcccggcactaccctggccccaacaaccgtgcctattaccagcgccaaggcggcggaactgcctcctgggaactacaggctggtggtcttcgaactggaaaacttccagggccgtcgagcagaattctcgggggagtgctcaaatctggcagaccgtggcttcgaccgtgtgcgcagcatcattgtctccgcgggaccctgggtcgcctttgagcagtccaacttccgcggggagatgttcatcctggagaagggcgagtaccctcgctggaacacatggtcgagcagctaccgcagtgatcggctcatgtccttccggcccatcaaaatggatgcccaggagcacaaaatctccctgtttgaaggggccaacttcaagggcaacaccatagagatccagggggacgacgcacccagtctctgggtctacggcttcagtgaccgcgtgggcagcgtgaaggtctccagtggaacatgggttggctatcagtatcctggctaccgcgggtaccagtacctcctagagcctggtgacttccggcactggaatgagtggggagccttccagccacagatgcagtccctgcgtcgcctgcgtgacaagcagtggcacctcgaggggtccttccctgtcctggccacagagccccccaagtgagtccacacctcactctgctaccttgccccaacccttcttcatgttcaattatttcccccatttttcccaggcaaataaaattccctaaagccaaaatttctcctggatctgtaaacagatgtgtgccttgaggtcccccatagttactgggatgtgacttcctcgctcttaataattacaacgataataaaagcagcaaacactg

SEQ ID NO: 334594 - DNA, 1092 bp, Homo sapiens
  misc_feature (1050)..(1050): n is a, c, g, or t
cgatagcacctgcccgcctgcctgtcctccagcaggaagtagcaagtccccagacttttgcaggcgggaaccatgtctcaggctgcaaaggcctcggcctcggccacagtggcggtgaacccagggcctgacaccaaggggaagggggccccacctgcaggaacatcccctagtcccggcactaccctggccccaacaaccgtgcctattaccagcgccaaggcggcggaactgcctcctgggaactacaggctggtggtcttcgaactggaaaacttccagggccgtcgagcagaattctcgggggagtgctcaaatctggcagaccgtggcttcgaccgtgtgcgcagcatcattgtctccgcgggaccctgggtcgcctttgagcagtccaacttccgcggggagatgttcatcctggagaagggcgagtaccctcgctggaacacatggtcgagcagctaccgcagtgatcggctcatgtccttccggcccatcaaaatggatgcccaggagcacaaaatctccctgtttgaaggggccaacttcaagggcaacaccatagagatccagggggacgacgcacccagtctctgggtctacggcttcagtgaccgcgtgggcagcgtgaaggtctccagtggaacatgggttggctatcagtatcctggctaccgcgggtaccagtacctcctagagcctggtgacttccggcactggaatgagtggggagccttccagccacagatgcagtccctgcgtcgcctgcgtgacaagcagtggcacctcgaggggtccttccctgtcctggccacagagccccccaagtgagtccacacctcactctgctaccttgccccaacccttcttcatgttcaattatttcccccatttttcccaggcaaataaaattccctaaagccaaaatttctcctggatctgtaaacagatgtgtgccttgaggtcccccatagttactgggatgtgacttcctcgctcttaataattacaacgataataaaagcagcaaacactgggatagtacacacngaccggggccgcgttttgttgttttttgttcctaccccagtc

SEQ ID NO: 334595 - DNA, 792 bp, Homo sapiens
cgatagcacctgcccgcctgcctgtcctccagcaggaagtagcaagtccccagacttttgcaggcgggaaccatgtctcaggctgcaaaggcctcggcctcggccacagtggcggtgaacccagggcctgacaccaaggggaagggggccccacctgcaggaacatcccctagtcccggcactaccctggccccaacaaccgtgcctattaccagcgccaaggcggcggaactgcctcctgggaactacaggctggtggtcttcgaactggaaaacttccagggccgtcgagcagaattctcgggggagtgctcaaatctggcagaccgtggcttcgaccgtgtgcgcagcatcattgtctccgcgggaccctgggtcgcctttgagcagtccaacttccgcggggagatgttcatcctggagaagggcgagtaccctcgctggaacacatggtcgagcagctaccgcagtgatcggctcatgtccttccggcccatcaaaatggatgcccaggagcacaaaatctccctgtttgaaggggccaacttcaagggcaacaccatagagatccagagccccccaagtgagtccacacctcactctgctaccttgccccaacccttcttcatgttcaattatttcccccatttttcccaggcaaataaaattccctaaagccaaaatttctcctggatctgtaaacagatgtgtgccttgaggtcccccatagttactgggatgtgacttcctcgctcttaataattacaacgataataaaagcagcaaacactg

SEQ ID NO: 334596 - DNA, 571 bp, Homo sapiens
  misc_feature (10)..(10): n is a, c, g, or t
ttcatgcggnactgactctcttaactaccaccgctacacgatgcccaggagcacaaaatctccctgtttgaaggggccaacttcaagggcaacaccatagagatccagggggacgacgcacccagtctctgggtctacggcttcagtgaccgcgtgggcagcgtgaaggtctccagtggaacatgggttggctatcagtatcctggctaccgcgggtaccagtacctcctagagcctggtgacttccggcactggaatgagtggggagccttccagccacagatgcagtccctgcgtcgcctgcgtgacaagcagtggcacctcgaggggtccttccctgtcctggccacagagccccccaagtgagtccacacctcactctgctaccttgccccaacccttcttcatgttcaattatttcccccatttttcccaggcaaataaaattccctaaagccaaaatttctcctggatctgtaaacagatgtgtgccttgaggtcccccatagttactgggatgtgacttcctcgctcttaataattacaacgataataaaagcagcaaacactg

SEQ ID NO: 334597 - DNA, 591 bp, Homo sapiens
gcgccgccgagcgacaaggcatccccgtaatttttactcggcggccgccttctggtggtcttcgaactggaaaacttccagggccgtcgagcagaattctcgggggagtgctcaaatctggcagaccgtggcttcgaccgtgtgcgcagcatcattgtctccgcgggaccctgggtcgcctttgagcagtccaacttccgcggggagatgttcatcctggagaagggcgagtaccctcgctggaacacatggtcgagcagctaccgcagtgatcggctcatgtccttccggcccatcaaaatggatgcccaggagcacaaaatctccctgtttgaaggggccaacttcaagggcaacaccatagagatccagagccccccaagtgagtccacacctcactctgctaccttgccccaacccttcttcatgttcaattatttcccccatttttcccaggcaaataaaattccctaaagccaaaatttctcctggatctgtaaacagatgtgtgccttgaggtcccccatagttactgggatgtgacttcctcgctcttaataattacaacgataataaaagcagcaaacactg

SEQ ID NO: 334598 - DNA, 332 bp, Homo sapiens
tgctatttgtcctttgctatagtagccagacaggtatcttagtttagaatatcatctactttgttaattagtttgtttattttctcagaataagtgaattgcaaccactctctttattatagtataacaaaattggattataaattaaaagatgtagattttagtgccagctcccttctatgttaggctatttgtatctattaattccttttcaggaatgagtaaataattatttcagtctttccttcccaggtaatctctactgattctttatgtttaagttcaaatattacttcctcaagaaagccttccctgaactgtcagttgagatg

SEQ ID NO: 334599 - DNA, 102 bp, Homo sapiens
gtacaatagaaacgctgtacatggcatttaaaggcaaattggattttcttctggcagccaccctggacttcagacttgcaggccccagagcacagtttatct

SEQ ID NO: 334600 - DNA, 429 bp, Homo sapiens
attccggggatacacgtgcagttattacttgggtatattgtgtgaagctgaggtttggacctctaatgttcctgttgccacaacagtgaacacagtacccagcacgcagtttttcagcccttgccccctccctcccgctctccctccttgcttttggagttcccagtgtctactgttcccatctttatgtccatgtgtacccaagacttatctcccacttacaagtgagagcatgcagtatttagttttcttgttctgcgttagttccgttaggataattgcctccagttacattcatgtcactgcaaaggatttgatttcattctttttaatggctgtgtagtattccatgttgtataggtaacacattttctttatccactcatcaattaatgggcacttacattgatttcatgtgtttgctattgt

SEQ ID NO: 334601 - DNA, 176 bp, Homo sapiens
aaaatgttaactttcctcatgaactggcattctttctttttatcagagaagaattatatataatgtttcccattttgcctttaatttccaggaaacccagagcttaattttaatgctcaggtacagtaattgtaaaaactgagggttttgtgtattttttatccctcttctgtggc

SEQ ID NO: 334602 - DNA, 660 bp, Homo sapiens
caatcagctctctgtaaaatagcaatcggctctctgtaaaatggatcaatcccaggatgtgggtggggccacataagagaataaaggcaggctgcctgagctagcagtggcaatcctctgaggaggtctccttgtatactggaagccttgctttttggctttctgaaataaattttgctgctgctcgctctttgggtccaccctgcgtttaagagctgtaacactccctgtgaaggtctgcagcttcactcctgaagccagccagaccgtaaacccaccagaaggaagaaactcctaacacatcagaacatcagaaggaacaaactctggacacaccacctttaagaactgtaacactcaccgcaagggtccgtggcttgattcttgaagtcagtgagaccaagaacccaccaattccggacacacagccacccatccacttatccacccatccactcacctatctatccatccatccctccatccacacatccactccatccatccatccatgcaacaatccatccatccaaccacccacccacctacacatccagtcatccacccatccatcagctgattcattcctccatccatctgttctcccatccatccattcacccatccaatcattcactcatccatccattcacccgtcca

SEQ ID NO: 334603 - DNA, 454 bp, Homo sapiens
tttgattttaaagtgtcagactccaaaggctgtgctttttctcttggcctggctgcagtgtagcaggggagcaccttggaagaggcatgtgcttattgcagttgaccatgcttgagtacaggattttgagagatggaggcaaaagaactttgaagaaggtgttggaggggtccggagacacaaagaaatacaaaaatactgtatgcactcactaatacagtccctagatcaatgatgtgtagaaagcataatgctcaactgaaaggagaaaaaaatccttctcatagcttaagagaacctgaagtgtcctctcagaaaaacatatttgaggccgggtgcagtggctcacgccagtaatcccagcacttcgggaggctgaggtgggcagaccacttgaggtcaggagttcacgaccaggctagccaacatggtgaaaacccatctctgctaaaaa

SEQ ID NO: 334604 - DNA, 217 bp, Homo sapiens
tttgatgcaagaaatgtcttctgtccattggcttcctagcttcccacctccttcccctccagcaagtctcacatactatgttcttctacaacgctctgtagtctgtggaggaagtaaaagcccgccactgtctagtgccctcatcttccacagccacaatgcatgcgtcattttttctgggagcattcaggtagttgaggaccattcaataatggac

SEQ ID NO: 334605 - DNA, 273 bp, Homo sapiens
ttctgtgccttcttatgtaaataaatgattatattttcaatacttttgtgtatattgatagccctgtagaactaataatgcagtctactcattgggacttggagcttaaatggaaatgaccaagatggattagaaggatatgaaaaataaagaaggaggtgaggggaaccaagggcttagaaagggagcgggagagtcagcggaatgacaaatgtctgaaagactgtgatggatgggatggcatgtcttgagtcaagagtggactgtgcttgg

SEQ ID NO: 334606 - DNA, 2236 bp, Homo sapiens
ggggggctgacaacaactgtgataggtacgaggctgggtgtggatcggccgacgctctcctggagcgctgggccttcgctggccgcaccggcagccatgagctcggagatggagccgctgctcctggcctggagctattttaggcgcaggaagttccagctctgcgccgatctatgcacgcagatgctggagaagtccccttatgaccaggaaccagatcctgaattgccagtgcatcaggcagcttggatcttaaaagcaagagcgctaacagaaatggtatacatagatgaaattgatgtagatcaggaaggaattgcagaaatgatgctggatgaaaatgctatagctcaagttccacgccctggaacgtctttgaaactccctggaactaatcagacaggagggcctagccaggccgttaggccaatcacacaagctggaagacccattacaggtttcctcaggcccagcacgcagagtggaaggccaggcactatggaacaggctatcagaacacccagaaccgcctacacagcccgccctatcaccagctcctccggaagatttgtcaggctgggaacggcttccatgcttacaagtcctgatggaccatttataaatttatctaggctgaatttaacaaagtattcccagaaacctaagttggcaaaggctttgtttgagtatatctttcatcatgaaaatgatgttaagactgctttggatctggctgccctctccacagaacattctcagtacaaggactggtggtggaaagtacagattggaaaatgttactacaggttgggaatgtatcgtgaagcagaaaaacagtttaaatcagccctgaagcagcaggaaatggtagatacatttctgtacttggcaaaagtttatgtctcattggatcaacctgtgactgctttaaatcttttcaaacaaggcttagataagtttccaggagaagtaaccctgctctgtggaattgcaagaatctatgaggaaatgaacaatatgtcatcagcagcagaatattacaaagaagttttgaaacaagacaatactcatgtggaagccatcgcatgcattggaagcaaccacttctattctgatcagccagaaatagctctccggttttacaggcggctgctgcagatgggcatttataacggccagctttttaacaatctggggctgtgttgcttctatgcccagcagtatgatatgactctgacctcatttgaacgtgccctttctttggctgaaaatgaagaagaggcagctgatgtctggtacaacttgggacatgtagctgtgggaataggagatacaaatttggcccatcagtgcttcaggctggctctggtcaacaacaacaaccacgccgaggcctacaacaacctggctgtgctggagatgcggaagggccacgttgaacaggcaagggcactattacaaactgcatcatcattagcaccccatatgtatgaaccgcattttaattttgcaacaatctctgataagattggagatctgcagagaagctatgttgctgcgcagaagtctgaagcagcatttccagaccatgtggacacacaacatttaattaaacaattaaggcagcattttgctatgctctgattgttccttagaccacatatgttcttatgaagcagcattatgcaaggggaaaaaagcactatgtctgtgtatgtatgtatatagtgtaatacgtatattttaacaaacctgtccttgatattagttaaggtgacacataagggtgacacagaatgtgtaatgcaaatttcatagtaatagtaactttataaaataatattataaaatacaggatttaaacctttctaaatagatcctgaaactgtctctcacattatatagtagatgtttgtttataatgtttacaaaacattttggtgaatttcctcaatgttttataaatgtacattttttaagtccttaagctgactcttagccatcatgtagcttaaggagtctgaaatctgccattaaaactgcacctttaagccaggtgtggtagcatgtgcctatagtcccagctacttgggaggtggaggtgggaggattataaatagagactttccttaagactttaaaaatgtatttaaaactattttttattaaatactttgtgatttcctattaagctttaaaataaatcattgtgtaaaacaccatcaaatcattattt

SEQ ID NO: 334607 - DNA, 2116 bp, Homo sapiens
ggggggctgacaacaactgtgataggtacgaggctgggtgtggatcggccgacgctctcctggagcgctgggccttcgctggccgcaccggcagccatgagctcggagatggagccgctgctcctggcctggagctattttaggcgcaggaagttccagctctgcgccgatctatgcacgcagatgctggagaagtccccttatgaccaggcagcttggatcttaaaagcaagagcgctaacagaaatggtatacatagatgaaattgatgtagatcaggaaggaattgcagaaatgatgctggatgaaaatgctatagctcaagttccacgccctggaacgtctttgaaactccctggaactaatcagacaggagggcctagccaggccgttaggccaatcacacaagctggaagacccattacaggtttcctcaggcccagcacgcagagtggaaggccaggcactatggaacaggctatcagaacacccagaaccgcctacacagcccgccctatcaccagctcctccggaagatttgtcaggctgggaacggctttgtttgagtatatctttcatcatgaaaatgatgttaagactgctttggatctggctgccctctccacagaacattctcagtacaaggactggtggtggaaagtacagattggaaaatgttactacaggttgggaatgtatcgtgaagcagaaaaacagtttaaatcagccctgaagcagcaggaaatggtagatacatttctgtacttggcaaaagtttatgtctcattggatcaacctgtgactgctttaaatcttttcaaacaaggcttagataagtttccaggagaagtaaccctgctctgtggaattgcaagaatctatgaggaaatgaacaatatgtcatcagcagcagaatattacaaagaagttttgaaacaagacaatactcatgtggaagccatcgcatgcattggaagcaaccacttctattctgatcagccagaaatagctctccggttttacaggcggctgctgcagatgggcatttataacggccagctttttaacaatctggggctgtgttgcttctatgcccagcagtatgatatgactctgacctcatttgaacgtgccctttctttggctgaaaatgaagaagaggcagctgatgtctggtacaacttgggacatgtagctgtgggaataggagatacaaatttggcccatcagtgcttcaggctggctctggtcaacaacaacaaccacgccgaggcctacaacaacctggctgtgctggagatgcggaagggccacgttgaacaggcaagggcactattacaaactgcatcatcattagcaccccatatgtatgaaccgcattttaattttgcaacaatctctgataagattggagatctgcagagaagctatgttgctgcgcagaagtctgaagcagcatttccagaccatgtggacacacaacatttaattaaacaattaaggcagcattttgctatgctctgattgttccttagaccacatatgttcttatgaagcagcattatgcaaggggaaaaaagcactatgtctgtgtatgtatgtatatagtgtaatacgtatattttaacaaacctgtccttgatattagttaaggtgacacataagggtgacacagaatgtgtaatgcaaatttcatagtaatagtaactttataaaataatattataaaatacaggatttaaacctttctaaatagatcctgaaactgtctctcacattatatagtagatgtttgtttataatgtttacaaaacattttggtgaatttcctcaatgttttataaatgtacattttttaagtccttaagctgactcttagccatcatgtagcttaaggagtctgaaatctgccattaaaactgcacctttaagccaggtgtggtagcatgtgcctatagtcccagctacttgggaggtggaggtgggaggattataaatagagactttccttaagactttaaaaatgtatttaaaactattttttattaaatactttgtgatttcctattaagctttaaaataaatcattgtgtaaaacaccatcaaatcattattt

SEQ ID NO: 334608 - DNA, 2152 bp, Homo sapiens
ggggggctgacaacaactgtgataggtacgaggctgggtgtggatcggccgacgctctcctggagcgctgggccttcgctggccgcaccggcagccatgagctcggagatggagccgctgctcctggcctggagctattttaggcgcaggaagttccagctctgcgccgatctatgcacgcagatgctggagaagtccccttatgaccaggcagcttggatcttaaaagcaagagcgctaacagaaatggtatacatagatgaaattgatgtagatcaggaaggaattgcagaaatgatgctggatgataatcagacaggagggcctagccaggccgttaggccaatcacacaagctggaagacccattacaggtttcctcaggcccagcacgcagagtggaaggccaggcactatggaacaggctatcagaacacccagaaccgcctacacagcccgccctatcaccagctcctccggaagatttgtcaggctgggaacggcttccatgcttacaagtcctgatggaccatttataaatttatctaggctgaatttaacaaagtattcccagaaacctaagttggcaaaggctttgtttgagtatatctttcatcatgaaaatgatgttaagactgctttggatctggctgccctctccacagaacattctcagtacaaggactggtggtggaaagtacagattggaaaatgttactacaggttgggaatgtatcgtgaagcagaaaaacagtttaaatcagccctgaagcagcaggaaatggtagatacatttctgtacttggcaaaagtttatgtctcattggatcaacctgtgactgctttaaatcttttcaaacaaggcttagataagtttccaggagaagtaaccctgctctgtggaattgcaagaatctatgaggaaatgaacaatatgtcatcagcagcagaatattacaaagaagttttgaaacaagacaatactcatgtggaagccatcgcatgcattggaagcaaccacttctattctgatcagccagaaatagctctccggttttacaggcggctgctgcagatgggcatttataacggccagctttttaacaatctggggctgtgttgcttctatgcccagcagtatgatatgactctgacctcatttgaacgtgccctttctttggctgaaaatgaagaagaggcagctgatgtctggtacaacttgggacatgtagctgtgggaataggagatacaaatttggcccatcagtgcttcaggctggctctggtcaacaacaacaaccacgccgaggcctacaacaacctggctgtgctggagatgcggaagggccacgttgaacaggcaagggcactattacaaactgcatcatcattagcaccccatatgtatgaaccgcattttaattttgcaacaatctctgataagattggagatctgcagagaagctatgttgctgcgcagaagtctgaagcagcatttccagaccatgtggacacacaacatttaattaaacaattaaggcagcattttgctatgctctgattgttccttagaccacatatgttcttatgaagcagcattatgcaaggggaaaaaagcactatgtctgtgtatgtatgtatatagtgtaatacgtatattttaacaaacctgtccttgatattagttaaggtgacacataagggtgacacagaatgtgtaatgcaaatttcatagtaatagtaactttataaaataatattataaaatacaggatttaaacctttctaaatagatcctgaaactgtctctcacattatatagtagatgtttgtttataatgtttacaaaacattttggtgaatttcctcaatgttttataaatgtacattttttaagtccttaagctgactcttagccatcatgtagcttaaggagtctgaaatctgccattaaaactgcacctttaagccaggtgtggtagcatgtgcctatagtcccagctacttgggaggtggaggtgggaggattataaatagagactttccttaagactttaaaaatgtatttaaaactattttttattaaatactttgtgatttcctattaagctttaaaataaatcattgtgtaaaacaccatcaaatcattattt

SEQ ID NO: 334609 - DNA, 1849 bp, Homo sapiens
tattactttggtattaccaaagtagctttatattatggtatatcattttcccctgttgttatagtggagaattatatggaagatttttgaaggtgattatttttatttatgttgcctttatatttttatgcatattaaacttgtttacatttcaagagaaagtttcagatctcttggtctattgtttttcctctgtaggcttccatgcttacaagtcctgatggaccatttataaatttatctaggctgaatttaacaaagtattcccagaaacctaagttggcaaaggctttgtttgagtatatctttcatcatgaaaatgatgttaagactgctttggatctggctgccctctccacagaacattctcagtacaaggactggtggtggaaagtacagattggaaaatgttactacaggttgggaatgtatcgtgaagcagaaaaacagtttaaatcagccctgaagcagcaggaaatggtagatacatttctgtacttggcaaaagtttatgtctcattggatcaacctgtgactgctttaaatcttttcaaacaaggcttagataagtttccaggagaagtaaccctgctctgtggaattgcaagaatctatgaggaaatgaacaatatgtcatcagcagcagaatattacaaagaagttttgaaacaagacaatactcatgtggaagccatcgcatgcattggaagcaaccacttctattctgatcagccagaaatagctctccggttttacaggcggctgctgcagatgggcatttataacggccagctttttaacaatctggggctgtgttgcttctatgcccagcagtatgatatgactctgacctcatttgaacgtgccctttctttggctgaaaatgaagaagaggcagctgatgtctggtacaacttgggacatgtagctgtgggaataggagatacaaatttggcccatcagtgcttcaggctggctctggtcaacaacaacaaccacgccgaggcctacaacaacctggctgtgctggagatgcggaagggccacgttgaacaggcaagggcactattacaaactgcatcatcattagcaccccatatgtatgaaccgcattttaattttgcaacaatctctgataagattggagatctgcagagaagctatgttgctgcgcagaagtctgaagcagcatttccagaccatgtggacacacaacatttaattaaacaattaaggcagcattttgctatgctctgattgttccttagaccacatatgttcttatgaagcagcattatgcaaggggaaaaaagcactatgtctgtgtatgtatgtatatagtgtaatacgtatattttaacaaacctgtccttgatattagttaaggtgacacataagggtgacacagaatgtgtaatgcaaatttcatagtaatagtaactttataaaataatattataaaatacaggatttaaacctttctaaatagatcctgaaactgtctctcacattatatagtagatgtttgtttataatgtttacaaaacattttggtgaatttcctcaatgttttataaatgtacattttttaagtccttaagctgactcttagccatcatgtagcttaaggagtctgaaatctgccattaaaactgcacctttaagccaggtgtggtagcatgtgcctatagtcccagctacttgggaggtggaggtgggaggattataaatagagactttccttaagactttaaaaatgtatttaaaactattttttattaaatactttgtgatttcctattaagctttaaaataaatcattgtgtaaaacaccatcaaatcattattt

SEQ ID NO: 334610 - DNA, 840 bp, Homo sapiens
ggggggctgacaacaactgtgataggtacgaggctgggtgtggatcggccgacgctctcctggagcgctgggccttcgctggccgcaccggcagccatgagctcggagatggagccgctgctcctggcctggagctattttaggcgcaggaagttccagctctgcgccgatctatgcacgcagatgctggagaagtccccttatgaccaggcagcttggatcttaaaagcaagagcgctaacagaaatggtatacatagatgaaattgatgtagatcaggaaggaattgcagaaatgatgctggatgaaaatgctatagctcaagttccacgccctggaacgtctttgaaactccctggaactaatcagacaggagggcctagccaggccgttaggccaatcacacaagctggaagacccattacaggtttcctcaggcccagcacgcagagtggaaggccaggcactatggaacaggctatcagaacacccagaaccgcctacacagcccgccctatcaccagctcctccggaagatttgtcaggctgggaacggcttccatgcttacaagtcctgatggaccatttataaatttatctaggctgaatttaacaaagtattcccagaaacctaagttggcaaaggctttgtttgagtatatctttcatcatgaaaatgatgttaagactgctttggatctggctgccctctccacagaacattctcagtacaaggactggtggtggaaagtacagattggaaaatgttactacaggttgggaatgatcggaacaaaaacacgttatagccgagaacgaggaaggagaactttggctgga

SEQ ID NO: 334611 - DNA, 398 bp, Homo sapiens
ttttacacaactcttgagaacacttctgtaggaagactaaagttaattttttggattcttattgaatgagttagagttcacctacaaatacttggttggtccttaggactttttattttagaaactgtatttcttaaaactgtttactgccttcttaatgctttccaggaaccagatcctgaattgccagtgcatcaggtaaagaaaggtttagctgcaacctttagtttagagaattctttaatgctattgcttagttgttgctatagattagaaaatttgctgcatatcttcctgtgggtttataaaattagccatatctgtcagacattctgtgccttcttatgtaaataaatgattatattttcaatacttttgtgtatattgatagccctgta

SEQ ID NO: 334612 - DNA, 448 bp, Homo sapiens
taaattctatcagctttcccatagccttgtattactttggtattaccaaagtagctttatattatggtatatcattttcccctgttgttatagtggagaattatatggaagatttttgaaggtgattatttttatttatgttgcctttatatttttatgcatattaaacttgtttacatttcaagagaaagtttcagatctcttggtctattgtttttcctctgtaggcttccatgcttacaagtcctgatggaccatttataaatttatctaggctgaatttaacaaagtattcccagaaacctaagttggcaaagggtatgtacttaaaatgattttgagttatgaagtaatattacacgtatgatgataatgacaaattagaaaatgaataaaaacttgtgaaggaaaggccatgtctttattgaagtggaaatgttttatatgt

SEQ ID NO: 334613 - DNA, 2206 bp, Homo sapiens
ggggggctgacaacaactgtgataggtacgaggctgggtgtggatcggccgacgctctcctggagcgctgggccttcgctggccgcaccggcagccatgagctcggagatggagccgctgctcctggcctggagctattttaggcgcaggaagttccagctctgcgccgatctatgcacgcagatgctggagaagtccccttatgaccaggcagcttggatcttaaaagcaagagcgctaacagaaatggtatacatagatgaaattgatgtagatcaggaaggaattgcagaaatgatgctggatgaaaatgctatagctcaagttccacgccctggaacgtctttgaaactccctggaactaatcagacaggagggcctagccaggccgttaggccaatcacacaagctggaagacccattacaggtttcctcaggcccagcacgcagagtggaaggccaggcactatggaacaggctatcagaacacccagaaccgcctacacagcccgccctatcaccagctcctccggaagatttgtcaggctgggaacggcttccatgcttacaagtcctgatggaccatttataaatttatctaggctgaatttaacaaagtattcccagaaacctaagttggcaaaggctttgtttgagtatatctttcatcatgaaaatgatgttaagactgctttggatctggctgccctctccacagaacattctcagtacaaggactggtggtggaaagtacagattggaaaatgttactacaggttgggaatgtatcgtgaagcagaaaaacagtttaaatcagccctgaagcagcaggaaatggtagatacatttctgtacttggcaaaagtttatgtctcattggatcaacctgtgactgctttaaatcttttcaaacaaggcttagataagtttccaggagaagtaaccctgctctgtggaattgcaagaatctatgaggaaatgaacaatatgtcatcagcagcagaatattacaaagaagttttgaaacaagacaatactcatgtggaagccatcgcatgcattggaagcaaccacttctattctgatcagccagaaatagctctccggttttacaggcggctgctgcagatgggcatttataacggccagctttttaacaatctggggctgtgttgcttctatgcccagcagtatgatatgactctgacctcatttgaacgtgccctttctttggctgaaaatgaagaagaggcagctgatgtctggtacaacttgggacatgtagctgtgggaataggagatacaaatttggcccatcagtgcttcaggctggctctggtcaacaacaacaaccacgccgaggcctacaacaacctggctgtgctggagatgcggaagggccacgttgaacaggcaagggcactattacaaactgcatcatcattagcaccccatatgtatgaaccgcattttaattttgcaacaatctctgataagattggagatctgcagagaagctatgttgctgcgcagaagtctgaagcagcatttccagaccatgtggacacacaacatttaattaaacaattaaggcagcattttgctatgctctgattgttccttagaccacatatgttcttatgaagcagcattatgcaaggggaaaaaagcactatgtctgtgtatgtatgtatatagtgtaatacgtatattttaacaaacctgtccttgatattagttaaggtgacacataagggtgacacagaatgtgtaatgcaaatttcatagtaatagtaactttataaaataatattataaaatacaggatttaaacctttctaaatagatcctgaaactgtctctcacattatatagtagatgtttgtttataatgtttacaaaacattttggtgaatttcctcaatgttttataaatgtacattttttaagtccttaagctgactcttagccatcatgtagcttaaggagtctgaaatctgccattaaaactgcacctttaagccaggtgtggtagcatgtgcctatagtcccagctacttgggaggtggaggtgggaggattataaatagagactttccttaagactttaaaaatgtatttaaaactattttttattaaatactttgtgatttcctattaagctttaaaataaatcattgtgtaaaacaccatcaaatcattattt

SEQ ID NO: 334614 - DNA, 2122 bp, Homo sapiens
ggggggctgacaacaactgtgataggtacgaggctgggtgtggatcggccgacgctctcctggagcgctgggccttcgctggccgcaccggcagccatgagctcggagatggagccgctgctcctggcctggagctattttaggcgcaggaagttccagctctgcgccgatctatgcacgcagatgctggagaagtccccttatgaccaggcagcttggatcttaaaagcaagagcgctaacagaaatggtatacatagatgaaattgatgtagatcaggaaggaattgcagaaatgatgctggatgaaaatgctatagctcaagttccacgccctggaacgtctttgaaactccctggaactaatcagacaggagggcctagccaggccgttaggccaatcacacaagctggaagacccattacaggtttcctcaggcccagcacgcagagtggaaggccaggcactatggaacaggctatcagaacacccagaaccgcctacacagcccgccctatcaccagctcctccggaagatttgtcaggctgggaacggcttccatgcttacaagtcctgatggaccatttataaatttatctaggctgaatttaacaaagtattcccagaaacctaagttggcaaaggctttgtttgagtatatctttcatcatgaaaatgatgttaagactgctttggatctggctgccctctccacagaacattctcagtacaaggactggtggtggaaagtacagattggaaaatgttactacaggttgggaatgtatcgtgaagcagaaaaacagtttaaatcagccctgaagcagcaggaaatggtagatacatttctgtacttggcaaaagtttatgtctcattggatcaacctgtgactgctttaaatcttttcaaacaaggcttagataagtttccaggagaagtaaccctgctctgtggaattgcaagaatctatgaggaaatgaacaatatgtcatcagcagcagaatattacaaagaagttttgaaacaagacaatactcatgtggaagccatcgcatgcattggaagcaaccacttctattctgatcagccagaaatagctctccggttttacaggcggctgctgcagatgggcatttataacggccagctttttaacaatctggggctgtgttgcttctatgcccagcagtatgatatgactctgacctcatttgaacgtgccctttctttggctgaaaatgaagaagaggcagctgatgtctggtacaacttgggacatgtagctgtgggaataggagatacaaatttggcccatcagtgcttcaggctggctctggtcaacaacaacaaccacgccgaggcctacaacaacctggctgtgctggagatgcggaagggccacgttgaacagattggagatctgcagagaagctatgttgctgcgcagaagtctgaagcagcatttccagaccatgtggacacacaacatttaattaaacaattaaggcagcattttgctatgctctgattgttccttagaccacatatgttcttatgaagcagcattatgcaaggggaaaaaagcactatgtctgtgtatgtatgtatatagtgtaatacgtatattttaacaaacctgtccttgatattagttaaggtgacacataagggtgacacagaatgtgtaatgcaaatttcatagtaatagtaactttataaaataatattataaaatacaggatttaaacctttctaaatagatcctgaaactgtctctcacattatatagtagatgtttgtttataatgtttacaaaacattttggtgaatttcctcaatgttttataaatgtacattttttaagtccttaagctgactcttagccatcatgtagcttaaggagtctgaaatctgccattaaaactgcacctttaagccaggtgtggtagcatgtgcctatagtcccagctacttgggaggtggaggtgggaggattataaatagagactttccttaagactttaaaaatgtatttaaaactattttttattaaatactttgtgatttcctattaagctttaaaataaatcattgtgtaaaacaccatcaaatcattattt

SEQ ID NO: 334615 - DNA, 246 bp, Homo sapiens
ggggaagaagtgagaaaaggcagattctgcaaaagagttaagaaataaggggtggcttagccatgggaggcagagaggaagggcaaagagaaggttttcaatggaaccaaaaagaaacacattaagggaaatgagaaccttgaagcagcggcttcacaagttcagagggaaatatttacctggagtataagtagagaaagaaaatcaccgagcttcaataaagtgattggtggtctatggtggcaa

SEQ ID NO: 334616 - DNA, 449 bp, Homo sapiens
gaaaataaaacactctatgttctcacttgtaagtggaagctaagctatgggtatgcaaggcatacagagtggtataatggaaactggagacctagaagggggagagtgggaggggtgaggggtaaaatctatgtactgggtgcactgtacagtactcgggtgacgggtacactaagatctcagactctgccactatacagttcatccctgttatacagttcatccatgccactaaaaccacgggtacccccaaagctattaaaataaaaaggtaacaaattaataaaaatttcattaattttttaaaaagaaaagatccctgtgaaggaaactgtaacccagggctgaaggactgatatgtccctgaggcaggcagcaagggtgtggcactggccttgccaactgaaagcaaactgcttctggtgggtcttacggacagggatggagaa

SEQ ID NO: 334617 - DNA, 1176 bp, Homo sapiens
  misc_feature (51)..(51): n is a, c, g, or t
atacccgcatcaactataaaaaatggttgcaccaaacaaagaacacttagnaatttcccatgtcctactttgcaatgtaacccagagggtatcattctggtttgtggttacagacccttcaaaaaatcacacccttcctgctgttgaggtgcaatcagccataagaatgaacaagaaccggatcaacaatgccttctttctaaatgaccaaactctggaatttttaaaaatcccttccacacttgcaccacccatggacccatctgtgcccatctggattattatatttggtgtgatattttgcatcatcatagttgcaattgcactactgattttatcagggatctggcaacgtagaagaaagaacaaagaaccatctgaagtggatgacgctgaagataagtgtgaaaacatgatcacaattgaaaatggcatcccctctgatcccctggacatgaagggagggcatattaatgatgccttcatgacagaggatgagaggctcacccctctctgaagggctgttgttctgcttcctcaagaaattaaacatttgtttctgtgtgactgctgagcatcctgaaataccaagagcagatcatatattttgtttcaccattcttcttttgtaataaattttgaatgtgcttgaaagtgaaaagcaatcaattatacccaccaacaccactgaaatcataagctattcacgactcaaaatattctaaaatatttttctgacagtatagtgtataaatgtggtcatgtggtatttgtagttattgatttaagcatttttagaaataagatcaggcatatgtatatattttcacacttcaaagacctaaggaaaaataaattttccagtggagaatacatataatatggtgtagaaatcattgaaaatggatcctttttgacgatcacttatatcactctgtatatgactaagtaaacaaaagtgagaagtaattattgtaaatggatggataaaaatggaattactcatatacagggtggaattttatcctgttatcacaccaacagttgattatatattttctgaatatcagcccctaataggacaattctatttgttgaccatttctacaatttgtaaaagtccaatctgtgctaacttaataaagtaataatcatctctttttgattgtgaaataa

SEQ ID NO: 334618 - DNA, 1306 bp, Homo sapiens
tgtttcctgaatgaagatagcctatctaagaaccaggtgcagaaaatgcttttaaagtgagacttagtatcagaacagctctgggagataaagcatatgcctgggataccaatgaagaatacctcttcaaagcgatggtagctttctccatgagaaaagttcccaacagagaagcaacagaaatttcccatgtcctactttgcaatgtaacccagagggtatcattctggtttgtggttacagacccttcaaaaaatcacacccttcctgctgttgaggtgcaatcagccataagaatgaacaagaaccggatcaacaatgccttctttctaaatgaccaaactctggaatttttaaaaatcccttccacacttgcaccacccatggacccatctgtgcccatctggattattatatttggtgtgatattttgcatcatcatagttgcaattgcactactgattttatcagggatctggcaacgtagaagaaagaacaaagaaccatctgaagtggatgacgctgaagataagtgtgaaaacatgatcacaattgaaaatggcatcccctctgatcccctggacatgaagggagggcatattaatgatgccttcatgacagaggatgagaggctcacccctctctgaagggctgttgttctgcttcctcaagaaattaaacatttgtttctgtgtgactgctgagcatcctgaaataccaagagcagatcatatattttgtttcaccattcttcttttgtaataaattttgaatgtgcttgaaagtgaaaagcaatcaattatacccaccaacaccactgaaatcataagctattcacgactcaaaatattctaaaatatttttctgacagtatagtgtataaatgtggtcatgtggtatttgtagttattgatttaagcatttttagaaataagatcaggcatatgtatatattttcacacttcaaagacctaaggaaaaataaattttccagtggagaatacatataatatggtgtagaaatcattgaaaatggatcctttttgacgatcacttatatcactctgtatatgactaagtaaacaaaagtgagaagtaattattgtaaatggatggataaaaatggaattactcatatacagggtggaattttatcctgttatcacaccaacagttgattatatattttctgaatatcagcccctaataggacaattctatttgttgaccatttctacaatttgtaaaagtccaatctgtgctaacttaataaagtaataatcatctctttttgattgtgaaataa

SEQ ID NO: 334619 - DNA, 1545 bp, Homo sapiens
  misc_feature (1)..(4): n is a, c, g, or t
nnnncttttgaggtagagtcagagtagggaaaacaactaatctgttttccaaacaggttttcataaataactgacaggagatgggctgtttttatggaagtattaacccaaatgatgggtgttaatcattaaacctttttggtggtggctcgcttgtttctctgatattctaatccgggtcgacagaatggctaaggcagatttaagtgcagcgtggattttttttttctcactttgccttgtgttttccaccctgaaagaatgttgtggctgctcttttttctggtgactgccattcatgctgaactctgtcaaccaggtgcagaaaatgcttttaaagtgagacttagtatcagaacagctctgggagataaagcatatgcctgggataccaatgaagaatacctcttcaaagcgatggtagctttctccatgagaaaagttcccaacagagaagcaacagaaatttcccatgtcctactttgcaatgtaacccagagggtatcattctggtttgtggttacagacccttcaaatgaacaagaaccggatcaacaatgccttctttctaaatgaccaaactctggaatttttaaaaatcccttccacacttgcaccacccatggacccatctgtgcccatctggattattatatttggtgtgatattttgcatcatcatagttgcaattgcactactgattttatcagggatctggcaacgtagaagaaagaacaaagaaccatctgaagtggatgacgctgaagataagtgtgaaaacatgatcacaattgaaaatggcatcccctctgatcccctggacatgaagggagggcatattaatgatgccttcatgacagaggatgagaggctcacccctctctgaagggctgttgttctgcttcctcaagaaattaaacatttgtttctgtgtgactgctgagcatcctgaaataccaagagcagatcatatattttgtttcaccattcttcttttgtaataaattttgaatgtgcttgaaagtgaaaagcaatcaattatacccaccaacaccactgaaatcataagctattcacgactcaaaatattctaaaatatttttctgacagtatagtgtataaatgtggtcatgtggtatttgtagttattgatttaagcatttttagaaataagatcaggcatatgtatatattttcacacttcaaagacctaaggaaaaataaattttccagtggagaatacatataatatggtgtagaaatcattgaaaatggatcctttttgacgatcacttatatcactctgtatatgactaagtaaacaaaagtgagaagtaattattgtaaatggatggataaaaatggaattactcatatacagggtggaattttatcctgttatcacaccaacagttgattatatattttctgaatatcagcccctaataggacaattctatttgttgaccatttctacaatttgtaaaagtccaatctgtgctaacttaataaagtaataatcatctctttttgattgtgaaataa

SEQ ID NO: 334620 - DNA, 1535 bp, Homo sapiens
  misc_feature (1)..(4): n is a, c, g, or t
nnnncttttgaggtagagtcagagtagggaaaacaactaatctgttttccaaacaggttttcataaataactgacaggagatgggctgtttttatggaagtattaacccaaatgatgggtgttaatcattaaacctttttggtggtggctcgcttgtttctctgatattctaatccgggtcgacagaatggctaaggcagatttaagtgcagcgtggattttttttttctcactttgccttgtgttttccaccctgaaagaatgttgtggctgctcttttttctggtgactgccattcatgctgaactctgtcaaccaggtgcagaaaatgcttttaaagtgagacttagtatcagaacagctctgggagataaagcatatgcctgggataccaatgaagaatacctcttcaaagcgatggtagctttctccatgagaaaagttcccaacagagaagcaacagaaatttcccatgtcctactttgcaatgtaacccagagggtatcattctggtttgtggttacagacccttcaaaaaatcacacccttcctgctgttgaggtgcaatcagccataagaatgaacaagaaccggatcaacaatgccttctttctaaatgaccaaactctggaatttttaaaaatcccttccacacttgcaccacccatggacccatctgtgcccatctggattattatatttggtgtgatattttgcatcatcatagttgcaattgcactactgattttatcagggatctggcaacgtagaagaaagaacaaagaaccatctgaagtggatgacgctgaagataagtgtgaaaacatgatcacaattgccttcatgacagaggatgagaggctcacccctctctgaagggctgttgttctgcttcctcaagaaattaaacatttgtttctgtgtgactgctgagcatcctgaaataccaagagcagatcatatattttgtttcaccattcttcttttgtaataaattttgaatgtgcttgaaagtgaaaagcaatcaattatacccaccaacaccactgaaatcataagctattcacgactcaaaatattctaaaatatttttctgacagtatagtgtataaatgtggtcatgtggtatttgtagttattgatttaagcatttttagaaataagatcaggcatatgtatatattttcacacttcaaagacctaaggaaaaataaattttccagtggagaatacatataatatggtgtagaaatcattgaaaatggatcctttttgacgatcacttatatcactctgtatatgactaagtaaacaaaagtgagaagtaattattgtaaatggatggataaaaatggaattactcatatacagggtggaattttatcctgttatcacaccaacagttgattatatattttctgaatatcagcccctaataggacaattctatttgttgaccatttctacaatttgtaaaagtccaatctgtgctaacttaataaagtaataatcatctctttttgattgtgaaataa

SEQ ID NO: 334621 - DNA, 1589 bp, Homo sapiens
  misc_feature (1)..(4): n is a, c, g, or t
nnnncttttgaggtagagtcagagtagggaaaacaactaatctgttttccaaacaggttttcataaataactgacaggagatgggctgtttttatggaagtattaacccaaatgatgggtgttaatcattaaacctttttggtggtggctcgcttgtttctctgatattctaatccgggtcgacagaatggctaaggcagatttaagtgcagcgtggattttttttttctcactttgccttgtgttttccaccctgaaagaatgttgtggctgctcttttttctggtgactgccattcatgctgaactctgtcaaccaggtgcagaaaatgcttttaaagtgagacttagtatcagaacagctctgggagataaagcatatgcctgggataccaatgaagaatacctcttcaaagcgatggtagctttctccatgagaaaagttcccaacagagaagcaacagaaatttcccatgtcctactttgcaatgtaacccagagggtatcattctggtttgtggttacagacccttcaaaaaatcacacccttcctgctgttgaggtgcaatcagccataagaatgaacaagaaccggatcaacaatgccttctttctaaatgaccaaactctggaatttttaaaaatcccttccacacttgcaccacccatggacccatctgtgcccatctggattattatatttggtgtgatattttgcatcatcatagttgcaattgcactactgattttatcagggatctggcaacgtagaagaaagaacaaagaaccatctgaagtggatgacgctgaagataagtgtgaaaacatgatcacaattgaaaatggcatcccctctgatcccctggacatgaagggagggcatattaatgatgccttcatgacagaggatgagaggctcacccctctctgaagggctgttgttctgcttcctcaagaaattaaacatttgtttctgtgtgactgctgagcatcctgaaataccaagagcagatcatatattttgtttcaccattcttcttttgtaataaattttgaatgtgcttgaaagtgaaaagcaatcaattatacccaccaacaccactgaaatcataagctattcacgactcaaaatattctaaaatatttttctgacagtatagtgtataaatgtggtcatgtggtatttgtagttattgatttaagcatttttagaaataagatcaggcatatgtatatattttcacacttcaaagacctaaggaaaaataaattttccagtggagaatacatataatatggtgtagaaatcattgaaaatggatcctttttgacgatcacttatatcactctgtatatgactaagtaaacaaaagtgagaagtaattattgtaaatggatggataaaaatggaattactcatatacagggtggaattttatcctgttatcacaccaacagttgattatatattttctgaatatcagcccctaataggacaattctatttgttgaccatttctacaatttgtaaaagtccaatctgtgctaacttaataaagtaataatcatctctttttgattgtgaaataa

SEQ ID NO: 334622 - DNA, 1172 bp, Homo sapiens
  misc_feature (39)..(39): n is a, c, g, or t
cgcgaaaagcaagcaggacgacataatacccaacaaganaaacccttaatttcccatgtcctactttgcaatgtaacccagagggtatcattctggtttgtggttacagacccttcaaaaaatcacacccttcctgctgttgaggtgcaatcagccataagaatgaacaagaaccggatcaacaatgccttctttctaaatgaccaaactctggaatttttaaaaatcccttccacacttgcaccacccatggacccatctgtgcccatctggattattatatttggtgtgatattttgcatcatcatagttgcaattgcactactgattttatcagggatctggcaacgtagaagaaagaacaaagaaccatctgaagtggatgacgctgaagataagtgtgaaaacatgatcacaattgaaaatggcatcccctctgatcccctggacatgaagggagggcatattaatgatgccttcatgacagaggatgagaggctcacccctctctgaagggctgttgttctgcttcctcaagaaattaaacatttgtttctgtgtgactgctgagcatcctgaaataccaagagcagatcatatattttgtttcaccattcttcttttgtaataaattttgaatgtgcttgaaagtgaaaagcaatcaattatacccaccaacaccactgaaatcataagctattcacgactcaaaatattctaaaatatttttctgacagtatagtgtataaatgtggtcatgtggtatttgtagttattgatttaagcatttttagaaataagatcaggcatatgtatatattttcacacttcaaagacctaaggaaaaataaattttccagtggagaatacatataatatggtgtagaaatcattgaaaatggatcctttttgacgatcacttatatcactctgtatatgactaagtaaacaaaagtgagaagtaattattgtaaatggatggataaaaatggaattactcatatacagggtggaattttatcctgttatcacaccaacagttgattatatattttctgaatatcagcccctaataggacaattctatttgttgaccatttctacaatttgtaaaagtccaatctgtgctaacttaataaagtaataatcatctctttttgattgtgaaataa

SEQ ID NO: 334623 - DNA, 1201 bp, Homo sapiens
  misc_feature (15)..(15): n is a, c, g, or t
taggaagaatatggntagagggaggttggtcacttcgcttttttgaatcccctacaatcatgaagcgaaccttgagaatttcccatgtcctactttgcaatgtaacccagagggtatcattctggtttgtggttacagacccttcaaaaaatcacacccttcctgctgttgaggtgcaatcagccataagaatgaacaagaaccggatcaacaatgccttctttctaaatgaccaaactctggaatttttaaaaatcccttccacacttgcaccacccatggacccatctgtgcccatctggattattatatttggtgtgatattttgcatcatcatagttgcaattgcactactgattttatcagggatctggcaacgtagaagaaagaacaaagaaccatctgaagtggatgacgctgaagataagtgtgaaaacatgatcacaattgaaaatggcatcccctctgatcccctggacatgaagggagggcatattaatgatgccttcatgacagaggatgagaggctcacccctctctgaagggctgttgttctgcttcctcaagaaattaaacatttgtttctgtgtgactgctgagcatcctgaaataccaagagcagatcatatattttgtttcaccattcttcttttgtaataaattttgaatgtgcttgaaagtgaaaagcaatcaattatacccaccaacaccactgaaatcataagctattcacgactcaaaatattctaaaatatttttctgacagtatagtgtataaatgtggtcatgtggtatttgtagttattgatttaagcatttttagaaataagatcaggcatatgtatatattttcacacttcaaagacctaaggaaaaataaattttccagtggagaatacatataatatggtgtagaaatcattgaaaatggatcctttttgacgatcacttatatcactctgtatatgactaagtaaacaaaagtgagaagtaattattgtaaatggatggataaaaatggaattactcatatacagggtggaattttatcctgttatcacaccaacagttgattatatattttctgaatatcagcccctaataggacaattctatttgttgaccatttctacaatttgtaaaagtccaatctgtgctaacttaataaagtaataatcatctctttttgattgtgaaataa

SEQ ID NO: 334624 - DNA, 1192 bp, Homo sapiens
ttgtatggtttttaaagtcttgcagcgattcgttgctcaacgccgccatcacactccatacttctagaatttcccatgtcctactttgcaatgtaacccagagggtatcattctggtttgtggttacagacccttcaaaaaatcacacccttcctgctgttgaggtgcaatcagccataagaatgaacaagaaccggatcaacaatgccttctttctaaatgaccaaactctggaatttttaaaaatcccttccacacttgcaccacccatggacccatctgtgcccatctggattattatatttggtgtgatattttgcatcatcatagttgcaattgcactactgattttatcagggatctggcaacgtagaagaaagaacaaagaaccatctgaagtggatgacgctgaagataagtgtgaaaacatgatcacaattgaaaatggcatcccctctgatcccctggacatgaagggagggcatattaatgatgccttcatgacagaggatgagaggctcacccctctctgaagggctgttgttctgcttcctcaagaaattaaacatttgtttctgtgtgactgctgagcatcctgaaataccaagagcagatcatatattttgtttcaccattcttcttttgtaataaattttgaatgtgcttgaaagtgaaaagcaatcaattatacccaccaacaccactgaaatcataagctattcacgactcaaaatattctaaaatatttttctgacagtatagtgtataaatgtggtcatgtggtatttgtagttattgatttaagcatttttagaaataagatcaggcatatgtatatattttcacacttcaaagacctaaggaaaaataaattttccagtggagaatacatataatatggtgtagaaatcattgaaaatggatcctttttgacgatcacttatatcactctgtatatgactaagtaaacaaaagtgagaagtaattattgtaaatggatggataaaaatggaattactcatatacagggtggaattttatcctgttatcacaccaacagttgattatatattttctgaatatcagcccctaataggacaattctatttgttgaccatttctacaatttgtaaaagtccaatctgtgctaacttaataaagtaataatcatctctttttgattgtgaaataa

SEQ ID NO: 334625 - DNA, 278 bp, Homo sapiens
cccaagtgtaaaggggcttccctgggagaccaaagccacctcctctttctcgcttcccaccacagcctcagcccctcgttcacacctcacaccgcagagaagccccgcaccgcatcccggctggcccatctgtggagttttaaagagccttccaatttcttcccgtgtttgatttaaccgaatcactaaaaatacatgcaaagcgatactccattattttcacactcaactcagaaaacgaccaggcgccacgatgcgccgttgagacaactagttgt

SEQ ID NO: 334626 - DNA, 1583 bp, Homo sapiens
aaaaaaaacaaattgagtggtgagaatacaacagaagtctgacttagactgagtgttgtcagcatgtgattacaatcacacggactctgaatcatttcactttctccataatgtcctttgaaacactgtttttaagtccaacttattttttctttggttgcttgtgcctaatccagggttatgaatatttacgactaagttttaagaattttatagttatatctcctacatttaggtctttgatccattttgagttaattttcatatatgatatgaaagagagatctgacttcgttcttctaacgtggctattcaattgtcagagcaccatttatggaaaggatttttttcccattgtcaaaaatcaactatagaggtatgggtttatttatagattcttaattgtattctaatgatctataatatcttcttatgccaataccacattgccttgatttctgttgctttgtaggaaattttgaaagcgagagtcctaagtttgttttttctaggttgttttggctattctaggtcccttgtatttccatatgaattgcaggatcagcttgtcaatttctatactaaaataaaggcagttgggattttcataagcgttgtattcatgacataaagcaaatgtggagaatattgccatattaagccttccagtccatgaacatgagatgtctttccatttattgggtttttaatgtcttttaacagtggattataatttttgctaagtctcatacttttgttagatttatttctaagtattgctactgtaaaaaaaatggaatttcctgtttttggattgtgtatataaatacaattgcttctgtatattgacaattgcatcatgcaacatcaaactttttcttttttgtggattccttaggattttctacattgaaggtcatgttgtttgcaaccagagatagtttgaactcttccttttcaatctggatgccttttctttctttctcctcccaaacggtcctggctagagccactagtacaatgcttattaggtggcaatagtggatatcgttgtcttctgatcttagggagaagctttctctcatcactaattatgatgctagctgtgggttttttattgataagctttatctggttgaggatgttgccttctgtatagtttgtcttttacaaaaatccaaatcccttccatgataaaaacactcaacaaacatacattgcatctactgaagtagtcatgtggtttttatcctttattctattaatatggtacattacactgattttcaaatgtttttgttttaagacagagttttgctctgtcacccatgctggaaggaagtggcgcagtcatggcttgctgcagcctcaacctcctgagctcaagccatcctcctacctcagtttctatagtagctgggcccacaggcacacaccaccatgccctgctaaatgttgtgtttttagtagagtcagggttttgccatgttgtccaggccagtctcaaactcctgggcttaagcaatccacccaccttggcctcccaaagtgctgaaattaagcatgtgccactgcacctggcc

SEQ ID NO: 334627 - DNA, 1367 bp, Homo sapiens
ggagatgagaaggtctaggtgtgcttgaggggatgggccaaaatggtgggaaattagcttggtaaggcagctcatgaagatcttcacaacagaagagtttggcaattattgattgagcaactggacaccctgactgaactcttttgccaatagttttatggtggaaaaacaaaacctcctcagctcctctttcactccttctcttctgcaaggaaaacgattttcagactagaaaggacaaggtgaacaccagagagaaactcctgaaggcagtctagttcaagagagccgtaagctgccttgagtaactgcatctcattgtctgagtcagtagcatcccagggcacttaaggacttgcagctcaaattgcaggacaactggtggtggccctgaaaaccccatgaagaagggaagagatacgtgctgcagcctagagatgggtaaacatggccccactttgacagatgggaaaaggtaaactccacaaattatagatcaatacatttgatattgattgagggcaagattctaggacaaatgattaaaaggatggttggtgagcacttacaaaaggaagcgacgatcactcagtccccacatggattcaggaaaaacaaatcatgccccactgggttcatttcccttgacagagtgactggacaggtagaggagggaaaagttatcacccacagcgtatctagagttcaaccaaacattctctcaatgcttttgggaaaacatgtatacatgtggggtgggtaaaggtaaacctaggcgaattcttaactggttgaatgactacatacaaaatagttctgttttaatgtcactagatcaaatttgcgaattacacaaagttggtaaagtcccttatttgaacttcaaaatgtggcagtacaaatgtaagatgtgagagatgtggcttagaggcattttagagtgaatgaaagctcatgagttgaaagtgtggtttggttgctgtaaaaagtattgtgaccttgggccatattactaagagtacaactttcagaacaaaggaggtgatcatcttgtgctactttgcactgatcagaccacatctgatgcccagtgttcagttatgagcaccagacttcaagggagatgttaacaaaagtatatccagagaagagtgagaagactgaagaatcccaggagaaatttgtctactgtcagtgagtaattactgggctcacagtagatttgttctgcgtgacttcagggctccaagatctaatggatggaaattataggaaagcagatttgggttcaacatgaggaagatgctccttttccttccttttttatgatgaaaaattataataaaagtttcagctcctgaaaacag

SEQ ID NO: 334628 - DNA, 3986 bp, Homo sapiens
ggtgcgcgggcacagcagccaggctgccggagagctgatctcggggattcgggtgcggagcccttggcctggaggcgatatgggtggtccgtggcccggttcagtcgcttgcagcagcccggggaacaggcctgtctggccctgagggagtcccctttctgaagctgtggtgcttggacgacctgctctctacattgctgggcacctgtaggtgtccctcgagagctcagttttgaggttcaagtcagtgtggccatgaaggggctgcctattgggctgatgctgtgaccctggagtctgcctctcctgccagtccccctgcccggaacatgtggctgcggcttggcccgccctcgctgtccctgagccccaagcccacggttggcaggagcctgtgcctcaccctgtggttcctcagtttggcgctgagggccagtacccaggccccagcacccacagtcaacactcactttgggaagctaaggggtgcccgagtaccactgcccagtgagatcctggggcctgtggaccaatacctgggggtgccctacgcagctcccccgatcggcgagaaacgtttcctgccccctgaaccacccccatcctggtcgggcatccggaacgccacacactttcccccagtgtgcccccagaacatccacacagctgtgcccgaagtcatgctgccggtctggttcactgccaacttggatatcgtcgctacttacatccaggagcccaacgaagactgtctctacctgaacgtctatgtgccgacggaggatgtaaagcggatttccaaggaatgcgcccgaaagcccaacaagaaaatttgtaggaaaggaggatccggcgctaagaaacagggcgaggacttagcggataatgacggggatgaagatgaagacatccgggacagtggtgctaaacccgtcatggtctacatccacggaggctcttacatggaagggacaggcaacatgattgatggcagcatcctcgccagttatggcaatgtcatcgtcatcaccctcaactatcgggttggagtgctaggtttcctgagtactggagatcaggctgccaagggcaactatgggctccttgaccagatccaggccctccgctgggtgagcgagaatattgccttcttcgggggagacccccgccggatcactgtctttggctcgggcattggtgcatcctgcgtcagcctcctcacgttgtcacatcactcagagggacttttccagagagccatcatccaaagtggctctgctctgtccagctgggctgtgaactaccaaccagtgaagtacaccagcctgctggcagacaaagtgggctgtaatgtgctggacaccgtggatatggtggactgtcttcggcaaaagagtgccaaggagctggtagagcaggacatccagccagcccgctaccacgtggcctttggccctgtgattgatggtgatgtcattcctgatgaccctgagatcctcatggagcagggcgagttcctcaactatgacatcatgctaggtgtcaaccagggcgagggtctcaagtttgtggaaggggtggtggaccctgaggatggtgtctctggcactgactttgactattccgtctccaattttgtggacaatctgtatggctatcctgagggtaaggacaccctgcgagagaccatcaagttcatgtatacagactgggcagaccgtgacaaccctgagacccgccgtaaaacactggtggcactcttcactgaccaccagtgggtggagccctcagtggtgacagccgatctgcatgcccgctacggctcgcctacctacttctacgccttctatcatcactgccagagcctcatgaagcctgcttggtcagatgcagctcatggggatgaagtaccctatgtttttggggttcctatggtaggccccactgaccttttcccctgcaacttctccaagaatgatgttatgctcagtgctgtcgtcatgacctattggaccaactttgccaagactggggatcccaacaagccggtcccccaggacaccaagttcattcacaccaaggccaaccgctttgaggaagtggcctggtccaaatacaatccccgagaccagctctaccttcacatcgggctgaaaccaagggtccgagatcattaccgggccactaaggtggccttttggaaacatctggtgccccacctatacaacctgcatgacatgttccactatacgtccaccaccaccaaagtgccgcctccggataccacccacagctcccacatcacccgcaggcccaatggcaagacctggagcaccaagcggccagccatctcacctgcctacagcaacgagaatgcccaggggtcctggaacggggaccaggatgcagggccactcctggtggagaaccctcgtgactactccactgaattaagtgtcaccatcgccgtgggggcctccctcctgttccttaacgttctggccttcgctgccctctactaccgtaaggacaaacggcgccaggagcccctgcggcagcctagccctcagcggggagccggggccccggagttgggagctgctccagaggaggagctggcagcattacaactgggccccacccaccacgagtgtgaggccggtcccccccatgacacgctgcgcctcactgcattgcccgactacaccctgaccctgcggcgctccccggatgacatcccactcatgacccccaacaccatcactatgatccccaactccctggtagggctgcagacattgcacccctataacacctttgccgcagggttcaacagtaccgggctgccccactcacactccactacccgggtatagctccaactcagagcacagccaatctccaggctccctccctcccagatccaggaacacatgcacacacacacacacacacacgcagacacacacacacacacacatatatgtatacgcacgcacccacaccctacagcagatccacctgcacaaacatagacagatgtggacatgcacccgcatgtacaaaaacacaaatacggaagtaaacctgaacaaaccctttaaatggggacgcagatgagtcctcggtaaaccgaggacccatgaaacagcagctgaagccagctccctgaatctgaccacagacactcctggggggcctgaaagcaacagctggacacccccttggtgctcgccttcggcctctcttggaactgcaccaccgaccaactccagacttgggagctttaaagagcaggatagctcttcctccccaggacttggtcttttttctgggtcttgttttgttgatttttcttttttaattttggaacaaatgcttttccaacccatgagtgctaagagcctctggaagggagggcttcaggcccgaaggtctctctggctctaggacccccagtgctcacacaatcagaccaaggaacaagacccccaggaaggaaacagatttaagcaagaccatggggtggaaggagaaaggggctagcactggatggagctggagggtcgtaggggagagatctccaactctctctgtgtccgtgtggagggctgcagagcctgcagggtgacctgcttccccaaaggccaacagcattggcctggccagaccaggtgaccttagatttggtgaacaacgtactatggaagccacatcactattgggcccccaggtctgatctgggttttgcctctgcccttggggaaatgctatcagaaattcgccccattttctttacagtcttttgtgtctgtcatttctctttcaaaaaggcggtgttttttgttgttgttggtttttttttttttttaaagaaaagttcttaaaacactaacggaaacccatggagtttgtcctttgtaaaaattttaaacacagtgtcttgatataaaaataaaaaatccagttagcactcccaaaaaaaa

SEQ ID NO: 334629 - DNA, 3926 bp, Homo sapiens
ggtgcgcgggcacagcagccaggctgccggagagctgatctcggggattcgggtgcggagcccttggcctggaggcgatatgggtggtccgtggcccggttcagtcgcttgcagcagcccggggaacaggcctgtctggccctgagggagtcccctttctgaagctgtggtgcttggacgacctgctctctacattgctgggcacctgtaggtgtccctcgagagctcagttttgaggttcaagtcagtgtggccatgaaggggctgcctattgggctgatgctgtgaccctggagtctgcctctcctgccagtccccctgcccggaacatgtggctgcggcttggcccgccctcgctgtccctgagccccaagcccacggttggcaggagcctgtgcctcaccctgtggttcctcagtttggcgctgagggccagtacccaggccccagcacccacagtcaacactcactttgggaagctaaggggtgcccgagtaccactgcccagtgagatcctggggcctgtggaccaatacctgggggtgccctacgcagctcccccgatcggcgagaaacgtttcctgccccctgaaccacccccatcctggtcgggcatccggaacgccacacactttcccccagtgtgcccccagaacatccacacagctgtgcccgaagtcatgctgccggtctggttcactgccaacttggatatcgtcgctacttacatccaggagcccaacgaagactgtctctacctgaacgtctatgtgccgacggaggatggatccggcgctaagaaacagggcgaggacttagcggataatgacggggatgaagatgaagacatccgggacagtggtgctaaacccgtcatggtctacatccacggaggctcttacatggaagggacaggcaacatgattgatggcagcatcctcgccagttatggcaatgtcatcgtcatcaccctcaactatcgggttggagtgctaggtttcctgagtactggagatcaggctgccaagggcaactatgggctccttgaccagatccaggccctccgctgggtgagcgagaatattgccttcttcgggggagacccccgccggatcactgtctttggctcgggcattggtgcatcctgcgtcagcctcctcacgttgtcacatcactcagagggacttttccagagagccatcatccaaagtggctctgctctgtccagctgggctgtgaactaccaaccagtgaagtacaccagcctgctggcagacaaagtgggctgtaatgtgctggacaccgtggatatggtggactgtcttcggcaaaagagtgccaaggagctggtagagcaggacatccagccagcccgctaccacgtggcctttggccctgtgattgatggtgatgtcattcctgatgaccctgagatcctcatggagcagggcgagttcctcaactatgacatcatgctaggtgtcaaccagggcgagggtctcaagtttgtggaaggggtggtggaccctgaggatggtgtctctggcactgactttgactattccgtctccaattttgtggacaatctgtatggctatcctgagggtaaggacaccctgcgagagaccatcaagttcatgtatacagactgggcagaccgtgacaaccctgagacccgccgtaaaacactggtggcactcttcactgaccaccagtgggtggagccctcagtggtgacagccgatctgcatgcccgctacggctcgcctacctacttctacgccttctatcatcactgccagagcctcatgaagcctgcttggtcagatgcagctcatggggatgaagtaccctatgtttttggggttcctatggtaggccccactgaccttttcccctgcaacttctccaagaatgatgttatgctcagtgctgtcgtcatgacctattggaccaactttgccaagactggggatcccaacaagccggtcccccaggacaccaagttcattcacaccaaggccaaccgctttgaggaagtggcctggtccaaatacaatccccgagaccagctctaccttcacatcgggctgaaaccaagggtccgagatcattaccgggccactaaggtggccttttggaaacatctggtgccccacctatacaacctgcatgacatgttccactatacgtccaccaccaccaaagtgccgcctccggataccacccacagctcccacatcacccgcaggcccaatggcaagacctggagcaccaagcggccagccatctcacctgcctacagcaacgagaatgcccaggggtcctggaacggggaccaggatgcagggccactcctggtggagaaccctcgtgactactccactgaattaagtgtcaccatcgccgtgggggcctccctcctgttccttaacgttctggccttcgctgccctctactaccgtaaggacaaacggcgccaggagcccctgcggcagcctagccctcagcggggagccggggccccggagttgggagctgctccagaggaggagctggcagcattacaactgggccccacccaccacgagtgtgaggccggtcccccccatgacacgctgcgcctcactgcattgcccgactacaccctgaccctgcggcgctccccggatgacatcccactcatgacccccaacaccatcactatgatccccaactccctggtagggctgcagacattgcacccctataacacctttgccgcagggttcaacagtaccgggctgccccactcacactccactacccgggtatagctccaactcagagcacagccaatctccaggctccctccctcccagatccaggaacacatgcacacacacacacacacacacgcagacacacacacacacacacatatatgtatacgcacgcacccacaccctacagcagatccacctgcacaaacatagacagatgtggacatgcacccgcatgtacaaaaacacaaatacggaagtaaacctgaacaaaccctttaaatggggacgcagatgagtcctcggtaaaccgaggacccatgaaacagcagctgaagccagctccctgaatctgaccacagacactcctggggggcctgaaagcaacagctggacacccccttggtgctcgccttcggcctctcttggaactgcaccaccgaccaactccagacttgggagctttaaagagcaggatagctcttcctccccaggacttggtcttttttctgggtcttgttttgttgatttttcttttttaattttggaacaaatgcttttccaacccatgagtgctaagagcctctggaagggagggcttcaggcccgaaggtctctctggctctaggacccccagtgctcacacaatcagaccaaggaacaagacccccaggaaggaaacagatttaagcaagaccatggggtggaaggagaaaggggctagcactggatggagctggagggtcgtaggggagagatctccaactctctctgtgtccgtgtggagggctgcagagcctgcagggtgacctgcttccccaaaggccaacagcattggcctggccagaccaggtgaccttagatttggtgaacaacgtactatggaagccacatcactattgggcccccaggtctgatctgggttttgcctctgcccttggggaaatgctatcagaaattcgccccattttctttacagtcttttgtgtctgtcatttctctttcaaaaaggcggtgttttttgttgttgttggtttttttttttttttaaagaaaagttcttaaaacactaacggaaacccatggagtttgtcctttgtaaaaattttaaacacagtgtcttgatataaaaataaaaaatccagttagcactcccaaaaaaaa

SEQ ID NO: 334630 - DNA, 3968 bp, Homo sapiens
ggtgcgcgggcacagcagccaggctgccggagagctgatctcggggattcgggtgcggagcccttggcctggaggcgatatgggtggtccgtggcccggttcagtcgcttgcagcagcccggggaacaggcctgtctggccctgagggagtcccctttctgaagctgtggtgcttggacgacctgctctctacattgctgggcacctgtaggtgtccctcgagagctcagttttgaggttcaagtcagtgtggccatgaaggggctgcctattgggctgatgctgtgaccctggagtctgcctctcctgccagtccccctgcccggaacatgtggctgcggcttggcccgccctcgctgtccctgagccccaagcccacggttggcaggagcctgtgcctcaccctgtggttcctcagtttggcgctgagggccagtacccaggccccagcacccacagtcaacactcactttgggaagctaaggggtgcccgagtaccactgcccagtgagatcctggggcctgtggaccaatacctgggggtgccctacgcagctcccccgatcggcgagaaacgtttcctgccccctgaaccacccccatcctggtcgggcatccggaacgccacacactttcccccagtgtgcccccagaacatccacacagctgtgcccgaagtcatgctgccggtctggttcactgccaacttggatatcgtcgctacttacatccaggagcccaacgaagactgtctctacctgaacgtctatgtgccgacggaggatgtaaagcggatttccaaggaatgcgcccgaaagcccaacaagaaaatttgtaggaaaggaggatccggcgctaagaaacagggcgaggacttagcggataatgacggggatgaagatgaagacatccgggacagtggtgctaaacccgtcatggtctacatccacggaggctcttacatggaagggacaggcaacatgattgatggcagcatcctcgccagttatggcaatgtcatcgtcatcaccctcaactatcgggttggagtgctaggtttcctgagtactggagatcaggctgccaagggcaactatgggctccttgaccagatccaggccctccgctgggtgagcgagaatattgccttcttcgggggagacccccgccggatcactgtctttggctcgggcattggtgcatcctgcgtcagcctcctcacgttgtcacatcactcagagggacttttccagagagccatcatccaaagtggctctgctctgtccagctgggctgtgaactaccaaccagtgaagtacaccagcctgctggcagacaaagtgggctgtaatgtgctggacaccgtggatatggtggactgtcttcggcaaaagagtgccaaggagctggtagagcaggacatccagccagcccgctaccacgtggcctttggccctgtgattgatggtgatgtcattcctgatgaccctgagatcctcatggagcagggcgagttcctcaactatgacatcatgctaggtgtcaaccagggcgagggtctcaagtttgtggaaggggtggtggaccctgaggatggtgtctctggcactgactttgactattccgtctccaattttgtggacaatctgtatggctatcctgagggtaaggacaccctgcgagagaccatcaagttcatgtatacagactgggcagaccgtgacaaccctgagacccgccgtaaaacactggtggcactcttcactgaccaccagtgggtggagccctcagtggtgacagccgatctgcatgcccgctacggctcgcctacctacttctacgccttctatcatcactgccagagcctcatgaagcctgcttggtcagatgcagctcatggggatgaagtaccctatgtttttggggttcctatggtaggccccactgaccttttcccctgcaacttctccaagaatgatgttatgctcagtgctgtcgtcatgacctattggaccaactttgccaagactggggatcccaacaagccggtcccccaggacaccaagttcattcacaccaaggccaaccgctttgaggaagtggcctggtccaaatacaatccccgagaccagctctaccttcacatcgggctgaaaccaagggtccgagatcattaccgggccactaaggtggccttttggaaacatctggtgccccacctatacaacctgcatgacatgttccactatacgtccaccaccaccaaagtgccgcctccggataccacccacagctcccacatcacccgcaggcccaatggcaagacctggagcaccaagcggccagccatctcacctgcctacagcaacgagaatgcccaggggtcctggaacggggaccaggatgcagggccactcctggtggagaaccctcgtgactactccactgaattaagtgtcaccatcgccgtgggggcctccctcctgttccttaacgttctggccttcgctgccctctactaccgtaaggacaaacggcgccaggagcccctgcggcagcctagccctcagcggggagccggggccccggagttgggagctgctccagaggaggagctggcagcattacaactgggccccacccaccacgagtgtgaggccggtcccccccatgacacgctgcgcctcactgcattgcccgactacaccctgaccctgcggcgctccccggatgacatcccactcatgacccccaacaccatcactatgatccccaactccctggtagggctgcagacattgcacccctataacacctttgccgcagggttcaacagtaccgggctgccccactcacactccactacccgggtatagctccaactcagagcacagccaatctccaggctccctccctcccagatccaggaacacatgcacacacacacacacacacacgcagacacacacacacacacacatatatgtatacgcacgcacccacaccctacagcagatccacctgcacaaacatagacagatgtggacatgcacccgcatgtacaaaaacacaaatacggaagtaaacctgaacaaaccctttaaatggggacgcagatgagtcctcggtaaaccgaggacccatgaaacagcagctgaagccagctccctgaatctgaccacagacactcctggggggcctgaaagcaacagctggacacccccttggtgctcgccttcggcctctcttggaactgcaccaccgaccaactccagacttgggagctttaaagagcaggatagctcttcctccccaggacttggtcttttttctgggtcttgttttgttgatttttcttttttaattttggaacaaatgcttttccaacccatgagtgctaagagcctctggaagggagggcttcaggcccgaaggtctctctggctctaggacccccagtgctcacacaatcagaccaaggaacaagacccccaggaaggaaacagatttaagcaagaccatggggtggaaggagaaaggggctagcactggatggagctggagggtcgtaggggagagatctccaactctctctgtgtccgtgtggagggctgcagagcctgcagggtgacctgcttccccaaaggccaacagcattggcctggccagaccaggtgaccttagatttggtgaacaacgtatattgggcccccaggtctgatctgggttttgcctctgcccttggggaaatgctatcagaaattcgccccattttctttacagtcttttgtgtctgtcatttctctttcaaaaaggcggtgttttttgttgttgttggtttttttttttttttaaagaaaagttcttaaaacactaacggaaacccatggagtttgtcctttgtaaaaattttaaacacagtgtcttgatataaaaataaaaaatccagttagcactcccaaaaaaaa

SEQ ID NO: 334631 - DNA, 3866 bp, Homo sapiens
ggtgcgcgggcacagcagccaggctgccggagagctgatctcggggattcgggtgcggagcccttggcctggaggcgatatgggtggtccgtggcccggttcagtcgcttgcagcagcccggggaacaggcctgtctggccctgagggagtcccctttctgaagctgtggtgcttggacgacctgctctctacattgctgggcacctgtaggtgtccctcgagagctcagttttgaggttcaagtcagtgtggccatgaaggggctgcctattgggctgatgctgtgaccctggagtctgcctctcctgccagtccccctgcccggaacatgtggctgcggcttggcccgccctcgctgtccctgagccccaagcccacggttggcaggagcctgtgcctcaccctgtggttcctcagtttggcgctgagggccagtacccaggccccagcacccacagtcaacactcactttgggaagctaaggggtgcccgagtaccactgcccagtgagatcctggggcctgtggaccaatacctgggggtgccctacgcagctcccccgatcggcgagaaacgtttcctgccccctgaaccacccccatcctggtcgggcatccggaacgccacacactttcccccagtgtgcccccagaacatccacacagctgtgcccgaagtcatgctgccggtctggttcactgccaacttggatatcgtcgctacttacatccaggagcccaacgaagactgtctctacctgaacgtctatgtgccgacggaggatgacatccgggacagtggtgctaaacccgtcatggtctacatccacggaggctcttacatggaagggacaggcaacatgattgatggcagcatcctcgccagttatggcaatgtcatcgtcatcaccctcaactatcgggttggagtgctaggtttcctgagtactggagatcaggctgccaagggcaactatgggctccttgaccagatccaggccctccgctgggtgagcgagaatattgccttcttcgggggagacccccgccggatcactgtctttggctcgggcattggtgcatcctgcgtcagcctcctcacgttgtcacatcactcagagggacttttccagagagccatcatccaaagtggctctgctctgtccagctgggctgtgaactaccaaccagtgaagtacaccagcctgctggcagacaaagtgggctgtaatgtgctggacaccgtggatatggtggactgtcttcggcaaaagagtgccaaggagctggtagagcaggacatccagccagcccgctaccacgtggcctttggccctgtgattgatggtgatgtcattcctgatgaccctgagatcctcatggagcagggcgagttcctcaactatgacatcatgctaggtgtcaaccagggcgagggtctcaagtttgtggaaggggtggtggaccctgaggatggtgtctctggcactgactttgactattccgtctccaattttgtggacaatctgtatggctatcctgagggtaaggacaccctgcgagagaccatcaagttcatgtatacagactgggcagaccgtgacaaccctgagacccgccgtaaaacactggtggcactcttcactgaccaccagtgggtggagccctcagtggtgacagccgatctgcatgcccgctacggctcgcctacctacttctacgccttctatcatcactgccagagcctcatgaagcctgcttggtcagatgcagctcatggggatgaagtaccctatgtttttggggttcctatggtaggccccactgaccttttcccctgcaacttctccaagaatgatgttatgctcagtgctgtcgtcatgacctattggaccaactttgccaagactggggatcccaacaagccggtcccccaggacaccaagttcattcacaccaaggccaaccgctttgaggaagtggcctggtccaaatacaatccccgagaccagctctaccttcacatcgggctgaaaccaagggtccgagatcattaccgggccactaaggtggccttttggaaacatctggtgccccacctatacaacctgcatgacatgttccactatacgtccaccaccaccaaagtgccgcctccggataccacccacagctcccacatcacccgcaggcccaatggcaagacctggagcaccaagcggccagccatctcacctgcctacagcaacgagaatgcccaggggtcctggaacggggaccaggatgcagggccactcctggtggagaaccctcgtgactactccactgaattaagtgtcaccatcgccgtgggggcctccctcctgttccttaacgttctggccttcgctgccctctactaccgtaaggacaaacggcgccaggagcccctgcggcagcctagccctcagcggggagccggggccccggagttgggagctgctccagaggaggagctggcagcattacaactgggccccacccaccacgagtgtgaggccggtcccccccatgacacgctgcgcctcactgcattgcccgactacaccctgaccctgcggcgctccccggatgacatcccactcatgacccccaacaccatcactatgatccccaactccctggtagggctgcagacattgcacccctataacacctttgccgcagggttcaacagtaccgggctgccccactcacactccactacccgggtatagctccaactcagagcacagccaatctccaggctccctccctcccagatccaggaacacatgcacacacacacacacacacacgcagacacacacacacacacacatatatgtatacgcacgcacccacaccctacagcagatccacctgcacaaacatagacagatgtggacatgcacccgcatgtacaaaaacacaaatacggaagtaaacctgaacaaaccctttaaatggggacgcagatgagtcctcggtaaaccgaggacccatgaaacagcagctgaagccagctccctgaatctgaccacagacactcctggggggcctgaaagcaacagctggacacccccttggtgctcgccttcggcctctcttggaactgcaccaccgaccaactccagacttgggagctttaaagagcaggatagctcttcctccccaggacttggtcttttttctgggtcttgttttgttgatttttcttttttaattttggaacaaatgcttttccaacccatgagtgctaagagcctctggaagggagggcttcaggcccgaaggtctctctggctctaggacccccagtgctcacacaatcagaccaaggaacaagacccccaggaaggaaacagatttaagcaagaccatggggtggaaggagaaaggggctagcactggatggagctggagggtcgtaggggagagatctccaactctctctgtgtccgtgtggagggctgcagagcctgcagggtgacctgcttccccaaaggccaacagcattggcctggccagaccaggtgaccttagatttggtgaacaacgtactatggaagccacatcactattgggcccccaggtctgatctgggttttgcctctgcccttggggaaatgctatcagaaattcgccccattttctttacagtcttttgtgtctgtcatttctctttcaaaaaggcggtgttttttgttgttgttggtttttttttttttttaaagaaaagttcttaaaacactaacggaaacccatggagtttgtcctttgtaaaaattttaaacacagtgtcttgatataaaaataaaaaatccagttagcactcccaaaaaaaa

SEQ ID NO: 334632 - DNA, 593 bp, Homo sapiens
  misc_feature (486)..(486): n is a, c, g, or t
tcaataacatatttaagtataatttcaattgttcagattattatattcttgtatttaatggtgagaggtattatttcccttttcaattttgtcatattgcaaatttcgaggaaaattaaagttatgtacgtctccagagatattatctagagatattaccaactgcgttttccaaaacgcaattggtaagagttttttttcccttgccttacactcaaggtagagaaataaattattttccaccattgaaaaaaaaaactgcacaaaagcttgtctggttcccaaaacaactgcttcttctaaaagttctcaatgattttcatagtataaatgctaaattacctcaacagaaatacaacacaagtttgaaggaaaccagaaaccaccataaatagcaactttcaaaagatgagagtacctgggcgccggtggctcacattatgctttcttaaagactgtctggaattacggcatttctattatttnagagtcaataacatatttaagtataatttcaattgttcagattattatattcttgtatttcatgatgagaggtatatttccctgctattgaaacttctaaaactagg

SEQ ID NO: 334633 - DNA, 1075 bp, Homo sapiens
gcacaggtcaagtatttcatgttgatttaaatactaagtcaatttatattgttaaatgatatattaatttcaggtaataatctccagatgagtaaggattagtaaattggttggtcatacacaatcagagatttaatagcatcatttgttgtttatgttgcaaaaaaaatattttgtagatgaagtagcttagttgaaaactctttttgtattttttttttttttttactgtttggagatagtgtagagatgtgaggaaaatttaaaaatgtgtgtgattttcttgaaataaattgcagtagaaatcaggtaacattttaagttttagtatcaaactggaataatatttgatgatatagcaatgtatatgtttttgaaagctataaaacttgaaacaacaggctggcaaagtctgttgagtaactgtcaataaatggattatgatagctagaatattgaaacatcagggctcagtactatttgaaagtacattcttctgtgaataaagaacaacccttgagccttacattttatcttttaaggggttgagcgggaaaaacaggacctggagaagcaaatgtcagatttgagagtgcagctgaacttcagcgcaatggcatctgagttagaggaagtgaaacggtgcatggagagaaaagacaaggagaaagcacatttggcatcacaagtagaggtgactttgctctttttaagtcatattcgaaatattttaattttatctcatggaattgcttaatgaaattttaatataaagatgtgttattttatgaactccagtgtgagcattgataatataaagttatattaatgactgatttacttatatgtagaaattcctatgggttcatttctctttcattcaggaccccaaagccaggaacctggatgattttcctttattattttacagagaaatcctttactatttttaaatttgaaaatatttttgttctaatagcaattgaaccctttctacagacagaagggaccttttttgtttgagagaacagtgaattattatttattttgcgggtgaaactggcagaatgcatag

SEQ ID NO: 334634 - DNA, 950 bp, Homo sapiens
acatgatagctggtgttactgagtaaatttgagtgttaaatgtcaatgtaagctaacggccaagatagggaccactgcagggtggttacttgcagctgtgactcaactggtccttcactgccaaacatacctggggttggatcattggcctgacgtttgcaaattgaggaaccttagggcaaatcagtgaacttctgaactgccttcgtcttcagttatatggggatttccccacttttgagatccttgtaaggattatatgagatgaagagatgagacaaggtatataaaagtcctagcacagagcgtgtcatataatatggcttcacaagtaccctcatctcctttccacctgggcgacagaatgagactccatctcaaaaaaaaaaaaaagaaaccaaggatatagaataaaacaagagtgtagatttgggcattgaggccttcaaattggattgttcccaatgtccagaagaaaaaaaaaatttagaagagacccaaatcagaaaacaaaagttgggctgaattcaatgcgaattattttctagctcaatattaatactgcttatgtcagctgaatttcagcctttcaataacagctagtcaagtatttttttagttggttcctattgatcgtcatcttattttagtggaatccattatattgaagatgtcaagttcctcatttcccatacaaagaatgtgagattcatctttcttgaatctttgctaagtgttgaaggggacttttggcatcttttcaggaggactataattgggccctctaactaaaaagtctcctatgccccttagatagatgagattttttttttgaccttgtacccaccaacattggtgggaggctcagaagggactgtgtttgtaactttgtagcactttctaaacagtgacctgttgtatgggcattataggacagtccgtggggtggg

SEQ ID NO: 334635 - DNA, 1464 bp, Homo sapiens
acatgatagctggtgttactgagtaaatttgagtgttaaatgtcaatgtaagctaacggccaagatagggaccactgcagggtggttacttgcagctgtgactcaactggtccttcactgccaaacatacctggggttggatcattggcctgacgtttgcaaattgaggaaccttagggcaaatcagtgaacttctgaactgccttcgtcttcagttatatggggatttccccacttttgagatccttgtaaggattatatgagatgaagagatgagacaaggtatataaaagtcctagcacagagcgtgtcatataatatggcttcacaagtaccctcatctcctttccagtcgttttttgttgttgtttttgtttttttgagaccatctcactctgttgcccaggctggagtgcctcttcatttttatttctttattcagcaagtattgatcaaatgtgctttgtaccaggtactgagctctacgttgggatataatggtgatcaaggagattgtagattctggcagggaaaactgacatcaaacacggcgacccgacatagtgagaccctgtctctactagaagaactttaaaaatcacctaggtgtgggccgggcacggtggctaacgcctgtaatcccagcactttgagatgctgaggcaggtggatcacgaggtcaggagatcgagaccatcctggataacacggagaaaccccgtctctactaaaaatacaaaaaaattagccgggcgtgggggcgggcatctgtagtcccaattactcgggaggctgcagcaggagaatggcatgaacccgggaggcggatcttgcattgagccaagatcacgccactgcactccagcctgggcgacagaatgagactccatctcaaaaaaaaaaaaaagaaaccaaggatatagaataaaacaagagtgtagatttgggcattgaggccttcaaattggattgttcccaatgtccagaagaaaaaaaaaatttagaagagacccaaatcagaaaacaaaagttgggctgaattcaatgcgaattattttctagctcaatattaatactgcttatgtcagctgaatttcagcctttcaataacagctagtcaagtatttttttagttggttcctattgatcgtcatcttattttagtggaatccattatattgaagatgtcaagttcctcatttcccatacaaagaatgtgagattcatctttcttgaatctttgctaagtgttgaaggggacttttggcatcttttcaggaggactataattgggccctctaactaaaaagtctcctatgccccttagatagatgagattttttttttgaccttgtacccaccaacattggtgggaggctcagaagggactgtgtttgtaactttgtagcactttctaaacagtgacctgttgtatgggcattataggacagtccgtggggtggg

SEQ ID NO: 334636 - DNA, 1581 bp, Homo sapiens
aggctgcaacacatgaaaacaggaaggagacacaggggcgagtcagctccactgaaagtctgtagctgtgactttctggtttgccactccaatttgagtactaattaagtggtagtcacatcttcaacataaaaaccaaaataatggcatcctcgtggaaggaattttgtcagaaaaatgctgtgtactttgctgtcttcctaggatttgttctgtttttgtttgtttgttttttttaatggttccacaggctgcataggaatacaagctaagcaatattttaattacagatcattaagcagctttgagtctggaaaatttgtcaaatgtaccgagcaattagaattgttaccaggagaaaatatcaatctacttgctggagggtcaaaagaaaaaatagacatgaaaaaactgcttcgtaacatgtgaagtccagatccaagggaacctcagaaatccattgaagttccattgttaagaagttctgtttgtttttttgagaccatctcactctgttgcccaggctggagtgcctcttcatttttatttctttattcagcaagtattgatcaaatgtgctttgtaccaggtactgagctctacgttgggatataatggtgatcaaggagattgtagattctggcagggaaaactgacatcaaacacggcgacccgacatagtgagaccctgtctctactagaagaactttaaaaatcacctaggtgtgggccgggcacggtggctaacgcctgtaatcccagcactttgagatgctgaggcaggtggatcacgaggtcaggagatcgagaccatcctggataacacggagaaaccccgtctctactaaaaatacaaaaaaattagccgggcgtgggggcgggcatctgtagtcccaattactcgggaggctgcagcaggagaatggcatgaacccgggaggcggatcttgcattgagccaagatcacgccactgcactccagcctgggcgacagaatgagactccatctcaaaaaaaaaaaaaagaaaccaaggatatagaataaaacaagagtgtagatttgggcattgaggccttcaaattggattgttcccaatgtccagaagaaaaaaaaaatttagaagagacccaaatcagaaaacaaaagttgggctgaattcaatgcgaattattttctagctcaatattaatactgcttatgtcagctgaatttcagcctttcaataacagctagtcaagtatttttttagttggttcctattgatcgtcatcttattttagtggaatccattatattgaagatgtcaagttcctcatttcccatacaaagaatgtgagattcatctttcttgaatctttgctaagtgttgaaggggacttttggcatcttttcaggaggactataattgggccctctaactaaaaagtctcctatgccccttagatagatgagattttttttttgaccttgtacccaccaacattggtgggaggctcagaagggactgtgtttgtaactttgtagcactttctaaacagtgacctgttgtatgggcattataggacagtccgtggggtggg

SEQ ID NO: 334637 - DNA, 634 bp, Homo sapiens
tcaggtttgaaaaggcctctgtggagtaccaggaacacctgtgtgccatgataggtgttcattgctgcatctccagctttgacaaatcggtgctcaccttagccaatgctgggtgtaacagtgccagcccgaaacattgtctgaatggtgaatccagaaaaactgtgctgtccaaaccgactgactcttcccctgaggttataaattatttaggaaataaagcatgtgagtgctacatctcaattgccgattgggctgctgtgcaggaatggcagaacgctatccatgacttgaaaaagagtaccagtagcacttccttcaacctgaaagctgacttcaactatataaaatcattaagcagctttgagtctggaaaatttgtcaaatgtaccgagcaattagaattgttaccaggagaaaatatcaatctacttgctggagggtcaaaagaaaaaatagacatgaaaaaactgcttcgtaacatgtgaagtccagatccaagggaacctcagaaatccattgaagttccattgttaagaagttctgtttgtttggcaactgctttaaacccgatagaacaagatcagaagtggcagtctataactgaaaatgtggtaaagtacttgaagcaaac

SEQ ID NO: 334638 - DNA, 393 bp, Homo sapiens
tgctgggattacaggcgtgagccaccacacctgacctcgacttagtgatttttgagcctttgaaggcaactgctttttaggggtctgaggtacagtaattttgtatgaagtatgatttttatatagctctcagtaatgcttatagtgtttaactgcctgaaatattaaaggagctgttcattggtgattagttcttaataatgccaaacataaatcaaaatttataataaaagcacattaacttaatgacatttcatttaacttctgtagacatgaaaaaactgcttcgtaacatgtgaagtccagatccaagggaacctcagaaatccattgaagttccattgttaagaagttctgtttgtttggcaactgctttaaacccgatagaacaag

SEQ ID NO: 334639 - DNA, 1640 bp, Homo sapiens
tcaggtttgaaaaggcctctgtggagtaccaggaacacctgtgtgccatgataggtgttcattgctgcatctccagctttgacaaatcggtgctcaccttagccaatgctgggtgtaacagtgccagcccgaaacattgtctgaatggtgaatccagaaaaactgtgctgtccaaaccgactgactcttcccctgaggttataaattatttaggaaataaagcatgtgagtgctacatctcaattgccgattgggctgctgtgcaggaatggcagaacgctatccatgacttgaaaaagagtaccagtagcacttccttcaacctgaaagctgacttcaactatataaaatcattaagcagctttgagtctggaaaatttgtcaaatgtaccgagcaattagaattgttaccaggagaaaatatcaatctacttgctggagggtcaaaagaaaaaatagacatgaaaaaactgcttcgtaacatgtgaagtccagatccaagggaacctcagaaatccattgaagttccattgttaagaagttctgtttgtttttttgagaccatctcactctgttgcccaggctggagtgcctcttcatttttatttctttattcagcaagtattgatcaaatgtgctttgtaccaggtactgagctctacgttgggatataatggtgatcaaggagattgtagattctggcagggaaaactgacatcaaacacggcgacccgacatagtgagaccctgtctctactagaagaactttaaaaatcacctaggtgtgggccgggcacggtggctaacgcctgtaatcccagcactttgagatgctgaggcaggtggatcacgaggtcaggagatcgagaccatcctggataacacggagaaaccccgtctctactaaaaatacaaaaaaattagccgggcgtgggggcgggcatctgtagtcccaattactcgggaggctgcagcaggagaatggcatgaacccgggaggcggatcttgcattgagccaagatcacgccactgcactccagcctgggcgacagaatgagactccatctcaaaaaaaaaaaaaagaaaccaaggatatagaataaaacaagagtgtagatttgggcattgaggccttcaaattggattgttcccaatgtccagaagaaaaaaaaaatttagaagagacccaaatcagaaaacaaaagttgggctgaattcaatgcgaattattttctagctcaatattaatactgcttatgtcagctgaatttcagcctttcaataacagctagtcaagtatttttttagttggttcctattgatcgtcatcttattttagtggaatccattatattgaagatgtcaagttcctcatttcccatacaaagaatgtgagattcatctttcttgaatctttgctaagtgttgaaggggacttttggcatcttttcaggaggactataattgggccctctaactaaaaagtctcctatgccccttagatagatgagattttttttttgaccttgtacccaccaacattggtgggaggctcagaagggactgtgtttgtaactttgtagcactttctaaacagtgacctgttgtatgggcattataggacagtccgtggggtggg

SEQ ID NO: 334640 - DNA, 253 bp, Homo sapiens
aagccagggctgggtgagatgaggctcagcctgagggagttcatcaggaccggagggctgcttgcggcccatctcaacaaggactcctcactgctcggtgtcgtgcaggtgtgccactgcgagccgggtgggcagcccagccccataggtcgtaggcagagagtatgcatggcccacatgcagtaccttctcatatgatacaacagccctgtgatggtgccatttacatttttttgaatgaagaaactgaggc

SEQ ID NO: 334641 - DNA, 231 bp, Homo sapiens
atatttgaaacttcctaattatttctgaaaatatcttttaaagctatttgattgaaccagaatctgaacaagttcagtcattgtatttggttctatctctttagtctcttaatacagaaaagctttggcccaccttttttttgtgtgtgttttgtgaacattcacttttttttttgttgagtcagagtctcgctctgtcgcccaggctggagtgcagtggtgccgtctcgg

SEQ ID NO: 334642 - DNA, 444 bp, Homo sapiens
tcttctctaaatttttacacttacatctacaatgaacttggaattgattttttcatttccaaaagagttttacaattaatcaagtatcacaggctaatttcactcaagaactcagatgcaaaagtccaaaccaagtatcagtcaacctaatccagcaatatataaagcgatattatgaccaagttggatttcaggaatgcaagtgtagttgatcatttcaaactcaatcactgcaatttctcatactgatgtatcaatggagacaaagtatagaggtacttttttaatgttttatgagaaatgctaagctgaatttatgtcaaggaagaactgaggccatatatagtggctcacacctgtaatcccagcagggccaaggcaggcggattgcttgaggccaggagtccaagaccagcctggccaatgtagcaaagaccccaaaag

SEQ ID NO: 334643 - DNA, 170 bp, Homo sapiens
gctctgatcagcaagaagcttaatgattatcgcaaagtgagccatagctctgggcccaaagctgattcctcccccaaaggctctcgcggcctggggggcctcaagtctgagttcctcaagcagagtgcggcacgtggcctcaggactcaggacctgcccgcagggagcaa

SEQ ID NO: 334644 - DNA, 383 bp, Homo sapiens
gaaatagtacaggaaaataagtctgtcttggttctcaccacctagtggggagtaaacaaatgcaatagaaggcctgtctcaagggtcttgagagaaagttgcttagggagctgtgggaactcacaaaggggaccacctaactcagcctggagatttccagaaagtcttgccagagaaggcgtcacttagctcagatgttaaaggatgagcaagaattagctagagaaataagaaaaggaaaagtattccagtcagagaaatcagcatatgccaaggcacagaggtatgctgtgtttgggaaaagcaggagtgctgggtggctggaggcttgtagcagtcattgagaagccagatattcaaggttccttgatggcctactcgta

SEQ ID NO: 334645 - DNA, 247 bp, Homo sapiens
aaatcggtagactttttctccacaagtcctgtcagagtcagcagctttctgcagtaccgaaggccacttcctcacggtccccaagctcctgagggaggcagaggctcccacaagtgacagtgggcaccccctccccaaaatgcaaaacaaaagcaactcccacaggcccgccgccaccaccccttgctttccccggaaatcgaaggaaaatctctagtgtccccaacgcctcgtggtggccctgctc

SEQ ID NO: 334646 - DNA, 476 bp, Homo sapiens
tgcctggcacacagggagagcggcgagggggaggccagggaggccagggtcagaaggtcaagactagaaggagtttaaagaacagagccctagggagcatcaaagagccaactacggaggctccaagggaaggagccaactgggagacaggtcgtggatcatgggagagggtagaaagtgtgcttgcagcagccctgatgctcagagaggaaggcaaggagccaggggacaagcagtcagtgggggctgttagggagaaggaagcctcattgtctgtgtcacaggtggtggtcaggtggctgatgtgacggcagagaacagttatgccaggagttgtaagtggcagcaggtgccagatcagcagcttgcaggagggctatggcttaagcagaaatgcaaacctgttagtattgttaaaaagcaagagtgactttagtattcatgaacagtaaatcagaggtcagacttgacaagag

SEQ ID NO: 334647 - DNA, 435 bp, Homo sapiens
gggaattgcttgagtccaggagtcggaggtcgcagtgagctgagatcatggcactgcactccagtctggtgatagaacaagactgcctcaaaacaaacaaacaaaaatttggagcttatgtttaaggaagatttatttaaaacacacaaaatatcaagtatttggggaggatgtggaacaattagaactccctttgactcctggaaggagtgttaactggtacaaccacttggcggcactgggagactctactaaagctgaacatatgtgttatggaatgaattgtgtccactccccgcaaaattcttatgttgaaatcctaacccccacagggtctcgctctgtccaccatgcctggctaattaaaaaaaagttttttttttggagacagagtttcacggtgtgggccaggagggtctggatctcctaacctcg

SEQ ID NO: 334648 - DNA, 407 bp, Homo sapiens
cacttgctatgttatctccctcacactcatattcaccctgatgctccccactccccactcaccatgagacagttttaaaagaattgaccctaaagagttcgccatctcctctcatccttccccaaccctctccaatcagctgttgcccctaggtatccccaggcatcttcttaatgactagttgtctctgtgttgccaaacccaacactcagttccaatgcttgtctgccttgacacatcagtgtcatgtttggacagtgagtccctgcctccctgtgaagcacgttcctctcttggcttcctggactgctctctctgtcatcctgattcactggctgctctttctctgcacctatgtatttttctcctcaacttccctcctgtaaacccaggagttccccaggcct

SEQ ID NO: 334649 - DNA, 449 bp, Homo sapiens
aaaaaaaaaaaaaaagaataaaatgctatctctatgttcagattgaaattgaaggtaaagaataaaagaaagaaaaaagaaatccatactggtcctagttttttttaaaagagcctgcctataatagcatccaaattgaggcaaggcagattagatacattcttacaatcctaaaccagaaagcagtttataaatttaacaagatattaatgataccttcattgctgtagtgatggatatgtgtgtgcaaatagtttaccttcaaggtaagtggattcttgaaggtatgaatgttgaatttctgcactccgattggaaccatgtaattgggttggcattaccacaactatttttctagtaatctttaagtatttctttcattgataaatagaaataaaagtatatagtaagtttggcatttgttttaaacttttgggtattgactgata

SEQ ID NO: 334650 - DNA, 845 bp, Homo sapiens
ctgaagccccacggtgttttcccccttaagcccaagatatttaggaccccccctggtttggggctcagcttgttgagtccttccagtcacgggtcttccaagtttataagaagaatcagatttccaagagcaatttacccctttcttcattctgttaggcattatttggaatggcttttcttcgatgaattcaattaacaggctggagtgcagcggcgtgatctcggctcactacaacctccacctcccgggttcaagcgattcttctgcttcagccttctcctgagcagctgggattacaagtgcgcaccatcatgcctggctaatttttgtatttttaatagagacggggtttctccatgttggccaggctcgtctcaaactcctgacctcaggtgatctgcccacctcggcctcccgaagtgctgggattacaggtgtgagccactgcacccagcctaaagagaatattttctcaattaaaaatactatagtcttcagaaaagaatcaattaaagtgatgagaaatttcaaatatattaactacaaactgcaactttgaaaaatattgcaggcaattttattaagttctacagagaaatgtcagtaacatggtattagaaataaatatagctgataaacagattaaagtttatgaatatataccaagaataattattctgcttatgtaattttaattttggaaaaccattttgaaaagtttgttacatgaaatgttatttttaaaagaatttcatatttgaaaatagtttgaatatataatttttaagtattttcaatgcaattagtccaattttctgatcaataaatatcttttaaaagta

SEQ ID NO: 334651 - DNA, 696 bp, Homo sapiens
aaatgtatgatgaaagtgagccgcccccacccatcaatactctcagctggcagctggagtgcagcggcgtgatctcggctcactacaacctccacctcccgggttcaagcgattcttctgcttcagccttctcctgagcagctgggattacaagtgcgcaccatcatgcctggctaatttttgtatttttaatagagacggggtttctccatgttggccaggctcgtctcaaactcctgacctcaggtgatctgcccacctcggcctcccgaagtgctgggattacaggtgtgagccactgcacccagcctaaagagaatattttctcaattaaaaatactatagtcttcagaaaagaatcaattaaagtgatgagaaatttcaaatatattaactacaaactgcaactttgaaaaatattgcaggcaattttattaagttctacagagaaatgtcagtaacatggtattagaaataaatatagctgataaacagattaaagtttatgaatatataccaagaataattattctgcttatgtaattttaattttggaaaaccattttgaaaagtttgttacatgaaatgttatttttaaaagaatttcatatttgaaaatagtttgaatatataatttttaagtattttcaatgcaattagtccaattttctgatcaataaatatcttttaaaagta

SEQ ID NO: 334652 - DNA, 867 bp, Homo sapiens
  misc_feature (702)..(702): n is a, c, g, or t
  misc_feature (751)..(751): n is a, c, g, or t
  misc_feature (865)..(865): n is a, c, g, or t
  misc_feature (867)..(867): n is a, c, g, or t
aaatgtatgatgaaagtgagccgcccccacccatcaatactctcagctggcagctggagtgcagcggcgtgatctcggctcactacaacctccacctcccgggttcaagcgattcttctgcttcagccttctcctgagcagctgggattacaagtgcgcaccatcatgcctggctaatttttgtatttttaatagagacggggtttctccatgttggccaggctcgtctcaaactcctgacctcaggtgatctgcccacctcggcctcccgaagtgctgggattacaggtgtgagccactgcacccagcctaaagagaatattttctcaattaaaaatactatagtcttcagaaaagaatcaattaaagtgatgagaaatttcaaatatattaactacaaactgcaactttgaaaaatattgcaggcaattttattaagttctacagagaaatgtcagtaacatggtattagaaataaatatagctgataaacagattaaagtttatgaatatataccaagaataattattctgcttatgtaattttaattttggaaaaccattttgaaaagtttgttacatgaaatgttatttttaaaagaatttcatatttgaaaatagtttgaatatataatttttaagtattttcaatgcaattagtccaattttctgatcaataaatatcttttaaaagtaaaaaanaaacaaagaaccgccctcgttgggctcaaacggggatctttgacgccgnttaccctttagtggggtgtaatccatgatcctcgttccatgactccgctcaccaatgtcgttcggctgcggcaacgggtccagcatattcaaaggcgggattcgtgttgatccncn

SEQ ID NO: 334653 - DNA, 867 bp, Homo sapiens
  misc_feature (758)..(758): n is a, c, g, or t
  misc_feature (792)..(792): n is a, c, g, or t
ttatgtaaagttttttcgggtgtcatgaatttcagattaatcttgggctgacagctggagtgcagcggcgtgatctcggctcactacaacctccacctcccgggttcaagcgattcttctgcttcagccttctcctgagcagctgggattacaagtgcgcaccatcatgcctggctaatttttgtatttttaatagagacggggtttctccatgttggccaggctcgtctcaaactcctgacctcaggtgatctgcccacctcggcctcccgaagtgctgggattacaggtgtgagccactgcacccagcctaaagagaatattttctcaattaaaaatactatagtcttcagaaaagaatcaattaaagtgatgagaaatttcaaatatattaactacaaactgcaactttgaaaaatattgcaggcaattttattaagttctacagagaaatgtcagtaacatggtattagaaataaatatagctgataaacagattaaagtttatgaatatataccaagaataattattctgcttatgtaattttaattttggaaaaccattttgaaaagtttgttacatgaaatgttatttttaaaagaatttcatatttgaaaatagtttgaatatataatttttaagtattttcaatgcaattagtccaattttctgatcaataaatatcttttaaaagtagaggagcacgatcagagcacgccagagcatcggagctcataagttattaagcactaatatncaatatacaaaggcatgccctatggaatataagnaatcgtggcctttcggctcctcgggggcctctccccgtcgtccctctttacgggggtatcgttgatctgctccct

SEQ ID NO: 334654 - DNA, 827 bp, Homo sapiens
  misc_feature (1)..(1): n is a, c, g, or t
ngcttcctgaccctttttaatccaattttgatttcacccttaataaagccgagtttattttcacagctcagcatgcgcttcggagccgcaaagcccaggcttgaataatcgcttcccatagggcccaggtgttgggactttgatgggaaaaaggtgaagcaaaatgtggtaaacaggaatgaaaagccagaatgaataaaggaagccttcattgttctgaggatgggatctccttatgttgctcaggctggtttcagacttctcctgagcagctgggattacaagtgcgcaccatcatgcctggctaatttttgtatttttaatagagacggggtttctccatgttggccaggctcgtctcaaactcctgacctcaggtgatctgcccacctcggcctcccgaagtgctgggattacaggtgtgagccactgcacccagcctaaagagaatattttctcaattaaaaatactatagtcttcagaaaagaatcaattaaagtgatgagaaatttcaaatatattaactacaaactgcaactttgaaaaatattgcaggcaattttattaagttctacagagaaatgtcagtaacatggtattagaaataaatatagctgataaacagattaaagtttatgaatatataccaagaataattattctgcttatgtaattttaattttggaaaaccattttgaaaagtttgttacatgaaatgttatttttaaaagaatttcatatttgaaaatagtttgaatatataatttttaagtattttcaatgcaattagtccaattttctgatcaataaatatcttttaaaagta

SEQ ID NO: 334655 - DNA, 848 bp, Homo sapiens
  misc_feature (1)..(1): n is a, c, g, or t
ngcttcctgaccctttttaatccaattttgatttcacccttaataaagccgagtttattttcacagctcagcatgcgcttcggagccgcaaagcccaggcttgaataatcgcttcccatagggcccaggtgttgggactttgatgggaaaaaggtgaagcaaaatgtggtaaacaggaatgaaaagccagaatgaataaaggaagccttcattgttctgactggggcctgagcagtgagcagaatggaatgtctatcaggacagccgtagatttccacagcttcctgctttcgtcagcttcagcttaacatctattattgtgaagagtagggtcttccaagtttataagaagaatcagatttccaagagcaatttacccctttcttcattctgttaggcattatttggaatggcttttcttcgatgaattcaattaacaggtgtgagccactgcacccagcctaaagagaatattttctcaattaaaaatactatagtcttcagaaaagaatcaattaaagtgatgagaaatttcaaatatattaactacaaactgcaactttgaaaaatattgcaggcaattttattaagttctacagagaaatgtcagtaacatggtattagaaataaatatagctgataaacagattaaagtttatgaatatataccaagaataattattctgcttatgtaattttaattttggaaaaccattttgaaaagtttgttacatgaaatgttatttttaaaagaatttcatatttgaaaatagtttgaatatataatttttaagtattttcaatgcaattagtccaattttctgatcaataaatatcttttaaaagta

SEQ ID NO: 334656 - DNA, 988 bp, Homo sapiens
  misc_feature (988)..(988): n is a, c, g, or t
ctgaagccccacggtgttttcccccttaagcccaagatatttaggaccccccctggtttggggctcagcttgttgagtccttccagtcacgggtcttccaagtttataagaagaatcagatttccaagagcaatttacccctttcttcattctgttaggcattatttggaatggcttttcttcgatgaattcaattaacaggctggagtgcagcggcgtgatctcggctcactacaacctccacctcccgggttcaagcgattcttctgcttcagccttctcctgagcagctgggattacaagtgcgcaccatcatgcctggctaatttttgtatttttaatagagacggggtttctccatgttggccaggctcgtctcaaactcctgacctcaggtgatctgcccacctcggcctcccgaagtgctgggattacaggtgtgagccactgcacccagcctaaagagaatattttctcaattaaaaatactatagtcttcagaaaagaatcaattaaagtgatgagaaatttcaaatatattaactacaaactgcaactttgaaaaatattgcaggcaattttattaagttctacagagaaatgtcagtaacatggtattagaaataaatatagctgataaacagattaaagtttatgaatatataccaagaataattattctgcttatgtaattttaattttggaaaaccattttgaaaagtttgttacatgaaatgttatttttaaaagaatttcatatttgaaaatagtttgaatatataatttttaagtattttcaatgcaattagtccaattttctgatcaataaatatcttttaaaagtacaaacgcctaatccaaccaccaactggccccgccggcctcagccgtggaacctctgccggccgtttccctttaggggaggggtaatgtcaagatcccaggttcactgactccctgtgcttcgacggccggttgctgggagcan

SEQ ID NO: 334657 - DNA, 1022 bp, Homo sapiens
ctgaagccccacggtgttttcccccttaagcccaagatatttaggaccccccctggtttggggctcagcttgttgagtccttccagtcacgggtcttccaagtttataagaagaatcagatttccaagagcaatttacccctttcttcattctgttaggcattatttggaatggcttttcttcgatgaattcaattaacaggctggagtgcagcggcgtgatctcggctcactacaacctccacctcccgggttcaagcgattcttctgcttcagccttctcctgagcagctgggattacaagtgcgcaccatcatgcctggctaatttttgtatttttaatagagacggggtttctccatgttggccaggctcgtctcaaactcctgacctcaggtgatctgcccacctcggcctcccgaagtgctgggattacaggtgtgagccactgcacccagcctaaagagaatattttctcaattaaaaatactatagtcttcagaaaagaatcaattaaagtgatgagaaatttcaaatatattaactacaaactgcaactttgaaaaatattgcaggcaattttattaagttctacagagaaatgtcagtaacatggtattagaaataaatatagctgataaacagattaaagtttatgaatatataccaagaataattattctgcttatgtaattttaattttggaaaaccattttgaaaagtttgttacatgaaatgttatttttaaaagaatttcatatttgaaaatagtttgaatatataatttttaagtattttcaatgcaattagtccaattggtgcgagccatcagaagccttgtcacaagtgtacagaaaaaaagagaaaggggcctcgttgggccccagcggggggacctttggggccgtctaccctgtaaggggggggtgaatcaatgaaccccccctgcctgacttgcggcggcgggtacgtcgcggtggcgccaggcggattacgtgcttcagggggggactcggtgcgcac

SEQ ID NO: 334658 - DNA, 975 bp, Homo sapiens
ctgaagccccacggtgttttcccccttaagcccaagatatttaggaccccccctggtttggggctcagcttgttgagtccttccagtcacgggtcttccaagtttataagaagaatcagatttccaagagcaatttacccctttcttcattctgttaggcattatttggaatggcttttcttcgatgaattcaattaacaggctggagtgcagcggcgtgatctcggctcactacaacctccacctcccgggttcaagcgattcttctgcttcagccttctcctgagcagctgggattacaagtgcgcaccatcatgcctggctaatttttgtatttttaatagagacggggtttctccatgttggccaggctcgtctcaaactcctgacctcaggtgatctgcccacctcggcctcccgaagtgctgggattacaggtgtgagccactgcacccagcctaaagagaatattttctcaattaaaaatactatagtcttcagaaaagaatcaattaaagtgatgagaaatttcaaatatattaactacaaactgcaactttgaaaaatattgcaggcaattttattaagttctacagagaaatgtcagtaacatggtattagaaataaatatagctgataaacagattaaagtttatgaatatataccaagaataattattctgcttatgtaattttaattttggaaaaccattttgaaaagtttgttacatgaaatgttatttttaaaagaatttcatatttgaaaatagtttgaatatataatttttaagtattttcaatgcaattagtccaattttctgatcaataaatatcttttaaaagtagcgaagagagccaagacaacgagggtagcgtgcacgttgttaacgaagcccatacggggtgaggtagaccgaccatacgcttcacctgagccgcctgcccgttgtgtctttgggggaaaaaaacggcggt

SEQ ID NO: 334659 - DNA, 994 bp, Homo sapiens
ctgaagccccacggtgttttcccccttaagcccaagatatttaggaccccccctggtttggggctcagcttgttgagtccttccagtcacgggtcttccaagtttataagaagaatcagatttccaagagcaatttacccctttcttcattctgttaggcattatttggaatggcttttcttcgatgaattcaattaacaggctggagtgcagcggcgtgatctcggctcactacaacctccacctcccgggttcaagcgattcttctgcttcagccttctcctgagcagctgggattacaagtgcgcaccatcatgcctggctaatttttgtatttttaatagagacggggtttctccatgttggccaggctcgtctcaaactcctgacctcaggtgatctgcccacctcggcctcccgaagtgctgggattacaggtgtgagccactgcacccagcctaaagagaatattttctcaattaaaaatactatagtcttcagaaaagaatcaattaaagtgatgagaaatttcaaatatattaactacaaactgcaactttgaaaaatattgcaggcaattttattaagttctacagagaaatgtcagtaacatggtattagaaataaatatagctgataaacagattaaagtttatgaatatataccaagaataattattctgcttatgtaattttaattttggaaaaccattttgaaaagtttgttacatgaaatgttatttttaaaagaatttcatatttgaaaatagtttgaatatataatttttaagtattttcaatgcaattagtccaattttctgatcaataaatatcttttaaaagtacaggttacccctagcataattaaaattatgggaatgggctcgttggccatagagggggaagtttgcgggcgcttccttttacggagggtaatttatgatcctcgtccactacctcccacgctatgtcgttcagttgcggtaaccgtata

SEQ ID NO: 334660 - DNA, 971 bp, Homo sapiens
ctgaagccccacggtgttttcccccttaagcccaagatatttaggaccccccctggtttggggctcagcttgttgagtccttccagtcacgggtcttccaagtttataagaagaatcagatttccaagagcaatttacccctttcttcattctgttaggcattatttggaatggcttttcttcgatgaattcaattaacaggctggagtgcagcggcgtgatctcggctcactacaacctccacctcccgggttcaagcgattcttctgcttcagccttctcctgagcagctgggattacaagtgcgcaccatcatgcctggctaatttttgtatttttaatagagacggggtttctccatgttggccaggctcgtctcaaactcctgacctcaggtgatctgcccacctcggcctcccgaagtgctgggattacaggtgtgagccactgcacccagcctaaagagaatattttctcaattaaaaatactatagtcttcagaaaagaatcaattaaagtgatgagaaatttcaaatatattaactacaaactgcaactttgaaaaatattgcaggcaattttattaagttctacagagaaatgtcagtaacatggtattagaaataaatatagctgataaacagattaaagtttatgaatatataccaagaataattattctgcttatgtaattttaattttggaaaaccattttgaaaagtttgttacatgaaatgttatttttaaaagaatttcatatttgaaaatagtttgaatatataatttttaagtattttcaatgcaattagtccaattttctgatcaataaatatcttttaaaagtagggaacacagctacgaactctcggttctctcccgcaccacctctcaaaactggccttgtggccccaaagggggacctcttggggccttttcctttgggagggtaatccaagaacctcctcctgact

SEQ ID NO: 334661 - DNA, 907 bp, Homo sapiens
  misc_feature (1)..(1): n is a, c, g, or t
ngcttcctgaccctttttaatccaattttgatttcacccttaataaagccgagtttattttcacagctcagcatgcgcttcggagccgcaaagcccaggcttgaataatcgcttcccatagggcccaggtgttgggactttgatgggaaaaaggtgaagcaaaatgtggtaaacaggaatgaaaagccagaatgaataaaggaagccttcattgttctgactggggcctgagcagtgagcagaatggaatgtctatcaggacagccgtagatttccacagcttcctgctttcgtcagcttcagcttaacatctattattgtgaagagtagggtcttccaagtttataagaagaatcagatttccaagagcaatttacccctttcttcattctgttaggcattatttggaatggcttttcttcgatgaattcaattaacagaggtgggagccacctgccccccaacctaaaaagaaatatttttctaaaataaaaataactataggccttaaaaaaaagaatacacattgaaaggggaggaaaaaattttcaaaatatattaacctaccaacctgcgaacttttagaaaaaaattgtgggggggcaattttttatttaattgcctaacagaagaaaaaggccggggaacagtgggtatataaaaaaataaaataacctagtaaaaacaagtagaagttttgttaaatattgtaccaaagaaaaaagttttcgcggctggggagaagtttaaaacggcggaaaaacccacctttagaaaagagttgttcacatgagacagtttttttataaaaaaatgttctcaatggaagaaaaggggaggataaataaattctaaaggagttatcaaagcgaagtaggccaggcttttggagagataaaatcctttt

SEQ ID NO: 334662 - DNA, 938 bp, Homo sapiens
ctgaagccccacggtgttttcccccttaagcccaagatatttaggaccccccctggtttggggctcagcttgttgagtccttccagtcacgggtcttccaagtttataagaagaatcagatttccaagagcaatttacccctttcttcattctgttaggcattatttggaatggcttttcttcgatgaattcaattaacaggctggagtgcagcggcgtgatctcggctcactacaacctccacctcccgggttcaagcgattcttctgcttcagccttctcctgagcagctgggattacaagtgcgcaccatcatgcctggctaatttttgtatttttaatagagacggggtttctccatgttggccaggctcgtctcaaactcctgacctcaggtgatctgcccacctcggcctcccgaagtgctgggattacaggtgtgagccactgcacccagcctaaagagaatattttctcaattaaaaatactatagtcttcagaaaagaatcaattaaagtgatgagaaatttcaaatatattaactacaaactgcaactttgaaaaatattgcaggcaattttattaagttctacagagaaatgtcagtaacatggtattagaaataaatatagctgataaacagattaaagtttatgaatatataccaagaataattattctgcttatgtaattttaattttggaaaaccattttgaaaagtttgttacatgaaatgttatttttaaaagaatttcatatttgaaaatagtttgaatatataatttttaagtattttcaatgcaattagtccaattcgtgtcaccgaaatacttctacaattcccgaacaaaaagatcggcctgccggccgcaacggacgagcttgggcgtgcttacctttggcggggccacccacgtcccccctgattacaaaacgt

SEQ ID NO: 334663 - DNA, 943 bp, Homo sapiens
ctgaagccccacggtgttttcccccttaagcccaagatatttaggaccccccctggtttggggctcagcttgttgagtccttccagtcacgggtcttccaagtttataagaagaatcagatttccaagagcaatttacccctttcttcattctgttaggcattatttggaatggcttttcttcgatgaattcaattaacaggctggagtgcagcggcgtgatctcggctcactacaacctccacctcccgggttcaagcgattcttctgcttcagccttctcctgagcagctgggattacaagtgcgcaccatcatgcctggctaatttttgtatttttaatagagacggggtttctccatgttggccaggctcgtctcaaactcctgacctcaggtgatctgcccacctcggcctcccgaagtgctgggattacaggtgtgagccactgcacccagcctaaagagaatattttctcaattaaaaatactatagtcttcagaaaagaatcaattaaagtgatgagaaatttcaaatatattaactacaaactgcaactttgaaaaatattgcaggcaattttattaagttctacagagaaatgtcagtaacatggtattagaaataaatatagctgataaacagattaaagtttatgaatatataccaagaataattattccgcccacggcttttcgatgttggtacaccctttcgtccccttgctccctgacctgcctgtttaattaatgcttcctttccgatccctcgttgtttccttttttccctcgccaccctcctctccccctttctcatcactcctccccgttatcatttttcaccctttgtgacataatgttgtctcagcatccagtttcgcctctacacacttcccattgcgctggtgcgcgttacgatcttccctccgcctacgctttacacat

SEQ ID NO: 334664 - DNA, 607 bp, Homo sapiens
  misc_feature (1)..(1): n is a, c, g, or t
ngcttcctgaccctttttaatccaattttgatttcacccttaataaagccgagtttattttcacagctcagcatgcgcttcggagccgcaaagcccaggcttgaataatcgcttcccatagggcccaggtgttgggactttgatgggaaaaaggtgaagcaaaatgtggtaaacaggaatgaaaagccagaatgaataaaggaagccttcattgttctgactaaagagaatattttctcaattaaaaatactatagtcttcagaaaagaatcaattaaagtgatgagaaatttcaaatatattaactacaaactgcaactttgaaaaatattgcaggcaattttattaagttctacagagaaatgtcagtaacatggtattagaaataaatatagctgataaacagattaaagtttatgaatatataccaagaataattattctgcttatgtaattttaattttggaaaaccattttgaaaagtttgttacatgaaatgttatttttaaaagaatttcatatttgaaaatagtttgaatatataatttttaagtattttcaatgcaattagtccaattttctgatcaataaatatcttttaaaagta

SEQ ID NO: 334665 - DNA, 412 bp, Homo sapiens
attcctggggggggggttgcttgtgtgttccacccattgatacagatgggcaaagacaagtgattctgattccaagatggatttggaaaggtatgtctactggggaaaaatgcccaaatgacctgctaattggtttcctggctaattcaccttctggctttcatagaggggcaggttggaaatcagaatgactctaaattagccaaggtttctcagtgtgattgtagacttcatagactggctgacgggccccagagcccctgggtgagttattcttagggcaattccctgatggtcctgctcatagattttgtactgacaagttgggccaatggcattgctaagataaaaggggaaaattaaaacatgcccctgggatttccacacatgggatgaggcagggtgagctcag

SEQ ID NO: 334666 - DNA, 676 bp, Homo sapiens
ttcagctcgctgggtctcattttccccatctatagaatggggataatgttagtacagacctcatgtgactactgtgaggaaccagagagttaaagaagggtggctgggtgcggtggctcatgcctgtaatcccagcactttggaaggctgaggcaggtggattacttgaggtcaggagttcgagaccagcctggccaacatggtgaaaccctgtccctactaaaaatagccaggcatggtggtgggtgcctgtagtcccagctactcaggaggctgaggcaggagaatcacttgaacccgggaggtggaggttgcagagagccaaaatcgtgccattgtactccaacctgtgcaacagagcgagactctatctcaaaaaaaaagagaagggaaggaccccagtgtggtgcctggcattgtgggtactcaggataccctaaccattaggatgccctggtttgggctgcctcaaatctgcctctctttcctggcttcaggccctgccatcctaatgggaccaacctcacaccccagttccaggcctggccaatcaacactaactccaggtgctggtaggagatgggtcacctgacccaagcccagtcatcaaatcaatgaacgccagcccggggatctgaaggaaggaggcgctctcctccgatagtggggggaaagc

SEQ ID NO: 334667 - DNA, 419 bp, Homo sapiens
tttatcagaactctgaaaactaactaaaggcttgcaataatctcaggagtgtgattttaagaataacagccaaataacagtaaaaacagcaagctttgtggaattttaattttctctattcttatcatccccttgccaactccgtggtatccttacaagtcaacaatctcacaactatggctgctgtgaaaactagcagcctagcagttactagacagggcagaatgggtctggagcacctctaaaacccaatcgcaaagaaatgtcactttatgacctgtgtagcagctccctgaaaagctccattcccagagctcatctttccttttttttttttttttgagacccagagtctcactctgttgcccagactggagcgcagtggtgcaatctcggctcactgcaacctctgcctaccg

SEQ ID NO: 334668 - DNA, 433 bp, Homo sapiens
tgatcctcccacctcagcctttcacatagctgggactataggtgcaccatcacacctggctaatttttaatctttttctagagacagggtctcaatatgttgctcaggctggtcttgaactcttgggctcaagcaatcctgcctccgcccttcagtgttgggattacagatatgaaccaccatgcccggccccatttcacccctttgaaccagtttctaattttaagatggggttaccagggttccaagtataataagggacagtgcctgttccccacaaatgctgagttcccgccctttgctcacagaattctttccgtctgaaattcctcttactactaaattcggcatcgtttaaggcccagcccaaggatgctgattaagatctctgccttaggagggtgcggtgagctgagattgcctcctccatctc

SEQ ID NO: 334669 - DNA, 192 bp, Homo sapiens
ccccaaagttccaatattttttcacacaacccagcaccttgtgctgagcgccccacttggaaaccactgatttgctttatcaaaaaaaaagtggttttgtacatgatattaaagtgtaaaacaatgccttatgcccaatgttagtagcaactgaatagtttatataaaagtatctggtaagtagggcttggt

SEQ ID NO: 334670 - DNA, 239 bp, Homo sapiens
cgaggagagtgattttatatcccgtgttctggctttctttgcagcaagtgatggcatagtaaatgaaaacttggtggagcgatttagccaagaagttcagattacagaagcccgctgtttctatgacttccaaattgccatggaaaacacacattctgaaatgtatagtctccttattgacacttacataaaagatgccaaagaaagggaatttctcttcaacaccattgaaacacctt

SEQ ID NO: 334671 - DNA, 234 bp, Homo sapiens
atggaaaggctgggaaaacttcaagggacaagtgacattgaattggaccttggagaatatgcagaatttattgtagatacgtagagtccagagaaaaggggactccagatgagggaggtttgtggccagaagtacagcatgagacatgaatgagaataaacaaagattacaggaatgtcttggctctgtgtgacctccatcatgggacatgaagccacacgaagctaggtgaga

SEQ ID NO: 334672 - DNA, 93 bp, Homo sapiens
cttaatcaaatgaaagaatctaaactctagaacatctctggtttcaattcaaaatatatctgaatcaaaacttcagtttcttgtcaaattcct

SEQ ID NO: 334673 - DNA, 364 bp, Homo sapiens
ctagctctggatcaaggacagggagagggattaacgctgaaccaaccagaaaaaggtttgtctgacactggggacagggcaggaagcaccactatgatgggggagggggagattctggaaccatttttgcacagaatgctgtctgccagtctggcttctaaaaacagcatcagcgttgggccagagcaattaatgttctaataacagtcacaagtcgttctgttctaagaataacccccatggccgttgggccaggtactggtcctgtgttactcatttaaccctcagcatccttgggaggcggatgacatgatcattccattttacagaagagaaaaccaaagcacagagaaggaagggcttt

SEQ ID NO: 334674 - DNA, 360 bp, Homo sapiens
attaatgtaaagcgaagccgctcctatctctaccccttgggtcctggacctatatattcctcccagtgggacatagcgccttattggttggtgattagagtgtacactgtgccctggaaggtagtaacccctccttacttggtatcatcgactctgagctggcatctcagctacgccttcaacagcccatttcttctcttcgttcaagccagtatcttctgggtggtgcagaatgtgacaggaccagtgatcccatggtcacgtgccattgtcatgcctccttcgccttgcaatgaacgggcccttgggtctgatgtgatgttacgtgggaacctatgtcagtgggtaaaacactcagta

SEQ ID NO: 334675 - DNA, 2052 bp, Homo sapiens
ctcatttttttttttaaaaatcacattatctgtatttccagacataaggtaagtatttcaccaactttcatccaaactaacatcctcaattgtaatcccactaagaaccgccagggcgagacgaaagcggaatcgcttccatctttacgtggagtccgggaaatggttcagcaccatgacatccgccgaagacgtaggtgtagacgaggaacaaaagagaagacccctcgtggaggtggcctgtggggcccgccctcaccgggcgccatctgtccctgattctgctccccgcaggggccgcagcgggtgcgcccggcgatagagcgggctgtggagggagcctccatggagtctccatcaaccattccggaccaggagacggtggcaggcagtaaaaaggcctaggcagggccagcgccccgggctgctagcacaggacggcggcgcccagggacgccccagggcaggcctcagcccctccaacccgcgagagcccagctccaagggagcctgcagctccctccatcttggttgatggaggcggggatctgcgtctgggtgtctccaccgtcgcgcccgaccagtactgccccgcggacgcagacgccggcagctggggctgttcccttgtccgaatggcagagcccagtcggggcttccgggacaagtcctggccccacggggtttggttttgaggggtcccaagttcccacagttgtcccgacaaaatggaggacgtcgtctcctcctgctgcagccatggcgggaggtgggggactattccccacggggcgcggcgagggtggaagggcctccactgaccgcagcgcactcaagactccagttcaaccgcggccccgaaagctcacttggccccgctccagcacctccccggcctcgcccctcttgggggccttcaaggaactggacagggagggcgctggggcatccaggccgccgctctcctcgagcagaggcgttgggagccgctgccgcagcttgggcccccgggctcgggcgagggcaggcggccccgccggagtctcccgggctgtgtaggtcccggagagccccgggccccgaggggccgaagcgggccgctacgacgggcggcgaatctcgggctcctgacctggcggacccggtagctgggggcgggagaccggcggggagacaacccgaccgggagttgagggctggcaggcgggagtggaactgcagggccgcgggtgtggcccgcacctgacggacagctcttcggccaccccaccgagggggcgccctgaaggacggccgtcggagccaatgggcgtgcccaaggcgcccaggctcgtctccctcgccagccaacgagcgcacggagggtggggcctcctcgggctctgctgcgccgtcccctgcttctccgcctcctcaccagcgcgaaaagccgggactggacctagcggagttgtgcttgtcgccgaagcggggtgggcttgttcgttccgcgcagccgcagccagaaccgggtgacgcttatccccgctgtctttccagtccagggccgctgagagtgggggtggctgggagcagcgcagcctccggaggaggaggcggaggccgaggtgagtggggaggcggagatgggtgagagcagcctccggaggctcccaccgacccgggattaataccccgcggcgcggccgccgtcgccgttgccgcttcggggcctcgagggcagctcggggctgccctcctgtcaccggcgcttttgcgtccggcctgaggggctgggagagtgcgagcgaggccgggagggttgggtgaggcggtcgccagcggcggaggtcgcggggccggcggggaggcggggtggcggggcgggttgccggccgcccggggaggtcgcggggcatttttctttctctcctgccgcatagtggcggggggcgggttgggcgagggaggggcgccccggccgggtcttcgctgtcaggaccgcgctgccaccctgccgccggagccgaggtccccaggtttttcgggcgagggcttctgcctctgccccgc

SEQ ID NO: 334676 - DNA, 3165 bp, Homo sapiens
ctcatttttttttttaaaaatcacattatctgtatttccagacataaggtaagtatttcaccaactttcatccaaactaacatcctcaattgtaatcccactaagaaccgccagggcgagacgaaagcggaatcgcttccatctttacgtggagtccgggaaatggttcagcaccatgacatccgccgaagacgtaggtgtagacgaggaacaaaagagaagacccctcgtggaggtggcctgtggggcccgccctcaccgggcgccatctgtccctgattctgctccccgcaggggccgcagcgggtgcgcccggcgatagagcgggctgtggagggagcctccatggagtctccatcaaccattccggaccaggagacggtggcaggcagtaaaaaggcctaggcagggccagcgccccgggctgctagcacaggacggcggcgcccagggacgccccagggcaggcctcagcccctccaacccgcgagagcccagctccaagggagcctgcagctccctccatcttggttgatggaggcggggatctgcgtctgggtgtctccaccgtcgcgcccgaccagtactgccccgcggacgcagacgccggcagctggggctgttcccttgtccgaatggcagagcccagtcggggcttccgggacaagtcctggccccacggggtttggttttgaggggtcccaagttcccacagttgtcccgacaaaatggaggacgtcgtctcctcctgctgcagccatggcgggaggtgggggactattccccacggggcgcggcgagggtggaagggcctccactgaccgcagcgcactcaagactccagttcaaccgcggccccgaaagctcacttggccccgctccagcacctccccggcctcgcccctcttgggggccttcaaggaactggacagggagggcgctggggcatccaggccgccgctctcctcgagcagaggcgttgggagccgctgccgcagcttgggcccccgggctcgggcgagggcaggcggccccgccggagtctcccgggctgtgtaggtcccggagagccccgggccccgaggggccgaagcgggccgctacgacgggcggcgaatctcgggctcctgacctggcggacccggtagctgggggcgggagaccggcggggagacaacccgaccgggagttgagggctggcaggcgggagtggaactgcagggccgcgggtgtggcccgcacctgacggacagctcttcggccaccccaccgagggggcgccctgaaggacggccgtcggagccaatgggcgtgcccaaggcgcccaggctcgtctccctcgccagccaacgagcgcacggagggtggggcctcctcgggctctgctgcgccgtcccctgcttctccgcctcctcaccagcgcgaaaagccgggactggacctagcggagttgtgcttgtcgccgaagcggggtgggcttgttcgttccgcgcagccgcagccagaaccgggtgacgcttatccccgctgtctttccagtccagggccgctgagagtgggggtggctgggagcagcgcagcctccggaggaggaggcggaggccgaggaccaggaatcaccttcaagcctatgtcgtgaggctttggcagaaattaagaaggaaatatctccattgttcattggcatggaaaaatgttcagtgggaggattagagttgactgaacagactcctgctttattagggaatatggccatggcaactagtctcatggacataggggattcatttggtcatccagcttgtcctttagtcagtagatctaggaactcaccagtggaagatgatgatgatgatgatgatgttgtgtttattgaatctatacaacctccttcaatttctgctccagcaatagctgatcaaagaaacttcatatttgcatcatcaaaaaatgaaaagcctcaaggaaattattctgtaattcctccttcttcaagagatttggcatctcagaaaggaaatataagtgagacaattgttattgatgatgaagaggacatagaaacaaatggaggagcagagaaaaagtcttcctgttttatcgaatggggacttcctggaactaaaaacaaaaccaacgatttggatttctccacttccagtctttcaagaagtaaggtaaatgcaggaatgggtaatagtggtatcactacagaattgactctgaaatacattattactaatgttacaaccttagaaacaggtataagctctgtgaatgctgggcaagatgtgaacataattattacatataaaacatcactatagaataccaacttgggagatgtcgctaaaggacttcagtcaagtaattttggtgttaatatacaaacgtacaccccatctttaactccacagaccaagactggagtaagaccttttaaccctggtagaatgaatgtggcaggagacttatttcagaatggagaatttgcaactcatcatagtcctgattcttggatctcccagtcagcttcatttcccagtaatcagaaacagccaggggtggattctttatcaccagtggccttacttcgtaagcagaatttccagcctacagcccaacaacaacttactaaaccagctaaaatcacttgtgcaaattgcaaaaagcctttacagaagggacagacagcttatcaacgaaaaggatcagctcacctcttttgctctaccacctgcctttcttccttctctcataaacgtactcaaaacacacgaagcataatatgtaaaaaagatgcatctacaaagaaggctaatgtcattcttccagtagaatcaagcaaatccttccaagaattttatagtacatcttgtttgtctccctgtgaaaacaactggaatcttaaaaaaggagtttttaataagtcaagatgtacaatttgtagtaaattagcagaggtctggatttttatacctaagttgttgtttaggctaacagtgataattttaacttttaagtgctattatgtactctttcatctacataatgcacgtgttctggatgtataacatgaagctgaaaggaagaataaggatatgttagaactatcttatgggatattttataaataaaattccatttgcatagcatggaaagtac

SEQ ID NO: 334677 - DNA, 4945 bp, Homo sapiens
ctcatttttttttttaaaaatcacattatctgtatttccagacataaggtaagtatttcaccaactttcatccaaactaacatcctcaattgtaatcccactaagaaccgccagggcgagacgaaagcggaatcgcttccatctttacgtggagtccgggaaatggttcagcaccatgacatccgccgaagacgtaggtgtagacgaggaacaaaagagaagacccctcgtggaggtggcctgtggggcccgccctcaccgggcgccatctgtccctgattctgctccccgcaggggccgcagcgggtgcgcccggcgatagagcgggctgtggagggagcctccatggagtctccatcaaccattccggaccaggagacggtggcaggcagtaaaaaggcctaggcagggccagcgccccgggctgctagcacaggacggcggcgcccagggacgccccagggcaggcctcagcccctccaacccgcgagagcccagctccaagggagcctgcagctccctccatcttggttgatggaggcggggatctgcgtctgggtgtctccaccgtcgcgcccgaccagtactgccccgcggacgcagacgccggcagctggggctgttcccttgtccgaatggcagagcccagtcggggcttccgggacaagtcctggccccacggggtttggttttgaggggtcccaagttcccacagttgtcccgacaaaatggaggacgtcgtctcctcctgctgcagccatggcgggaggtgggggactattccccacggggcgcggcgagggtggaagggcctccactgaccgcagcgcactcaagactccagttcaaccgcggccccgaaagctcacttggccccgctccagcacctccccggcctcgcccctcttgggggccttcaaggaactggacagggagggcgctggggcatccaggccgccgctctcctcgagcagaggcgttgggagccgctgccgcagcttgggcccccgggctcgggcgagggcaggcggccccgccggagtctcccgggctgtgtaggtcccggagagccccgggccccgaggggccgaagcgggccgctacgacgggcggcgaatctcgggctcctgacctggcggacccggtagctgggggcgggagaccggcggggagacaacccgaccgggagttgagggctggcaggcgggagtggaactgcagggccgcgggtgtggcccgcacctgacggacagctcttcggccaccccaccgagggggcgccctgaaggacggccgtcggagccaatgggcgtgcccaaggcgcccaggctcgtctccctcgccagccaacgagcgcacggagggtggggcctcctcgggctctgctgcgccgtcccctgcttctccgcctcctcaccagcgcgaaaagccgggactggacctagcggagttgtgcttgtcgccgaagcggggtgggcttgttcgttccgcgcagccgcagccagaaccgggtgacgcttatccccgctgtctttccagtccagggccgctgagagtgggggtggctgggagcagcgcagcctccggaggaggaggcggaggccgaggaccaggaatcaccttcaagcctatgtcgtgaggctttggcagaaattaagaaggaaatatctccattgttcattggcatggaaaaatgttcagtgggaggattagagttgactgaacagactcctgctttattagggaatatggccatggcaactagtctcatggacataggggattcatttggtcatccagcttgtcctttagtcagtagatctaggaactcaccagtggaagatgatgatgatgatgatgatgttgtgtttattgaatctatacaacctccttcaatttctgctccagcaatagctgatcaaagaaacttcatatttgcatcatcaaaaaatgaaaagcctcaaggaaattattctgtaattcctccttcttcaagagatttggcatctcagaaaggaaatataagtgagacaattgttattgatgatgaagaggacatagaaacaaatggaggagcagagaaaaagtcttcctgttttatcgaatggggacttcctggaactaaaaacaaaaccaacgatttggatttctccacttccagtctttcaagaagtaagaccaagactggagtaagaccttttaaccctggtagaatgaatgtggcaggagacttatttcagaatggagaatttgcaactcatcatagtcctgattcttggatctcccagtcagcttcatttcccagtaatcagaaacagccaggggtggattctttatcaccagtggccttacttcgtaagcagaatttccagcctacagcccaacaacaacttactaaaccagctaaaatcacttgtgcaaattgcaaaaagcctttacagaagggacagacagcttatcaacgaaaaggatcagctcacctcttttgctctaccacctgcctttcttccttctctcataaacgtactcaaaacacacgaagcataatatgtaaaaaagatgcatctacaaagaaggctaatgtcattcttccagtagaatcaagcaaatccttccaagaattttatagtacatcttgtttgtctccctgtgaaaacaactggaatcttaaaaaaggagtttttaataagtcaagatgtacaatttgtagtaaattagcagagattcgccatgaagtcagcgtaaataatgtaacacataaactgtgcagtaaccattgctttaataagtacagattggccaatggtctaataatgaactgctgtgaacactgtggagagtacatgcctagtaagagtactggaaacaacatcctggtgattggaggtcagcagaagagattttgctgccaaagttgtattaacgaatataaacagatgatggaaacaaaatcaaaaaaattaacagcatcagaaaatagaaaaaggaatgcttttagagaagaaaatgagaaacaattatatggatcgtcaaatacacttttgaaaaaaatagagggaatcccagaaaaaaaggaaaagacttcacagctacagctttcagtagaatgtggcacggatacattactgatccaagagaatgtgaatttacctccttcttccacgtcaaccatagctgatacatttcaagagcaactggaagagaaaaattttgaagactccattgtaccagttgtgctttccgcagatccaggtacgtggccccgaattttgaatattaaacaacgggacactcttgttgaaaatgttccgcctcaagtaagaaattttaactttccaaaagataatacagggaggaagttttcagaaacttattatacacggattcttccaaatggtgaaaaaaccactagatcctggttactttattcaacctcaaaagattctgtgttttgtctatattgcaaactctttggggaaggaaaaaatcaactgaaaaatgaaaatgggtgcaaagattggcaacatttatcacatattcttagtaaacatgaagaaagtgaaatgcacatcaacaatagtgttaagtactcaaaattaaaatctgatctgaaaaaaaataaagctattgatgctgcagaacgcagattatatgaaaatgagaaaaatgatggtgtgctgttgttgtacacgtaatatacctgagttgttttttggcatgatgatcagaatcttacattactcagaaaacatctgtcctgcaatagtcagtactattgtgttgtaagtctcctctacagagtaacttgcagcagttccttagcaataagtatgatagcaaataaatagcaaagaatgtttccattctaaatctaaaactaattagattcaatcatcattaggcaatgacttcattaggcaatgaagattaacaataggtaattgttaatcttcaaaatctatcaatttacacctatttaaaaattggcatttaatgactgccatttgatgggtttggttaatattctgttcttggccgggcgcaatggctcacgcctgtaatccaagaactttgggaggctcaggcgggtagatcaattgaggtcagaagttcaagaccagcctggccaacaaggtgaaaccccgtctcaactaaaaatacaaaaacattagccaggtgtggtggcacacacctgtagtcccagctactcaggaggctgaggcaggagaatcgcttgaacccaggaggcagaggttgcagtgagctgagattgcaccactgcagtccagcctgagcaacagagcgagagtcagtctcaaaagaaagaaaaatattatgttctaattaccttgaaagaggaaagaaaggcttgaattgatcaataccagtttgaataagatacttatgtgaacaagcattctcaacattattattaaagtaaaactactcagtttacagaatgggatctgaaactacagctttttgctattaaaccaaatacttgtgatctactttgtttgagcaaaacagcattatttgttatgttaatgatggttaatttccattttattggttttatgtttattttaatttgtaaatgttttagcatttattattgtatgtgaactatatttacctattttatgttgataaaaatataaaaaatattaaaataagtatatattaagttaaccttcaagtgttatgggcttttttctccctgtgaaaagagatggcatgcttgaaatttgagatacaccaatgaaaattaaggatttaagttattttagatggtcagcagccccatcactgtgtatttagtaaatctcccttctgtttctgatttctgatgtcaattttgtaatatattaaatttttatatactattcctgtgaaacaaaatggcatatgagcagtgactaggacagaaggtgcgttcttgtgg

SEQ ID NO: 334678 - DNA, 3211 bp, Homo sapiens
ctcatttttttttttaaaaatcacattatctgtatttccagacataaggtaagtatttcaccaactttcatccaaactaacatcctcaattgtaatcccactaagaaccgccagggcgagacgaaagcggaatcgcttccatctttacgtggagtccgggaaatggttcagcaccatgacatccgccgaagacgtaggtgtagacgaggaacaaaagagaagacccctcgtggaggtggcctgtggggcccgccctcaccgggcgccatctgtccctgattctgctccccgcaggggccgcagcgggtgcgcccggcgatagagcgggctgtggagggagcctccatggagtctccatcaaccattccggaccaggagacggtggcaggcagtaaaaaggcctaggcagggccagcgccccgggctgctagcacaggacggcggcgcccagggacgccccagggcaggcctcagcccctccaacccgcgagagcccagctccaagggagcctgcagctccctccatcttggttgatggaggcggggatctgcgtctgggtgtctccaccgtcgcgcccgaccagtactgccccgcggacgcagacgccggcagctggggctgttcccttgtccgaatggcagagcccagtcggggcttccgggacaagtcctggccccacggggtttggttttgaggggtcccaagttcccacagttgtcccgacaaaatggaggacgtcgtctcctcctgctgcagccatggcgggaggtgggggactattccccacggggcgcggcgagggtggaagggcctccactgaccgcagcgcactcaagactccagttcaaccgcggccccgaaagctcacttggccccgctccagcacctccccggcctcgcccctcttgggggccttcaaggaactggacagggagggcgctggggcatccaggccgccgctctcctcgagcagaggcgttgggagccgctgccgcagcttgggcccccgggctcgggcgagggcaggcggccccgccggagtctcccgggctgtgtaggtcccggagagccccgggccccgaggggccgaagcgggccgctacgacgggcggcgaatctcgggctcctgacctggcggacccggtagctgggggcgggagaccggcggggagacaacccgaccgggagttgagggctggcaggcgggagtggaactgcagggccgcgggtgtggcccgcacctgacggacagctcttcggccaccccaccgagggggcgccctgaaggacggccgtcggagccaatgggcgtgcccaaggcgcccaggctcgtctccctcgccagccaacgagcgcacggagggtggggcctcctcgggctctgctgcgccgtcccctgcttctccgcctcctcaccagcgcgaaaagccgggactggacctagcggagttgtgcttgtcgccgaagcggggtgggcttgttcgttccgcgcagccgcagccagaaccgggtgacgcttatccccgctgtctttccagtccagggccgctgagagtgggggtggctgggagcagcgcagcctccggaggaggaggcggaggccgaggaccaggaatcaccttcaagcctatgtcgtgaggctttggcagaaattaagaaggaaatatctccattgttcattggcatggaaaaatgttcagtgggaggattagagttgactgaacagactcctgctttattagggaatatggccatggcaactagtctcatggacataggggattcatttggtcatccagcttgtcctttagtcagtagatctaggaactcaccagtggaagatgatgatgatgatgatgatgttgtgtttattgaatctatacaacctccttcaatttctgctccagcaatagctgatcaaagaaacttcatatttgcatcatcaaaaaatgaaaagcctcaaggaaattattctgtaattcctccttcttcaagagatttggcatctcagaaaggaaatataagtgagacaattgttattgatgatgaagaggacatagaaacaaatggaggagcagagaaaaagtcttcctgttttatcgaatggggacttcctggaactaaaaacaaaaccaacgatttggatttctccacttccagtctttcaagaagtaaggtaaatgcaggaatgggtaatagtggtatcactacagaattgactctgaaatacattattactaatgttacaaccttagaaacaggtataagctctgtgaatgctgggcaagatgtgaacataattattacatataaaacatcactatagaataccaacttgggagatgtcgctaaaggacttcagtcaagtaattttggtgttaatatacaaacgtacaccccatctttaactccacagaccaagactggagtaagaccttttaaccctggtagaatgaatgtggcaggagacttatttcagaatggagaatttgcaactcatcatagtcctgattcttggatctcccagtcagcttcatttcccagtaatcagaaacagccaggggtggattctttatcaccagtggccttacttcgtaagcagaatttccagcctacagcccaacaacaacttactaaaccagctaaaatcacttgtgcaaattgcaaaaagcctttacagaagggacagacagcttatcaacgaaaaggatcagctcacctcttttgctctaccacctgcctttcttccttctctcataaacgtactcaaaacacacgaagcataatatgtaaaaaagatgcatctacaaagaaggctaatgtcattcttccagtagaatcaagcaaatccttccaagaattttatagtacatcttgtttgtctccctgtgaaaacaactggaatcttaaaaaaggagtttttaataagtcaagatgtacaatttgtagtaaattagcagagattcgccatgaagtcagcgtaaataatgtaacacataaactgtgcagtaaccattgctttaataagtacagattggccaatggtctaataatgaactgctgtgaacactgtggagagtacatgcctagtaagagtactggaaacaacatcctggtgattggaggtcagcagaagagattttgctgccaaagttgtattaacgaatataaacagatgatggaaacaaaatcaaaaaaattaacagcatc

SEQ ID NO: 334679 - DNA, 4851 bp, Homo sapiens
ctcatttttttttttaaaaatcacattatctgtatttccagacataaggtaagtatttcaccaactttcatccaaactaacatcctcaattgtaatcccactaagaaccgccagggcgagacgaaagcggaatcgcttccatctttacgtggagtccgggaaatggttcagcaccatgacatccgccgaagacgtaggtgtagacgaggaacaaaagagaagacccctcgtggaggtggcctgtggggcccgccctcaccgggcgccatctgtccctgattctgctccccgcaggggccgcagcgggtgcgcccggcgatagagcgggctgtggagggagcctccatggagtctccatcaaccattccggaccaggagacggtggcaggcagtaaaaaggcctaggcagggccagcgccccgggctgctagcacaggacggcggcgcccagggacgccccagggcaggcctcagcccctccaacccgcgagagcccagctccaagggagcctgcagctccctccatcttggttgatggaggcggggatctgcgtctgggtgtctccaccgtcgcgcccgaccagtactgccccgcggacgcagacgccggcagctggggctgttcccttgtccgaatggcagagcccagtcggggcttccgggacaagtcctggccccacggggtttggttttgaggggtcccaagttcccacagttgtcccgacaaaatggaggacgtcgtctcctcctgctgcagccatggcgggaggtgggggactattccccacggggcgcggcgagggtggaagggcctccactgaccgcagcgcactcaagactccagttcaaccgcggccccgaaagctcacttggccccgctccagcacctccccggcctcgcccctcttgggggccttcaaggaactggacagggagggcgctggggcatccaggccgccgctctcctcgagcagaggcgttgggagccgctgccgcagcttgggcccccgggctcgggcgagggcaggcggccccgccggagtctcccgggctgtgtaggtcccggagagccccgggccccgaggggccgaagcgggccgctacgacgggcggcgaatctcgggctcctgacctggcggacccggtagctgggggcgggagaccggcggggagacaacccgaccgggagttgagggctggcaggcgggagtggaactgcagggccgcgggtgtggcccgcacctgacggacagctcttcggccaccccaccgagggggcgccctgaaggacggccgtcggagccaatgggcgtgcccaaggcgcccaggctcgtctccctcgccagccaacgagcgcacggagggtggggcctcctcgggctctgctgcgccgtcccctgcttctccgcctcctcaccagcgcgaaaagccgggactggacctagcggagttgtgcttgtcgccgaagcggggtgggcttgttcgttccgcgcagccgcagccagaaccgggtgacgcttatccccgctgtctttccagtccagggccgctgagagtgggggtggctgggagcagcgcagcctccggaggaggaggcggaggccgaggaccaggaatcaccttcaagcctatgtcgtgaggctttggcagaaattaagaaggaaatatctccattgttcattggcatggaaaaatgttcagtgggaggattagagttgactgaacagactcctgctttattagggaatatggccatggcaactagtctcatggacataggggattcatttggtcatccagcttgtcctttagtcagtagatctaggaactcaccagtggaagatgatgatgatgatgatgatgttgtgtttattgaatctatacaacctccttcaatttctgctccagcaatagctgatcaaagaaacttcatatttgcatcatcaaaaaatgaaaagcctcaaggaaattattctgtaattcctccttcttcaagagatttggcatctcagaaaggaaatataagtgagacaattgttattgatgatgaagaggacatagaaacaaatggaggagcagagaaaaagtcttcctgttttatcgaatggggacttcctggaactaaaaacaaaaccaacgatttggatttctccacttccagtctttcaagaagtaagattcttggatctcccagtcagcttcatttcccagtaatcagaaacagccaggggtggattctttatcaccagtggccttacttcgtaagcagaatttccagcctacagcccaacaacaacttactaaaccagctaaaatcacttgtgcaaattgcaaaaagcctttacagaagggacagacagcttatcaacgaaaaggatcagctcacctcttttgctctaccacctgcctttcttccttctctcataaacgtactcaaaacacacgaagcataatatgtaaaaaagatgcatctacaaagaaggctaatgtcattcttccagtagaatcaagcaaatccttccaagaattttatagtacatcttgtttgtctccctgtgaaaacaactggaatcttaaaaaaggagtttttaataagtcaagatgtacaatttgtagtaaattagcagagattcgccatgaagtcagcgtaaataatgtaacacataaactgtgcagtaaccattgctttaataagtacagattggccaatggtctaataatgaactgctgtgaacactgtggagagtacatgcctagtaagagtactggaaacaacatcctggtgattggaggtcagcagaagagattttgctgccaaagttgtattaacgaatataaacagatgatggaaacaaaatcaaaaaaattaacagcatcagaaaatagaaaaaggaatgcttttagagaagaaaatgagaaacaattatatggatcgtcaaatacacttttgaaaaaaatagagggaatcccagaaaaaaaggaaaagacttcacagctacagctttcagtagaatgtggcacggatacattactgatccaagagaatgtgaatttacctccttcttccacgtcaaccatagctgatacatttcaagagcaactggaagagaaaaattttgaagactccattgtaccagttgtgctttccgcagatccaggtacgtggccccgaattttgaatattaaacaacgggacactcttgttgaaaatgttccgcctcaagtaagaaattttaactttccaaaagataatacagggaggaagttttcagaaacttattatacacggattcttccaaatggtgaaaaaaccactagatcctggttactttattcaacctcaaaagattctgtgttttgtctatattgcaaactctttggggaaggaaaaaatcaactgaaaaatgaaaatgggtgcaaagattggcaacatttatcacatattcttagtaaacatgaagaaagtgaaatgcacatcaacaatagtgttaagtactcaaaattaaaatctgatctgaaaaaaaataaagctattgatgctgcagaacgcagattatatgaaaatgagaaaaatgatggtgtgctgttgttgtacacgtaatatacctgagttgttttttggcatgatgatcagaatcttacattactcagaaaacatctgtcctgcaatagtcagtactattgtgttgtaagtctcctctacagagtaacttgcagcagttccttagcaataagtatgatagcaaataaatagcaaagaatgtttccattctaaatctaaaactaattagattcaatcatcattaggcaatgacttcattaggcaatgaagattaacaataggtaattgttaatcttcaaaatctatcaatttacacctatttaaaaattggcatttaatgactgccatttgatgggtttggttaatattctgttcttggccgggcgcaatggctcacgcctgtaatccaagaactttgggaggctcaggcgggtagatcaattgaggtcagaagttcaagaccagcctggccaacaaggtgaaaccccgtctcaactaaaaatacaaaaacattagccaggtgtggtggcacacacctgtagtcccagctactcaggaggctgaggcaggagaatcgcttgaacccaggaggcagaggttgcagtgagctgagattgcaccactgcagtccagcctgagcaacagagcgagagtcagtctcaaaagaaagaaaaatattatgttctaattaccttgaaagaggaaagaaaggcttgaattgatcaataccagtttgaataagatacttatgtgaacaagcattctcaacattattattaaagtaaaactactcagtttacagaatgggatctgaaactacagctttttgctattaaaccaaatacttgtgatctactttgtttgagcaaaacagcattatttgttatgttaatgatggttaatttccattttattggttttatgtttattttaatttgtaaatgttttagcatttattattgtatgtgaactatatttacctattttatgttgataaaaatataaaaaatattaaaataagtatatattaagttaaccttcaagtgttatgggcttttttctccctgtgaaaagagatggcatgcttgaaatttgagatacaccaatgaaaattaaggatttaagttattttagatggtcagcagccccatcactgtgtatttagtaaatctcccttctgtttctgatttctgatgtcaattttgtaatatattaaatttttatatactattcctgtgaaacaaaatggcatatgagcagtgactaggacagaaggtgcgttcttgtgg

SEQ ID NO: 334680 - DNA, 3223 bp, Homo sapiens
aaaatttaaggttaatactagaaacggacctcttttatctatgctatgtcaaggtaaagagttaaaatagccaccactacccaaagactaaccctttgacagatgaccttaaccttttttttttaaataaaaaaaaaaaaagtagctaatattttttgagtgtgcctgtgtgccaggcattacttttatgtcatgtgttcttcatagcactctgatgagttaggtatcatcaattagtatatttgtataatattacattcaggagatctttgaacctggagtctgacttaagagccgatggctaccacattacacaattccagacgccaacatttactttattattattgttggcacagtggagtatcattcacttgagatacaaagtggatagtccccctgggattgtgcatcaagagtgtttggccttaaccacatgtttatacgcctgccccacttgtctcttaaactcttaaatgaaaatgcaagttatttttctgatgtacattttgatttgttccatgatttttttcttgtttcatttttaagattcttggatctcccagtcagcttcatttcccagtaatcagaaacagccaggggtggattctttatcaccagtggccttacttcgtaagcagaatttccagcctacagcccaacaacaacttactaaaccagctaaaatcacttgtgcaaattgcaaaaagcctttacagaagggacagacagcttatcaacgaaaaggatcagctcacctcttttgctctaccacctgcctttcttccttctctcataaacgtactcaaaacacacgaagcataatatgtaaaaaagatgcatctacaaagaaggctaatgtcattcttccagtagaatcaagcaaatccttccaagaattttatagtacatcttgtttgtctccctgtgaaaacaactggaatcttaaaaaaggagtttttaataagtcaagatgtacaatttgtagtaaattagcagagattcgccatgaagtcagcgtaaataatgtaacacataaactgtgcagtaaccattgctttaataagtacagattggccaatggtctaataatgaactgctgtgaacactgtggagagtacatgcctagtaagagtactggaaacaacatcctggtgattggaggtcagcagaagagattttgctgccaaagttgtattaacgaatataaacagatgatggaaacaaaatcaaaaaaattaacagcatcagaaaatagaaaaaggaatgcttttagagaagaaaatgagaaacaattatatggatcgtcaaatacacttttgaaaaaaatagagggaatcccagaaaaaaaggaaaagacttcacagctacagctttcagtagaatgtggcacggatacattactgatccaagagaatgtgaatttacctccttcttccacgtcaaccatagctgatacatttcaagagcaactggaagagaaaaattttgaagactccattgtaccagttgtgctttccgcagatccaggtacgtggccccgaattttgaatattaaacaacgggacactcttgttgaaaatgttccgcctcaagtaagaaattttaactttccaaaagataatacagggaggaagttttcagaaacttattatacacggattcttccaaatggtgaaaaaaccactagatcctggttactttattcaacctcaaaagattctgtgttttgtctatattgcaaactctttggggaaggaaaaaatcaactgaaaaatgaaaatgggtgcaaagattggcaacatttatcacatattcttagtaaacatgaagaaagtgaaatgcacatcaacaatagtgttaagtactcaaaattaaaatctgatctgaaaaaaaataaagctattgatgctgcagaacgcagattatatgaaaatgagaaaaatgatggtgtgctgttgttgtacacgtaatatacctgagttgttttttggcatgatgatcagaatcttacattactcagaaaacatctgtcctgcaatagtcagtactattgtgttgtaagtctcctctacagagtaacttgcagcagttccttagcaataagtatgatagcaaataaatagcaaagaatgtttccattctaaatctaaaactaattagattcaatcatcattaggcaatgacttcattaggcaatgaagattaacaataggtaattgttaatcttcaaaatctatcaatttacacctatttaaaaattggcatttaatgactgccatttgatgggtttggttaatattctgttcttggccgggcgcaatggctcacgcctgtaatccaagaactttgggaggctcaggcgggtagatcaattgaggtcagaagttcaagaccagcctggccaacaaggtgaaaccccgtctcaactaaaaatacaaaaacattagccaggtgtggtggcacacacctgtagtcccagctactcaggaggctgaggcaggagaatcgcttgaacccaggaggcagaggttgcagtgagctgagattgcaccactgcagtccagcctgagcaacagagcgagagtcagtctcaaaagaaagaaaaatattatgttctaattaccttgaaagaggaaagaaaggcttgaattgatcaataccagtttgaataagatacttatgtgaacaagcattctcaacattattattaaagtaaaactactcagtttacagaatgggatctgaaactacagctttttgctattaaaccaaatacttgtgatctactttgtttgagcaaaacagcattatttgttatgttaatgatggttaatttccattttattggttttatgtttattttaatttgtaaatgttttagcatttattattgtatgtgaactatatttacctattttatgttgataaaaatataaaaaatattaaaataagtatatattaagttaaccttcaagtgttatgggcttttttctccctgtgaaaagagatggcatgcttgaaatttgagatacaccaatgaaaattaaggatttaagttattttagatggtcagcagccccatcactgtgtatttagtaaatctcccttctgtttctgatttctgatgtcaattttgtaatatattaaatttttatatactattcctgtgaaacaaaatggcatatgagcagtgactaggacagaaggtgcgttcttgtgg

SEQ ID NO: 334681 - DNA, 2337 bp, Homo sapiens
  misc_feature (17)..(17): n is a, c, g, or t
tctatgcctttaaaaanagcctggtgcagtggtgcacacctgtagtcccagctacttagaaggctaatttttgtatttttagtagagacagggtttcaccatattggccagacttgttctcgaactcctgacctcaaatgatccatccaccttggcctcccaaagtgctgggattacaggcatgaaccaccgcacccgaccgtcgtcgtctttttgattggcatttctttgatgcctaatgatgagcatgtgcttattgagcatttgaatatacattaatttttaaaagtttaacctaaaataaaattataatcctctttgtcctcagatgatggaaacaaaatcaaaaaaattaacagcatcagaaaatagaaaaaggaatgcttttagagaagaaaatgagaaacaattatatggatcgtcaaatacacttttgaaaaaaatagagggaatcccagaaaaaaaggaaaagacttcacagctacagctttcagtagaatgtggcacggatacattactgatccaagagaatgtgaatttacctccttcttccacgtcaaccatagctgatacatttcaagagcaactggaagagaaaaattttgaagactccattgtaccagttgtgctttccgcagatccaggtacgtggccccgaattttgaatattaaacaacgggacactcttgttgaaaatgttccgcctcaagtaagaaattttaactttccaaaagataatacagggaggaagttttcagaaacttattatacacggattcttccaaatggtgaaaaaaccactagatcctggttactttattcaacctcaaaagattctgtgttttgtctatattgcaaactctttggggaaggaaaaaatcaactgaaaaatgaaaatgggtgcaaagattggcaacatttatcacatattcttagtaaacatgaagaaagtgaaatgcacatcaacaatagtgttaagtactcaaaattaaaatctgatctgaaaaaaaataaagctattgatgctgcagaacgcagattatatgaaaatgagaaaaatgatggtgtgctgttgttgtacacgtaatatacctgagttgttttttggcatgatgatcagaatcttacattactcagaaaacatctgtcctgcaatagtcagtactattgtgttgtaagtctcctctacagagtaacttgcagcagttccttagcaataagtatgatagcaaataaatagcaaagaatgtttccattctaaatctaaaactaattagattcaatcatcattaggcaatgacttcattaggcaatgaagattaacaataggtaattgttaatcttcaaaatctatcaatttacacctatttaaaaattggcatttaatgactgccatttgatgggtttggttaatattctgttcttggccgggcgcaatggctcacgcctgtaatccaagaactttgggaggctcaggcgggtagatcaattgaggtcagaagttcaagaccagcctggccaacaaggtgaaaccccgtctcaactaaaaatacaaaaacattagccaggtgtggtggcacacacctgtagtcccagctactcaggaggctgaggcaggagaatcgcttgaacccaggaggcagaggttgcagtgagctgagattgcaccactgcagtccagcctgagcaacagagcgagagtcagtctcaaaagaaagaaaaatattatgttctaattaccttgaaagaggaaagaaaggcttgaattgatcaataccagtttgaataagatacttatgtgaacaagcattctcaacattattattaaagtaaaactactcagtttacagaatgggatctgaaactacagctttttgctattaaaccaaatacttgtgatctactttgtttgagcaaaacagcattatttgttatgttaatgatggttaatttccattttattggttttatgtttattttaatttgtaaatgttttagcatttattattgtatgtgaactatatttacctattttatgttgataaaaatataaaaaatattaaaataagtatatattaagttaaccttcaagtgttatgggcttttttctccctgtgaaaagagatggcatgcttgaaatttgagatacaccaatgaaaattaaggatttaagttattttagatggtcagcagccccatcactgtgtatttagtaaatctcccttctgtttctgatttctgatgtcaattttgtaatatattaaatttttatatactattcctgtgaaacaaaatggcatatgagcagtgactaggacagaaggtgcgttcttgtgg

SEQ ID NO: 334682 - DNA, 926 bp, Homo sapiens
  misc_feature (20)..(20): n is a, c, g, or t
cggtatacatgattctccanacatcaagaccaacctacagttacttcaagtgggcaggagcctttatggaacttatcagggtcgaaatctttgaaacgccagcctggccaacaaggtgaaaccccgtctcaactaaaaatacaaaaacattagccaggtgtggtggcacacacctgtagtcccagctactcaggaggctgaggcaggagaatcgcttgaacccaggaggcagaggttgcagtgagctgagattgcaccactgcagtccagcctgagcaacagagcgagagtcagtctcaaaagaaagaaaaatattatgttctaattaccttgaaagaggaaagaaaggcttgaattgatcaataccagtttgaataagatacttatgtgaacaagcattctcaacattattattaaagtaaaactactcagtttacagaatgggatctgaaactacagctttttgctattaaaccaaatacttgtgatctactttgtttgagcaaaacagcattatttgttatgttaatgatggttaatttccattttattggttttatgtttattttaatttgtaaatgttttagcatttattattgtatgtgaactatatttacctattttatgttgataaaaatataaaaaatattaaaataagtatatattaagttaaccttcaagtgttatgggcttttttctccctgtgaaaagagatggcatgcttgaaatttgagatacaccaatgaaaattaaggatttaagttattttagatggtcagcagccccatcactgtgtatttagtaaatctcccttctgtttctgatttctgatgtcaattttgtaatatattaaatttttatatactattcctgtgaaacaaaatggcatatgagcagtgactaggacagaaggtgcgttcttgtgg

SEQ ID NO: 334683 - DNA, 370 bp, Homo sapiens
cagacagcttatcaacgaaaaggatcagctcacctcttttgctctaccacctgcctttcttccttctctcataaacgtactcaaaacacacgaagcataatatgtaaaaagtaagcagtacctttcaacatttctccacatagttgaatactaatggtataaataagtactcaatataactgcagagctggatagatttatgggtagaattgttgcaggagtgtcttcaagtttattgagcttgagctcctagaatatatccaagctgtggactcgtatgtgctgtatttactctcggcagaaaaatggaacataggtttggaaatcaattgcccctctccctgctactacatttgcctcccctgctccc

SEQ ID NO: 334684 - DNA, 2639 bp, Homo sapiens
ctcatttttttttttaaaaatcacattatctgtatttccagacataaggtaagtatttcaccaactttcatccaaactaacatcctcaattgtaatcccactaagaaccgccagggcgagacgaaagcggaatcgcttccatctttacgtggagtccgggaaatggttcagcaccatgacatccgccgaagacgtaggtgtagacgaggaacaaaagagaagacccctcgtggaggtggcctgtggggcccgccctcaccgggcgccatctgtccctgattctgctccccgcaggggccgcagcgggtgcgcccggcgatagagcgggctgtggagggagcctccatggagtctccatcaaccattccggaccaggagacggtggcaggcagtaaaaaggcctaggcagggccagcgccccgggctgctagcacaggacggcggcgcccagggacgccccagggcaggcctcagcccctccaacccgcgagagcccagctccaagggagcctgcagctccctccatcttggttgatggaggcggggatctgcgtctgggtgtctccaccgtcgcgcccgaccagtactgccccgcggacgcagacgccggcagctggggctgttcccttgtccgaatggcagagcccagtcggggcttccgggacaagtcctggccccacggggtttggttttgaggggtcccaagttcccacagttgtcccgacaaaatggaggacgtcgtctcctcctgctgcagccatggcgggaggtgggggactattccccacggggcgcggcgagggtggaagggcctccactgaccgcagcgcactcaagactccagttcaaccgcggccccgaaagctcacttggccccgctccagcacctccccggcctcgcccctcttgggggccttcaaggaactggacagggagggcgctggggcatccaggccgccgctctcctcgagcagaggcgttgggagccgctgccgcagcttgggcccccgggctcgggcgagggcaggcggccccgccggagtctcccgggctgtgtaggtcccggagagccccgggccccgaggggccgaagcgggccgctacgacgggcggcgaatctcgggctcctgacctggcggacccggtagctgggggcgggagaccggcggggagacaacccgaccgggagttgagggctggcaggcgggagtggaactgcagggccgcgggtgtggcccgcacctgacggacagctcttcggccaccccaccgagggggcgccctgaaggacggccgtcggagccaatgggcgtgcccaaggcgcccaggctcgtctccctcgccagccaacgagcgcacggagggtggggcctcctcgggctctgctgcgccgtcccctgcttctccgcctcctcaccagcgcgaaaagccgggactggacctagcggagttgtgcttgtcgccgaagcggggtgggcttgttcgttccgcgcagccgcagccagaaccgggtgacgcttatccccgctgtctttccagtccagggccgctgagagtgggggtggctgggagcagcgcagcctccggaggaggaggcggaggccgaggaccaggaatcaccttcaagcctatgtcgtgaggctttggcagaaattaagaaggaaatatctccattgttcattggcatggaaaaatgttcagtgggaggattagagttgactgaacagactcctgctttattagggaatatggccatggcaactagtctcatggacataggggattcatttggtcatccagcttgtcctttagtcagtagatctaggaactcaccagtggaagatgatgatgatgatgatgatgttgtgtttattgaatctatacaacctccttcaatttctgctccagcaatagctgatcaaagaaacttcatatttgcatcatcaaaaaatgaaaagcctcaaggaaattattctgtaattcctccttcttcaagagatttggcatctcagaaaggaaatataagtgagacaattgttattgatgatgaagaggacatagaaacaaatggaggagcagagaaaaagtcttcctgttttatcgaatggggacttcctggaactaaaaacaaaaccaacgatttggatttctccacttccagtctttcaagaagtaagaccaagactggagtaagaccttttaaccctggtagaatgaatgtggcaggagacttatttcagaatggagaatttgcaactcatcatagtcctgagatgcatctacaaagaaggctaatgtcattcttccagtagaatcaagcaaatccttccaagaattttatagtacatcttgtttgtctccctgtgaaaacaactggaatcttaaaaaaggagtttttaataagtcaagatgtacaatttgtagtaaattagcagaggtctggatttttatacctaagttgttgtttaggctaacagtgataattttaacttttaagtgctattatgtactctttcatctacataatgcacgtgttctggatgtataacatgaagctgaaaggaagaataaggatatgttagaactatcttatgggatattttataaataaaattccatttgcatagcatggaaagtac

SEQ ID NO: 334685 - DNA, 2925 bp, Homo sapiens
ctcatttttttttttaaaaatcacattatctgtatttccagacataaggtaagtatttcaccaactttcatccaaactaacatcctcaattgtaatcccactaagaaccgccagggcgagacgaaagcggaatcgcttccatctttacgtggagtccgggaaatggttcagcaccatgacatccgccgaagacgtaggtgtagacgaggaacaaaagagaagacccctcgtggaggtggcctgtggggcccgccctcaccgggcgccatctgtccctgattctgctccccgcaggggccgcagcgggtgcgcccggcgatagagcgggctgtggagggagcctccatggagtctccatcaaccattccggaccaggagacggtggcaggcagtaaaaaggcctaggcagggccagcgccccgggctgctagcacaggacggcggcgcccagggacgccccagggcaggcctcagcccctccaacccgcgagagcccagctccaagggagcctgcagctccctccatcttggttgatggaggcggggatctgcgtctgggtgtctccaccgtcgcgcccgaccagtactgccccgcggacgcagacgccggcagctggggctgttcccttgtccgaatggcagagcccagtcggggcttccgggacaagtcctggccccacggggtttggttttgaggggtcccaagttcccacagttgtcccgacaaaatggaggacgtcgtctcctcctgctgcagccatggcgggaggtgggggactattccccacggggcgcggcgagggtggaagggcctccactgaccgcagcgcactcaagactccagttcaaccgcggccccgaaagctcacttggccccgctccagcacctccccggcctcgcccctcttgggggccttcaaggaactggacagggagggcgctggggcatccaggccgccgctctcctcgagcagaggcgttgggagccgctgccgcagcttgggcccccgggctcgggcgagggcaggcggccccgccggagtctcccgggctgtgtaggtcccggagagccccgggccccgaggggccgaagcgggccgctacgacgggcggcgaatctcgggctcctgacctggcggacccggtagctgggggcgggagaccggcggggagacaacccgaccgggagttgagggctggcaggcgggagtggaactgcagggccgcgggtgtggcccgcacctgacggacagctcttcggccaccccaccgagggggcgccctgaaggacggccgtcggagccaatgggcgtgcccaaggcgcccaggctcgtctccctcgccagccaacgagcgcacggagggtggggcctcctcgggctctgctgcgccgtcccctgcttctccgcctcctcaccagcgcgaaaagccgggactggacctagcggagttgtgcttgtcgccgaagcggggtgggcttgttcgttccgcgcagccgcagccagaaccgggtgacgcttatccccgctgtctttccagtccagggccgctgagagtgggggtggctgggagcagcgcagcctccggaggaggaggcggaggccgaggaccaggaatcaccttcaagcctatgtcgtgaggctttggcagaaattaagaaggaaatatctccattgttcattggcatggaaaaatgttcagtgggaggattagagttgactgaacagactcctgctttattagggaatatggccatggcaactagtctcatggacataggggattcatttggtcatccagcttgtcctttagtcagtagatctaggaactcaccagtggaagatgatgatgatgatgatgatgttgtgtttattgaatctatacaacctccttcaatttctgctccagcaatagctgatcaaagaaacttcatatttgcatcatcaaaaaatgaaaagcctcaaggaaattattctgtaattcctccttcttcaagagatttggcatctcagaaaggaaatataagtgagacaattgttattgatgatgaagaggacatagaaacaaatggaggagcagagaaaaagtcttcctgttttatcgaatggggacttcctggaactaaaaacaaaaccaacgatttggatttctccacttccagtctttcaagaagtaagaccaagactggagtaagaccttttaaccctggtagaatgaatgtggcaggagacttatttcagaatggagaatttgcaactcatcatagtcctgattcttggatctcccagtcagcttcatttcccagtaatcagaaacagccaggggtggattctttatcaccagtggccttacttcgtaagcagaatttccagcctacagcccaacaacaacttactaaaccagctaaaatcacttgtgcaaattgcaaaaagcctttacagaagggacagacagcttatcaacgaaaaggatcagctcacctcttttgctctaccacctgcctttcttccttctctcataaacgtactcaaaacacacgaagcataatatgtaaaaaagatgcatctacaaagaaggctaatgtcattcttccagtagaatcaagcaaatccttccaagaattttatagtacatcttgtttgtctccctgtgaaaacaactggaatcttaaaaaaggagtttttaataagtcaagatgtacaatttgtagtaaattagcagaggtctggatttttatacctaagttgttgtttaggctaacagtgataattttaacttttaagtgctattatgtactctttcatctacataatgcacgtgttctggatgtataacatgaagctgaaaggaagaataaggatatgttagaactatcttatgggatattttataaataaaattccatttgcatagcatggaaagtac

SEQ ID NO: 334686 - DNA, 4690 bp, Homo sapiens
ctcatttttttttttaaaaatcacattatctgtatttccagacataaggtaagtatttcaccaactttcatccaaactaacatcctcaattgtaatcccactaagaaccgccagggcgagacgaaagcggaatcgcttccatctttacgtggagtccgggaaatggttcagcaccatgacatccgccgaagacgtaggtgtagacgaggaacaaaagagaagacccctcgtggaggtggcctgtggggcccgccctcaccgggcgccatctgtccctgattctgctccccgcaggggccgcagcgggtgcgcccggcgatagagcgggctgtggagggagcctccatggagtctccatcaaccattccggaccaggagacggtggcaggcagtaaaaaggcctaggcagggccagcgccccgggctgctagcacaggacggcggcgcccagggacgccccagggcaggcctcagcccctccaacccgcgagagcccagctccaagggagcctgcagctccctccatcttggttgatggaggcggggatctgcgtctgggtgtctccaccgtcgcgcccgaccagtactgccccgcggacgcagacgccggcagctggggctgttcccttgtccgaatggcagagcccagtcggggcttccgggacaagtcctggccccacggggtttggttttgaggggtcccaagttcccacagttgtcccgacaaaatggaggacgtcgtctcctcctgctgcagccatggcgggaggtgggggactattccccacggggcgcggcgagggtggaagggcctccactgaccgcagcgcactcaagactccagttcaaccgcggccccgaaagctcacttggccccgctccagcacctccccggcctcgcccctcttgggggccttcaaggaactggacagggagggcgctggggcatccaggccgccgctctcctcgagcagaggcgttgggagccgctgccgcagcttgggcccccgggctcgggcgagggcaggcggccccgccggagtctcccgggctgtgtaggtcccggagagccccgggccccgaggggccgaagcgggccgctacgacgggcggcgaatctcgggctcctgacctggcggacccggtagctgggggcgggagaccggcggggagacaacccgaccgggagttgagggctggcaggcgggagtggaactgcagggccgcgggtgtggcccgcacctgacggacagctcttcggccaccccaccgagggggcgccctgaaggacggccgtcggagccaatgggcgtgcccaaggcgcccaggctcgtctccctcgccagccaacgagcgcacggagggtggggcctcctcgggctctgctgcgccgtcccctgcttctccgcctcctcaccagcgcgaaaagccgggactggacctagcggagttgtgcttgtcgccgaagcggggtgggcttgttcgttccgcgcagccgcagccagaaccgggtgacgcttatccccgctgtctttccagtccagggccgctgagagtgggggtggctgggagcagcgcagcctccggaggaggaggcggaggccgaggaccaggaatcaccttcaagcctatgtcgtgaggctttggcagaaattaagaaggaaatatctccattgttcattggcatggaaaaatgttcagtgggaggattagagttgactgaacagactcctgctttattagggaatatggccatggcaactagtctcatggacataggggattcatttggtcatccagcttgtcctttagtcagtagatctaggaactcaccagtggaagatgatgatgatgatgatgatgttgtgtttattgaatctatacaacctccttcaatttctgctccagcaatagctgatcaaagaaacttcatatttgcatcatcaaaaaatgaaaagcctcaaggaaattattctgtaattcctccttcttcaagagatttggcatctcagaaaggaaatataagtgagacaattgttattgatgatgaagaggacatagaaacaaatggaggagcagagaaaaagtcttcctgttttatcgaatggggacttcctggaactaaaaacaaaaccaacgatttggatttctccacttccagtctttcaagaagtaagaccaagactggagtaagaccttttaaccctggtagaatgaatgtggcaggagacttatttcagaatggagaatttgcaactcatcatagtcctgattcttggatctcccagtcagcttcatttcccagtaatcagaaacagccaggggtggattctttatcaccagtggccttacttcgtaagcagaatttccagcctacagcccaacaacaacttactaaaccagctaaaatcacttgtgcaaattgcaaaaagcctttacagaagggacagacagcttatcaacgaaaaggatcagctcacctcttttgctctaccacctgcctttcttccttctctcataaacgtactcaaaacacacgaagcataatatgtaaaaaagatgcatctacaaagaaggctaatgtcattcttccagtagaatcaagcaaatccttccaagaattttatagtacatcttgtttgtctccctgtgaaaacaactggaatcttaaaaaaggagtttttaataagtcaagatgtacaatttgtagtaaattagcagagattcgccatgaagtcagcgtaaataatgtaacacataaactgtgcagtaaccattgctttaataagtacagattggccaatggtctaataatgaactgctgtgaacactgtggagagtacatgcctagtaagagtactggaaacaacatcctggtgattggaggtcagcagaagagattttgctgccaaagttgtattaacgaatataaacagatgatggaaacaaaatcaaaaaaattaacagcatcagaaaatagaaaaaggaatgcttttagagaagaaaatgagaaacaattatatggatcgtcaaatacacttttgaaaaaaatagagggaatcccagaaaaaaaggaaaagacttcacagctacagctttcagtagaatgtggcacggatacattactgatccaagagaatgtgaatttacctccttcttccacgtcaaccatagctgatacatttcaagagcaactggaagagaaaaattttgaagactccattgtaccagttgtgctttccgcagatccaggtacgtggccccgaattttgaatattaaacaacgggacactcttgttgaaaatgttccgcctcaagtaagaaattttaactttccaaaagataatacagggaggaagttttcagaaacttattatacacggattcttccaaatggtgaaaaaaccactagatcctggttactttattcaacctcaaaagattctgtgttttgtctatattgcaaactctttggggaaggaaaaaatcaactgaaaaatgaaaatgggtgcaaagattggcaacatttatcacatattcttagtaaacatgaagaaagtgaaatgcacatcaacaatagtgttaagtactcaaaattaaaatctgatctgaaaaaaaataaagctattgatgctgcagaacgcagattatatgaaaatgagaaaaatgatggtgtgctgttgttgtacacgtaatatacctgagttgttttttggcatgatgatcagaatcttacattactcagaaaacatctgtcctgcaatagtcagtactattgtgttgtaagtctcctctacagagtaacttgcagcagttccttagcaataagtatgatagcaaataaatagcaaagaatgtttccattctaaatctaaaactaattagattcaatcatcattaggcaatgacttcattaggcaatgaagattaacaataggtaattgttaatcttcaaaatctatcaatttacacctatttaaaaattggcatttaatgactgccatttgatgggtttggttaatattctgttcttggccgggcgcaatggctcacgcctgtaatccaagaactttgggaggctcaggcgggtagatcaattgaggtcagaagttcaagaccagcctggccaacaaggtgaaaccccgtctcaactaaaaatacaaaaacattagccaggtgtggtggcacacacctgtagtcccagctactcaggaggctgaggcaggagaatcgcttgaacccaggaggcagaggttgcagtgagctgagattgcaccactgcagtccagcctgagcaacagagcgagagtcagtctcaaaagaaagaaaaatattatgttctaattaccttgaaagaggaaagaaaggcttgaattgatcaataccagtttgaataagatacttatgtgaacaagcattctcaacattattattaaagtaaaactactcagtttacagaatgggatctgaaactacagctttttgctattaaaccaaatacttgtgatctactttgtttgagcaaaacagcattatttgttatgttaatgatggttaatttccattttattggttttatgtttattttaatttgtaaatgttttagcatttattattgtatgtgaactatatttacctattttatgttgataaaaatataaaaaatattaaaataagtatatattaagtt

SEQ ID NO: 334687 - DNA, 2879 bp, Homo sapiens
ctcatttttttttttaaaaatcacattatctgtatttccagacataaggtaagtatttcaccaactttcatccaaactaacatcctcaattgtaatcccactaagaaccgccagggcgagacgaaagcggaatcgcttccatctttacgtggagtccgggaaatggttcagcaccatgacatccgccgaagacgtaggtgtagacgaggaacaaaagagaagacccctcgtggaggtggcctgtggggcccgccctcaccgggcgccatctgtccctgattctgctccccgcaggggccgcagcgggtgcgcccggcgatagagcgggctgtggagggagcctccatggagtctccatcaaccattccggaccaggagacggtggcaggcagtaaaaaggcctaggcagggccagcgccccgggctgctagcacaggacggcggcgcccagggacgccccagggcaggcctcagcccctccaacccgcgagagcccagctccaagggagcctgcagctccctccatcttggttgatggaggcggggatctgcgtctgggtgtctccaccgtcgcgcccgaccagtactgccccgcggacgcagacgccggcagctggggctgttcccttgtccgaatggcagagcccagtcggggcttccgggacaagtcctggccccacggggtttggttttgaggggtcccaagttcccacagttgtcccgacaaaatggaggacgtcgtctcctcctgctgcagccatggcgggaggtgggggactattccccacggggcgcggcgagggtggaagggcctccactgaccgcagcgcactcaagactccagttcaaccgcggccccgaaagctcacttggccccgctccagcacctccccggcctcgcccctcttgggggccttcaaggaactggacagggagggcgctggggcatccaggccgccgctctcctcgagcagaggcgttgggagccgctgccgcagcttgggcccccgggctcgggcgagggcaggcggccccgccggagtctcccgggctgtgtaggtcccggagagccccgggccccgaggggccgaagcgggccgctacgacgggcggcgaatctcgggctcctgacctggcggacccggtagctgggggcgggagaccggcggggagacaacccgaccgggagttgagggctggcaggcgggagtggaactgcagggccgcgggtgtggcccgcacctgacggacagctcttcggccaccccaccgagggggcgccctgaaggacggccgtcggagccaatgggcgtgcccaaggcgcccaggctcgtctccctcgccagccaacgagcgcacggagggtggggcctcctcgggctctgctgcgccgtcccctgcttctccgcctcctcaccagcgcgaaaagccgggactggacctagcggagttgtgcttgtcgccgaagcggggtgggcttgttcgttccgcgcagccgcagccagaaccgggtgacgcttatccccgctgtctttccagtccagggccgctgagagtgggggtggctgggagcagcgcagcctccggaggaggaggcggaggccgaggaccaggaatcaccttcaagcctatgtcgtgaggctttggcagaaattaagaaggaaatatctccattgttcattggcatggaaaaatgttcagtgggaggattagagttgactgaacagactcctgctttattagggaatatggccatggcaactagtctcatggacataggggattcatttggtcatccagcttgtcctttagtcagtagatctaggaactcaccagtggaagatgatgatgatgatgatgatgttgtgtttattgaatctatacaacctccttcaatttctgctccagcaatagctgatcaaagaaacttcatatttgcatcatcaaaaaatgaaaagcctcaaggaaattattctgtaattcctccttcttcaagagatttggcatctcagaaaggaaatataagtgagacaattgttattgatgatgaagaggacatagaaacaaatggaggagcagagaaaaagtcttcctgttttatcgaatggggacttcctggaactaaaaacaaaaccaacgatttggatttctccacttccagtctttcaagaagtaaggtaaatgcaggaatgggtaatagtggtatcactacagaattgactctgaaatacattattactaatgttacaaccttagaaacaggtataagctctgtgaatgctgggcaagatgtgaacataattattacatataaaacatcactatagaataccaacttgggagatgtcgctaaaggacttcagtcaagtaattttggtgttaatatacaaacgtacaccccatctttaactccacagaccaagactggagtaagaccttttaaccctggtagaatgaatgtggcaggagacttatttcagaatggagaatttgcaactcatcatagtcctgagatgcatctacaaagaaggctaatgtcattcttccagtagaatcaagcaaatccttccaagaattttatagtacatcttgtttgtctccctgtgaaaacaactggaatcttaaaaaaggagtttttaataagtcaagatgtacaatttgtagtaaattagcagaggtctggatttttatacctaagttgttgtttaggctaacagtgataattttaacttttaagtgctattatgtactctttcatctacataatgcacgtgttctggatgtataacatgaagctgaaaggaagaataaggatatgttagaactatcttatgggatattttataaataaaattccatttgcatagcatggaaagtac

SEQ ID NO: 334688 - DNA, 663 bp, Homo sapiens
agacggggtttcactatgttggccaggctggtctcgaactcctgagctcaggtgatctgcccaacttggcctcccaaagtgtgggattacaggcgtgagccaccttgcccggctgtattatcagttctttagtctataatgttgcccatttaggctctacagatatattaaaaatattcgttgatgaaataaaaaccaggaggtaataagaaagcctgtaatgtaaaggtttcccatttcttgtgaaagtagctgtggactttacccacagttattgctgcatcacattctgtttgatataatttttatttcatctacagttgtgccataatcaccaaattcccaaagtaaaaatatgttaggtttatatcattatttaaagatactttaaattttattttcctaaattaaattttcaacttgaaatattcttttgtaacagaaggaagaaagtgccattgtattttcactttgggccactattttaaaatattgggcaaacaaagtaacaataaaaattaaagctgagaaactatggcaaagacaaagtaagacaaagaacactgacttagattctgagataaaaagccagtttttgtttgtttgttttatttgagttctggtatacatgtgctgaacatgtggatttgttacataggtaca

SEQ ID NO: 334689 - DNA, 738 bp, Homo sapiens
ggccatgggtctggatttccaagaaagcggagacctcgaggtgcaggactgtcggggcgaggtggccgaggcaggtcaaagctgaaaagtggaatcggagctgttgtattgcctggggtgtctactgcagatatttcatcaaataaggatgatgaagaaaactctatgcacactacggttgtgttgttttctagcagtgacaagttcactttgaatcaggatatgtgtgtagtttgtggcagttttggccaaggagcagaaggaagactacttgcctgttctcagtgtggtcagtgttaccatccatactgtgtcagtattaaggtaaacatccttaaattgagttaacaaatatgtactgaatttttatttggttttagtagtaacatgagctcccagttctcacaattaagtattatgattattaaacgtatgtgacagtatttaagcactttaaatactgcttttaagggtttcctatctcaagaaatttgctcctctataaatcttatattgtactaatatcctgcttttgtcttgaaaaagtaaaacataaaaatatatgcatttaatttaaaagacaatttatactattcacaaagattttaggtttagctgattcattttgtctgttgatttaaaaagctgagaactggagtatttagtaaaaaattattagcctattctgttctttaccgcattctctctcctctgtgctcactcatatacaaaatgaca

SEQ ID NO: 334690 - DNA, 324 bp, Homo sapiens
tcaagcacaaattatcttaatttctaagctgggcctgcagattttctctaaatctgtacctcttcattcctcctgttatttagatcccttagacatgtgtgctgttgatccctcgtacttgttttcttcaggactttacgccgtgaagtgacctgttctccccctatatctctctatatctttagtctccaactctttagtgactttttcctcagcctgtaacattttccttcatcctgcatttgcctttaactcctctcttacatctctcttttttacttagccaagcttttagtgtccgcataagcttccattcaccagggc

SEQ ID NO: 334691 - DNA, 1171 bp, Homo sapiens
  misc_feature (1)..(2): n is a, c, g, or t
  misc_feature (6)..(8): n is a, c, g, or t
  misc_feature (10)..(10): n is a, c, g, or t
  misc_feature (12)..(12): n is a, c, g, or t
  misc_feature (14)..(15): n is a, c, g, or t
nncacnnncncncnnccccaaccccctcaatccccctttctctcctcatccttttcccctctttctccctgcctctttttggttatgccaggcaatatctaatctgcattttagcaagtcattcctgacaaatggaaaggtgaatgctcttccacagttctccctggcaaggcaatttttcttgttagcatccttctgtacgctccattaccctttttcctttatgtataggttaagaggaaatgatgaggctctgatttatcaatgagaaatcatttacactgtaggacattcaaatcctttagtctcagacttaagatcagtttcactccaggtttctatgctctgtggaaatttcatcactggacagtgctttccttttaaggaggttgccctttttttgtgttctctcttctcttcctctcccagtaaccaccggagggcgagagagccagctagttatcaggatggaggcatcattttaggagctggaatcctgtttagttatataatgccctgcagtgctgtttggaaggagggaaacctgtagggatattttcccattgggacccagaggaaagaagtttcaaatatatcttttcaaagtaatttttcaccaaatctgagtttagaaaatttcaacaaactccttcctcttttggaaaagcggagaagcttttgaaatgtttctcttccatgtgttatcccctcatcatcagtctaattacctcttttgaaatactgctttatgctctcggccttagcgccatttttttggaaacctctgtgccatgagagccaagtggaggaagaagcgaatgcgcaggctgaagcgcaaaagaagaaagatgaggcagaggtccaagtaaaccgctagcttgttgcaccgtggaggccacaggagcagaaacatggaatgccagacgctggggatgctggtacaagttgtgggactgcatgctactgtctagagcttgtctcaatggatctagaacttcatcgccctctgatcgccgatcacctctgagacccaccttgctcataaacaaaatgcccatgttggtcctctgccctggacctgtgacattctggactatttctgtgtttatttgtggccgagtgtaacaaccatataataaatcacctcttccgctgttttagctgaagaatt

SEQ ID NO: 334692 - DNA, 1734 bp, Homo sapiens
  misc_feature (1)..(2): n is a, c, g, or t
  misc_feature (6)..(8): n is a, c, g, or t
  misc_feature (10)..(10): n is a, c, g, or t
  misc_feature (12)..(12): n is a, c, g, or t
  misc_feature (14)..(15): n is a, c, g, or t
  misc_feature (1207)..(1207): n is a, c, g, or t
nncacnnncncncnnccccaaccccctcaatccccctttctctcctcatccttttcccctctttctccctgcctctttttggttatgccaggcaatatctaatctgcattttagcaagtcattcctgacaaatggaaaggtgaatgctcttccacagttctccctggcaaggcaatttttcttgttagcatccttctgtacgctccattaccctttttcctttatgtataggttaagaggaaatgatgaggctctgatttatcaatgagaaatcatttacactgtaggacattcaaatcctttagtctcagacttaagatcagtttcactccaggtttctatgctctgtggaaatttcatcactggacagtgctttccttttaaggaggttgccctttttttgtgttctctcttctcttcctctcccagtaaccaccggagggcgagagagccagctagttatcaggatggaggcatcattttaggagctggaatcctgtttagttatataatgccctgcagtgctgtttggaaggagggaaacctgtagggatattttcccattgggacccagaggaaagaagtttcaaatatatcttttcaaagtaatttttcaccaaatctgagtttagaaaatttcaacaaactccttcctcttttggaaaagcggagaagcttttgaaatgtttctcttccatgtgttatcccctcatcatcagtctaattacctcttttgaaatactgctttatgctctcggccttagcgccatttttttggaaacctctgtgccatgagagccaagtggaggaagaagcgaatgcgcaggctgaagcgcaaaagaagaaagatgaggcagaggtccaagtaaaccgctagcttgttgcaccgtggaggccacaggagcagaaacatggaatgccagacgctggggatgctggtacaagttgtgggactgcatgctactgtctagagcttgtctcaatggatctagaacttcatcgccctctgatcgccgatcacctctgagacccaccttgctcataaacaaaatgcccatgttggtcctctgccctggacctgtgacattctggactatttctgtgtttatttgtggccgagtgtaacaaccatataataaatcacctcttccgctgttttagctgaagaattaaaaaaaaaaaaaaaaaaaaaaaaataaaaaaaaanaaaaaaaaaaaaaaaaaaaaaaaaaaaaaaaaaaaaaaaaaaaaatggtggcccctttggcccaatcgactttaaaatcgaccaagtttatgcaaggggcccaaattcgggctaaattggccaattcgccctaaaggggggcgaattaaaaataaagggcccgcgttttaaaacgctcggactggaaaaaccctggggttccccaacttaaaccccttggaaaaaaacccccttttccaaattggggaaaatgcaaaaaagccccaaccgaacccctttccaaaaaattgccccacccaaatgcgcaagggaaattgtaaggcttaaaatttgggaaaaaatcccgtaaattttgggaaaacaactaaattttaaacaaaaggcccaatatgggaaaaatccctttataactgaacttccctcataaagggttgagggttgtccaatttggaacaaagaccctcttataagaaagggcctcaaacgtaattttttgggctaagggccaataccctttggccctggcc

SEQ ID NO: 334693 - DNA, 1278 bp, Homo sapiens
  misc_feature (1)..(2): n is a, c, g, or t
  misc_feature (6)..(8): n is a, c, g, or t
  misc_feature (10)..(10): n is a, c, g, or t
  misc_feature (12)..(12): n is a, c, g, or t
  misc_feature (14)..(15): n is a, c, g, or t
nncacnnncncncnnccccaaccccctcaatccccctttctctcctcatccttttcccctctttctccctgcctctttttggttatgccaggcaatatctaatctgcattttagcaagtcattcctgacaaatggaaaggtgaatgctcttccacagttctccctggcaaggcaatttttcttgttagcatccttctgtacgctccattaccctttttcctttatgtataggttaagaggaaatgatgaggctctgatttatcaatgagaaatcatttacactgtaggacattcaaatcctttagtctcagacttaagatcagtttcactccaggtttctatgctctgtggaaatttcatcactggacagtgctttccttttaaggaggttgccctttttttgtgttctctcttctcttcctctcccagtaaccaccggagggcgagagagccagctagttatcaggatggaggcatcattttaggagctggaatcctgtttagttatataatgccctgcagtgctgtttggaaggagggaaacctgtagggatattttcccattgggacccagaggaaagaagtttcaaatatatcttttcaaagtaatttttcaccaaatctgagtttagaaaatttcaacaaactccttcctcttttggaaaagcggagaagcttttgaaatgtttctcttccatgtgttatcccctcatcatcagtctaattacctcttttgaaatactgctttatgctctcggccttagcgccatttttttggaaacctctgtgccatgagagccaagtggaggaagaagcgaatgcgcaggctgaagcgcaaaagaagaaagatgaggcagaggtccaagtaaaccgctagcttgttgcaccgtggaggccacaggagcagaaacatggaatgccagacgctggggatgctggtacaagttgtgggactgcatgctactgtctagagcttgtctcaatggatctagaacttcatcgccctctgatcgccgatcacctctgagacccaccttgctcataaacaaaatgcccatgttggtcctctgccctggacctgtgacattctggactatttctgtgtttatttgtggccgagtgtaacaaccatataataaatcacctcttccgctgttttagctgaagaattaaaaaaaaaaaaacctggctaacacagtgaaaccccgtctctactaaaaatacaaaaaagtagtcgggtgtggtggcgggcgcctgtggtcccagccactcaggaga

SEQ ID NO: 334694 - DNA, 1309 bp, Homo sapiens
cagaaaagaaagaaagaaaagatccctttgctatgagctcgctgtatattgataagtgtaagaattgtgttgcatgaataaccgctttgggctggatttgaagtattttgatgttgtgttttgcaaatattgaagttacaataatggcaacagaaaaggaacagatacacagctttacacttagcagaatgttacatttaaaatctgacaaggcgccaagatggtgactgtctcctctaaaccacgaaagagtaagatttgtgcaaccctcctcctcttccacctccttcaggagaattaaatgaatcaagactttggaaagacggggaagagccgggacttggcagtacttgaaacaggaggaatacaccagcctaaatgtacagactttgtagccgagcccactcgatcggtctgtgccttcacgtgaccaccatctgtgcctccctcgctccatccaaatttgtgtaggctgctccttggagctatgcctaaaatatagctacaccagagccctggaaactgtagtcaagtaacaggcctcactgttttttttctttggattaaaagtgtatatctctctactgaggggtttccagctttacacttctataggttgttctgacagtgagaacacattatgtacatgttttctattcatgtccagggcatgagaatcttaatattcttatacttccctttttgcatgcagtatgtctggaatatgtttataaaattttagcaaggggtgagatcaagggacaaaggtagagtggttatttaaagacaatcagaaatgaacttaaaagctgccctgcaaaaccaatcctttcctatcatgaagagtaccttcatattttctagagattgtctctgaaccgttgctacatagccataaatttctgtaaatcatgttggctatcagttcttgctattctcagagcactctatcatgtttttaggtgtatattgtgtattcaggatagcattaaaaagaactgatggcaaatgtattgactcacagtggaaacattcatttggatgaagaattagtggtttagcctttgaaatgaataccttgaatcatttcttctgattttctagtagtttattatctcaaatgattattatccccttcaaaaatactggtctgtactttggtgttgtggtttcatttttctggcattgatcaaatagcaaatacaaaataaagcatttctacatgtttgaggtggttgtttttaaaggggatatgtgtaatgcagattttctttattaataaaattttcataatctctgaaaaaaaaaa

SEQ ID NO: 334695 - DNA, 1078 bp, Homo sapiens
cctaacaggctttggagccggggagaggcgaggagagggaagaagaggagaagaaaagaagaggaattaaatgaatcaagactttggaaagacggggaagagccgggacttggcagtacttgaaacaggaggaatacaccagcctaaatgtacagactttgtagccgagcccactcgatcggtctgtgccttcacgtgaccaccatctgtgcctccctcgctccatccaaatttgtgtaggctgctccttggagctatgcctaaaatatagctacaccagagccctggaaactgtagtcaagtaacaggcctcactgttttttttctttggattaaaagtgtatatctctctactgaggggtttccagctttacacttctataggttgttctgacagtgagaacacattatgtacatgttttctattcatgtccagggcatgagaatcttaatattcttatacttccctttttgcatgcagtatgtctggaatatgtttataaaattttagcaaggggtgagatcaagggacaaaggtagagtggttatttaaagacaatcagaaatgaacttaaaagctgccctgcaaaaccaatcctttcctatcatgaagagtaccttcatattttctagagattgtctctgaaccgttgctacatagccataaatttctgtaaatcatgttggctatcagttcttgctattctcagagcactctatcatgtttttaggtgtatattgtgtattcaggatagcattaaaaagaactgatggcaaatgtattgactcacagtggaaacattcatttggatgaagaattagtggtttagcctttgaaatgaataccttgaatcatttcttctgattttctagtagtttattatctcaaatgattattatccccttcaaaaatactggtctgtactttggtgttgtggtttcatttttctggcattgatcaaatagcaaatacaaaataaagcatttctacatgtttgaggtggttgtttttaaaggggatatgtgtaatgcagattttctttattaataaaattttcataatctctgaaaaaaaaaa

SEQ ID NO: 334696 - DNA, 1397 bp, Homo sapiens
cagaaaagaaagaaagaaaagatccctttgctatgagctcgctgtatattgataagtgtaagaattgtgttgcatgaataaccgctttgggctggatttgaagtattttgatgttgtgttttgcaaatattgaagttacaataatggcaacagaaaaggaacagatacacagctttacacttagcagaatgttacatttaaaatctgacaaggcgccaagatggtgactgtctcctctaaaccacgaaagagtaagatttgtgcaaccctcctcctcttccacctccttcaggagaattaaatgaatcaagactttggaaagacggggaagagccgggacttggcagtacttgaaacaggaggaatacaccagcctaaatgtacagactttgtagccgagcccactcgatcggtctgtgccttcacgtgaccaccatctgtgcctccctcgctccatccaaatttgtgtaggctgctccttggagctatgcctaaaatatagctacaccagagccctggaaactgtagtcaagtaacaggcctcactgttttttttctttggattaaaagtgtatatctctctactgaggggtttccagctttacacttctataggttgttctgacagtgagaacacattatgtacatgttttctattcatgtccagggcatgagaatcttaatattcttatacttccctttttgcatgcagtatgtctggaatatgtttataaaattttagcaaggggtgagatcaagggacaaaggtagagtggttatttaaagacaatcagaaatgaacttaaaagctgccctgcaaaaccaatcctttcctatcatgaagagtaccttcatattttctagagattgtctctgaaccgttgctacatagccataaatttctgtaaatcatgttggctatcagttcttgctattctcagagcactctatcatgtttttaggtgtatattgtgtattcaggatagcattaaaaagaactgatggcaaatgtattgactcacagtggaaacattcatttggatgaagaattagtggtttagcctttgaaatgaataccttgaatcatttcttctgattttctagtagtttattatctcaaatgattattatccccttcaaaaatactggtctgtactttggtgttgtggtttcatttttctggcattgatcaaatagcaaatacaaaataaagcatttctacatgtttgaggtggttgtttttaaaggggatatgtgtaatgcagattttctttattaataaactcttggtggtgtctgatacccaattcgccctataactagtggggtggccctttactgaatgcggcttatcaacagtcggactgcaataacctggccgttacccaacttcatcg

SEQ ID NO: 334697 - DNA, 194 bp, Homo sapiens
tgtaggtccatgagaagggttgagtctgaggtgcctgtgagacacccaagtggaaatggcaagtcagtggccggaagagcaggtctagagtccaggagccccacaaggtttgaaaggaccagttgtgcatcatgtgagtgtaactgataataggtactccccagaagtgtgtgccaagggtcaagagcgtggac

SEQ ID NO: 334698 - DNA, 1756 bp, Homo sapiens
atttccacatcttggctattatgagtaatgctacaacgaacgagggagtgaaaatatctctttaagatcctgatttcagtttttttgaataaatacccagaagtggaatgactgggtcattcatatggtaattctaattaaacatagaattatttttaattttttgagaaacttctgtgctgctttccacagtggttgcatctgtttacatacttaccaatggtgcacaagggttccaatttctccacatctttgccaacttgttatctgtgtttgtttaaatgacagctgtatgagttgtcccttgcctccatgcaattctgaacttcagaaataagcacttggctcctttaatagctgtccgtcctatgttgtgtctacagccactgaatcctgtcctacattttctgattcattaactcattcaactaatagctattgaacaccatcaataagtcagccaccatgaagatgagtattttatattgaattctactaacatatcctgtatgtttactatgttgccagagaggatgctgtgtgctttttttacattgttatctttactcttcacaagaaccatgtaaggtaggtattggtaaaatgggtaattttggaaatgcttcaataatcgagtagaataacttttgctctatgtgagaagatacgttttaaataagatatggcttaggtttctggttacctgagacatactataccttctcagatactctcagacctgaatcatttaacaaactaaggcagaaatactaaaaatatctggttcaataacataggggcatggagtagacatgcagaaaatgcttgttcacttgccttgaaatggctccaggtggcctgaaggaatcaatgaaacttctcaagtatctacattacaaccactggtccccactacacatttatttctaaataaaggaggagaaactctagcaaagtaatatttaacattttcattgcttccaggataaatcttattgaatatggaggatctgatagtggtaggtctatcaggaatatcagggaaaatgcttttgatgttgttggcaaagtcaattcctatcatttgtacttgacaccagctacctagcaggctcattgtgaacttcaggtttcgcccacgttatttatataaagtatctcagtgtaatatagggagttgctggttatttgaaaatagtaacaaaaataacccaaacgagaaactccatttccataattagctttcctgaaagtcaggcatgtctttgaggacaggttttggcagtattatttttgtgcacaggaggaaaattgttagtaggtttatagatgttatttttataatagaatgttaaacccctgaaaaacatcaaaaattgtctcctagaactaattctatgttttaaaaacttgttttaaaaaggattctaaatagcaatagggtctttcctcctttctccactccaatggtttaatgggatagaggaatcaatgtttatatttttaaacctgtaaatattttattttgggtattttgtatatttgttgatataattccattttgtgcatatgtaccattgtgcatgttgctgtttttgatagtcactcttttaatgaatgtaagaagcttgggctaatagcacttttcttgttccattcaaacatctgaaaatgaaattacaacactgccattttactgttgtgtttaattcagtcaataaattttgttgctcctttgcatttaaaatgaattctg

SEQ ID NO: 334699 - DNA, 151 bp, Homo sapiens
ataagagagtaattatatctggaaaaattaaaaaaaggaggaatgtcagagaaaatacaaaaaggaagtgacctgagctgagctttgaaggatgaaagcaccagttacacatggaggaagaggcattccagggcagaggtgacagagtgaa

SEQ ID NO: 334700 - DNA, 156 bp, Homo sapiens
ccatgtgctcagaatatatagtagctaacaggaatttaatgattttttaattattatagtttccagtgtatttctttatagggttaacctctattatgccgagtaatgctggtttccaattaatgctgtctctttttttttttttttttttttttt

SEQ ID NO: 334701 - DNA, 313 bp, Homo sapiens
gatgggggatcaggaagcaggagcctctgaggacgagggatcaggaaggaggagcctctgaggacggcggatcaggaaggaggagcctctgaggacgaaggatcgggaaggaggagcctctgaggacggcggatcgggaaaggaggagcctctgaagatgggagattgggaaggaggagcctctgaggatggggaatcaggaaagaggagcccccctgagaccaggggatcagggaggggggagccagggttcctgatggctctgggaccagggcaaggcaaaggagctgctgcctctggatggtcctccatg

SEQ ID NO: 334702 - DNA, 515 bp, Homo sapiens
catattgtccaggttagttctctatggcagaagaggtaaggctggagatgaagaaaatttgtgatctggaagtacctggcaatgcatcatccactaacttaataactttccttactggttttgagggcctaagaacccgtttttagtgtcccccagctctatttgaggaacttttattctttgacgtgtcactaattccatactttactatggaaaattgcctgttgaaatcatacaagtcatcagcatatggtacttacaagataggcctcccacccattcataatttaaacaactattatgtattaattataggaaatttggaaaatagatatttaaaggaaaaaagaagtaattccacttattcaggatgaccattgttaatatttggaacatgtagccttttgatacacatttagtatacatacattaaacatataattgaaagtaggccacctctggtattttgtaatattaagattaatattttaaaacttaatattttttcatatttc

SEQ ID NO: 334703 - DNA, 166 bp, Homo sapiens
ccttgctcagatgtccatcctgtttcctcagctttgcctcctcaaccatgagggttctaatcttcatagttgcttctgtttgataagttctatttatttaggaagccatacacaggaacacaggcagaagagaaccagaagactgcatccattggaaaatttaata

SEQ ID NO: 334704 - DNA, 399 bp, Homo sapiens
tgtgtgcctcggcctttcccaagggccagcttcttcctggtagtgcttttgtgtacttgtctggttgggacttcgtgtttctttcttgggattgttgtctgggactgcaagcagggtatgtttttatctactgtgaggttcctggggcggagatgtgcagtggagcgagaacttcctgtgaccgtgacattgtctaggtggtgagcaggtgtgggggtgtggagagaggtgaggggctgaggtagtgctgagtggggaaaaagcacctcccaccacaagctgttctgtcccgctccatcctctgcccagtagctctctcagttgctttgcctactcagtctcactgtttcatcttccctgggtctcttggtccccttccttttgactgtgtgtgatttt

SEQ ID NO: 334705 - DNA, 143 bp, Homo sapiens
tttgactgccaatatacagtgtgctgcttttgttgaaacttgtagctctcacactggtatttgccaacattacatttgacttctcacatagtaaaagacaactcattcctgtggagtttaaggcatgtggaaacatctatctg

SEQ ID NO: 334706 - DNA, 310 bp, Homo sapiens
gatgctcttcagaggggacactgccaaactgtgtccaggttaaggggataaagaaggatcctatggcacacagaaatgataccacctgggtgccatggggatgctgaacccgtggcacagaagggaagggagaggtgacagcaaatgctcacagagctgccatgtggaggaaggtgaactggagtgcctgaagggtgagatactgcagggtgggaacatctggcctattatggacagagtttttatcacaacaaagaattgggaaacaagtgagtaagtgacctgtgtgaggagggaactattcgcccag

SEQ ID NO: 334707 - DNA, 1679 bp, Homo sapiens
cactccatgccctgtgaatgaaacagatggctttcctgacctctaatcaaagcctacccatattgatctgttccttctagtccttagtatgtgctacctcttcttttctgtgccgaagtggtgagtagccaatagttatttcctctaccagtggtattttactaggcaattattggaaatagaatgctgccacccggtagtgataaatctaacatttctcgtagaagatataggtggattagttactccctggggcaatatggattagttcctgtgtccttcaaattgcactcaccaagcctgagccatgctttactgctgaaacatcctagcagagagaagtaagtggctcagggtggccctcttgtggtggacaagcattcccaggactctgctggtcactaaagaaaaggtagccctcaaacagtcctttttattatttttgattttattgtcatcattatcagtatcctccaagtcaagaatccgtaaataatacaatgagatgctaaaaacaagtttgaaaaatgtgagcaaggtctgtttctagttttaaaatagcccacatttctcaaatatgttactgtttggttcagaatttggaccactacctaaaaagaacagatcattcaaacgtgtcttttgaatatttctgtcatctggaaatgcctgcgcataagccccatgacggatgtgcttggctaaaaaacctgttgacgtgtcctcagccttcagaatagaagagacagccagtttcccatgattctaaggataaacatcccccactggaaaaatattacattagctggcaagtaataatccaaacatgtacatggatagtaaatattctgtgtgtgatcctcataattttatactccaaaacagtattttaggaggatcaaaattatatttattaacacacagttgaaattgccattctagaactcaaataacacaggaccaaatttgacagaatcagctgtggaactttatcaaaagtctgaagccaggacctcaccactggatggtctgagtcagaagtctggggagagttccagcattactatttttctttttcattctctgtgtgattatagtatgcagctaggactgagtgagagtaacactaaaccgtgatctccttggtggaatgctgtgggtactcctaggagagactctccaaatttgtgaatttataccagtgtagtgggctactcagaatgcaaacagtcacgctacatgtcacatttcagggaatcttcagagctgaccagacctgttgaagacaaggatttcttcctcttctttgagtcctcttggtctaacctggcacagaattggtattcacaaatatttgttaaatggaatgttaattgaagtacccaagaccttaggaattgaagataatttaagatttaagagttctgctaaacaactgagatctcatgatcttaaagtactttgaaaattgcaaggggcagacattattcaagaaggaaggatttcttaaaatacgtcctttatagtagcctttgaactttaacatgcagaagaatgagtttaggcggggcacagtgtttcaggcctataatctcagcactttgggaggcaaaggagggaggatcatttgagctcagaagttcaaaaccagcctgagcaacatagcaagaccttatctc

SEQ ID NO: 334708 - DNA, 1471 bp, Homo sapiens
cagttccttaaagatactggtccactgtcttctggctttcattgttttggcaagaagtctttttaattttattgttcttgatgtaatgtgtttttttctgactccttttaagatttttctcctcttccccccatctttccatgccaccacagtggtgcatgtcacgagcgtccatgtgaagagaccaccaggcaagctttacgtgaacagtaaagcttttttatttcacctgggtgcaggcggactgagtccgaagagtcagcaaagggtgatgggattatcattagttcttataggtttgtgataggcggtggagttgggagcagtttttttgtgggcagggggaggatcttacaaagtaccttctcaagggtggagcgggtgtatcgtacaaagtacattcacaaggacgggggaatatcataaagtacataagcgcaagggctgggagggggtgtattgtcacaaagtcaattgatcagtcagggtggggcaggaacaaatcacaatggtggaatggcatcagttaaggcaggaactggctattttcacttttgtgaatcttcagttgcttcaggccatctggatgtatatgtgcaggtcacaggggatatgacggcttaacttgggctcagaggcctgacagtgcacacggatgtcctggctgacattctcaagagcatcaacaatgccgaaaagaggcaaacgctaggtgctttttaagctgtgctccaaggtcattgcccgtctctcactgtgatgatgcagcacggattatgcggggtggagttggggggacttcctgggccgggggacttttgcaagagaccccggtgactcaggattttgagttcttaaccagtcgagtgaaggattcaaaattaaccactccaagggaggattgaaaaaagaaccactctcagtggacaaaaagaaagaaaggggagagggtaacacagggatataagccctagtcacccgagccagcaacggcaacccttctgggtccccttccaccacgtggaagctttcctttcactttgttcagtaaactgcgctgctgctcactctcctggtccgtggactctttttaagctgtaacactcaccgtgaaggtccgcagcttcattcatcaaagttagcgagaccacaaacccatcggcaggaaaaactcctaactcagttacattggcaaatttgaaatcattgatgatcacagagctgggaaaattgttgtgaacctcacaggcgggctaaacaagtgtggagtgatcagcctcagatttgatgtgcaactcaaagatctagaaaaatggcagaataatctgcttccatcctgccagtttggtttcattgcactgacaacctcggctggcatcatggaccataaggaagcaagatgaaaacacacagcagggaaaatcctggaattctttttctagggatgtaatacatatttacaaaaaaaaaa

SEQ ID NO: 334709 - DNA, 654 bp, Homo sapiens
tgcttaagaaaactttgctgctgtgtaatattagaacggaaggttggtttccagtaaaatgcattaactttggctcaaaccaagatgatgggtaccgggcatgggggtggggaggcagttgaagatccactgagctttgtctcagggcagccctgctcatcgtcctactttaccttccaccacggtgctcaagcccacactgagagagaaatttccagctgcaaaagggagaagagaaacgctggaatactagtatcggacgttaggacatggttgtggtgttttaaaaatcatttcatcatctggagtttgaccccgaggggagtattttcacccttcagccctctgaaagcattcactagcatctgaatattgttctgagtttgttggagcagtgaaatctggtgagagagaagggtggaggaaggaaggagctgttgtatttggcggctggactcaggtagaggaaactgctacaatcccgggaaagaacagaaaagtagaaagggacgagttcccacacgcagccaatgtccatggccttaactgtgcttgggaaggaagatcctgggccaggggtgtaccctcgtttttcaaaactaaacgtgtctgagacagctacaaagtttattaagggacttgagagactagagt

SEQ ID NO: 334710 - DNA, 1618 bp, Homo sapiens
catataagacatgaattccatgagtaaaatcaaacttctgtggcaaggaaacctctctgagtctcgatttcctccgtggtaaaaaggagagggttaaaccacagggtcccgagggtcccttccagctgtcacattctggagcgtatgagatgagattcttctactcaaaacaaaagagccaacagaacagaagaaaatgtttcagacggttccccaaatgccggttctgtggagcagacgcccaagaagcctggcctcagaagacgtcaaacgtaaacagctcgaattaagaatatgtttccttgtttatcagatacatcactgcttgatgaagcaaggaagatatacatgaaaattttaaaaatacatatcgctgacttcatggaatggacatcctgtataagcactgaaaaacaacaacacaataacactaaaattttaggcactcttaaatgatctgcctctaaaagcgttggatgtagcattatgcaattaggtttttccttatttgcttcattgtactacctgtgtatatagtttttaccttttatgtagcacataaactttggggaagggagggcagggtggggctgaggaactgacgtggagcggggtatgaagagcttgctttgatttacagcaagtagataaatatttgacttgcatgaagagaagcaattttggggaagggtttgaattgttttctttaaagatgtaatgtccctttcagagacagctgatacttcatttaaaaaaatcacaaaaatttgaacactggctaaagataattgctatttatttttacaagaagtttattctcatttgggagatctggtgatctcccaagctatctaaagtttgttagatagctgcatgtggcttttttaaaaaagcaacagaaacctatcctcactgccctccccagtctctcttaaagttggaatttaccagttaattactcagcagaatggtgatcactccaggtagtttggggcaaaaatccgaggtgcttgggagttttgaatgttaagaattgaccatctgcttttattaaatttgttgacaaaattttctcattttcttttcacttcgggctgtgtaaacacagtcaaaataattctaaatccctcgatatttttaaagatctgtaagtaacttcacattaaaaaatgaaatattttttaatttaaagcttactctgtccatttatccacaggaaagtgttatttttaaaggaaggttcatgtagagaaaagcacacttgtaggataagtgaaatggatactacatctttaaacagtatttcattgcctgtgtatggaaaaaccatttgaagtgtacctgtgtacataactctgtaaaaacactgaaaaattatactaacttatttatgttaaaagattttttttaatctagacaatatacaagccaaagtggcatgttttgtgcatttgtaaatgctgtgttgggtagaataggttttcccctcttttgttaaataatatggctatgcttaaaaggttgcatactgagccaagtataattttttgtaatgtgtgaaaaagatgccaattattgttacacattaagtaatcaataaagaaaacttccatagcta

SEQ ID NO: 334711 - DNA, 2452 bp, Homo sapiens
atcattttcttcttcgtcagcctcccttccaccgccatattgggccactaaaaaaagggggctcgtcttttcggggtgtttttctccccctcccctgtccccgcttgctcacggctctgcgactccgacgccggcaaggtttggagagcggctgggttcgcgggacccgcgggcttgcacccgcccagactcggacgggctttgccaccctctccgcttgcctggtcccctctcctctccgccctcccgctcgccagtccatttgatcagcggagactcggcggccgggccggggcttccccgcagcccctgcgcgctcctagagctcgggccgtggctcgtcggggtctgtgtcttttggctccgagggcagtcgctgggcttccgagaggggttcgggccgcgtaggggcgctttgttttgttcggttttgtttttttgagagtgcgagagaggcggtcgtgcagacccgggagaaagatgtcaaacgtgcgagtgtctaacgggagccctagcctggagcggatggacgccaggcaggcggagcaccccaagccctcggcctgcaggaacctcttcggcccggtggaccacgaagagttaacccgggacttggagaagcactgcagagacatggaagaggcgagccagcgcaagtggaatttcgattttcagaatcacaaacccctagagggcaagtacgagtggcaagaggtggagaagggcagcttgcccgagttctactacagacccccgcggccccccaaaggtgcctgcaaggtgccggcgcaggagagccaggatgtcagcgggagccgcccggcggcgcctttaattggggctccggctaactctgaggacacgcatttggtggacccaaagactgatccgtcggacagccagacggggttagcggagcaatgcgcaggaataaggaagcgacctgcaaccgacgattcttctactcaaaacaaaagagccaacagaacagaagaaaatgtttcagacggttccccaaatgccggttctgtggagcagacgcccaagaagcctggcctcagaagacgtcaaacgtaaacagctcgaattaagaatatgtttccttgtttatcagatacatcactgcttgatgaagcaaggaagatatacatgaaaattttaaaaatacatatcgctgacttcatggaatggacatcctgtataagcactgaaaaacaacaacacaataacactaaaattttaggcactcttaaatgatctgcctctaaaagcgttggatgtagcattatgcaattaggtttttccttatttgcttcattgtactacctgtgtatatagtttttaccttttatgtagcacataaactttggggaagggagggcagggtggggctgaggaactgacgtggagcggggtatgaagagcttgctttgatttacagcaagtagataaatatttgacttgcatgaagagaagcaattttggggaagggtttgaattgttttctttaaagatgtaatgtccctttcagagacagctgatacttcatttaaaaaaatcacaaaaatttgaacactggctaaagataattgctatttatttttacaagaagtttattctcatttgggagatctggtgatctcccaagctatctaaagtttgttagatagctgcatgtggcttttttaaaaaagcaacagaaacctatcctcactgccctccccagtctctcttaaagttggaatttaccagttaattactcagcagaatggtgatcactccaggtagtttggggcaaaaatccgaggtgcttgggagttttgaatgttaagaattgaccatctgcttttattaaatttgttgacaaaattttctcattttcttttcacttcgggctgtgtaaacacagtcaaaataattctaaatccctcgatatttttaaagatctgtaagtaacttcacattaaaaaatgaaatattttttaatttaaagcttactctgtccatttatccacaggaaagtgttatttttaaaggaaggttcatgtagagaaaagcacacttgtaggataagtgaaatggatactacatctttaaacagtatttcattgcctgtgtatggaaaaaccatttgaagtgtacctgtgtacataactctgtaaaaacactgaaaaattatactaacttatttatgttaaaagattttttttaatctagacaatatacaagccaaagtggcatgttttgtgcatttgtaaatgctgtgttgggtagaataggttttcccctcttttgttaaataatatggctatgcttaaaaggttgcatactgagccaagtataattttttgtaatgtgtgaaaaagatgccaattattgttacacattaagtaatcaataaagaaaacttccatagctattcattgagtcaaattgtaatgtgctttaccaa

SEQ ID NO: 334712 - DNA, 463 bp, Homo sapiens
taggaggctgtcctgtgtgttttagattgtttggaattatccctggcctctcacactagatgccagcagtatcctcctcccccagtgtgacaacctaaaatgtctccagacattgccaaatgttccctgtggggcgggggcaacattgcctactgttaagaactactgctctagaccaaagaacacagcacagaggaaaggaaaaaaaaatccagttaagagaatgttaggtggagatgactatagtcatcaaacttttttccccatcaagtatttccaagctaacatagtgacaaaataattcctgtactctactggtaacgttaatctagtgctcttcctttaattcttccgttttgttttcttttgcagaattaagaatatgtttccttgtttatcagatacatcactgcttgatgaagcaaggaagatatacatgaaaattttaaaaatacatatcgct

SEQ ID NO: 334713 - DNA, 443 bp, Homo sapiens
ctgggaaggagccattttcagtcacttgtaagacagcaggacctgcagactacagcacaatcaaactcagacaaaaccctgaaccagtgagaaccattaggaaggaaaggaacagaaaatgaaccaacctgagtgttaggagacttgcatctagtcctgactccggtaccaaccgaatgcatgtccctggacaggaaacctctctgagtctcgatttcctccgtggtaaaaaggagagggttaaaccacagggtcccgagggtcccttccagctgtcacattctggagcgtatgagatgaggtaggcacacaaagtggacaagatgtggctaagaaaacaagctacacatcaagctcatctgtagcataggtgcttaagaaaactttgctgctgtgtaatattagaacggaaggttggtttccagtaaaatgcattaactttg

SEQ ID NO: 334714 - DNA, 2419 bp, Homo sapiens
atcattttcttcttcgtcagcctcccttccaccgccatattgggccactaaaaaaagggggctcgtcttttcggggtgtttttctccccctcccctgtccccgcttgctcacggctctgcgactccgacgccggcaaggtttggagagcggctgggttcgcgggacccgcgggcttgcacccgcccagactcggacgggctttgccaccctctccgcttgcctggtcccctctcctctccgccctcccgctcgccagtccatttgatcagcggagactcggcggccgggccggggcttccccgcagcccctgcgcgctcctagagctcgggccgtggctcgtcggggtctgtgtcttttggctccgagggcagtcgctgggcttccgagaggggttcgggccgcgtaggggcgctttgttttgttcggttttgtttttttgagagtgcgagagaggcggtcgtgcagacccgggagaaagatgtcaaacgtgcgagtgtctaacgggagccctagcctggagcggatggacgccaggcaggcggagcaccccaagccctcggcctgcaggaacctcttcggcccggtggaccacgaagagttaacccgggacttggagaagcactgcagagacatggaagaggcgagccagcgcaagtggaatttcgattttcagaatcacaaacccctagagggcaagtacgagtggcaagaggtggagaagggcagcttgcccgagttctactacagacccccgcggccccccaaaggtgcctgcaaggtgccggcgcaggagagccaggatgtcagcgggagccgcccggcggcgcctttaattggggctccggctaactctgaggacacgcatttggtggacccaaagactgatccgtcggacagccagacggggttagcggagcaatgcgcaggaataaggaagcgacctgcaaccgacgattcttctactcaaaacaaaagagccaacagaacagaagaaaatgtttcagacggttccccaaatgccggttctgtggagcagacgcccaagaagcctggcctcagaagacgtcaaacgtaaacagctcgaattaagaatatgtttccttgtttatcagatacatcactgcttgatgaagcaaggaagatatacatgaaaattttaaaaatacatatcgctgacttcatggaatggacatcctgtataagcactgaaaaacaacaacacaataacactaaaattttaggcactcttaaatgatctgcctctaaaagcgttggatgtagcattatgcaattaggtttttccttatttgcttcattgtactacctgtgtatatagtttttaccttttatgtagcacataaactttggggaagggagggcagggtggggctgaggaactgacgtggagcggggtatgaagagcttgctttgatttacagcaagtagataaatatttgacttgcatgaagagaagcaattttggggaagggtttgaattgttttctttaaagatgtaatgtccctttcagagacagctgatacttcatttaaaaaaatcacaaaaatttgaacactggctaaagataattgctatttatttttacaagaagtttattctcatttgggagatctggtgatctcccaagctatctaaagtttgttagatagctgcatgtggcttttttaaaaaagcaacagaaacctatcctcactgccctccccagtctctcttaaagttggaatttaccagttaattactcagcagaatggtgatcactccaggtagtttggggcaaaaatccgaggtgcttgggagttttgaatgttaagaattgaccatctgcttttattaaatttgttgacaaaattttctcattttcttttcacttcgggctgtgtaaacacagtcaaaataattctaaatccctcgatatttttaaagatctgtaagtaacttcacattaaaaaatgaaatattttttaatttaaagcttactctgtccatttatccacaggaaagtgttatttttaaaggaaggttcatgtagagaaaagcacacttgtaggataagtgaaatggatactacatctttaaacagtatttcattgcctgtgtatggaaaaaccatttgaagtgtacctgtgtacataactctgtaaaaacactgaaaaattatactaacttatttatgttaaaagattttttttaatctagacaatatacaagccaaagtggcatgttttgtgcatttgtaaatgctgtgttgggtagaataggttttcccctcttttgttaaataatatggctatgcttaaaaggttgcatactgagccaagtataattttttgtaatgtgtgaaaaagatgccaattattgttacacattaagtaatcaataaagaaaacttccatagcta

SEQ ID NO: 334715 - DNA, 2725 bp, Homo sapiens
gtctttatttcagtcccggatccgcgggcgcaggcccagctcaggcccccagggatggacgtcgtggaccctgacattttcaatagagacccccgggaccactatgacctgctacagcggctgggtggcggcacgtatggggaagtctttaaggctcgagacaaggtgtcaggggacctggtggcactgaagatggtgaagatggagcctgatgatgatgtctccacccttcagaaggaaatcctcatattgaaaacttgccggcacgccaacatcgtggcctaccatgggagttatctctggttgcagaaactctggatctgcatggaattctgtggggctggttctctccaggacatctaccaagtgacaggctccctgtcagagctccagattagctatgtctgccgggaagtgctccagggactggcctatttgcactcacagaagaagatacacagggacatcaagggagctaacatcctcatcaatgatgctggggaggtcagattggctgactttggcatctcggcccagattggggctacactggccagacgcctctctttcattgggacaccctactggatggctccggaagtggcagctgtggccctgaagggaggatacaatgagctgtgtgacatctggtccctgggcatcacggccatcgaactggccgagctacagccaccgctctttgatgtgcaccctctcagagttctcttcctcatgaccaagagtggctaccagcctccccgactgaaggaaaaaggcaaatggtcggctgccttccacaacttcatcaaagtcactctgactaagagtcccaagaaacgacccagcgccaccaagatgctcagtcatcaactggtatcccagcctgggctgaatcgaggcctgatcctggatcttcttgacaaactgaagaatcccgggaaaggaccctccattggggacattgaggatgaggagcccgagctaccccctgctatccctcggcggatcagatccacccaccgctccagctctctggggatcccagatgcagactgctgtcggcggcacatggagttcaggaagctccgaggaatggagaccagacccccagccaacaccgctcgcctacagcctcctcgagacctcaggagcagcagccccaggaagcaactgtcagagtcgtctgacgatgactatgacgacgtggacatccccacccctgcagaggacacacctcctccacttccccccaagcccaagttccgttctccatcagacgagggtcctgggagcatgggggatgatgggcagctgagcccgggggtgctggtccggtgtgccagtgggcccccaccaaacagcccccgtcctgggcctcccccatccaccagcagcccccacctcaccgcccattcagaaccctcactctggaacccaccctcccgggagcttgacaagcccccacttctgccccccaagaaggaaaagatgaagagaaagggatgtgcccttctcgtaaagttgttcaatggctgccccctccggatccacagcacggccgcctggacacatccctccaccaaggaccagcacctgctcctgggggcagaggaaggcatcttcatcctgaaccggaatgaccaggaggccacgctggaaatgctctttcctagccggactacgtgggtgtactccatcaacaacgttctcatgtctctctcaggaaagaccccccacctgtattctcatagcatccttggcctgctggaacggaaagagaccagagcaggaaaccccatcgctcacattagcccccaccgcctactggcaaggaagaacatggtttccaccaagatccaggacaccaaaggctgccgggcgtgctgtgtggcggagggtgcgagctctgggggcccgttcctgtgcggtgcattggagacgtccgttgtcctgcttcagtggtaccagcccatgaacaaattcctgcttgtccggcaggtgctgttcccactgccgacgcctctgtccgtgttcgcgctgctgaccgggccaggctctgagctgcccgctgtgtgcatcggcgtgagccccgggcggccggggaagtcggtgctcttccacacggtgcgctttggcgcgctctcttgctggctgggcgagatgagcaccgagcacaggggacccgtgcaggtgacccaggtagaggaagatatggtgatggtgttgatggatggctctgtgaagctggtgaccccggaggggtccccagtccggggacttcgcacacctgagatccccatgaccgaagcggtggaggccgtggctatggttggaggtcagcttcaggccttctggaagcatggagtgcaggtgtgggctctaggctcggatcagctgctacaggagctgagagaccctaccctcactttccgtctgcttggctcccccaggctggagtgcagtggcacgatctcgcctcactgcaacctcctcctcccaggttcaagcaattctcctgcctcagcctcccgagtagctgggattacaggcctgtagtggtggagacacgcccagtggatgatcctactgctcccagcaacctctacatccaggaatgagtccctaggggggtgtcaggaactagtccttgcaccccctcccccatagacacactagtggtcatggcatgtcctcatctcccaataaacatgactttagcctctgc

SEQ ID NO: 334716 - DNA, 1028 bp, Homo sapiens
  misc_feature (926)..(926): n is a, c, g, or t
  misc_feature (955)..(955): n is a, c, g, or t
  misc_feature (959)..(959): n is a, c, g, or t
  misc_feature (962)..(962): n is a, c, g, or t
  misc_feature (997)..(997): n is a, c, g, or t
aaggcgggtgcagggcttctggggacggagggaggtgccagaagttgagccctgaggccctgctggcccctgggcgcaggcccagctcaggcccccagggatggacgtcgtggaccctgacattttcaatagagacccccgggaccactatgacctgctacagcggctgggtggcggcacgtatggggaagtctttaaggctcgagacaaggtgtcaggggacctggtggcactgaagatggtgaagatggagcctgatgatgatgtctccacccttcagaaggaaatcctcatattgaaaacttgccggcacgccaacatcgtggcctaccatgggagttatctctggttgcagaaactctggatctgcatggaattctgtggggctggttctctccaggacatctaccaagtgacaggctccctgtcagagctccagattagctatgtctgccgggaagtgctccagggactggcctatttgcactcacagaagaagatacacagggacatcaagggagctaacatcctcatcaatgatgctggggaggtcagattggctgactttggcatctcggcccagattggggctacactggccagacgcctctctttcattgggacaccctactggatggctccggaagtggcagctgtggccctgaagggaggatacaatgagctgtgtgacatctggtccctgggcatcacggccatcgaactggccgagctacagccaccgctctttgatgtgcaccctctcagagttctcttcctcatgaccaagagtggctaccagcctccccgactgaaggaaaaaggcaaatggtcggctgccttccacaacttcatcaaagtcactctgactaagagtcccaagaaacgacccagcgccaccaagatgctcagtcatcactggtatccanctgggctgatcgaggctgatctggatttnttgnaantgaaatccgggaaagacctcattgggaattgagangagagccgactaccctgtatctcgggataat

SEQ ID NO: 334717 - DNA, 594 bp, Homo sapiens
ctggccacagcccacaaggccatgacatctccagccaagtcccagcctttctcccacctcaaatcctttgcacaggctgttctccccagccagaacactcttccttgccctttcaccaagttccctcctaaccccccttcaggctgcaccatccattctctggggagtctgggctgacctcctgggttaggtttccctgccagacatgccatgcttttttgcactcatgtaattcactgattcatgttgatctccttctctagaatgcaagcttcctaagggcagggaccgtgtctgcccattcactgctatagttcagcatggggctggcacagtctctattaactactttgtgaattaatgaatcaatgaacatatgaatgaataaatgaactgacttatctcttccttccacaggcctgtagtggtggagacacgcccagtggatgatcctactgctcccagcaacctctacatccaggaatgagtccctaggggggtgtcaggaactagtccttgcaccccctcccccatagacacactagtggtcatggcatgtcctcatctcccaataaacatgactttagcctctgc

SEQ ID NO: 334718 - DNA, 2642 bp, Homo sapiens
aaggcgggtgcagggcttctggggacggagggaggtgccagaagttgagccctgaggccctgctggcccctgggcgcaggcccagctcaggcccccagggatggacgtcgtggaccctgacattttcaatagagacccccgggaccactatgacctgctacagcggctgggtggcggcacgtatggggaagtctttaaggctcgagacaaggtgtcaggggacctggtggcactgaagatggtgaagatggagcctgatgatgatgtctccacccttcagaaggaaatcctcatattgaaaacttgccggcacgccaacatcgtggcctaccatgggagttatctctggttgcagaaactctggatctgcatggaattctgtggggctggttctctccaggacatctaccaagtgacaggctccctgtcagagctccagattagctatgtctgccgggaagtgctccagggactggcctatttgcactcacagaagaagatacacagggacatcaagggagctaacatcctcatcaatgatgctggggaggtcagattggctgactttggcatctcggcccagattggggctacactggccagacgcctctctttcattgggacaccctactggatggctccggaagtggcagctgtggccctgaagggaggatacaatgagctgtgtgacatctggtccctgggcatcacggccatcgaactggccgagctacagccaccgctctttgatgtgcaccctctcagagttctcttcctcatgaccaagagtggctaccagcctccccgactgaaggaaaaaggcaaatggtcggctgccttccacaacttcatcaaagtcactctgactaagagtcccaagaaacgacccagcgccaccaagatgctcagtcatcaactggtatcccagcctgggctgaatcgaggcctgatcctggatcttcttgacaaactgaagaatcccgggaaaggaccctccattggggacattgaggatgaggagcccgaggaatggagaccagacccccagccaacaccgctcgcctacagcctcctcgagacctcaggagcagcagccccaggtcagggaccccagggaggatggggagggggctggaatgtggacaaggcccccaaggctcatacctgtcacccttcaggaagcaactgtcagagtcgtctgacgatgactatgacgacgtggacatccccacccctgcagaggacacacctcctccacttccccccaagcccaagttccgttctccatcagacgagggtcctgggagcatgggggatgatgggcagctgagcccgggggtgctggtccggtgtgccagtgggcccccaccaaacagcccccgtcctgggcctcccccatccaccagcagcccccacctcaccgcccattcagaaccctcactctggaacccaccctcccgggagcttgacaagcccccacttctgccccccaagaaggaaaagatgaagagaaagggatgtgcccttctcgtaaagttgttcaatggctgccccctccggatccacagcacggccgcctggacacatccctccaccaaggaccagcacctgctcctgggggcagaggaaggcatcttcatcctgaaccggaatgaccaggaggccacgctggaaatgctctttcctagccggactacgtgggtgtactccatcaacaacgttctcatgtctctctcaggaaagaccccccacctgtattctcatagcatccttggcctgctggaacggaaagagaccagagcaggaaaccccatcgctcacattagcccccaccgcctactggcaaggaagaacatggtttccaccaagatccaggacaccaaaggctgccgggcgtgctgtgtggcggagggtgcgagctctgggggcccgttcctgtgcggtgcattggagacgtccgttgtcctgcttcagtggtaccagcccatgaacaaattcctgcttgtccggcaggtgctgttcccactgccgacgcctctgtccgtgttcgcgctgctgaccgggccaggctctgagctgcccgctgtgtgcatcggcgtgagccccgggcggccggggaagtcggtgctcttccacacggtgcgctttggcgcgctctcttgctggctgggcgagatgagcaccgagcacaggggacccgtgcaggtgacccaggtagaggaagatatggtgatggtgttgatggatggctctgtgaagctggtgaccccggaggggtccccagtccggggacttcgcacacctgagatccccatgaccgaagcggtggaggccgtggctatggttggaggtcagcttcaggccttctggaagcatggagtgcaggtgtgggctctaggctcggatcagctgctacaggagctgagagaccctaccctcactttccgtctgcttggctcccccaggcctgtagtggtggagacacgcccagtggatgatcctactgctcccagcaacctctacatccaggaatgagtccctaggggggtgtcaggaactagtccttgcaccccctcccccatagacacactagtggtcatggcatgtcctcatctcccaataaacatgactttagcctctgc

SEQ ID NO: 334719 - DNA, 2647 bp, Homo sapiens
caggttccctggctcccatccaatgcctggcctggccggggtgacctttgcagtgacaggctccctgtcagagctccagattagctatgtctgccgggaagtgctccaggtaaggagaggcctggggattctggggatgggaggggagggtggccccactccagcccccaaacactcactgtccccttgtccacccttctccccagggactggcctatttgcactcacagaagaagatacacagggacatcaaggtggtctgggggtgtaggggtgctgttggggggtggggcccaggagatgggagtggcatttcaggggctcagggatcagggtagtttgagctggcggagtgggctagcactgggctggggagagtctctgcagcctcccatatcccctctcattcccagggagctaacatcctcatcaatgatgctggggaggtcagattggctgactttggcatctcggcccagattggggctacactggccagacgcctctctttcattgggacaccctactggatggctccggaagtggcagctgtggccctgaagggaggatacaatgagctgtgtgacatctggtccctgggcatcacggccatcgaactggccgagctacagccaccgctctttgatgtgcaccctctcagagttctcttcctcatgaccaagagtggctaccagcctccccgactgaaggaaaaaggcaaatggtcggctgccttccacaacttcatcaaagtcactctgactaagagtcccaagaaacgacccagcgccaccaagatgctcagtcatcaactggtatcccagcctgggctgaatcgaggcctgatcctggatcttcttgacaaactgaagaatcccgggaaaggaccctccattggggacattgaggatgaggagcccgagctaccccctgctatccctcggcggatcagatccacccaccgctccagctctctggggatcccagatgcagactgctgtcggcggcacatggagttcaggaagctccgaggaatggagaccagacccccagccaacaccgctcgcctacagcctcctcgagacctcaggagcagcagccccaggtcagggaccccagggaggatggggagggggctggaatgtggacaaggcccccaaggctcatacctgtcacccttcaggaagcaactgtcagagtcgtctgacgatgactatgacgacgtggacatccccacccctgcagaggacacacctcctccacttccccccaagcccaagttccgttctccatcagacgagggtcctgggagcatgggggatgatgggcagctgagcccgggggtgctggtccggtgtgccagtgggcccccaccaaacagcccccgtcctgggcctcccccatccaccagcagcccccacctcaccgcccattcagaaccctcactctggaacccaccctcccgggagcttgacaagcccccacttctgccccccaagaaggaaaagatgaagagaaagggatgtgcccttctcgtaaagttgttcaatggctgccccctccggatccacagcacggccgcctggacacatccctccaccaaggaccagcacctgctcctgggggcagaggaaggcatcttcatcctgaaccggaatgaccaggaggccacgctggaaatgctctttcctagccggactacgtgggtgtactccatcaacaacgttctcatgtctctctcaggaaagaccccccacctgtattctcatagcatccttggcctgctggaacggaaagagaccagagcaggaaaccccatcgctcacattagcccccaccgcctactggcaaggaagaacatggtttccaccaagatccaggacaccaaaggctgccgggcgtgctgtgtggcggagggtgcgagctctgggggcccgttcctgtgcggtgcattggagacgtccgttgtcctgcttcagtggtaccagcccatgaacaaattcctgcttgtccggcaggtgctgttcccactgccgacgcctctgtccgtgttcgcgctgctgaccgggccaggctctgagctgcccgctgtgtgcatcggcgtgagccccgggcggccggggaagtcggtgctcttccacacggtgcgctttggcgcgctctcttgctggctgggcgagatgagcaccgagcacaggggacccgtgcaggtgacccaggtagaggaagatatggtgatggtgttgatggatggctctgtgaagctggtgaccccggaggggtccccagtccggggacttcgcacacctgagatccccatgaccgaagcggtggaggccgtggctatggttggaggtcagcttcaggccttctggaagcatggagtgcaggtgtgggctctaggctcggatcagctgctacaggagctgagagaccctaccctcactttccgtctgcttggctcccccaggcctgtagtggtggagacacgcccagtggatgatcctactgctcccagcaacctctacatccaggaatgagtccctaggggggtgtcaggaactagtccttgcaccccctcccccatagacacactagtggtcatggcatgtcctcatctcccaataaacatgactttagcctctgc

SEQ ID NO: 334720 - DNA, 2835 bp, Homo sapiens
aaggcgggtgcagggcttctggggacggagggaggtgccagaagttgagccctgaggccctgctggcccctgggcgcaggcccagctcaggcccccagggatggacgtcgtggaccctgacattttcaatagagacccccgggaccactatgacctgctacagcggctgggtggcggcacgtatggggaagtctttaaggctcgagacaaggtgtcaggggacctggtggcactgaagatggtgaagatggagcctgatgatgatgtctccacccttcagaaggaaatcctcatattgaaaacttgccggcacgccaacatcgtggcctaccatgggagttatctctggttgcagaaactctggatctgcatggaattctgtggggctggttctctccaggacatctaccaagtgacaggctccctgtcagagctccagattagctatgtctgccgggaagtgctccagggactggcctatttgcactcacagaagaagatacacagggacatcaagggagctaacatcctcatcaatgatgctggggaggtcagattggctgactttggcatctcggcccagattggggctacactggccagacgcctctctttcattgggacaccctactggatggctccggaagtggcagctgtggccctgaagggaggatacaatgagctgtgtgacatctggtccctgggcatcacggccatcgaactggccgagctacagccaccgctctttgatgtgcaccctctcagagttctcttcctcatgaccaagagtggctaccagcctccccgactgaaggaaaaaggcaaatggtcggctgccttccacaacttcatcaaagtcactctgactaagagtcccaagaaacgacccagcgccaccaagatgctcagtcatcaactggtatcccagcctgggctgaatcgaggcctgatcctggatcttcttgacaaactgaagaatcccgggaaaggaccctccattggggacattgaggatgaggagcccgagctaccccctgctatccctcggcggatcagatccacccaccgctccagctctctggggatcccagatgcagactgctgtcggcggcacatggagttcaggaagctccgaggaatggagaccagacccccagccaacaccgctcgcctacagcctcctcgagacctcaggagcagcagccccaggtcagggaccccagggaggatggggagggggctggaatgtggacaaggcccccaaggctcatacctgtcacccttcaggaagcaactgtcagagtcgtctgacgatgactatgacgacgtggacatccccacccctgcagaggacacacctcctccacttccccccaagcccaagttccgttctccatcagacgagggtcctgggagcatgggggatgatgggcagctgagcccgggggtgctggtccggtgtgccagtgggcccccaccaaacagcccccgtcctgggcctcccccatccaccagcagcccccacctcaccgcccattcagaaccctcactctggaacccaccctcccgggagcttgacaagcccccacttctgccccccaagaaggaaaagatgaagagaaagggatgtgcccttctcgtaaagttgttcaatggctgccccctccggatccacagcacggccgcctggacacatccctccaccaaggaccagcacctgctcctgggggcagaggaaggcatcttcatcctgaaccggaatgaccaggaggccacgctggaaatgctctttcctagccggactacgtgggtgtactccatcaacaacgttctcatgtctctctcaggaaagaccccccacctgtattctcatagcatccttggcctgctggaacggaaagagaccagagcaggaaaccccatcgctcacattagcccccaccgcctactggcaaggaagaacatggtttccaccaagatccaggacaccaaaggctgccgggcgtgctgtgtggcggagggtgcgagctctgggggcccgttcctgtgcggtgcattggagacgtccgttgtcctgcttcagtggtaccagcccatgaacaaattcctgcttgtccggcaggtgctgttcccactgccgacgcctctgtccgtgttcgcgctgctgaccgggccaggctctgagctgcccgctgtgtgcatcggcgtgagccccgggcggccggggaagtcggtgctcttccacacggtgcgctttggcgcgctctcttgctggctgggcgagatgagcaccgagcacaggggacccgtgcaggtgacccaggtagaggaagatatggtgatggtgttgatggatggctctgtgaagctggtgaccccggaggggtccccagtccggggacttcgcacacctgagatccccatgaccgaagcggtggaggccgtgggtctgtgcagggacgggagagcccaggatcaggggtggaaactcaagtgatccccaagggtaacgggcattgctttctccccagctatggttggaggtcagcttcaggccttctggaagcatggagtgcaggtgtgggctctaggctcggatcagctgctacaggagctgagagaccctaccctcactttccgtctgcttggctcccccaggcctgtagtggtggagacacgcccagtggatgatcctactgctcccagcaacctctacatccaggaatgagtccctaggggggtgtcaggaactagtccttgcaccccctcccccatagacacactagtggtcatggcatgtcctcatctcccaataaacatgactttagcctctgc

SEQ ID NO: 334721 - DNA, 278 bp, Homo sapiens
tggaggtatcttccaggcactgagacacacactttttttccctagctgctacaggagctgagagaccctaccctcactttccgtctgcttggctcccccaggcctgtagtggtggagacacgcccagtggatgatcctactgctcccagcaacctctacatccaggaatgagtccctaggggggtgtcaggaactagtccttgcaccccctcccccatagacacactagtggtcatggcatgtcctcatctcccaataaacatgactttagcctctgc

SEQ ID NO: 334722 - DNA, 465 bp, Homo sapiens
ccccacccctgcagaggacacacctcctccacttccccccaaggtaaggccctgggccagagctgggaggctggggcctcagggccactgggggccaggaggccaggtccttagatgctgggatactgggctctccagggcagggaattggggagaccaggatgatggctacattgggatctggaagtggcatccctcaacctcagggtcggattcaaaatatttagcctcttagacactggtcagtagctggtcctaggaagcccctgctatatatccagcattaacccattagtttctgaagtgtgttgatgtccaggctggggatgtcaggggaaggctggagggggcacaagatgttgtcgggggggtgggtcagagccacagctgttagttctggtggaggcagggacttgagttgcaaaagggtgccctctctgagatcatctgatgtatttccccacg

SEQ ID NO: 334723 - DNA, 2751 bp, Homo sapiens
aaggcgggtgcagggcttctggggacggagggaggtgccagaagttgagccctgaggccctgctggcccctgggcgcaggcccagctcaggcccccagggatggacgtcgtggaccctgacattttcaatagagacccccgggaccactatgacctgctacagcggctgggtggcggcacgtatggggaagtctttaaggctcgagacaaggtgtcaggggacctggtggcactgaagatggtgaagatggagcctgatgatgatgtctccacccttcagaaggaaatcctcatattgaaaacttgccggcacgccaacatcgtggcctaccatgggagttatctctggttgcagaaactctggatctgcatggaattctgtggggctggttctctccaggacatctaccaagtgacaggctccctgtcagagctccagattagctatgtctgccgggaagtgctccagggactggcctatttgcactcacagaagaagatacacagggacatcaagggagctaacatcctcatcaatgatgctggggaggtcagattggctgactttggcatctcggcccagattggggctacactggccagacgcctctctttcattgggacaccctactggatggctccggaagtggcagctgtggccctgaagggaggatacaatgagctgtgtgacatctggtccctgggcatcacggccatcgaactggccgagctacagccaccgctctttgatgtgcaccctctcagagttctcttcctcatgaccaagagtggctaccagcctccccgactgaaggaaaaaggcaaatggtcggctgccttccacaacttcatcaaagtcactctgactaagagtcccaagaaacgacccagcgccaccaagatgctcagtcatcaactggtatcccagcctgggctgaatcgaggcctgatcctggatcttcttgacaaactgaagaatcccgggaaaggaccctccattggggacattgaggatgaggagcccgagctaccccctgctatccctcggcggatcagatccacccaccgctccagctctctggggatcccagatgcagactgctgtcggcggcacatggagttcaggaagctccgaggaatggagaccagacccccagccaacaccgctcgcctacagcctcctcgagacctcaggagcagcagccccaggtcagggaccccagggaggatggggagggggctggaatgtggacaaggcccccaaggctcatacctgtcacccttcaggaagcaactgtcagagtcgtctgacgatgactatgacgacgtggacatccccacccctgcagaggacacacctcctccacttccccccaagcccaagttccgttctccatcagacgagggtcctgggagcatgggggatgatgggcagctgagcccgggggtgctggtccggtgtgccagtgggcccccaccaaacagcccccgtcctgggcctcccccatccaccagcagcccccacctcaccgcccattcagaaccctcactctggaacccaccctcccgggagcttgacaagcccccacttctgccccccaagaaggaaaagatgaagagaaagggatgtgcccttctcgtaaagttgttcaatggctgccccctccggatccacagcacggccgcctggacacatccctccaccaaggaccagcacctgctcctgggggcagaggaaggcatcttcatcctgaaccggaatgaccaggaggccacgctggaaatgctctttcctagccggactacgtgggtgtactccatcaacaacgttctcatgtctctctcaggaaagaccccccacctgtattctcatagcatccttggcctgctggaacggaaagagaccagagcaggaaaccccatcgctcacattagcccccaccgcctactggcaaggaagaacatggtttccaccaagatccaggacaccaaaggctgccgggcgtgctgtgtggcggagggtgcgagctctgggggcccgttcctgtgcggtgcattggagacgtccgttgtcctgcttcagtggtaccagcccatgaacaaattcctgcttgtccggcaggtgctgttcccactgccgacgcctctgtccgtgttcgcgctgctgaccgggccaggctctgagctgcccgctgtgtgcatcggcgtgagccccgggcggccggggaagtcggtgctcttccacacggtgcgctttggcgcgctctcttgctggctgggcgagatgagcaccgagcacaggggacccgtgcaggtgacccaggtagaggaagatatggtgatggtgttgatggatggctctgtgaagctggtgaccccggaggggtccccagtccggggacttcgcacacctgagatccccatgaccgaagcggtggaggccgtggctatggttggaggtcagcttcaggccttctggaagcatggagtgcaggtgtgggctctaggctcggatcagctgctacaggagctgagagaccctaccctcactttccgtctgcttggctcccccaggcctgtagtggtggagacacgcccagtggatgatcctactgctcccagcaacctctacatccaggaatgagtccctaggggggtgtcaggaactagtccttgcaccccctcccccatagacacactagtggtcatggcatgtcctcatctcccaataaacatgactttagcctctgc

SEQ ID NO: 334724 - DNA, 2799 bp, Homo sapiens
aaggcgggtgcagggcttctggggacggagggaggtgccagaagttgagccctgaggccctgctggcccctgggcgcaggcccagctcaggcccccagggatggacgtcgtggaccctgacattttcaatagagacccccgggaccactatgacctgctacagcggctgggtggcggcacgtatggggaagtctttaaggctcgagacaaggtgtcaggggacctggtggcactgaagatggtgaagatggagcctgatgatgatgtctccacccttcagaaggaaatcctcatattgaaaacttgccggcacgccaacatcgtggcctaccatgggagttatctctggttgcagaaactctggatctgcatggaattctgtggggctggttctctccaggacatctaccaagtgacaggctccctgtcagagctccagattagctatgtctgccgggaagtgctccagggactggcctatttgcactcacagaagaagatacacagggacatcaagggagctaacatcctcatcaatgatgctggggaggtcagattggctgactttggcatctcggcccagattggggctacactggccagacgcctctctttcattgggacaccctactggatggctccggaagtggcagctgtggccctgaagggaggatacaatgagctgtgtgacatctggtccctgggcatcacggccatcgaactggccgagctacagccaccgctctttgatgtgcaccctctcagagttctcttcctcatgaccaagagtggctaccagcctccccgactgaaggaaaaaggcaaatggtcggctgccttccacaacttcatcaaagtcactctgactaagagtcccaagaaacgacccagcgccaccaagatgctcagtcatcaactggtatcccagcctgggctgaatcgaggcctgatcctggatcttcttgacaaactgaagaatcccgggaaaggaccctccattggggacattgaggatgaggagcccgagctaccccctgctatccctcggcggatcagatccacccaccgctccagctctctggggatcccagatgcagactgctgtcggcggcacatggagttcaggaagctccgaggaatggagaccagacccccagccaacaccgctcgcctacagcctcctcgagacctcaggagcagcagccccaggtcagggaccccagggaggatggggagggggctggaatgtggacaaggcccccaaggctcatacctgtcacccttcaggaagcaactgtcagagtcgtctgacgatgactatgacgacgtggacatccccacccctgcagaggacacacctcctccacttccccccaagcccaagttccgttctccatcagacgagggtcctgggagcatgggggatgatgggcagctgagcccgggggtgctggtccggtgtgccagtgggcccccaccaaacagcccccgtcctgggcctcccccatccaccagcagcccccacctcaccgcccattcagaaccctcactctggaacccaccctcccgggagcttgacaagcccccacttctgccccccaagaaggaaaagatgaagagaaagggatgtgcccttctcgtaaagttgttcaatggctgccccctccggatccacagcacggccgcctggacacatccctccaccaaggaccagcacctgctcctgggggcagaggaaggcatcttcatcctgaaccggaatgaccaggaggccacgctggaaatgctctttcctagccggactacgtgggtgtactccatcaacaacgttctcatgtctctctcaggaaagaccccccacctgtattctcatagcatccttggcctgctggaacggaaagagaccagagcaggaaaccccatcgctcacattagcccccaccgcctactggcaaggaagaacatggtttccaccaagatccaggacaccaaaggctgccgggcgtgctgtgtggcggagggtgcgagctctgggggcccgttcctgtgcggtgcattggagacgtccgttgtcctgcttcagtggtaccagcccatgaacaaattcctgcttgtccggcaggtgctgttcccactgccgacgcctctgtccgtgttcgcgctgctgaccgggccaggctctgagctgcccgctgtgtgcatcggcgtgagccccgggcggccggggaagtcggtgctcttccacacggtgcgctttggcgcgctctcttgctggctgggcgagatgagcaccgagcacaggggacccgtgcaggtgacccaggtagaggaagatatggtgatggtgttgatggatggctctgtgaagctggtgaccccggaggggtccccagtccggggacttcgcacacctgagatccccatgaccgaagcggtggaggccgtggctatggttggaggtcagcttcaggccttctggaagcatggagtgcaggtgtgggctctaggctcggatcagctgctacaggagctgagagaccctaccctcactttccgtctgcttggctcccccaggttcaagtgattctcatgcttcagcctcccaagtagctgggtttacaggcctgtagtggtggagacacgcccagtggatgatcctactgctcccagcaacctctacatccaggaatgagtccctaggggggtgtcaggaactagtccttgcaccccctcccccatagacacactagtggtcatggcatgtcctcatctcccaataaacatgactttagcctctgc

SEQ ID NO: 334725 - DNA, 401 bp, Homo sapiens
gtctttatttcagtcccggatccgcgggcgcaggcccagctcaggcccccagggatggacgtcgtggaccctgacattttcaatagagacccccgggaccactatgacctgctacagcggctgggtggcggcacgtatggggaagtctttaaggctcgagacaaggtgtcaggggacctggtggcactgaagatggtgaagatggagcctgatgatgatgtctccacccttcagaaggaaatcctcatattgaaaacttgccggcacgccaacatcgtggcctaccatgggagttatctctggttgcagaaactctggatctgcatggaattctgtggggctggttctctccaggacatctaccaaggttagagaaaggacaacgggacccaagcacccct

SEQ ID NO: 334726 - DNA, 338 bp, Homo sapiens
ttatgtaacgatttactaacagtaagggtgtatatattagataaaaattatattaattggatataagttctataaaatttatgaagcatcctgtcttttatttcacaagttttaaagtagatcatttatcaaagctgagtaaaattgaagtatacacctttttctttacacagagcccttgataagtatagaaattgaaaacagtattctagaaatgtaggaattcatataacccccaaaactcatgataacattgagataatcactttgtaagtgtatcttttttttctcttagcttaatatttttgagagtcttccatgttgtattatgtatcaag

SEQ ID NO: 334727 - DNA, 239 bp, Homo sapiens
tttctggaaggattaaactactagatgaaagttatctttagcgaatagggctgtggggaaggaatgagacaaggtgcaccttttatcataaccctctttgccctacatgacttttttactgtgtgcatcccgtagtccttcttattctctgtctcctccttttctcccaccatcactatcatcgtcattctctcagcaagccagtgcattttctgaagaactctagggacaaggtttta

SEQ ID NO: 334728 - DNA, 620 bp, Homo sapiens
tgccctagggctagtggaagacttaagatggcggcgtttgcacggagtgcaatcactgcgtccttacgggggttgcaaggcgtccgaagtatgagtccactaacaaaagtccagaaactcgccagttaatagtattgtgtctcttcaaaatatcggagaataatttctttctcgctgatcgcctaacttctactgacgaagcttggaagttgcagaagatggagttcgctcttgttgcccaggctggaatgcaatggcatgaccttggctcactgcaacctctgcctccccagttcaagtggttctcctgcctcagcctcccgagtagctgagattacagaaatacaaaaaaaattctaaaacttgtatggaactacaaaagacattaaataatcaaagtaatcttgagcaacaaggacacagctggaggcatcactctacctgattttgtaatccattatcaaaaaactgtggtaccagcataaaaacagattcactgaccagtggaacaggaaagcccagacataactcatacatttccatccaattgatttttgacaaaagtggcacacagaatggggagaggacaaataaataaataaattgttttgagatatctg

SEQ ID NO: 334729 - DNA, 626 bp, Homo sapiens
tgccctagggctagtggaagacttaagatggcggcgtttgcacggagtgcaatcactgcgtccttacgggggttgcaaggcgtccgaagtatgagtccactaacaaaagtccagaaactcgccagttaatagtattgtggtgagtgatgagcctcacgttggctagagaagtggccgttagcgaggctacacactttgggatcgcgtggcctgagtcgggggagtaaccggcctgtattccatttttctctctccagtctcttcaaaatatcggagaataatttctttctcgctgatcgcctaacttctactgacgaagcttggaagttgcagaaggtagctcctaggagggatatatgggtcgttctttcctttttccttatttaaatgggtttttattgacaccatgtcgcgccaaaatggattccatctcctcagagctttcctaggaacagcctaacctcttgggcctaactttattttttttttgttctgcctttcatgtccagacttattagttttaattaatttgtttgtaacgtattcattatgcactagattaaacaatttttttctgtgcccactataccccaaatgtggagttttgggcaaaaacttaacatttg

SEQ ID NO: 334730 - DNA, 1056 bp, Homo sapiens
tgccctagggctagtggaagacttaagatggcggcgtttgcacggagtgcaatcactgcgtccttacgggggttgcaaggcgtccgaagtatgagtccactaacaaaagtccagaaactcgccagttaatagtattgtgtctcttcaaaatatcggagaataatttctttctcgctgatcgcctaacttctactgacgaagcttggaagttgcagaaggttggagtgcagtggcgcgatctcggctgactgcaacctccacctcctggattcaagctattctcctgcctcagcctgccgagtagctgggattacaggcatgtgccaccgcacccagctaattttgtattttttagtagagatggggtttctccatgttggtcaggctggtcttgaactcctgacctcaggtgatccgcccacctcagcctcccaaagtgctgggattacaggcgtgagccaccgcgcccggccagaacattagttttaaacttcctaacccttgggagaaggcaaaacacttgatgaaatctacataaagactaaaacattttaccaattttgcattgtttgtttgaaattgcattgacgactggtatgttaattttgtatatatttttatgagaacaatgttggacatcatttaatttttttaggtttttttaattgattatggattggttcatttgcaggaactgactattagtaatcaaggatacaaattgttaagagaatatgttacagagaaaaacttgacaagctagacttagatttttgtcgttaaagataatttgtgggatatgatttttataaggagttgcattaaatagaatgtcttacacagatttaagaggttaataattataaaattaagatgagttcttataaaatattcttgaggtataataaaattatacttgtggagtatatctttgaataacatttaaaagcaaactaatactttccaggtaaaataattatcaacataactttttaaaaataattcatagtacttcaggttatttctatgtttgacacattaacttaaaagaaaaaa

SEQ ID NO: 334731 - DNA, 823 bp, Homo sapiens
tgccctagggctagtggaagacttaagatggcggcgtttgcacggagtgcaatcactgcgtccttacgggggttgcaaggcgtccgaagtatgagtccactaacaaaagtccagaaactcgccagttaatagtattgtgtctcttcaaaatatcggagaataatttctttctcgctgatcgcctaacttctactgacgaagcttggaagttgcagaagatggagttcgctcttgttgcccaggctggaatgcaatggcatgaccttggctcactgcaacctctgcctccccagttcaagtggttctcctgcctcagcctcccgagtagctgagattacagaaaccacaataaaggctctcgcccacattcttccctcaccctctgcctcctgactgacactggtgctttcctgggtgaaccctgacggtgtggcatgcctcttcttgtgatctattgttcactgttggcatatagaaacactactgatgcctcagagatgaccatgatggtgttctggtgtcaggagaatagcaatgcctgggagtccaccaccaccataatctcctgtgatcccacggagctgcagtcagaagggagcaatgacaagaaataagtgctgagcagttgtcatatggtgctggaagacatgctacttttccctgagggcggaagacagcctgatgacggtggtacaatcaatgacatctctgtgctgggagtgacctgcttgggggcccaggctgatcatttcacacagacacccctggatcctggaagccaagtcctggtctgggtagactgggagtggaggtttgaccacat

SEQ ID NO: 334732 - DNA, 1047 bp, Homo sapiens
tgccctagggctagtggaagacttaagatggcggcgtttgcacggagtgcaatcactgcgtccttacgggggttgcaaggcgtccgaagtatgagtccactaacaaaagtccagaaactcgccagttaatagtattgtgtctcttcaaaatatcggagaataatttctttctcgctgatcgcctaacttctactgacgaagcttggaagttgcagaagatggagttcgctcttgttgcccaggctggaatgcaatggcatgaccttggctcactgcaacctctgcctccccagttcaagtggttctcctgcctcagcctcccgagtagctgagattacaggtactggctcctgtatcacccagctctggagttgaaagagctcttcattcctgagtctcctgtaccactgagaatagtccagcctgggtaacagagcaagactctgtttcaaaaaaaaaaaaaaaaaagggaagagtcaccacaacttctagtgttagggccagttacaccaaaaatttacaaaaatgtggcttggcgaaatttttgacagcgcacctaatcaggggggagacataaccctggctcagggcttcaacaagagtggctcatggtaaacaacaagagtcagacgcatccgtaaactgtggactcccccaagatctcccaatggcaaattctctacgtataatagatcacacgaggggcacttctgggccacgacacttatccaggctgggatactaccatttataattcgaaacgggtcacgagcttgcacaaataatacaaactaggcaactcatatcctacaacaagcaactaaggggcgcaaaaggagacttacaattaaccaaaattcacccaagaaaatcaccctaaacaaacgattgacacagtcaaccgatactagtgacggtctgggtcacaaagacaatacaagaaaacacgcgagcagacaataacagagcagagcagcagcgaacagagagtcagaaacagcacaaagcgcacaaacagtactacggccaccgctgtgttccacgggg

SEQ ID NO: 334733 - DNA, 998 bp, Homo sapiens
tgccctagggctagtggaagacttaagatggcggcgtttgcacggagtgcaatcactgcgtccttacgggggttgcaaggcgtccgaagtatgagtccactaacaaaagtccagaaactcgccagttaatagtattgtgtctcttcaaaatatcggagaataatttctttctcgctgatcgcctaacttctactgacgaagcttggaagttgcagaagatggagttcgctcttgttgcccaggctggaatgcaatggcatgaccttggctcactgcaacctctgcctccccagttcaagtggttctcctgcctcagcctcccgagtagctgagattacaggtatgcgctaccacgcccggctaattttgtatttttagtagagacggggtttctccatgttggtcagactggtcttgtaggagaaatagacttcactaaaatattacagccaattagtaaaaataagacagtaaatagtaacaccttgtcctggagtgatagtagccagtattgctaccatatattactgacaatgtttaattttcaacaacaaaaataattgagagataaagagaagtaagaaaacgtgaccttatggggaagaagactggcaaaacatctcaactttgaaggcataagatgtgttactaagcagacaaatatttcaaattggccattataaatatcttaaaagaactagaggacaccatacctcaggaggcaatgatataattacaataattttgcaactagagaatataaataaataggtaagaattatagaaaagaaccatatggaaatctggagttgtaaagtataataacagaaattacaattcattagagaggtttaatactagattttaactggtagaataaacaatcattgaatttgaagatagattgatagaaatcacccagtttaaaaaatacagaataaagaagtaagtaaaatgcagtttcagagaaatggcagaagccattgagaataccaaca

SEQ ID NO: 334734 - DNA, 921 bp, Homo sapiens
tgccctagggctagtggaagacttaagatggcggcgtttgcacggagtgcaatcactgcgtccttacgggggttgcaaggcgtccgaagtatgagtccactaacaaaagtccagaaactcgccagttaatagtattgtgtctcttcaaaatatcggagaataatttctttctcgctgatcgcctaacttctactgacgaagcttggaagttgcagaaggttggagtgcagtggcgcgatctcggctgactgcaacctccacctcctggattcaagctattctcctgcctcagcctgccgagtagctgggattacaggcgtgagccaccgcgcccggccagaacattagttttaaacttcctaacccttgggagaaggcaaaacacttgatgaaatctacataaagactaaaacattttaccaattttgcattgtttgtttgaaattgcattgacgactggtatgttaattttgtatatatttttatgagaacaatgttggacatcatttaatttttttaggtttttttaattgattatggattggttcatttgcaggaactgactattagtaatcaaggatacaaattgttaagagaatatgttacagagaaaaacttgacaagctagacttagatttttgtcgttaaagataatttgtgggatatgatttttataaggagttgcattaaatagaatgtcttacacagatttaagaggttaataattataaaattaagatgagttcttataaaatattcttgaggtataataaaattatacttgtggagtatatctttgaataacatttaaaagcaaactaatactttccaggtaaaataattatcaacataactttttaaaaataattcatagtacttcaggttatttctatgtttgacacattaacttaaaagaaaaaa

SEQ ID NO: 334735 - DNA, 455 bp, Homo sapiens
cttggcctgctctggtgatgaattcgtttctgcagactttccctgggagtaatttgtacacatactgactgccccatattttacatccctcattcaaggtactggctcctgtatcacccagctctggagttgaaagagctcttcattcctgagtctcctgtaccactgagaatagaaatacaaaaaaaattctaaaacttgtatggaactacaaaagacattaaataatcaaagtaatcttgagcaacaaggacacagctggaggcatcactctacctgattttgtaatccattatcaaaaaactgtggtaccagcataaaaacagattcactgaccagtggaacaggaaagcccagacataactcatacatttccatccaattgatttttgacaaaagtggcacacagaatggggagaggacaaataaataaataaattgttttgagatatctg

SEQ ID NO: 334736 - DNA, 575 bp, Homo sapiens
tgccctagggctagtggaagacttaagatggcggcgtttgcacggagtgcaatcactgcgtccttacgggggttgcaaggcgtccgaagtatgagtccactaacaaaagtccagaaactcgccagttaatagtattgtgtctcttcaaaatatcggagaataatttctttctcgctgatcgcctaacttctactgacgaagcttggaagttgcagaaggtactggctcctgtatcacccagctctggagttgaaagagctcttcattcctgagtctcctgtaccactgagaatagaaatacaaaaaaaattctaaaacttgtatggaactacaaaagacattaaataatcaaagtaatcttgagcaacaaggacacagctggaggcatcactctacctgattttgtaatccattatcaaaaaactgtggtaccagcataaaaacagattcactgaccagtggaacaggaaagcccagacataactcatacatttccatccaattgatttttgacaaaagtggcacacagaatggggagaggacaaataaataaataaattgttttgagatatctg

SEQ ID NO: 334737 - DNA, 498 bp, Homo sapiens
tgccctagggctagtggaagacttaagatggcggcgtttgcacggagtgcaatcactgcgtccttacgggggttgcaaggcgtccgaagtatgagtccactaacaaaagtccagaaactcgccagttaatagtattgtgtctcttcaaaatatcggagaataatttctttctcgctgatcgcctaacttctactgacgaagcttggaagttgcagaagaaatacaaaaaaaattctaaaacttgtatggaactacaaaagacattaaataatcaaagtaatcttgagcaacaaggacacagctggaggcatcactctacctgattttgtaatccattatcaaaaaactgtggtaccagcataaaaacagattcactgaccagtggaacaggaaagcccagacataactcatacatttccatccaattgatttttgacaaaagtggcacacagaatggggagaggacaaataaataaataaattgttttgagatatctg

SEQ ID NO: 334738 - DNA, 373 bp, Homo sapiens
tgccctagggctagtggaagacttaagatggcggcgtttgcacggagtgcaatcactgcgtccttacgggggttgcaaggcgtccgaagtatgagtccactaacaaaagtccagaaactcgccagttaatagtattgtgtctcttcaaaatatcggagaataatttctttctcgctgatcgcctaacttctactgacgaagcttggaagttgcagaaggttggagtgcagtggcgcgatctcggctgactgcaacctccacctcctggattcaaggagaatcacttgaacctgggaggcagaggttgcagtgagccaagattgtgccactgcacttcccagcctgagcaacaaaagcaaaactctatctttaa

SEQ ID NO: 334739 - DNA, 592 bp, Homo sapiens
atagaggtccttagggctttttctcacttctcttttctctacatatttgtgtaaaaataagacagtaaatagtaacaccttgtcctggagtgatagtagccagtattgctaccatatattactgacaatgtttaattttcaacaacaaaaataattgagagataaagagaagtaagaaaacgtgaccttatggggaagaagactggcaaaacatctcaactttgaaggcataagatgtgttactaagcagacaaatatttcaaattggccattataaatatcttaaaagaactagaggacaccatacctcaggaggcaatgatataattacaataattttgcaactagagaatataaataaataggtaagaattatagaaaagaaccatatggaaatctggagttgtaaagtataataacagaaattacaattcattagagaggtttaatactagattttaactggtagaataaacaatcattgaatttgaagatagattgatagaaatcacccagtttaaaaaatacagaataaagaagtaagtaaaatgcagtttcagagaaatggcagaagccattgagaataccaaca

SEQ ID NO: 334740 - DNA, 3465 bp, Homo sapiens
tgccctagggctagtggaagacttaagatggcggcgtttgcacggagtgcaatcactgcgtccttacgggggttgcaaggcgtccgaagtatgagtccactaacaaaagtccagaaactcgccagttaatagtattgtgtctcttcaaaatatcggagaataatttctttctcgctgatcgcctaacttctactgacgaagcttggaagttgcagaaggttggagtgcagtggcgcgatctcggctgactgcaacctccacctcctggattcaagctattctcctgcctcagcctgccgagtagctgggattacaggcatgtgccaccgcacccagctaattttgtattttttagtagagatggggtttctccatgttggtcaggctggtcttgaactcctgacctcaggtgatccgcccacctcagcctcccaaagtgctgggattacaggcgtgagccaccgcgcccggccagaacattagttttaaacttcctaacccttgggagaaggcaaaacacttgatgaaatctacataaagactaaaacattttaccaattttgcattgtttgtttgaaattgcattgacgactgatggagttcgctcttgttgcccaggctggaatgcaatggcatgaccttggctcactgcaacctctgcctccccagttcaagtggttctcctgcctcagcctcccgagtagctgagattacaggtactggctcctgtatcacccagctctggagttgaaagagctcttcattcctgagtctcctgtaccactgagaataggctggagtgcagtggcgcaatctcggctctctgcaaccttcacctcccgtgttcaagtgattctcctgcctcagcctcctgaatacctgagattacaagcatgcaccaccacgcccgtctaattttgtattttcactagagacggggtttctccatgttggtcaggctggtctcgaactcccgacctcaggtgatccgcccgcctcagcctcccaaagtgctgggattacaggcatgagccaccgcgtccagcaagaataggtgattttcaaacttggaaacattcagaagttatcgcctcagtttcagattgagtagtctcaaagagattacagacatctaccacaaattctctacttggtgtggtgcaaaatcagtatgatgtaaactttgtctctcagtttcttcaaaggaaagaagcaactggaacacacatataacactaacccttccagctgcattatgagggaccagtacctgtctcaaggcaaaattatgacttagttcatcctcacctctggaggccagtaaaagtgggttatagaagaacaaagaggcatctagatctttcactgggttatttggagagaaacatctcctaccgaaggccagtttaacaagactggtagaggaggttatcttatctaattcacagaaatcaacacattgagtcaagaaaaatgaaacacagaaacactctaaataaaagaagataagtcttcagaaaccaaccctaatgaaatgaagatatgtgattaacctgacaggaaattaaaaagagcaaccataaagagtctcatgggagcaatgcatgaacaaactgagaattttcataaagaaataaaagataacaaaaagtataaagttgaagaatacaataactggactcaaaaatttaatgtgtccaacagaagaatcgatgaagcagaagaaagggctatcaaacttgtagataggccattggaaatcatgtaatgtgaggagaaaaaagaaaaaagattgaagatagtttaagagacttttgagacatcctcaaaggggaataatttatacattaccagatggagaagatagagggaaaaggacagaaaacatatttgaagaaataatgtcagaaaacctcataattctggcaaggaaatagaaatttagatctaagaatctcgaacatcaggtatgatgaatccaaggagactcacaccaaaccatattgtaattaaataaaggttaaagacaatcttcagagcagcaagggaatagtctcttcttacatacaaaatgatccacggaagactgtcagcagacttcaccagaaaactttcacgccagaaggcagtcgtgatatatacaaaaagctgaaaggaaaacactgccatccaggaatactatctccaactatcctgtgtttcaaaaattaaggagaaatataaagttctcaaacaaaagatgtgggagtttaccaccactagacctgcacgggaagaattgctaaagggagtccttcaagctgtagtaaaagagtgctaattagaaacatgaaaacaaatacaaaaaaaattctaaaacttgtatggaactacaaaagacattaaataatcaaagtaatcttgagcaacaaggacacagctggaggcatcactctacctgattttgtaatccattatcaaaaaactgtggtaccagcataaaaacagattcactgaccagtggaacaggaaagcccagacataactcatacatttccatccaattgatttttgacaaaagtggcacacagaatggggagaggacaaataaataaataaattgttttgagatatctgtatatctatatgtgaaattgaaccattttctcatagcatatagaaaaatcaactcaaaatggattaaagcctgaaatgttgcctttgaaactgtaaaactactagtagaaaatataggggaaaagctctatgatgttgttctgggcaatgatttcttggatacatccttaaaagcatgggcagcaaaaacagccagacaactatcagggaacctgcccagatagtcacataggttcttttctattttccctaagcattggccgggttgagaaataaagggacagagtacaaaagagagaaattttaaagctgggcatcctggggagacatcacatgtcggtaggttccgtgatgccccctgagccgtaaaaccagtaagtttttattagggattttcaaaggggagggagtatacgaataggaggtgggtcacagagatcacgtgcttcacaaggtaatagaatatcacaaggcaaatggaggcagggcgagatcacaggaccacaggactgggttgaaattaaaattgctaatgaagtttcgggcaccatcgtcattgataacatcttatcaggagacagggtttgagagcaacctgtctgaccaaaatttattaggtgggaatttcctcgtcctaataagcctgggagcgctatgggagactggggcttatttcatccctacagtctcgaccatagaagacagctacacccaagggggccattttagaggcccaccctcaggggcacattctctttctcagggatgttccttgctgagaaaaagaattcggcgatatttctcccatttgcttttgaaagaagagaaatatggctctgttccgcctgg

SEQ ID NO: 334741 - DNA, 3089 bp, Homo sapiens
tgccctagggctagtggaagacttaagatggcggcgtttgcacggagtgcaatcactgcgtccttacgggggttgcaaggcgtccgaagtatgagtccactaacaaaagtccagaaactcgccagttaatagtattgtgtctcttcaaaatatcggagaataatttctttctcgctgatcgcctaacttctactgacgaagcttggaagttgcagaagatggagttcgctcttgttgcccaggctggaatgcaatggcatgaccttggctcactgcaacctctgcctccccagttcaagtggttctcctgcctcagcctcccgagtagctgagattacaggtactggctcctgtatcacccagctctggagttgaaagagctcttcattcctgagtctcctgtaccactgagaataggctggagtgcagtggcgcaatctcggctctctgcaaccttcacctcccgtgttcaagtgattctcctgcctcagcctcctgaatacctgagattacaagcatgcaccaccacgcccgtctaattttgtattttcactagagacggggtttctccatgttggtcaggctggtctcgaactcccgacctcaggtgatccgcccgcctcagcctcccaaagtgctgggattacaggcatgagccaccgcgtccagcaagaataggtgattttcaaacttggaaacattcagaagttatcgcctcagtttcagattgagtagtctcaaagagattacagacatctaccacaaattctctacttggtgtggtgcaaaatcagtatgatgtaaactttgtctctcagtttcttcaaaggaaagaagcaactggaacacacatataacactaacccttccagctgcattatgagggaccagtacctgtctcaaggcaaaattatgacttagttcatcctcacctctggaggccagtaaaagtgggttatagaagaacaaagaggcatctagatctttcactgggttatttggagagaaacatctcctaccgaaggccagtttaacaagactggtagaggaggttatcttatctaattcacagaaatcaacacattgagtcaagaaaaatgaaacacagaaacactctaaataaaagaagataagtcttcagaaaccaaccctaatgaaatgaagatatgtgattaacctgacaggaaattaaaaagagcaaccataaagagtctcatgggagcaatgcatgaacaaactgagaattttcataaagaaataaaagataacaaaaagtataaagttgaagaatacaataactggactcaaaaatttaatgtgtccaacagaagaatcgatgaagcagaagaaagggctatcaaacttgtagataggccattggaaatcatgtaatgtgaggagaaaaaagaaaaaagattgaagatagtttaagagacttttgagacatcctcaaaggggaataatttatacattaccagatggagaagatagagggaaaaggacagaaaacatatttgaagaaataatgtcagaaaacctcataattctggcaaggaaatagaaatttagatctaagaatctcgaacatcaggtatgatgaatccaaggagactcacaccaaaccatattgtaattaaataaaggttaaagacaatcttcagagcagcaagggaatagtctcttcttacatacaaaatgatccacggaagactgtcagcagacttcaccagaaaactttcacgccagaaggcagtcgtgatatatacaaaaagctgaaaggaaaacactgccatccaggaatactatctccaactatcctgtgtttcaaaaattaaggagaaatataaagttctcaaacaaaagatgtgggagtttaccaccactagacctgcacgggaagaattgctaaagggagtccttcaagctgtagtaaaagagtgctaattagaaacatgaaaacaaatacaaaaaaaattctaaaacttgtatggaactacaaaagacattaaataatcaaagtaatcttgagcaacaaggacacagctggaggcatcactctacctgattttgtaatccattatcaaaaaactgtggtaccagcataaaaacagattcactgaccagtggaacaggaaagcccagacataactcatacatttccatccaattgatttttgacaaaagtggcacacagaatggggagaggacaaataaataaataaattgttttgagatatctgtatatctatatgtgaaattgaaccattttctcatagcatatagaaaaatcaactcaaaatggattaaagcctgaaatgttgcctttgaaactgtaaaactactagtagaaaatataggggaaaagctctatgatgttgttctgggcaatgatttcttggatacatccttaaaagcatgggcagcaaaaacagccagacaactatcagggaacctgcccagatagtcacataggttcttttctattttccctaagcattggccgggttgagaaataaagggacagagtacaaaagagagaaattttaaagctgggcatcctggggagacatcacatgtcggtaggttccgtgatgccccctgagccgtaaaaccagtaagtttttattagggattttcaaaggggagggagtatacgaataggaggtgggtcacagagatcacgtgcttcacaaggtaatagaatatcacaaggcaaatggaggcagggcgagatcacaggaccacaggactgggttgaaattaaaattgctaatgaagtttcgggcaccatcgtcattgataacatcttatcaggagacagggtttgagagcaacctgtctgaccaaaatttattaggtgggaatttcctcgtcctaataagcctgggagcgctatgggagactggggcttatttcatccctacagtctcgaccatagaagacagctacacccaagggggccattttagaggcccaccctcaggggcacattctctttctcagggatgttccttgctgagaaaaagaattcggcgatatttctcccatttgcttttgaaagaagagaaatatggctctgttccgcctgg

SEQ ID NO: 334742 - DNA, 2616 bp, Homo sapiens
tgccctagggctagtggaagacttaagatggcggcgtttgcacggagtgcaatcactgcgtccttacgggggttgcaaggcgtccgaagtatgagtccactaacaaaagtccagaaactcgccagttaatagtattgtgtctcttcaaaatatcggagaataatttctttctcgctgatcgcctaacttctactgacgaagcttggaagttgcagaaggttggagtgcagtggcgcgatctcggctgactgcaacctccacctcctggattcaagctattctcctgcctcagcctgccgagtagctgggattacaggcatgtgccaccgcacccagctaattttgtattttttagtagagatggggtttctccatgttggtcaggctggtcttgaactcctgacctcaggtgatccgcccacctcagcctcccaaagtgctgggattacaggcgtgagccaccgcgcccggccagaacattagttttaaacttcctaacccttgggagaaggcaaaacacttgatgaaatctacataaagactaaaacattttaccaattttgcattgtttgtttgaaattgcattgacgactgatggagttcgctcttgttgcccaggctggaatgcaatggcatgaccttggctcactgcaacctctgcctccccagttcaagtggttctcctgcctcagcctcccgagtagctgagattacaggtactggctcctgtatcacccagctctggagttgaaagagctcttcattcctgagtctcctgtaccactgagaataggctggagtgcagtggcgcaatctcggctctctgcaaccttcacctcccgtgttcaagtgattctcctgcctcagcctcctgaatacctgagattacaagcatgcaccaccacgcccgtctaattttgtattttcactagagacggggtttctccatgttggtcaggctggtctcgaactcccgacctcaggtgatccgcccgcctcagcctcccaaagtgctgggattacaggcatgagccaccgcgtccagcaagaataggtgattttcaaacttggaaacattcagaagttatcgcctcagtttcagattgagtagtctcaaagagattacagacatctaccacaaattctctacttggtgtggtgcaaaatcagtatgatgtaaactttgtctctcagtttcttcaaaggaaagaagcaactggaacacacatataacactaacccttccagctgcattatgagggaccagtacctgtctcaaggcaaaattatgacttagttcatcctcacctctggaggccagtaaaagtgggttatagaagaacaaagaggcatctagatctttcactgggttatttggagagaaacatctcctaccgaaggccagtttaacaagactggtagaggaggttatcttatctaattcacagaaatcaacacattgagtcaagaaaaatgaaacacagaaacactctaaataaaagaagataagtcttcagaaaccaaccctaatgaaatgaagatatgtgattaacctgacaggaaattaaaaagagcaaccataaagagtctcatgggagcaatgcatgaacaaactgagaattttcataaagaaataaaagataacaaaaagtataaagttgaagaatacaataactggactcaaaaatttaatgtgtccaacagaagaatcgatgaagcagaagaaagggctatcaaacttgtagataggccattggaaatcatgtaatgtgaggagaaaaaagaaaaaagattgaagatagtttaagagacttttgagacatcctcaaaggggaataatttatacattaccagatggagaagatagagggaaaaggacagaaaacatatttgaagaaataatgtcagaaaacctcataattctggcaaggaaatagaaatttagatctaagaatctcgaacatcaggtatgatgaatccaaggagactcacaccaaaccatattgtaattaaataaaggttaaagacaatcttcagagcagcaagggaatagtctcttcttacatacaaaatgatccacggaagactgtcagcagacttcaccagaaaactttcacgccagaaggcagtcgtgatatatacaaaaagctgaaaggaaaacactgccatccaggaatactatctccaactatcctgtgtttcaaaaattaaggagaaatataaagttctcaaacaaaagatgtgggagtttaccaccactagacctgcacgggaagaattgctaaagggagtccttcaagctgtagtaaaagagtgctaattagaaacatgaaaacaaatacaaaaaaaattctaaaacttgtatggaactacaaaagacattaaataatcaaagtaatcttgagcaacaaggacacagctggaggcatcactctacctgattttgtaatccattatcaaaaaactgtggtaccagcataaaaacagattcactgaccagtggaacaggaaagcccagacataactcatacatttccatccaattgatttttgacaaaagtggcacacagaatggggagaggacaaataaataaataaattgttttgagatatctg

SEQ ID NO: 334743 - DNA, 3498 bp, Homo sapiens
tatgaacttcagttgccttggaggcatctgagggaaatgaggttgcatgtagatgaatcagttgtttctggcatcatgttagtgtgattacatttagctgctgtgtgcaaaacattttagcaatcatttaggtccaggacgtggaatttattagtgcaacaaccctgtaaacagtggttagaacattaataattttattttatttatgttttatttattttttgagacggatttttgctcttgttgcccaggttggagtgcagtggcgcgatctcggctgactgcaacctccacctcctggattcaagctattctcctgcctcagcctgccgagtagctgggattacaggcatgtgccaccgcacccagctaattttgtattttttagtagagatggggtttctccatgttggtcaggctggtcttgaactcctgacctcaggtgatccgcccacctcagcctcccaaagtgctgggattacaggcgtgagccaccgcgcccggccagaacattagttttaaacttcctaacccttgggagaaggcaaaacacttgatgaaatctacataaagactaaaacattttaccaattttgcattgtttgtttgaaattgcattgacgactgatggagttcgctcttgttgcccaggctggaatgcaatggcatgaccttggctcactgcaacctctgcctccccagttcaagtggttctcctgcctcagcctcccgagtagctgagattacaggtactggctcctgtatcacccagctctggagttgaaagagctcttcattcctgagtctcctgtaccactgagaataggctggagtgcagtggcgcaatctcggctctctgcaaccttcacctcccgtgttcaagtgattctcctgcctcagcctcctgaatacctgagattacaagcatgcaccaccacgcccgtctaattttgtattttcactagagacggggtttctccatgttggtcaggctggtctcgaactcccgacctcaggtgatccgcccgcctcagcctcccaaagtgctgggattacaggcatgagccaccgcgtccagcaagaataggtgattttcaaacttggaaacattcagaagttatcgcctcagtttcagattgagtagtctcaaagagattacagacatctaccacaaattctctacttggtgtggtgcaaaatcagtatgatgtaaactttgtctctcagtttcttcaaaggaaagaagcaactggaacacacatataacactaacccttccagctgcattatgagggaccagtacctgtctcaaggcaaaattatgacttagttcatcctcacctctggaggccagtaaaagtgggttatagaagaacaaagaggcatctagatctttcactgggttatttggagagaaacatctcctaccgaaggccagtttaacaagactggtagaggaggttatcttatctaattcacagaaatcaacacattgagtcaagaaaaatgaaacacagaaacactctaaataaaagaagataagtcttcagaaaccaaccctaatgaaatgaagatatgtgattaacctgacaggaaattaaaaagagcaaccataaagagtctcatgggagcaatgcatgaacaaactgagaattttcataaagaaataaaagataacaaaaagtataaagttgaagaatacaataactggactcaaaaatttaatgtgtccaacagaagaatcgatgaagcagaagaaagggctatcaaacttgtagataggccattggaaatcatgtaatgtgaggagaaaaaagaaaaaagattgaagatagtttaagagacttttgagacatcctcaaaggggaataatttatacattaccagatggagaagatagagggaaaaggacagaaaacatatttgaagaaataatgtcagaaaacctcataattctggcaaggaaatagaaatttagatctaagaatctcgaacatcaggtatgatgaatccaaggagactcacaccaaaccatattgtaattaaataaaggttaaagacaatcttcagagcagcaagggaatagtctcttcttacatacaaaatgatccacggaagactgtcagcagacttcaccagaaaactttcacgccagaaggcagtcgtgatatatacaaaaagctgaaaggaaaacactgccatccaggaatactatctccaactatcctgtgtttcaaaaattaaggagaaatataaagttctcaaacaaaagatgtgggagtttaccaccactagacctgcacgggaagaattgctaaagggagtccttcaagctgtagtaaaagagtgctaattagaaacatgaaaacaaatacaaaaaaaattctaaaacttgtatggaactacaaaagacattaaataatcaaagtaatcttgagcaacaaggacacagctggaggcatcactctacctgattttgtaatccattatcaaaaaactgtggtaccagcataaaaacagattcactgaccagtggaacaggaaagcccagacataactcatacatttccatccaattgatttttgacaaaagtggcacacagaatggggagaggacaaataaataaataaattgttttgagatatctgtatatctatatgtgaaattgaaccattttctcatagcatatagaaaaatcaactcaaaatggattaaagcctgaaatgttgcctttgaaactgtaaaactactagtagaaaatataggggaaaagctctatgatgttgttctgggcaatgatttcttggatacatccttaaaagcatgggcagcaaaaacagccagacaactatcagggaacctgcccagatagtcacataggttcttttctattttccctaagcattggccgggttgagaaataaagggacagagtacaaaagagagaaattttaaagctgggcatcctggggagacatcacatgtcggtaggttccgtgatgccccctgagccgtaaaaccagtaagtttttattagggattttcaaaggggagggagtatacgaataggaggtgggtcacagagatcacgtgcttcacaaggtaatagaatatcacaaggcaaatggaggcagggcgagatcacaggaccacaggactgggttgaaattaaaattgctaatgaagtttcgggcaccatcgtcattgataacatcttatcaggagacagggtttgagagcaacctgtctgaccaaaatttattaggtgggaatttcctcgtcctaataagcctgggagcgctatgggagactggggcttatttcatccctacagtctcgaccatagaagacagctacacccaagggggccattttagaggcccaccctcaggggcacattctctttctcagggatgttccttgctgagaaaaagaattcggcgatatttctcccatttgcttttgaaagaagagaaatatggctctgttccgcctgg

SEQ ID NO: 334744 - DNA, 2967 bp, Homo sapiens
tgccctagggctagtggaagacttaagatggcggcgtttgcacggagtgcaatcactgcgtccttacgggggttgcaaggcgtccgaagtatgagtccactaacaaaagtccagaaactcgccagttaatagtattgtgtctcttcaaaatatcggagaataatttctttctcgctgatcgcctaacttctactgacgaagcttggaagttgcagaaggtactggctcctgtatcacccagctctggagttgaaagagctcttcattcctgagtctcctgtaccactgagaataggctggagtgcagtggcgcaatctcggctctctgcaaccttcacctcccgtgttcaagtgattctcctgcctcagcctcctgaatacctgagattacaagcatgcaccaccacgcccgtctaattttgtattttcactagagacggggtttctccatgttggtcaggctggtctcgaactcccgacctcaggtgatccgcccgcctcagcctcccaaagtgctgggattacaggcatgagccaccgcgtccagcaagaataggtgattttcaaacttggaaacattcagaagttatcgcctcagtttcagattgagtagtctcaaagagattacagacatctaccacaaattctctacttggtgtggtgcaaaatcagtatgatgtaaactttgtctctcagtttcttcaaaggaaagaagcaactggaacacacatataacactaacccttccagctgcattatgagggaccagtacctgtctcaaggcaaaattatgacttagttcatcctcacctctggaggccagtaaaagtgggttatagaagaacaaagaggcatctagatctttcactgggttatttggagagaaacatctcctaccgaaggccagtttaacaagactggtagaggaggttatcttatctaattcacagaaatcaacacattgagtcaagaaaaatgaaacacagaaacactctaaataaaagaagataagtcttcagaaaccaaccctaatgaaatgaagatatgtgattaacctgacaggaaattaaaaagagcaaccataaagagtctcatgggagcaatgcatgaacaaactgagaattttcataaagaaataaaagataacaaaaagtataaagttgaagaatacaataactggactcaaaaatttaatgtgtccaacagaagaatcgatgaagcagaagaaagggctatcaaacttgtagataggccattggaaatcatgtaatgtgaggagaaaaaagaaaaaagattgaagatagtttaagagacttttgagacatcctcaaaggggaataatttatacattaccagatggagaagatagagggaaaaggacagaaaacatatttgaagaaataatgtcagaaaacctcataattctggcaaggaaatagaaatttagatctaagaatctcgaacatcaggtatgatgaatccaaggagactcacaccaaaccatattgtaattaaataaaggttaaagacaatcttcagagcagcaagggaatagtctcttcttacatacaaaatgatccacggaagactgtcagcagacttcaccagaaaactttcacgccagaaggcagtcgtgatatatacaaaaagctgaaaggaaaacactgccatccaggaatactatctccaactatcctgtgtttcaaaaattaaggagaaatataaagttctcaaacaaaagatgtgggagtttaccaccactagacctgcacgggaagaattgctaaagggagtccttcaagctgtagtaaaagagtgctaattagaaacatgaaaacaaatacaaaaaaaattctaaaacttgtatggaactacaaaagacattaaataatcaaagtaatcttgagcaacaaggacacagctggaggcatcactctacctgattttgtaatccattatcaaaaaactgtggtaccagcataaaaacagattcactgaccagtggaacaggaaagcccagacataactcatacatttccatccaattgatttttgacaaaagtggcacacagaatggggagaggacaaataaataaataaattgttttgagatatctgtatatctatatgtgaaattgaaccattttctcatagcatatagaaaaatcaactcaaaatggattaaagcctgaaatgttgcctttgaaactgtaaaactactagtagaaaatataggggaaaagctctatgatgttgttctgggcaatgatttcttggatacatccttaaaagcatgggcagcaaaaacagccagacaactatcagggaacctgcccagatagtcacataggttcttttctattttccctaagcattggccgggttgagaaataaagggacagagtacaaaagagagaaattttaaagctgggcatcctggggagacatcacatgtcggtaggttccgtgatgccccctgagccgtaaaaccagtaagtttttattagggattttcaaaggggagggagtatacgaataggaggtgggtcacagagatcacgtgcttcacaaggtaatagaatatcacaaggcaaatggaggcagggcgagatcacaggaccacaggactgggttgaaattaaaattgctaatgaagtttcgggcaccatcgtcattgataacatcttatcaggagacagggtttgagagcaacctgtctgaccaaaatttattaggtgggaatttcctcgtcctaataagcctgggagcgctatgggagactggggcttatttcatccctacagtctcgaccatagaagacagctacacccaagggggccattttagaggcccaccctcaggggcacattctctttctcagggatgttccttgctgagaaaaagaattcggcgatatttctcccatttgcttttgaaagaagagaaatatggctctgttccgcctgg

SEQ ID NO: 334745 - DNA, 3010 bp, Homo sapiens
tgccctagggctagtggaagacttaagatggcggcgtttgcacggagtgcaatcactgcgtccttacgggggttgcaaggcgtccgaagtatgagtccactaacaaaagtccagaaactcgccagttaatagtattgtgatggagttcgctcttgttgcccaggctggaatgcaatggcatgaccttggctcactgcaacctctgcctccccagttcaagtggttctcctgcctcagcctcccgagtagctgagattacaggtactggctcctgtatcacccagctctggagttgaaagagctcttcattcctgagtctcctgtaccactgagaataggctggagtgcagtggcgcaatctcggctctctgcaaccttcacctcccgtgttcaagtgattctcctgcctcagcctcctgaatacctgagattacaagcatgcaccaccacgcccgtctaattttgtattttcactagagacggggtttctccatgttggtcaggctggtctcgaactcccgacctcaggtgatccgcccgcctcagcctcccaaagtgctgggattacaggcatgagccaccgcgtccagcaagaataggtgattttcaaacttggaaacattcagaagttatcgcctcagtttcagattgagtagtctcaaagagattacagacatctaccacaaattctctacttggtgtggtgcaaaatcagtatgatgtaaactttgtctctcagtttcttcaaaggaaagaagcaactggaacacacatataacactaacccttccagctgcattatgagggaccagtacctgtctcaaggcaaaattatgacttagttcatcctcacctctggaggccagtaaaagtgggttatagaagaacaaagaggcatctagatctttcactgggttatttggagagaaacatctcctaccgaaggccagtttaacaagactggtagaggaggttatcttatctaattcacagaaatcaacacattgagtcaagaaaaatgaaacacagaaacactctaaataaaagaagataagtcttcagaaaccaaccctaatgaaatgaagatatgtgattaacctgacaggaaattaaaaagagcaaccataaagagtctcatgggagcaatgcatgaacaaactgagaattttcataaagaaataaaagataacaaaaagtataaagttgaagaatacaataactggactcaaaaatttaatgtgtccaacagaagaatcgatgaagcagaagaaagggctatcaaacttgtagataggccattggaaatcatgtaatgtgaggagaaaaaagaaaaaagattgaagatagtttaagagacttttgagacatcctcaaaggggaataatttatacattaccagatggagaagatagagggaaaaggacagaaaacatatttgaagaaataatgtcagaaaacctcataattctggcaaggaaatagaaatttagatctaagaatctcgaacatcaggtatgatgaatccaaggagactcacaccaaaccatattgtaattaaataaaggttaaagacaatcttcagagcagcaagggaatagtctcttcttacatacaaaatgatccacggaagactgtcagcagacttcaccagaaaactttcacgccagaaggcagtcgtgatatatacaaaaagctgaaaggaaaacactgccatccaggaatactatctccaactatcctgtgtttcaaaaattaaggagaaatataaagttctcaaacaaaagatgtgggagtttaccaccactagacctgcacgggaagaattgctaaagggagtccttcaagctgtagtaaaagagtgctaattagaaacatgaaaacaaatacaaaaaaaattctaaaacttgtatggaactacaaaagacattaaataatcaaagtaatcttgagcaacaaggacacagctggaggcatcactctacctgattttgtaatccattatcaaaaaactgtggtaccagcataaaaacagattcactgaccagtggaacaggaaagcccagacataactcatacatttccatccaattgatttttgacaaaagtggcacacagaatggggagaggacaaataaataaataaattgttttgagatatctgtatatctatatgtgaaattgaaccattttctcatagcatatagaaaaatcaactcaaaatggattaaagcctgaaatgttgcctttgaaactgtaaaactactagtagaaaatataggggaaaagctctatgatgttgttctgggcaatgatttcttggatacatccttaaaagcatgggcagcaaaaacagccagacaactatcagggaacctgcccagatagtcacataggttcttttctattttccctaagcattggccgggttgagaaataaagggacagagtacaaaagagagaaattttaaagctgggcatcctggggagacatcacatgtcggtaggttccgtgatgccccctgagccgtaaaaccagtaagtttttattagggattttcaaaggggagggagtatacgaataggaggtgggtcacagagatcacgtgcttcacaaggtaatagaatatcacaaggcaaatggaggcagggcgagatcacaggaccacaggactgggttgaaattaaaattgctaatgaagtttcgggcaccatcgtcattgataacatcttatcaggagacagggtttgagagcaacctgtctgaccaaaatttattaggtgggaatttcctcgtcctaataagcctgggagcgctatgggagactggggcttatttcatccctacagtctcgaccatagaagacagctacacccaagggggccattttagaggcccaccctcaggggcacattctctttctcagggatgttccttgctgagaaaaagaattcggcgatatttctcccatttgcttttgaaagaagagaaatatggctctgttccgcctgg

SEQ ID NO: 334746 - DNA, 2611 bp, Homo sapiens
tgccctagggctagtggaagacttaagatggcggcgtttgcacggagtgcaatcactgcgtccttacgggggttgcaaggcgtccgaagtatgagtccactaacaaaagtccagaaactcgccagttaatagtattgtgtctcttcaaaatatcggagaataatttctttctcgctgatcgcctaacttctactgacgaagcttggaagttgcagaagatggagttcgctcttgttgcccaggctggaatgcaatggcatgaccttggctcactgcaacctctgcctccccagttcaagtggttctcctgcctcagcctcccgagtagctgagattacagtttcttcaaaggaaagaagcaactggaacacacatataacactaacccttccagctgcattatgagggaccagtacctgtctcaaggcaaaattatgacttagttcatcctcacctctggaggccagtaaaagtgggttatagaagaacaaagaggcatctagatctttcactgggttatttggagagaaacatctcctaccgaaggccagtttaacaagactggtagaggaggttatcttatctaattcacagaaatcaacacattgagtcaagaaaaatgaaacacagaaacactctaaataaaagaagataagtcttcagaaaccaaccctaatgaaatgaagatatgtgattaacctgacaggaaattaaaaagagcaaccataaagagtctcatgggagcaatgcatgaacaaactgagaattttcataaagaaataaaagataacaaaaagtataaagttgaagaatacaataactggactcaaaaatttaatgtgtccaacagaagaatcgatgaagcagaagaaagggctatcaaacttgtagataggccattggaaatcatgtaatgtgaggagaaaaaagaaaaaagattgaagatagtttaagagacttttgagacatcctcaaaggggaataatttatacattaccagatggagaagatagagggaaaaggacagaaaacatatttgaagaaataatgtcagaaaacctcataattctggcaaggaaatagaaatttagatctaagaatctcgaacatcaggtatgatgaatccaaggagactcacaccaaaccatattgtaattaaataaaggttaaagacaatcttcagagcagcaagggaatagtctcttcttacatacaaaatgatccacggaagactgtcagcagacttcaccagaaaactttcacgccagaaggcagtcgtgatatatacaaaaagctgaaaggaaaacactgccatccaggaatactatctccaactatcctgtgtttcaaaaattaaggagaaatataaagttctcaaacaaaagatgtgggagtttaccaccactagacctgcacgggaagaattgctaaagggagtccttcaagctgtagtaaaagagtgctaattagaaacatgaaaacaaatacaaaaaaaattctaaaacttgtatggaactacaaaagacattaaataatcaaagtaatcttgagcaacaaggacacagctggaggcatcactctacctgattttgtaatccattatcaaaaaactgtggtaccagcataaaaacagattcactgaccagtggaacaggaaagcccagacataactcatacatttccatccaattgatttttgacaaaagtggcacacagaatggggagaggacaaataaataaataaattgttttgagatatctgtatatctatatgtgaaattgaaccattttctcatagcatatagaaaaatcaactcaaaatggattaaagcctgaaatgttgcctttgaaactgtaaaactactagtagaaaatataggggaaaagctctatgatgttgttctgggcaatgatttcttggatacatccttaaaagcatgggcagcaaaaacagccagacaactatcagggaacctgcccagatagtcacataggttcttttctattttccctaagcattggccgggttgagaaataaagggacagagtacaaaagagagaaattttaaagctgggcatcctggggagacatcacatgtcggtaggttccgtgatgccccctgagccgtaaaaccagtaagtttttattagggattttcaaaggggagggagtatacgaataggaggtgggtcacagagatcacgtgcttcacaaggtaatagaatatcacaaggcaaatggaggcagggcgagatcacaggaccacaggactgggttgaaattaaaattgctaatgaagtttcgggcaccatcgtcattgataacatcttatcaggagacagggtttgagagcaacctgtctgaccaaaatttattaggtgggaatttcctcgtcctaataagcctgggagcgctatgggagactggggcttatttcatccctacagtctcgaccatagaagacagctacacccaagggggccattttagaggcccaccctcaggggcacattctctttctcagggatgttccttgctgagaaaaagaattcggcgatatttctcccatttgcttttgaaagaagagaaatatggctctgttccgcctgg

SEQ ID NO: 334747 - DNA, 2489 bp, Homo sapiens
tgccctagggctagtggaagacttaagatggcggcgtttgcacggagtgcaatcactgcgtccttacgggggttgcaaggcgtccgaagtatgagtccactaacaaaagtccagaaactcgccagttaatagtattgtgtctcttcaaaatatcggagaataatttctttctcgctgatcgcctaacttctactgacgaagcttggaagttgcagaagtttcttcaaaggaaagaagcaactggaacacacatataacactaacccttccagctgcattatgagggaccagtacctgtctcaaggcaaaattatgacttagttcatcctcacctctggaggccagtaaaagtgggttatagaagaacaaagaggcatctagatctttcactgggttatttggagagaaacatctcctaccgaaggccagtttaacaagactggtagaggaggttatcttatctaattcacagaaatcaacacattgagtcaagaaaaatgaaacacagaaacactctaaataaaagaagataagtcttcagaaaccaaccctaatgaaatgaagatatgtgattaacctgacaggaaattaaaaagagcaaccataaagagtctcatgggagcaatgcatgaacaaactgagaattttcataaagaaataaaagataacaaaaagtataaagttgaagaatacaataactggactcaaaaatttaatgtgtccaacagaagaatcgatgaagcagaagaaagggctatcaaacttgtagataggccattggaaatcatgtaatgtgaggagaaaaaagaaaaaagattgaagatagtttaagagacttttgagacatcctcaaaggggaataatttatacattaccagatggagaagatagagggaaaaggacagaaaacatatttgaagaaataatgtcagaaaacctcataattctggcaaggaaatagaaatttagatctaagaatctcgaacatcaggtatgatgaatccaaggagactcacaccaaaccatattgtaattaaataaaggttaaagacaatcttcagagcagcaagggaatagtctcttcttacatacaaaatgatccacggaagactgtcagcagacttcaccagaaaactttcacgccagaaggcagtcgtgatatatacaaaaagctgaaaggaaaacactgccatccaggaatactatctccaactatcctgtgtttcaaaaattaaggagaaatataaagttctcaaacaaaagatgtgggagtttaccaccactagacctgcacgggaagaattgctaaagggagtccttcaagctgtagtaaaagagtgctaattagaaacatgaaaacaaatacaaaaaaaattctaaaacttgtatggaactacaaaagacattaaataatcaaagtaatcttgagcaacaaggacacagctggaggcatcactctacctgattttgtaatccattatcaaaaaactgtggtaccagcataaaaacagattcactgaccagtggaacaggaaagcccagacataactcatacatttccatccaattgatttttgacaaaagtggcacacagaatggggagaggacaaataaataaataaattgttttgagatatctgtatatctatatgtgaaattgaaccattttctcatagcatatagaaaaatcaactcaaaatggattaaagcctgaaatgttgcctttgaaactgtaaaactactagtagaaaatataggggaaaagctctatgatgttgttctgggcaatgatttcttggatacatccttaaaagcatgggcagcaaaaacagccagacaactatcagggaacctgcccagatagtcacataggttcttttctattttccctaagcattggccgggttgagaaataaagggacagagtacaaaagagagaaattttaaagctgggcatcctggggagacatcacatgtcggtaggttccgtgatgccccctgagccgtaaaaccagtaagtttttattagggattttcaaaggggagggagtatacgaataggaggtgggtcacagagatcacgtgcttcacaaggtaatagaatatcacaaggcaaatggaggcagggcgagatcacaggaccacaggactgggttgaaattaaaattgctaatgaagtttcgggcaccatcgtcattgataacatcttatcaggagacagggtttgagagcaacctgtctgaccaaaatttattaggtgggaatttcctcgtcctaataagcctgggagcgctatgggagactggggcttatttcatccctacagtctcgaccatagaagacagctacacccaagggggccattttagaggcccaccctcaggggcacattctctttctcagggatgttccttgctgagaaaaagaattcggcgatatttctcccatttgcttttgaaagaagagaaatatggctctgttccgcctgg

SEQ ID NO: 334748 - DNA, 2355 bp, Homo sapiens
tgccctagggctagtggaagacttaagatggcggcgtttgcacggagtgcaatcactgcgtccttacgggggttgcaaggcgtccgaagtatgagtccactaacaaaagtccagaaactcgccagttaatagtattgtgatggagttcgctcttgttgcccaggctggaatgcaatggcatgaccttggctcactgcaacctctgcctccccagttcaagtggttctcctgcctcagcctcccgagtagctgagattacaggtactggctcctgtatcacccagctctggagttgaaagagctcttcattcctgagtctcctgtaccactgagaatagaaatcaacacattgagtcaagaaaaatgaaacacagaaacactctaaataaaagaagataagtcttcagaaaccaaccctaatgaaatgaagatatgtgattaacctgacaggaaattaaaaagagcaaccataaagagtctcatgggagcaatgcatgaacaaactgagaattttcataaagaaataaaagataacaaaaagtataaagttgaagaatacaataactggactcaaaaatttaatgtgtccaacagaagaatcgatgaagcagaagaaagggctatcaaacttgtagataggccattggaaatcatgtaatgtgaggagaaaaaagaaaaaagattgaagatagtttaagagacttttgagacatcctcaaaggggaataatttatacattaccagatggagaagatagagggaaaaggacagaaaacatatttgaagaaataatgtcagaaaacctcataattctggcaaggaaatagaaatttagatctaagaatctcgaacatcaggtatgatgaatccaaggagactcacaccaaaccatattgtaattaaataaaggttaaagacaatcttcagagcagcaagggaatagtctcttcttacatacaaaatgatccacggaagactgtcagcagacttcaccagaaaactttcacgccagaaggcagtcgtgatatatacaaaaagctgaaaggaaaacactgccatccaggaatactatctccaactatcctgtgtttcaaaaattaaggagaaatataaagttctcaaacaaaagatgtgggagtttaccaccactagacctgcacgggaagaattgctaaagggagtccttcaagctgtagtaaaagagtgctaattagaaacatgaaaacaaatacaaaaaaaattctaaaacttgtatggaactacaaaagacattaaataatcaaagtaatcttgagcaacaaggacacagctggaggcatcactctacctgattttgtaatccattatcaaaaaactgtggtaccagcataaaaacagattcactgaccagtggaacaggaaagcccagacataactcatacatttccatccaattgatttttgacaaaagtggcacacagaatggggagaggacaaataaataaataaattgttttgagatatctgtatatctatatgtgaaattgaaccattttctcatagcatatagaaaaatcaactcaaaatggattaaagcctgaaatgttgcctttgaaactgtaaaactactagtagaaaatataggggaaaagctctatgatgttgttctgggcaatgatttcttggatacatccttaaaagcatgggcagcaaaaacagccagacaactatcagggaacctgcccagatagtcacataggttcttttctattttccctaagcattggccgggttgagaaataaagggacagagtacaaaagagagaaattttaaagctgggcatcctggggagacatcacatgtcggtaggttccgtgatgccccctgagccgtaaaaccagtaagtttttattagggattttcaaaggggagggagtatacgaataggaggtgggtcacagagatcacgtgcttcacaaggtaatagaatatcacaaggcaaatggaggcagggcgagatcacaggaccacaggactgggttgaaattaaaattgctaatgaagtttcgggcaccatcgtcattgataacatcttatcaggagacagggtttgagagcaacctgtctgaccaaaatttattaggtgggaatttcctcgtcctaataagcctgggagcgctatgggagactggggcttatttcatccctacagtctcgaccatagaagacagctacacccaagggggccattttagaggcccaccctcaggggcacattctctttctcagggatgttccttgctgagaaaaagaattcggcgatatttctcccatttgcttttgaaagaagagaaatatggctctgttccgcctgg

SEQ ID NO: 334749 - DNA, 1922 bp, Homo sapiens
tgccctagggctagtggaagacttaagatggcggcgtttgcacggagtgcaatcactgcgtccttacgggggttgcaaggcgtccgaagtatgagtccactaacaaaagtccagaaactcgccagttaatagtattgtgtctcttcaaaatatcggagaataatttctttctcgctgatcgcctaacttctactgacgaagcttggaagttgcagaaggttggagtgcagtggcgcgatctcggctgactgcaacctccacctcctggattcaagctattctcctgcctcagcctgccgagtagctgggattacaggcatgtgccaccgcacccagctaattttgtattttttagtagagatggggtttctccatgttggtcaggctggtcttgaactcctgacctcaggtgatccgcccacctcagcctcccaaagtgctgggattacaggcgtgagccaccgcgcccggccagaacattagttttaaacttcctaacccttgggagaaggcaaaacacttgatgaaatctacataaagactaaaacattttaccaattttgcattgtttgtttgaaattgcattgacgactgatggagttcgctcttgttgcccaggctggaatgcaatggcatgaccttggctcactgcaacctctgcctccccagttcaagtggttctcctgcctcagcctcccgagtagctgagattacaggtactggctcctgtatcacccagctctggagttgaaagagctcttcattcctgagtctcctgtaccactgagaatagaaatacaaaaaaaattctaaaacttgtatggaactacaaaagacattaaataatcaaagtaatcttgagcaacaaggacacagctggaggcatcactctacctgattttgtaatccattatcaaaaaactgtggtaccagcataaaaacagattcactgaccagtggaacaggaaagcccagacataactcatacatttccatccaattgatttttgacaaaagtggcacacagaatggggagaggacaaataaataaataaattgttttgagatatctgtatatctatatgtgaaattgaaccattttctcatagcatatagaaaaatcaactcaaaatggattaaagcctgaaatgttgcctttgaaactgtaaaactactagtagaaaatataggggaaaagctctatgatgttgttctgggcaatgatttcttggatacatccttaaaagcatgggcagcaaaaacagccagacaactatcagggaacctgcccagatagtcacataggttcttttctattttccctaagcattggccgggttgagaaataaagggacagagtacaaaagagagaaattttaaagctgggcatcctggggagacatcacatgtcggtaggttccgtgatgccccctgagccgtaaaaccagtaagtttttattagggattttcaaaggggagggagtatacgaataggaggtgggtcacagagatcacgtgcttcacaaggtaatagaatatcacaaggcaaatggaggcagggcgagatcacaggaccacaggactgggttgaaattaaaattgctaatgaagtttcgggcaccatcgtcattgataacatcttatcaggagacagggtttgagagcaacctgtctgaccaaaatttattaggtgggaatttcctcgtcctaataagcctgggagcgctatgggagactggggcttatttcatccctacagtctcgaccatagaagacagctacacccaagggggccattttagaggcccaccctcaggggcacattctctttctcagggatgttccttgctgagaaaaagaattcggcgatatttctcccatttgcttttgaaagaagagaaatatggctctgttccgcctgg

SEQ ID NO: 334750 - DNA, 1073 bp, Homo sapiens
tgccctagggctagtggaagacttaagatggcggcgtttgcacggagtgcaatcactgcgtccttacgggggttgcaaggcgtccgaagtatgagtccactaacaaaagtccagaaactcgccagttaatagtattgtgtctcttcaaaatatcggagaataatttctttctcgctgatcgcctaacttctactgacgaagcttggaagttgcagaaggttggagtgcagtggcgcgatctcggctgactgcaacctccacctcctggattcaagctattctcctgcctcagcctgccgagtagctgggattacaggcatgtgccaccgcacccagctaattttgtattttttagtagagatggggtttctccatgttggtcaggctggtcttgaactcctgacctcaggtgatccgcccacctcagcctcccaaagtgctgggattacaggcgtgagccaccgcgcccggccagaacattagttttaaacttcctaacccttgggagaaggcaaaacacttgatgaaatctacataaagactaaaacattttaccaattttgcattgtttgtttgaaattgcattgacgactgatggagttcgctcttgttgcccaggctggaatgcaatggcatgaccttggctcactgcaacctctgcctccccagttcaagtggttctcctgcctcagcctcccgagtagctgagattacaggtactggctcctgtatcacccagctctggagttgaaagagctcttcattcctgagtctcctgtaccactgagaatagaaatacaaaaaaaattctaaaacttgtatggaactacaaaagacattaaataatcaaagtaatcttgagcaacaaggacacagctggaggcatcactctacctgattttgtaatccattatcaaaaaactgtggtaccagcataaaaacagattcactgaccagtggaacaggaaagcccagacataactcatacatttccatccaattgatttttgacaaaagtggcacacagaatggggagaggacaaataaataaataaattgttttgagatatctg

SEQ ID NO: 334751 - DNA, 1304 bp, Homo sapiens
cttggcctgctctggtgatgaattcgtttctgcagactttccctgggagtaatttgtacacatactgactgccccatattttacatccctcattcaaggtactggctcctgtatcacccagctctggagttgaaagagctcttcattcctgagtctcctgtaccactgagaatagaaatacaaaaaaaattctaaaacttgtatggaactacaaaagacattaaataatcaaagtaatcttgagcaacaaggacacagctggaggcatcactctacctgattttgtaatccattatcaaaaaactgtggtaccagcataaaaacagattcactgaccagtggaacaggaaagcccagacataactcatacatttccatccaattgatttttgacaaaagtggcacacagaatggggagaggacaaataaataaataaattgttttgagatatctgtatatctatatgtgaaattgaaccattttctcatagcatatagaaaaatcaactcaaaatggattaaagcctgaaatgttgcctttgaaactgtaaaactactagtagaaaatataggggaaaagctctatgatgttgttctgggcaatgatttcttggatacatccttaaaagcatgggcagcaaaaacagccagacaactatcagggaacctgcccagatagtcacataggttcttttctattttccctaagcattggccgggttgagaaataaagggacagagtacaaaagagagaaattttaaagctgggcatcctggggagacatcacatgtcggtaggttccgtgatgccccctgagccgtaaaaccagtaagtttttattagggattttcaaaggggagggagtatacgaataggaggtgggtcacagagatcacgtgcttcacaaggtaatagaatatcacaaggcaaatggaggcagggcgagatcacaggaccacaggactgggttgaaattaaaattgctaatgaagtttcgggcaccatcgtcattgataacatcttatcaggagacagggtttgagagcaacctgtctgaccaaaatttattaggtgggaatttcctcgtcctaataagcctgggagcgctatgggagactggggcttatttcatccctacagtctcgaccatagaagacagctacacccaagggggccattttagaggcccaccctcaggggcacattctctttctcagggatgttccttgctgagaaaaagaattcggcgatatttctcccatttgcttttgaaagaagagaaatatggctctgttccgcctgg

SEQ ID NO: 334752 - DNA, 1374 bp, Homo sapiens
tgccctagggctagtggaagacttaagatggcggcgtttgcacggagtgcaatcactgcgtccttacgggggttgcaaggcgtccgaagtatgagtccactaacaaaagtccagaaactcgccagttaatagtattgtgtctcttcaaaatatcggagaataatttctttctcgctgatcgcctaacttctactgacgaagcttggaagttgcagaaggttggagtgcagtggcgcgatctcggctgactgcaacctccacctcctggattcaagctattctcctgcctcagcctgccgagtagctgggattacaggcatgtgccaccgcacccagctaattttgtattttttagtagagatggggtttctccatgttggtcaggctggtcttgaactcctgacctcaggtgatccgcccacctcagcctcccaaagtgctgggattacaggcgtgagccaccgcgcccggccagaacattagttttaaacttcctaacccttgggagaaggcaaaacacttgatgaaatctacataaagactaaaacattttaccaattttgcattgtttgtttgaaattgcattgacgactgatggagttcgctcttgttgcccaggctggaatgcaatggcatgaccttggctcactgcaacctctgcctccccagttcaagtggttctcctgcctcagcctcccgagtagctgagattacaggtatgcgctaccacgcccggctaattttgtatttttagtagagacggggtttctccatgttggtcagactggtcttgtaggagaaatagacttcactaaaatattacagccaattagtaaaaataagacagtaaatagtaacaccttgtcctggagtgatagtagccagtattgctaccatatattactgacaatgtttaattttcaacaacaaaaataattgagagataaagagaagtaagaaaacgtgaccttatggggaagaagactggcaaaacatctcaactttgaaggcataagatgtgttactaagcagacaaatatttcaaattggccattataaatatcttaaaagaactagaggacaccatacctcaggaggcaatgatataattacaataattttgcaactagagaatataaataaataggtaagaattatagaaaagaaccatatggaaatctggagttgtaaagtataataacagaaattacaattcattagagaggtttaatactagattttaactggtagaataaacaatcattgaatttgaagatagattgatagaaatcacccagtttaaaaaatacagaataaagaagtaagtaaaatgcagtttcagagaaatggcagaagccattgagaataccaaca

SEQ ID NO: 334753 - DNA, 260 bp, Homo sapiens
ctaacaaacaacaatctatccaaaaaagtaatcaggaaactaatcacatttacactatttactaagtaaacaaacttatgaatgaatttaaccaagtaggttaaagatctgtatagtgaaaacattgatgaaacgaattgaagattacaaaaatagaaatttttctttgtacatggattgggaaatttatattgttataattttcatactgccaaaagaaacatacagattctgtgtaatcaatatttcaatgtcctttt

SEQ ID NO: 334754 - DNA, 449 bp, Homo sapiens
ggtgatctcatcaatttcattcatcagtgttttatagttttcattatagagatatttaacttctttggttaattcctaggtatttaattttatgtgtggctattgtaaatgagattactttttaatatctttttcagattgttcactgttggcatatagaaacactactgatgcctcagagatgaccatgatggtgttctggtgtcaggagaatagcaatgcctgggagtccaccaccaccataatctcctgtgatcccacggagctgcagtcagaagggagcaatgacaagaaataagtgctgagcagttgtcatatggtgctggaagacatgctacttttccctgagggcggaagacagcctgatgacggtggtacaatcaatgacatctctgtgctgggagtgacctgcttgggggcccaggctgatcatttcacacagacacccc

SEQ ID NO: 334755 - DNA, 350 bp, Homo sapiens
ccttgtttactaaaatagttatgtgaccttagacaaatttcctaacttctctgtgactcattttcttcatttgtaaaatggcgatgataatagcacctacttattatttacttgtagtagtaaagattaaatgagcttatacatagcaagtggtgaataaatgttagcattattatatatttagcctcaatttctggatgtcataagaagaaataaacttattcacagtttaagacctgtgtgaccagatttttcttagtttgtttgttttttctttgagatggagtctcgctctgtcgcaaggctgcaatgcagtggctcgatcttggctcactgcaaactccgcctcc

SEQ ID NO: 334756 - DNA, 326 bp, Homo sapiens
gctcccttcccctacttcgggatggtgtaaggtttccttgccaaggtccctgtggtgcagagtgggccaagtttgccgccttctggagcgacaacaaggagaaaacaggggtttaagtggaggatccggtgctctgatttctccccagttagtaaagcattcaggctgctcggtggaggtgggaagacaggcgctgagagttgtctgacacaattgtcttagcagcaggagacgctgatgggatgtcgggagtcaccaggaccatctgacaaatgaccgccttggggatccgtggagctcagcggtgcccagagagagcactcgaa

SEQ ID NO: 334757 - DNA, 319 bp, Homo sapiens
agaaaggtgctcagcctcaatctcaatctcaatctcaagcctcagccttgtatttatttgtattcaagtaaatacaaataaaaaccataagacattattttacacctactattttgacaaaaattctaaagtctaagaatatcaagtattggtaaagacataaagaaatgtgaattttcacccattacttgtgggaatataaaataacaatttggattaaagtttaacattacttagtaaagtcaaatacacacacacattatgatccagcaattctacttctaagtacattattggaggagtccccaacacctggctg

SEQ ID NO: 334758 - DNA, 965 bp, Homo sapiens
agcacactcagcggatggagggcctggcttctgcacgccggctggcacttgctgccagttgcccttttctgcgaggctggatcgtggtgcggtggtggcttggatgggtttctctgctgaacgatgatgtggaatgccttttcactgcttcttggtcgtcggtttttcttctttggggaaatgtctattcaagtcctttgccctttttttaaagtataatttccgtatttttttccccagaggatagtttgtctttagtccttaaggactcagctccttatgtgggtcttagtgggagtcgtgggcaacacccaggtctagacccaggtggaatgcatggtcttggggccttggtgggggtcgtgggcagcacccaggtctagacttgggtgacgtgcatagccctggacttgaggagcaggattcctgactggcttgctgtgaagggcaccactggggcagtgacgcagcttcacacgcagctcgggaagcacacagtcggcgcagatgcttccaaaatgtctgcaaggctgcggcctctactgcatccagatggtgaactgcctaactctaccgcgtcccgatggtgaactgctaactctgccgtatcccgatggtgaactgccgaactctaccgcatcccgatggtgaactgccaaacttttacctcgtcccgatggtgaactgcctaaacctcgtcccgatggtgaactgcctaactctaccgcatcccgatggtgaactgcctaactctaccacatcccgatggtgaactgctaactctgccgtatcccgatggtgaactgccaaactttacctcgtcccgatggtgaactgcctaactctacctcgtcccaatggtgaactgcctaactctaccacatcctgatggtgaactgctaactctgccgcatcccgacggtgaactgccaaactctacctcgtcccgacggtgaactgccaaa

SEQ ID NO: 334759 - DNA, 1356 bp, Homo sapiens
agcacactcagcggatggagggcctggcttctgcacgccggctggcacttgctgccagttgcccttttctgcgaggctggatcgtggtgcggtggtggcttggatgggtttctctgctgaacgatgatgtggaatgccttttcactgcttcttggtcgtcggtttttcttctttggggaaatgtctattcaagtcctttgccctttttttaaagtataatttccgtatttttttccccagaggatagtttgtctttagtccttaaggactcagctccttatgtgggtcttagtgggagtcgtgggcaacacccaggtctagacccaggtggaatgcatggtcttggggccttggtgggggtcgtgggcagcacccaggtctagacttgggtgacgtgcatagccctggacttgaggagcaggattcctgactggcttgctgtgaagggcaccactggggcagtgacgcagcttcacacgcagctcgggaagcacacagtcggcgcagatgcttccaaaatgtctgcaaggctgcggcctctactgcatccagatggtgaactgcctaactctaccgcgtcccgatggtgaactgctaactctgccgtatcccgatggtgaactgccgaactctaccgcatcccgatggtgaactgccaaactctaccgcatcccgatggtgaactgctaactaccgcatcccgatggtgaactgccgaactctaccgcatccctatggtgaactgctaactctgccgcatcccgatggtgaactgcctaactctacctcgtcccgatggtgaactgcctaactctaccacatcccgatggtgaactgctaactctgccacatcccgatggtgaactgctaactctgccgcatcccgatggtgaactgccaaactttacctcgtcccgatggtgaactgcctaaacctcgtcccgatggtgaactgcctaactctaccgcatcccgatggtgaactgcctaactctaccacatcccgatggtgaactgctaactctgccgcatcccgatggtgaactgccaaactttacctcgtcccgatggtgaactgcctaaacctcgtcccgatggtgaactgcctaactctaccgcatcccgatggtgaactgcctaactctaccacatcccgatggtgaactgctaactctgccgtatcccgatggtgaactgccaaactttacctcgtcccgatggtgaactgcctaactctacctcgtcccaatggtgaactgcctaactctaccacatcctgatggtgaactgctaactctgccgcatcccgacggtgaactgccaaactctacctcgtcccgacggtgaactgccaaa

SEQ ID NO: 334760 - DNA, 419 bp, Homo sapiens
gtagcacaatcttcagtaaatagactttgcaaaaactgcttttctggttgacttccagggcagccccaggaagcagcagagaataaaagtactgtctgcccctctcccacctcctccaaatccgatcccatttaacttccctggccaatgttgcacagtgagtccgaaccatataggagagctggagttcgagaggatctaaagacaagtcaccatcctgcttgaaggcaacaaaaagcctctgtccagctggtcgcagctgatctcccccagtatctccgcagtccttcccgaggccttctgcgtccgccccgccccctcgggctgcacaactcccaaagcccaccccaggcaaaaatcacgtccagaatctcgggtctttgttttccccgcgtagtagtagccgctcagcaaggatt

SEQ ID NO: 334761 - DNA, 497 bp, Homo sapiens
ctgggattacaggtgcccaccaccacacccagctaatctttgtatttttagtagagatggggtttcaccatgttggccaggctggtctcaaacccctgacttcaagtgatccacctacctcggcctcccaaggtgatgggattacaggtgtgagccaccgtgaccggtctagacaagcattttatgccttaattctaaacttaacttacaacccttcagcctaacatatctactgatacatctcacttctacaaatctgaactccagcaattcttcaaagacctatctaaagcatccaaaatctgtttctgagtttcaattacttctttttttttttttttttttgagacagagtctcgctgtcgcccaggctggagtgcagtggcacgatctcggctcactgcaagctccacctcccaggttcacgccattctcctgcctcagcctctcgagtagctgggactacaggtgcctgccacgtcgacccggctactttt

SEQ ID NO: 334762 - DNA, 117 bp, Homo sapiens
gtgtcatcacctactctcttgaccttggttttctgcatctcataagaatcaagagcagcagcaactaaggccagtcctagctagcaggttacaaaatactttttttttttttttttt

SEQ ID NO: 334763 - DNA, 294 bp, Homo sapiens
accttatacaaaaatcaattcaagatggactaaagatctaaacgttagacctaaaaccataaaaaccctagaagaaaacctaggcattaccattcaggaaataggcaagattttttcttttgcattggccttgaggaggatggttgtcctttatagtatctggcttaagttctctgtatttcttggatttgcatgtcaacctctctagtgagattagaaaaattttcatggactatatcctcaaatatagtttccaagttgcttattatctccccttctgtgtcaggaatgcca

SEQ ID NO: 334764 - DNA, 313 bp, Homo sapiens
gggtcccagcagggcagggattgtgttttacaatcttgaggtctccagcaccagtcacagtgactggtacgtactatgcacattattaaacgactaaataaaagaacttttacattcattgtctcatttgcacttcaaaatgtcaagcctagcattttagagctggggggtgacattagggattgattaatgcgtttattctattctttgagcacctgtaggtgctaggcactgttcggggcaaggtgtacaaattccagtgcggcaagaacaacacccttgagaagctgagagtctagtctgggagacgaga

SEQ ID NO: 334765 - DNA, 137 bp, Homo sapiens
actcaaaacttagtctctcattttctctatatttgtctctatttggttgatgtatctggactttttctaagtctctaaagggatgaagctgtgtacacttttagatcgtttcggaagtggttaaaacagcatcctgt

SEQ ID NO: 334766 - DNA, 213 bp, Homo sapiens
gtgcttttctagaagtggagggaaggaagccaagtgttattacagacttccatttaatgcccttatttttagatccacttctgcctcccagccttcattgtacctggggtttcaaaattccaagtctccggggttgggcagggtagatcagctacctccttccattggatagccctcagcaagagttccaagctgttactccctccacccagc

SEQ ID NO: 334767 - DNA, 511 bp, Homo sapiens
gtcccgcttctgggcagggcccaccctgacctgagatgtgtgtgtggctgacctcttgggaaaccctgaagccagtgtctgaggcaccccatcattttcaaggaacaggaataactggagaaacaagtctttcaaagtggttccaccttttgaggtaactgggagtgccttttcttggggtgactcagtcaggaaagtccccgattatgtacttaaggagtccttttctctccttttatggtagtctgcaaatagcagagagaagcccctcactctcgatgctccctgggtacctccctatggccccgctgctgccgactgcttcaacacattcttctgtccctgctgtttagatgccgtgttgtaggagcctgttgctagggtgtgttctgatgtgtcttccaccacctttaaacaagcagctcatgttccttttctctcccctggaatgggtcactgtgtaagcctttttcatagttcaagattccaggattgcccccaaataggccag

SEQ ID NO: 334768 - DNA, 388 bp, Homo sapiens
tttattgcttgattcagggtgactttctgcagaccctgtcaagtgtaagatgccatgactgcttctttaggaccaagctcacaatctggaaccttctttgtttccgtctctgctccatcccctctctccactgtggtccagaaccagggtcatagcttatctttattgcagcaggaggcatttcaaggcagaaacagcccattctatccaggtaaaccacaacagacgtggcatcatgtcagattcaatagctctttcatgcagtagctcccttcccttgccaggacataggccacgaggccagtctctgagcctatgagctaccgtgactgttcccaccttactcagtttccatcaattaactccattctcttccatcagcctgtcc

SEQ ID NO: 334769 - DNA, 306 bp, Homo sapiens
tctgtcttcttatttcagctcaaaaagtgttcttttcaaggcctatttgatgtcacattttttgcatttttgtgctttttttaattggtgatttcatgtttaaaatggcccccaagcatagtgctaaagtggtaactgggttcgacagcgtaagaaggctgtgatggacctcagggagaaaaatacatgtgttcgagaagtttcattcaggtatgagtgatagtgcttttagcctagagtttaatgttaatgaatcaacaatatatattaaatgaggtgtccttatacagaaacactcataaaata

SEQ ID NO: 334770 - DNA, 531 bp, Homo sapiens
aacctgacccactagacgcttcacttcctcctttcatggtctcatctataaaaatgagatgccacagatgacttccaagttgccacaggctggctgcttcaaatgcagacttcacccccaggaagctcacagttcagccagggagccatgatttgtacataagtgaaagaaatctcactccatgactgaattgggtgataactggcatcttaatcctcatctctgttattggcctttaaacccttgccacccagagaatgctttgcacagtgtctggcactcctggaagagtgagtgaggccagtgggtggtatggcatgggtgagacagggaggagtggggtgcagctctgccagttgcatcagttgcatcgggggcccctgcctggtgcatccatagcagcccagcctgggcagcttcctgtcccagcccggcaggatgcacctcacgtcacacagcgggaatcctcttgctgttatttacattgcttgcaaaatccaagaaatcatccctgaatatgtggcccaatgt

SEQ ID NO: 334771 - DNA, 391 bp, Homo sapiens
gtctgggcacagtggctcatgcctgtaatcccagcactttgggaagccaaggcaggcagatcacttgaggttaggattccaagaccagcctggccaacatggtgaaaccccatctctacaaaaatacaaaaattagccaggtgtggtggtacatgcctgtaatcccagctactcgagagcctgaggcaggagaattgcttggacctggtaggtggaggttgcagtgagctgaaattgcaccgctgcattccagtctgggtgacagagtgagaccctgtctcaaaaattaaataaataaataaataaaatacatacatacatacttaaccaggatgaaaaaaataatgaagagctacctaagaagaataactgggctctgatcttggtgaaa

SEQ ID NO: 334772 - DNA, 342 bp, Homo sapiens
agctggactccatcacttactagttctattaccttaggtaataggaagcctcggcttcctttttttgtaaaatggggatgttaacattgtctcatagggtcattgtgggggatcaaataagacgatatatacaaagctctcagcactgtgccctgcatatcaatgctgtaattactccaggatccagaggaagaacctatacccctcgcgctctctgggtttctgcacgctctgcccagtggcctggcacctcagctttagagggcaaggtagagccaaccattaatcagatagtgctgggaccggctggggttttctgtggcatcccgtatcttcccatca

SEQ ID NO: 334773 - DNA, 938 bp, Homo sapiens
gctcccggtgcccgctgcccgccgtccggtcccggctgctcgcggcccctgctcctgcctggtcgctctggccaggctcgggctccgtgagtgacaggaccgcgcgactggccggccgatccctgggccggctcgtgggagcagcctcctttgttctcctgtgcagggcccgggatggtgctctccctgacggggctcattgccttctccttcctgcaagccacccttgccctgaaccccgaggaccccaacgtgtgcagccactgggagagctatgctgtgactgtccaggaatcgtatgcacaccccttcgatcagatctattacacacgatgcacagacatcctcaactggttcaagtgcaccaggcaccggatcagttataagacggcgtatcggagaggcctccggaccatgtaccggcggaggtcccagtgctgccctggctactatgagagcggagacttctgcatacccctgtgtacggaggagtgtgtgcacggccgctgcgtttccccggacacctgccactgcgagcctggctggggagggcccgactgctccagcggctgcgacagcgaccactgggggccccactgcagcaaccggtgccagtgccagaacggcgccctgtgtaaccccatcacaggcgcctgcgtgtgcgccgccggcttccgtggatggcgctgcgaggagctctgcgcgcctggcacccacggcaagggatgccagctgccgtgccagtgccgacacggtgccagctgcgaaccccgcgccggcgagtgccttctgcgcacctggctacaccggcgtctactgcgaggagctgtgccctcctgggagccatggagctcactgtgagctgcgctgcccctgtcagaatgggggcacctgccaccacatcactggcgagtgtgcctgccccccaggctggacgg

SEQ ID NO: 334774 - DNA, 681 bp, Homo sapiens
agcggactgtctagccactcgactctcctaccacactctgtattctctgcaaagcacttgcacacatcattggagcactatctgcggcacaggaaagcttcatcactctcattttccagatgagaaaattggagctctgagaaagtgaagttcacctgggtcacaccgcctgatctcccgactccgggttggatgattttgccatctggtcccctcagccctgtgtacggaggagtgtgtgcacggccgctgcgtttccccggacacctgccactgcgagcctggctggggagggcccgactgctccagcggctgcgacagcgaccactgggggccccactgcagcaaccggtgccagtgccagaacggcgccctgtgtaaccccatcacaggcgcctgcgtgtgcgccgccggcttccgtggatggcgctgcgaggagctctgcgcgcctggcacccacggcaagggatgccagctgccgtgccagtgccgacacggtgccagctgcgaaccccgcgccggcgagtgccttctgcgcacctggctacaccggcgtctactgcgaggagctgtgccctcctgggagccatggagctcactgtgagctgcgctgcccctgtcagaatgggggcacctgccaccacatcactggcgagtgtgcctgccccccaggctggacgg

SEQ ID NO: 334775 - DNA, 510 bp, Homo sapiens
ggccttatgaataacacacaaatacccgtgggaagagagcctagggtcttaatgacaacaaatccattatatgaaattaaaatgaaaatgctattttgccattaaaatgctaaaatacagtcttaaacatataagaaatgggtattcctacatagtgttgacaggaatataaattttataactttgtagaaagttattaccctgtttgtataaaaatgttggaaatattcttgtagtaattccactgaaggaagtatattctaagggaacagtcacacaacaacaaagatctctgtacaaagacatttacaaaagcattaatagagaaaacactttttaaaaattactctatataaggatattggttaattttggttggtgtatttttataatatacacagccattatgaattaggtttattttcagtagtagttattgatgtggaaagtatacaatattaaataggaaaagcaaatttcttggatatggagcaatgataatgatccctt

SEQ ID NO: 334776 - DNA, 440 bp, Homo sapiens
gaagtggtggagctggagcctgctgcatgggagggttctgtggagtgagatgagatgttttacgtcatgctcttttcacaccttcttggcacccagaaagagctcagcaaacattagctgctaccagccaccctgactgtggctgtcagccagcattgttcttcccaggccctgccctaccctcctcctggcatagtgtctctcagggcataggaaactttctcggccagattggccatgggaggctttcttggggaccagagagtctgcagggagggcaagtcaagagcaggtgagagggagggaagggcgagcaggacccttgacctcattctcggctgcagtgtatattggcctgcctggtgaccctccttgctcctggtcccactgccaaacctctggagtctgccacatccctgcatagacagggccactgacag

SEQ ID NO: 334777 - DNA, 460 bp, Homo sapiens
tcacttgcccaagttcccagagctgacaagtggctgagcaggatttggatgttagtctatcttgcatcaaagtccacactccttcccgtagtaatctgggcagcttctccactctccacccacattccctccccacatatgtaggcatcttgcccttaaaaaatattcaaggctgaagctgccttacatagagtattataattaagagactgggctctggtgtcagacatttccaggcttaaatcccagctctaccacctgccaactgagtgcctcagtttcctcacctgtaacttagagacaatcatggattttgatttcgggggctcctatggggatttggtgagggaatatgcacttagtacatgagtccccacatggtagccagagtctgatgtcattgctggacagtgtcctccaaaccaagaaagctaatgaacactgggtcatgcctattgcc

SEQ ID NO: 334778 - DNA, 320 bp, Homo sapiens
ccgagctatttttatgtataaaatattttggggagacagagtatgtgctctgaatttcaactattgttacatagtgacagggatcatccatctggccctgctcagatgtcaccttgtctgcaagctcttcctctgttctcctaatcccaggtgattgttctttgtttttgctcctgtaaaatcctcttacagtacaagccatggtctgacttacagtatggctgtgtgtatatttcttttattagattgtggagtttgctaaaattaacagaagttagagccctttcatttttactgttgcctaaagtacttgggcagtt

SEQ ID NO: 334779 - DNA, 214 bp, Homo sapiens
aggaaaaaagtttgtctttgtcactttaatcttatcattactagagaatatttatgaatattttagaataatatatttttaagcccaaatctcaccaaatgttttttctaaaacaaatactttttgttgttgtttgtttttgttactgtgtctcactctgtcacccaggtatggagtgcagtggtgcaaccatggctcactgcagccttcacct

SEQ ID NO: 334780 - DNA, 472 bp, Homo sapiens
ccttcttagaggagataccgattgaatcagatatcttaaagtatgagtaaatgaaaacttgaaggggtgacttggaggacttcccactctagagcattataagacaattcagagctgaacagatgttggagtaggcattggtgagtatgacacctacaagaaggtcctagtcactaagacacagaggaagagcgatggctcttacctccccaatcaccagaggatgtttcattttggatatgttgaaattgaggtatcactgaacattgacttggatatatcctacatgtagttggaaatactttcactacattcaagggaggggccagggtcagagacaatgaagtgtgcagctcctatacccaaacagcagtgaaaatccaaggaatggatgagacttcccacagagtgggctaagagcttcaagtcaaggacagaaccaacatataaggggttagcacaggagagaaag

SEQ ID NO: 334781 - DNA, 384 bp, Homo sapiens
atgagtcaagcgaacagacctttatgtattacatgaatgatgaagtatatggatcatttaatcaatcctttatgatcatgcacatgtaaagcccctgctgcaaaagagacctagatcagtgagaagtattattcatccagtatatgggaagaacatgtgatggccttgatcagattgttgagcactgtgatctgcccaaaatatatgtaggtaattggatgctctttaaaaacatgggcgctgacactgttgctgctacttgtacttttaatggattccagaggccaacaatctacatgtgatgtcaggaccagcatcgaaactcatgcagtgtatctagaagcacgatctcccaccccaagtagaggaacaggacattagcat

SEQ ID NO: 334782 - DNA, 274 bp, Homo sapiens
tggtcattgtttaagagctgcccacagtcccattaccttttgagactaacatgaggctgacaaaaatgtcaaaagaaaaatgaaggaatataatgtccatatgggctttggaagtcttcaatatctctctgagaatctagtcatgtctatgtgcagggctgtgtgcatgccctggaaagacctgtgaaggctctaatctctcgtcggggctggtcttgaggctctgtgccagcagtaagtgactgttttaaagttgtaaactgcttgctagaga

SEQ ID NO: 334783 - DNA, 277 bp, Homo sapiens
ccaacatcagagcactgaaatacataaaacaaatattgacagagctaaagggagaaattgacagcaatgctatcataggaggaaactttaatgcctcaatttcaataatgaatagagcactcaagcagaaaatcaatttttaaaaacccgacttgtgcactctagcctaatggaccccacaaacatatctataactttccacccagcagaagaagaattagcccatgcaacaaattcttttcaaacacacttggaatatcctccaggacagatcaca

SEQ ID NO: 334784 - DNA, 183 bp, Homo sapiens
ttagctaaaggaaaccaaatacttaaagaaaatcagattcctcaataagattaacaggagttttctcatcagaaaacatggaggttaagaaaccagagaatgggcagatagacggatggactgactgaccaatttttttttttttttttttgagacggagtctcactctgttgcccaagctgg

SEQ ID NO: 334785 - DNA, 446 bp, Homo sapiens
cttgtttaccagctttgtttcaaatgactcttggcaatttccagaattgatcctaaaatggataaaatccctatctgtaatcaaggtatttgagacaaatatgtatgacaagttctcatgagtttcaaagtatgtggaacaatgacagtattgtaggaatgtgtatataagttccaaaaatacttgacttttaaataatatccattttgcaggagtcctgaatagcctcacgtaacacttcactgaaagtctgctatccagagatgtgtcaaaagcagtaactgtgcttggctgagtttgtaataatcaaagtgttaatcagctgtccccaagcttcctagctactgatacgaaatctaaaaagatgggctgggtgcagtggcctagattctggtcttgaaagctatcaatactttcctctgctttcaagacaaggtagagccgag

SEQ ID NO: 334786 - DNA, 1384 bp, Homo sapiens
  misc_feature (1384)..(1384): n is a, c, g, or t
gcgggagcgtctgtacctctgcggcgtcactgggagcccgacggaaaactgcgctaaaggcttgtctttcccctgcccgaccgaaggagccgaccttgcctgcgctacagcttccttattttcgtcgcctgttctcctgatcctgcgtgttctaaaaaccccttaggctttccatgggttcccagaccatggcggtggcgctgcccagggacttgcggcaggacgccaacctggcaaagaggaggcacgcggagctgtgcaggcagaagcgggtcttcaacgccagaaacaggataattgggggagacactgaagcctgggatgttcaagttcatgaccagaagataaaagaagctactgaaaaagctagacatgaaacctttgctgctgaaatgaggcaaaatgacaaaatcatgtgcatattggaaaaccggaaaaagagggataggaaaaatctctgtagggctatcaatgacttccaacagagctttcagaagccagaaactcgccgtgaatttgatctgtccgaccccctagcccttaagaaagatcttccagcccggcagtcagataatgatgttcggaatacgatatcaggaatgcagaaattcatgggagaggatttaaacttccatgagaggaagaaattccaagaggaacaaaacagagaatggtctttgcagcagcaaagggaatggaagaacgcccgtgctgaacaaaaatgcgcagaggccctctacacagagacaaggctgcagtttgacgagacagccaagcacctccagaagctggaaagcaccaccagaaaggcagtttgtgcatctgtgaaagacttcaacaagagccaggccatcgagtcagtggaaaggaaaaagcaagagaaaaagcaagaacaagaggacaacttggccgagatcaccaacctcctgcgtggggacctgctctccgagaacccgcagcaggcagccagctccttcgggccccaccgcgtggtccctgaccgctggaagggcatgacccaggagcagctggagcagatccgcctagtccagaagcagcaaatccaggagaagctgaggctccaggaagaaaagcgccagcgagacctggactgggaccggcggaggattcagggggctcgcgccaccctgctgtttgagcggcagcagtggcggcggcagcgcgacctgcgcagagctctggacagcagcaacctcagcctggccaaggagcagcatttgcagaaaaaatatatgaatgaagtctatacaaatcaacccacgggagactatttcacacaatttaatacaggaagtcgataatgaggaacacacccttgttcccgtcattcacgtataaagagtggctaccttaaagagtcacn

SEQ ID NO: 334787 - DNA, 318 bp, Homo sapiens
cttgaactgaaagttccctgaagcagtgacccttgtatttcctgatatggctcaaaacctgacagagttgtctgaagaggaacctccagaaaggcagggggaaaccagtagagttcaagggagtagagtgtgttaaagaatggtgaatagtcttacatgttgctttgtgtaaattctttggtagtaaaccgatgtacttcttcaagtgcatattgtagtgagtcaaaaaatttgtgaatgaatgagtgatgaacgaatgaatgcagagagtaaggtaaggcctagaaagggttcttttgcaagagtaatttcacatat

SEQ ID NO: 334788 - DNA, 306 bp, Homo sapiens
tttccctcataatgcaatgaataaaactttaatctttctcttcaggataaataatttctgaggctttagaaccaccttaaaaggtatctctaggccgggcgcggtggctgacgcctgtaatcacagcactttgggaggccgaggtgggcagatcttctgaggtcaagagttcaagaccagcctggtcaacatgctgaaaccctgtctctactaaaaatacaaaaattagccaggcgtggtggtgcacatctgtaatccagctactcagaaggcggaggcaggaaaatctgaatccgggaggcagag

SEQ ID NO: 334789 - DNA, 247 bp, Homo sapiens
cactcagtcagggaggcctgacttctgcctgtgtgcctccctctgctgtccgccagtgcgcctccgtgcctttgtctcttgtctcactgcctctttctctgcctcagtcaggctctctctcggattcctcctcctcctgagcccgttcctctcctcctctccattctcatcagagaggaacactcatccctctcttccagaaacaatggagcaccatgctcctgtccgctcagcctttcgggtggtg

SEQ ID NO: 334790 - DNA, 380 bp, Homo sapiens
gaaggaaggaagggaagggaagaaggagagaggaaaagagggaggaaaggaaggaggaaaggaaaaaaggaagccgagaaggaggaaggagggaagaagggagggaaggaagaaaggaaagaaggagagagggaaaaaagagagatgggggaagaataaatggggctttcttctcaagtacgaggcagttttcttatggtttgaggtgcaacagtggcatgagtggaacaaggaaaactagatcctttcatgagcctaaagaattcacctgctccacagaggcaatgaatggacagcaggacattccctggaacagatagcctgggtttcaatactggctctaccactaccagctgtgtgaccttaaggaaactacctaa

SEQ ID NO: 334791 - DNA, 144 bp, Homo sapiens
ttcacatacactgtttcctttgggcctcaccacataagctgaggttagaatttttaattttttttttctttgtgagatagggtctcactctcacccaggctggagcgcagtggcataatcacagctcactgcagcctcgacctc

SEQ ID NO: 334792 - DNA, 240 bp, Homo sapiens
ctgtaatcccagctactcagggagctgaggcaggagaatcgcttaaacccgggaggcagaggttgcggtgagccgatatcatgccattgcactccagcctgggcaacaagagcaaaattccatctcaaaaaaaaaatgagttttaacacactatagaagaatgggttaaattgtcactgagacttataagacagaaatagactttaatagtgtatcttttacttagctttcttgcttgct

SEQ ID NO: 334793 - DNA, 251 bp, Homo sapiens
cctcccaagtagctgggactacaggcgcgtgacaccacgcccgggtaattttttgtattttttagtagagacagggtttcatcgtgttagccaggatggtctcgatctcctgaccttgtgatccgcccgcctcggcctcccaaagtgctgggattacaggcgtgagccaccgcccccggccagccacaggtttcttatctgtaaaatggggatgagaacagcctgacctcctgggttgccatggtgattga

SEQ ID NO: 334794 - DNA, 428 bp, Homo sapiens
ctgtatccatatctatgcatctgcccatctatccaggtaactatataaaatattacatatgacatcatggccatactttcatttccgttttgtggggaagaaaagttatttcctaactacatcatttcccctcaagatgatctcaattttcatcataaaaggcttttacttttgccaagaaaataatgtgaaagtactctgaaaaagcatctgaagcacatgaatctgttcttattcgtagatttaaaacatcttggaagttaatgaaattgtcttccgttagggatttctgttaagtaagtagattttagctgttcttgtcaccacaaaaaaaaaaaaaagttaactatgtgagataataggtgtgttaacctcttcactagactgtctaaatgtatctctatgtctctgtgtatcccacaacatca

SEQ ID NO: 334795 - DNA, 294 bp, Homo sapiens
atctattctagctataggactcttacaacttaataaaagagaaaacccacctgggtgcactggctcacgcctgtaatcccagcactttgggaggccaggcggacggatcacttaagcccaggagttcaagaccagcttgggcaacacagcaaaaccctgtctctacaaaaaataccaaaataattagtcgggtatggtggcgggcacctgtggtcccagctaatcgagaggcagaggtgggaggatctcttgggcccaggaggtggaggctgcagtgagccaaaatcagaccat

SEQ ID NO: 334796 - DNA, 536 bp, Homo sapiens
gaaaagatggactattttggctaagcatggtggctcatgcctgtaatcccaacactttgggaggccgaggtgggtggatcacaaggacaggaaggagttcaagaccagcctgggcaatatggtgaaatcctgtctcttctaaaaatataaaaattagccgggcatggtggcgcacctgtagccgcagctactcaggaggctgaggcaggaaaattgcttgaaccccgggaggtagaggttgcagtgagctgagatcatgccactgcactccagcctgggtcctgctaccttgaaggacagcatagctaaactgcgtggcccaagggacagcatgaatgcagaatatagctttcttcacttgtggcctatttgcatagctgcccaaggcctccagtggacgacttcatggctttgtggtcttcatctgtagcatggatactacagattgtgggttcataggtcagctgggtacagggcagtttttataacaacctctggtgggtctttacattagtgtcaatatcacactgaaagat

SEQ ID NO: 334797 - DNA, 378 bp, Homo sapiens
atcaccagcatttaagttctgattctgtggccaggcatggtggctcacgcctgtaatcccaacactttgggaggccgaggcgggtggatcacgaggtcaggggtttgagaccagcctcgccaagatggtgaaatccttctctactaaaaataaaaaatcagctgggcgtggtggcagacgcctttaataccagctacttgggaggctgagggaggggaatcgcttgaacctgggaggcagaggttacagtgagctgagatggtgccattgcactccagcctgggcgacagagcgagactctgtctgaaaaaaattaattaattaattaattaattctgattctgcttcttctaagctgtgtgaatgtgtgcaagctgg

SEQ ID NO: 334798 - DNA, 629 bp, Homo sapiens
gcgtccgtggaacctcctgcaccctactcccagggcaaacccccagcgtccctccgggagccgcggagccactggccgcgctcatggctccaagccaatgaaccagggaaggtggaagggacggagactgggaaagtgtctgaggaccgagagctccgcggaaacggccgactgccgcttcctggcgcagtgggggtgtctgcggtatagggatgttcgcgtcctgatccgggacgcgatgccgcgacctgcggccacctagacgcgctcagcggcgcccgccccacccggatccccgaaaagggaaagaagtggctctcctcacttatgcggcaggttgagctgtttcctgagattcccgccagatcaccctccctgaagttccctccaggctcctccacaggggctcccctggacctcctgtaaaacattcacagcctggtatactgatatattctgagttaaaaacagagaaattgtagtttcagaaggagcaatccgacctgtttcttctgcatggagcatgccagaaaccttactctgggggagtatccttctgtaccagggcaagaaaacagccctgagaagccacaagggaccagaataaacatacgtaacaaagtcatctg

SEQ ID NO: 334799 - DNA, 881 bp, Homo sapiens
cagaaatattgtgtcaatgttttgatgttttactgactgttttttttagtacgtagattcattcatttgtacattcatttaataaatatttattgagcacctatcatgtgccagacactgttttaaacactgaagatataatgatgagcataaactttgtctttttagactttatcatctggagggtaagatgaggaaacttggagaatgtagtaatagataaatctgggaagagaaaaagggactgtaccaagtagcctcttgtaagccatagtaagattccctttacctcaagagcaatggaaagagagttgcattttgaaaagtttgttttcttagcaagccaaagaaaaagctattgtgttccaaacaaggcaaaaatgtttgaatcagagcagttatgatggagagaagttggtgaattccagaaatatttaggatgcaaaatctgcatgctttggtgatgaattggacatgggagaaagaaggtgtcaaggatgactcctaggtttctggtttgcacactgggatagtggtgccattcagtgagataaggactgcagtaagatcacatttgtagggaaggtcactatttcaattttggacataggcctttgagatatccaaaagaaaatgctcggtaggccactgcatatataagtgcagtcagtacatttgagaatcatttagtagctgatggacgtaggcatggcagtgtttcaaagaggggcgagatcaggaatatcaaatgcagctgagaggtcaagtaagatgggaaatctgtttgatttagcaacatatgtacatcattggtgacttgagcagttgctgttaggggaatgatgtgactcagtgccaagactgaagtagattagagagta

SEQ ID NO: 334800 - DNA, 381 bp, Homo sapiens
gcaattactgagggactatcgaattccagtaggcacagaatagagatggtggtgccatttagtttagcagaagtggacaaataagccagtcgagtcagctttgctctgaagctgcaggatttgctgtaacatggcagtggtcttgtaagcacaagccgtaagtggaggtgggtaaggggacagggactaattggagtaaacatgttaggactgtgggcaaagcaacatgtaccaaactcaatacagtctcctttacctaagacagtcagcacacaagtaaaacaacagatatagtaattcccctgcaaaagacttcttggtcactgtaaggattttaggaagcaggaaaagaaaccgaatggacagaaaagtgtcattaaa

SEQ ID NO: 334801 - DNA, 399 bp, Homo sapiens
aggctggatgagggccctgaagctgtcctttgggcaggggtgccaggcaggggacccaacagagcgccaagtataaagctggttggggtggggcttaaggatgggaggagtggacttaggaggtagagagtgctttgggtgtaggccaggtaagtttctggtctgcctgcattaggcacttggtagctgttagctatgccagtaaaaggatcttttacttttctggcaagactctgcaagaccggttctctcttaggtgattctcaggtggggatggggagggaagatgtgaaatttagggaaaataaaactacctttattacctacactatttccacctgattcatttaaaattatgtctaagattataatttgacacacatttttcaaaagagctct

SEQ ID NO: 334802 - DNA, 200 bp, Homo sapiens
tcgtcatcaatgttacgttatacctattttactaaaatttaaaaaaaaagctctgtctgccaacaaaaacaatgcttttaaaacaatttaccagttaaattaagcatttccaaaatatatttgattcaggaagattcacaattttcctatcgttttctgaacacagtgtttcttcagatttttcatctgcaaaatgaaaa

SEQ ID NO: 334803 - DNA, 453 bp, Homo sapiens
ccaaaacatggggtccaagatcttctgttgttgccgcaagaccagcgaggggtcttccaccactgttggcttccacaatccaagaatgttcgaacagcatcatccacggtccttcaatctgaacacaaattctctccacagtgctgtaccaaaaagacatccacgcctcccctatgacaaccgcatgatgctcaaggcgtgcatccttaggaggccatgagcattctagccggcggcacccacgtggtccctgcggctgcacagctgctgggcttccatgaggaagagggcagtggacaagagtcatgaagactgattcagaaactcccctgcaggaggagaagacgtctgagccatccctgtgccaccaccaagagtcactccagcttctgaaaaagccaccgtgggggggagccgcctccaattaaagtccttggtcacatcaaaggaagt

SEQ ID NO: 334804 - DNA, 411 bp, Homo sapiens
gtgctgtggggtccctagagacctgaaactcacagcccagtggggacagcccaagggcccttttctttggctcctgcttccctctagaggcggacactgtgctgtaccaaaaagacatccacgcctcccctatgacaaccgcatgatgctcaaggcgtgcatccttaggaggccatgagcattctagccggcggcacccacgtggtccctgcggctgcacagctgctgggcttccatgaggaagagggcagtggacaagagtcatgaagactgattcagaaactcccctgcaggaggagaagacgtctgagccatccctgtgccaccaccaagagtcactccagcttctgaaaaagccaccgtgggggggagccgcctccaattaaagtccttggtcacatcaaaggaagt

SEQ ID NO: 334805 - DNA, 522 bp, Homo sapiens
gtgctgtggggtccctagagacctgaaactcacagcccagtggggacagcccaagggcccttttctttggctcctgcttccctctagaggcggacactggtaatgcaagaaacaccacacccacccctactctgtcccagccagcatctcagtgatattaaacgcctactgtgtaccgcataccctgcaaagcacttgacatctttatgtcaccaaatccttacaacggcattctgcgggtaggtttcaccataccactgcacagactggaaaactgaggttcaaggaagctaaacggcccgaaattacacagcaaggtgcaacaggaattaagaactgaagtccatctaagtaaaaaaggagtgtgctcttaactgttatgctgttctgccaggcttcagatggagcctttccatttaaaaaccacttaccatcaactcttggagatcaaggtggttctgaacatctcattctggaattgtatagacggaataaaatctggcttcagataaaactacaaaa

SEQ ID NO: 334806 - DNA, 428 bp, Homo sapiens
ccaaaacatggggtccaagatcttctgttgttgccgcaagaccagcgaggggtcttccaccactgttggcttccacaatccaagaatgttcgaacagcatcatccacggtccttcatgctgtaccaaaaagacatccacgcctcccctatgacaaccgcatgatgctcaaggcgtgcatccttaggaggccatgagcattctagccggcggcacccacgtggtccctgcggctgcacagctgctgggcttccatgaggaagagggcagtggacaagagtcatgaagactgattcagaaactcccctgcaggaggagaagacgtctgagccatccctgtgccaccaccaagagtcactccagcttctgaaaaagccaccgtgggggggagccgcctccaattaaagtccttggtcacatcaaaggaagt

SEQ ID NO: 334807 - DNA, 557 bp, Homo sapiens
  misc_feature (125)..(125): n is a, c, g, or t
  misc_feature (130)..(130): n is a, c, g, or t
  misc_feature (155)..(156): n is a, c, g, or t
  misc_feature (158)..(158): n is a, c, g, or t
  misc_feature (166)..(166): n is a, c, g, or t
  misc_feature (171)..(171): n is a, c, g, or t
  misc_feature (191)..(191): n is a, c, g, or t
  misc_feature (200)..(200): n is a, c, g, or t
  misc_feature (275)..(275): n is a, c, g, or t
ccaaaacatggggtccaagatcttctgttgttgccgcaagaccagcgaggggtcttccaccactgttggcttccacaatccaagaatgttcgaacagcatcatccacggtccttcatgctgtacngcganaggaggtacaggacgaggcgttggnntnggggggtngggtngtgttggggccagtggccanacgaggggnggggggggggggggggggggggggggggggggggggggggggggggggggggggggggggggggggggggggggnggctacaacgcgcatgatgctcaaggcgtgcatccttaggaggccatgagcattctagccggcggcacccacgtggtccctgcggctgcacagctgctgggcttccatgaggaagagggcagtggacaagagtcatgaagactgattcagaaactcccctgcaggaggagaagacgtctgagccatccctgtgccaccaccaagagtcactccagcttctgaaaaagccaccgtgggggggagccgcctccaattaaagtccttggtcacatcaaaggaagt

SEQ ID NO: 334808 - DNA, 516 bp, Homo sapiens
ctgtgtccttattttccaaatcccatctttactagctaacattattaagcgctatgtgccagcacggttttaagtcgtttgcatacacagtatcaactcatttaaccgggtgcaacaactctgtggtaactaatattatcattctcattttataaatggggaaactgaggtatagaaagactatgtaacctgctcaaggtcatatggctaggaagaggtggagctgggacaccaacccagacagtcacaccccaaaaccactaaactacactcctcccatcagttttcctctctagaggctgaggtcttcagctcttcacctccagattttccaggcccaatccctcagaactggtctcctgttacttaccataagagcagctgttgaaggttacctaggagggaaagagtaaggaagaaaactaccccaatttcactttccttgccctgccacatcccagtcccagccctggccacactcacctccctggcactgcccattggtatcaggctctg

SEQ ID NO: 334809 - DNA, 576 bp, Homo sapiens
atcctattccttcccaccaatatttcagcaattttttccactttatttctttgctggggttgaagggagaggtctaggctggaagatacacatttaggaccaattaatacatagatcagatatagataggatttaaagttatgaaattgaatgaaatggccaaagaactataaatagagaaaaatgtctcctccaatacttagaggttggggaaagttagcaaaaaagaaacagcaaagaagcagcagccagtgaggtaggaagaaagccagaaaaacgtggtggctctgagaaggggaggacctctgggctttgattccatctccttgtcttttttctttgtttttagagacagggtcctgctatttcccaagctggagtgcagtggtgcgatcatggctcactgcagcctcgaactcctgggctcaagcaatcctcctgagtgatcccatttcttaatcagtgtagccccaagaaggctggggctatttaccagggtagaaaaaggagcttacctcccacctttggtcctaagaccctgccccctccccttcacaccataactaggatacagta

SEQ ID NO: 334810 - DNA, 600 bp, Homo sapiens
tggatcacagattgggctcctttacccatggagaagcctatgctcacatcataatgcaaaaatatttttttgagtgtgtctggtgacatatcaaaagttagccttgccatagatgtatagcgtaccatttttttctcaacccttgaattggggttggagaggaagagaaaaatcttgccctgctatttaagggacagctttcttttggtctctttacacattttggcacataaatggagtttatgtgcatatggcttcctttatttttatttaaaaaaataaatctattaccctgtggataagagaccttggcagtaagattaaaagcattgtagtagagaacatattttacaggaacatattttacagaaatcaaatctgtagaagcttatgtaaaagctatccttccaaattgacaagtatgtaagggaatttttaaaccgttttttttttcttttaaaatccatgtataaagtagctacttaaaaataagatttaatgaggtaaggaatagtagagagaagagacaacaactagtggattttaaaatatttttctttgtttaggtgatttgggaaactggtcatccaagatacaacc

SEQ ID NO: 334811 - DNA, 255 bp, Homo sapiens
ggctttgtttgcatagaccatagaaaatgcttgagtgtacattggagaattctgtgaggtagaagtaacctccctgggatgatgcttctgtattcagtgatgagcagccacagtttctccctctttccctgtctcctcaagaggtagtttttttgtttgtttgtttttagacggagtcttgctctgtcacccaggctagagtgcagtggcgttcctcatcccagtgacgttcctcatccttttgacgttcctcat

SEQ ID NO: 334812 - DNA, 459 bp, Homo sapiens
aggccaatcagcaccccaccctgagatatcataatcattagtccttagcctgcctttcttcttcttcaacaagtcacttttatgattcaattaccatttccatattgatgaattccacattgatatttcaaggtctgatgtgttgtgtgaaatctttggctccttcccctccttatctctttatgcaggtaaacattagactctaatcatgttatttctcaagatgttaaactgtttccttcttttcattcccatgttaccactacagtggtagatagctatggcctgcagtccacatatagccctcgcctgtttttctaaataaagttttactggaacacagccatgcttattcatttatatattgggtatggctgctttcttgctacagtggtggggtcaagtagttgccaccaagactatatggcctgaaaagcctaaaatatttatttaagtttt

SEQ ID NO: 334813 - DNA, 227 bp, Homo sapiens
tcacagggtgaaataaaaaaacatgggcaataaagaataaactgaatgagaacagaatacaacctaggtctccattttctcatctgcaaatgagaaaaagtaggtgccaaacctgactgttccatcagaatcccatatggggatattccataaaatataggttattagtctccactcccagaatattttgatttattttgtctaaggataggacctgagaatctgca

SEQ ID NO: 334814 - DNA, 985 bp, Homo sapiens
ggagagttttactcactaacaggtcctttcctggaagaaataacctcatctcctgccatattagtttacaataaaaatcattccaaagtgagccatttcacattgcatttttgccacatgcacatttgctattgaaaccacagattctcagcataagtaagacataggtgtttcagaaacttcataaatacacgatctttcaggtgctcctcaatttcttaatcaaggtatattgaactccagtgattaggatagaacctgaaaacatcctttgttctattggatagtacaacacagcaagagcacacagttatttgtataataaaacaacttaattaatgaggaagatgggatgtttgattcctgctaccaccagttcacttcacaaaggccttcttctggtattaccaggaaaactttcctgcattttctagggaaaaagaaaagtcgtttattaggagcacaatgcagatatgtatctgtgttttcatagcttcagcaaacttcttagtaaaattcccatttcaacaaaaaccaaaatactgattgtttgaatgtagaaaggtatagaataaagactacaaaggggaattttaccagggctccttagaccagcttccccagcataatttttatataactcaagtaagcctctgcttcccctctcctttccagtataatataagaaggtcggaactgtcgcacaaaagaacttgatttcaatatgaaaatataatatgtaattttggggactgcagactttctgcatcaaagatctggacagccttaacttttataaaaataatttttcaatgttctcttttactaaccaggaaaacaagatgttttctgaaattaatgactttttctattttgggtctgttttctaagtttttacaggttgaggtataaagggtcgtcttctcctcatattgcctcttcataatcacctggggctattttttgcaagtcactgcatttttac

SEQ ID NO: 334815 - DNA, 124 bp, Homo sapiens
tccacaagagagagggatgatgtattcaaaatgctaaagcagacaagcaagcaaacaaacaaaaatgccaatcaacaatactgttcccggccgggtgaagtggctcatacctgtaatcccagca

SEQ ID NO: 334816 - DNA, 117 bp, Homo sapiens
attgagaaaagaactgggccaagaggaaaacaagtaagaagctactatgataggattcttgatttcaaagaaaacaatcggcttctcgctcccccctgtcacatggtttactctgta

SEQ ID NO: 334817 - DNA, 388 bp, Homo sapiens
tctcctccattgcaaggaactggcaccatctatcatccaagccagaaacaacatcctccttgagtgctctctttctcacttgctgcacccaattttggccaagttctgctaattctggctccagaacagctctcaaatctctccccgtttcttcatcacgactaccagaccctactccagttcccattgttttgaggctggatcttggaattgcttgctcaacaggggtccctttatctagaccagcttccaacaaaccattttccaaagtaagccatagagatcttccttcaaaattgcatgcagaccaggcacagtggctcacacctgtaatcccagcactctgggaggccgagctgggtggatcatctgaggtcaggagttcgag

SEQ ID NO: 334818 - DNA, 267 bp, Homo sapiens
ttgtccctgtagcttatttggattttaatagatttagcagtatagaaacaacttgctaagttattttttttatgagaactatgaaatgtgtatatgttcgtggattacagaaaacatttgttgaatggcttttactttttagctaaacacattttattttggctgcagaacgtgacggtctcataacttatattttctacactgctaaatttattaaaatccaaataagctacaggacagccatttaggtaacagacatttaggtga

SEQ ID NO: 334819 - DNA, 946 bp, Homo sapiens
cctttattcccgtaggtacagttcctacattgaaaatgtccagaatattatttaaaccttgactgctctctcgatggcacccagccttcatcacttacatggctgagtttgttcattcttaaaacagtctttggattttaaactaaaatatttatcaaacccaagtctatagtaagtgtccactaaatgagcaaacaggaccatgtaaaactaatgtctttctttaagtggaaagttaacacttcttaaagcataagctgactccttactattcctattttttaattaattttggtttttaaaaagattaggccatcctaagcagaaaactataaacaaaattgctggtatataaaagcatagaatttggaattaaatccaggaaaccaaagggcacagagctgaagacccaagaattctcctttcattgcgtgaactgcattgccattcatggcaggtaaaactgtctgaaacaaagacctgaagtccttaggtgagtggcagtagaagctgctgccagtgttgcctagcaggaaaggaacttggagcaatcagggaatcagaggtgctgtggaccaaaagcccatatgggaatccttgtgcttctccagagcctagtgagagccacctcactccacctttacgtttcattttaaacttctttttcacaatagtaggaagttacattaaaaacaaacatcctatagatgagaacatatgatttctaaggttttctttcaaacaatatgagagggggaaaaagaagatgaacctggatgaagcaaaattatgctaaagctgggcaaagggtacacagaggttcattataggtactattctgtctgctgttgtacacttggaaaagtttccatcatgattttaaaatgcaaatattataaaggctgagttgatgtaaatgtttatattactaataatacttaggagg

SEQ ID NO: 334820 - DNA, 137 bp, Homo sapiens
gcctctcagtgtgctaagattataggcatgagccaccgcacctgacccacatttctttataatagtgaatttctttataattgtgaattccagtatgctttggcgaaaagggttttttttttttgtttttttttttt

SEQ ID NO: 334821 - DNA, 277 bp, Homo sapiens
gtgagggagaggcggagaaaagctcctgccaaagtcccagagggttaggggacagcattaaatgccctaccctcccaaccagggcaaaggctacagagaagacggttgagggcccaaaggcttcctaatttactatccgcatccccgacaagcatgtacagtcgatcctcatcattcacggattctgcatttgcgaattcgtccacttgctaacatttatctgtagccccaaagctggcactcaccgtgctttggctcattcatggacacacacaca

SEQ ID NO: 334822 - DNA, 407 bp, Homo sapiens
tcctcccagcttctgccagagtagtacaaggactttagaactctttacctcatatctttccctcctgctatttctttctattattttagctctaccttgttttcacttaactgctccacactctaccccaactttatatattttagttcctttacagtcagggcttatttggattgacgtatatgattttgcttttttgcatatactccttattttggtatatcttttagtgattctttcagcaactatctgtgaatggcaatttttttcacttgttgcctgaaaatgtctttattttgccctcattttaaaaaatataatttagcttgataaagaattagaagggttttttttttttttttttggactttgaagatttctccgtggttctctggctttggttattg

SEQ ID NO: 334823 - DNA, 737 bp, Homo sapiens
gaaggagaatcgtttaaacccatgaggcggaggttacagtgagccaagatcgcaccactgcactccagccagggcaacagagcaagactccatctcaaaataaaaaaaaaaaattaacaaaaaggatggtaggagaggtaactccagtactaattggtatgtcttaagcactgctgatgagaaagccattcagatacaaagtactggaaaggcagagggtgtactggaaagtactggaaagggtggttggaggagaatcttttgtgtggtggtgtgcacaagttactggggtaaagtggacaggattacaaggactttagtaggagaaatatgggaggatacattgaggtacttggtaagcatggcttttcgtctcaaggtttacacatataaaagcaaggacaaaaacaaccatagcattgtcttgtatttactacaagtcagaaagttgagtatattgccagtctttttttaaaatagtctggtagttttatgaaaagtctaactaaaactagtactgcttatatattgtccattttgagataaaattgtttacagtgatatgttatacataactagctacatgtcatgtaattataactttactttgaactagggtttttatttatgtggcattgtaacatcaaaaggtcacaataccactaccatctactaaaatgtaagaatatcttttgttaattcctacacggtgtcagctaaaagttcttagtgacaat

SEQ ID NO: 334824 - DNA, 596 bp, Homo sapiens
gccatgtggacagggtctacggacagtacagggccagaggtccctattctgggaccttgacatgctgccgttctcgtgagcttctgggggactcctgcgaggcatgtgggctgcttctcagacctgcgggtaccccacctcccagatgttgtcaatgggatgtgaggttcacgagcacgtcacggagcctctcccctcgtcatgtacgtgcgcatcatggcaaaatgtgcctggccactggttcctgacgctggaaggcacgaacccactccccacacccacagccggcgttgctgtgactgcagtgtctgtgttctaagccccacttttcacatccatccccgctgcccggccagagagacgtcctcagcccagagccccacttttcacatccatccccgctgcccggccagagagacatcctcagcccagagcttcctatctccctcgcctgctcctaccctccagaataaaatgtgtacgaggtagggaatctgtgcttgtctgccagttgtggtcactgctgtatctcttagagtggggcttacccctgggggcccagcgctcagggatgcgtgggctccaggctggagaga

SEQ ID NO: 334825 - DNA, 544 bp, Homo sapiens
cgaagttgtggaggaagtcatcatcgtaacattgtttcaggtatgctggatttgagacgcctgtgcaaaatccaagatgaggatgtcttggttagatctatgcacctagaattcatggaaaagatacagaatcacatctttcatgaagagcaggtcctaaagtcagtgttaggcaacaactgcaaatagcaaaaatcatctttggaaattctaatttaggaagatcccctccaaaggagactcacatactatctcttaataagccagtcgtctagcactagaacaaactaccgtttctttagttgagtcctaaatgatcattaagtagaaaaataagagtattaacttgcatttttaactgtttttaaaaaattctctacccatttgtagttgccacgtatatgtgttgaatttcttaagtgaaaagtacatatgatgtaaataaatcatttacatttaggctttagtgtaaatagatggtaaatgaagtcatggtggataatgagacacagggagagtatattagtttcctatagttgcagta

SEQ ID NO: 334826 - DNA, 311 bp, Homo sapiens
actccgttctgtctgaataaaaaggaatccatgagtttatatggatacaattttttttaatggggaaagaggagaaggaagagaagggaaaactgttctgttacagaagaataacaactaataaacagaaggaataacagaaattataaccaccacagtaataactgattcaggcaagaaccaatggatgccaaatctacctggttaaagattattaacgaatagcatattcacacagttcaaagaataatatcacaggtgacttattaactaccaagggaaaaggacatctttacaatataaaaacctgg

SEQ ID NO: 334827 - DNA, 575 bp, Homo sapiens
tatcctaggatcatatgtagaatcagaggatttcaacgtgctgtataaaaggagagagattctggaacatagggcaaattttagcagagttgggataatgactgggtaagaaaggataattctttgttctaaaagggatttctctggtattaaggccctgtgtgaaagctgctggagaaattcagttctgcaaagtttaaagtaaatggtttgctgtttatggagtactagattacttaatgcagtccagcctttatctaggtaaaggtgatgcttttcccattgtggaagatgttaggatgctaagtttgaatatgaaaatgtgttgtgtgttgtagaggcaatcaaatcaccattttggttgtatttcccattgagaaaattaaagatgcttctgtttgtgtaataattttgtttttatgaaataaagcgtaaaacttcatgtggtaaaatttcacactgtgattcattgtatttgagcatgcctatggaaagtgattgttactgtgtcaaatattgaatgatttgaataattactaagttgttcagttgtgtgtaggatactgctgctttga

SEQ ID NO: 334828 - DNA, 174 bp, Homo sapiens
atctctgttcagcctctgggtctaggtctccctgtgcagcctgtgggtctgggtctctgttcagcctgtgagtctgggtctcttttcagcctgtgggtctaggtctccctgtgcagcctgtgggtctaggtctctgttcagcctgtgggtctgggtctctctgtgcagcctgtg

SEQ ID NO: 334829 - DNA, 247 bp, Homo sapiens
agtggttaatttctccttccccttcttgtcactccctaccctcctgccccatagaccccaaagttatttgtttcgtaaggctataacatcatatttgaatgtatgaccttgaaaaatcctgattaagtagttctgggcaaagctctaatggttggaaaataaatcaggcctcccacacatacctgctcagccaagaatttgtttgccccagaaactgtgggtgggcgggaatggaagcaggcacacg

SEQ ID NO: 334830 - DNA, 356 bp, Homo sapiens
ctgttaagaaattaaggtttcttttaaaaagtgataacttttgaagtactgatttcacagtatcattaaaatcttaccgttgtacaaaacatttgtttaaatcattcaacaatcactatttactatgtaacaggcattgtaatcatagtcactgaaaataccaagtgactgcccagaatggcacagaatccctgttctccagctcatacagtttagctggagagatagacatctaaacaaataattaaatcaatgtgcaaagtgctataacaggagttatgaacaaggcacgatgagtatatagaataagaagagatgaactctgtcaagaaatgttaggatatgatcccagagat

SEQ ID NO: 334831 - DNA, 506 bp, Homo sapiens
ggcccaacttaatggcctcatcttaactaattacatctgcattgactgtgtttcccaataaggtcacattttgaggtactagggcttggacttcaacatatggattttgcaggggggcataattcaacccataatacacaatttagaaaataaaatcatagagcgtggggccagacatggtggctcacgcctgtaatctcaacactttgggaggctgaggtggttggatcacttgaggtcaggagttcgagaacagcctggccaacataatgaaaccccgtctctactaaaaatacaaaaattagctgggcttggtggtgcatgcctgtagtccgaactacttaggagactgaggcaggagaattgcttgaacctgggaggtggaagttgcagtgagccaagatcacgccactgcactccagcctgggcgacagagctagactctgtctcaaaaaaaaaaagtgccaatgtagagtactggagttgtgatccgtagcattggactt

SEQ ID NO: 334832 - DNA, 377 bp, Homo sapiens
tgtctcagagccaaatgtcctccatcttccttctgggagaaatgaggctccctaatgtgcacatacaaagcacactgatttgaaccattacacttaaaagcaaatatgtgggccaactggggtaattttgacttctctacttgagaaagtaaatttaaactttgtgccttaaaatgatattattacaaacaacaaagtattcaaaaacacgagggaaaactgattctggtttgacctcagccgatgtagtacctaggtaaaaacatcaggccaaatcaacctaatcctctattccgggggggggggacttgtttttcctatttttaattagaggattggtttatccaagatacaatgagacacagtcctaggatgaa

SEQ ID NO: 334833 - DNA, 367 bp, Homo sapiens
aggattaggctggatttctagagaacagcaaatggactctgagccaagtcttcacttgcgttccagtacagggacacacagtccccatggaggcacccaaaatggaatcgaagatgttgaagaatatacattgtcacacacacaaacatcctccaggacagaccacaggcgaggccataaaagctccttaataaaatttgagcagaaacacacaagtaagagtagggcacggtggctcacaccattaatcacagcagtttaggaggcccaggtttgaggagtacttgagctcaggggtccgagaccagcctgggcaacatggtgaaacctcatctgtacaaaaaatacaaaagttagcaaggtgtgg

SEQ ID NO: 334834 - DNA, 259 bp, Homo sapiens
catgcccagcccaaaactattgtatttctgtatactgtgacaattggaaatcaaaattttgaaaaatccaaacaaaattacaaagacaaaatatctaaaatgttagtgttatttcatagtagctgagagcagatttaacaccatgaatgtcattgccatttagaaaaattcttttattaatgaaaagaagtttcctaataactatcactgtaatggagaagtcatttgatgtacttcctcatgtcagctcatggttcag

SEQ ID NO: 334835 - DNA, 456 bp, Homo sapiens
actcagtcctcttaacccatctttattttccccatttatgatcaaggctcaccaaaatgaatatttgtctttgatcattacttaggaaaaataacaatactattaagaagaagagaggtaattgacattaggcctcagagacaaggagactgtaggagtgatacaattgaggcaaaggataagagcagcctcaactcagccccagccatttgttatcttgtaggagtgtggtgccggtagggtcagagcttccagcattttctgtgaaatctctcgatttacaaatgttgaaaataattttaaaatgttaaaacacaaagtcaaccattactgtatggtccaaatgaaacagagcaatgggtcagatttggctcatgggtcaccagtgttcaacctctgccgtaatgcagtaggtgcacaatttgtatttttagatattcttgcatactcttttag

SEQ ID NO: 334836 - DNA, 218 bp, Homo sapiens
ctcaagtaatccacctgcctcggcctcccaaagtgctaggattacaggcatgagccacgactcccagccttaatctatttttattgtgcttatcaatgaaccttaattttttttttcaaattctgagaggtcattactgaagatagcctaaactgtaacagaagcctgagaatttttctgtgattccaggcatctggagccattttgcaagaggaatc

SEQ ID NO: 334837 - DNA, 516 bp, Homo sapiens
ccaactatgtggaactgtcatcacagaaaaataattgccctggtcactccccagaaagcttgctcaagattttatccacttttgtttcaccaaagatttgatcttggggaaaaatatatccaactcagccagcttttgaaataacccaggatattgtcatcatgcatattttagaaacacttcaaacttaagagtacgctccatctctttccataagtctccccatgccaaacacacagaccagtccatagacttgagattatagctctttccagaagacaatatgcatatgtatgtatatatctgtcttagcccatctggtctactataacaaagtaccatagactgagtgccttaaacaacaaacatttacttctcacagttctggaggctggaagtccaagatcaagggaactctctggagtctctcttttgagggcattaatcccatttattaggattctatcttcatggcctcaaaagagagtctccgtcgactgggatcctcgtcacccg

SEQ ID NO: 334838 - DNA, 206 bp, Homo sapiens
taagtaactagttatttaattaaaagtaataaaatttagttactaaacacacaaataggcataatttagactaaaggatggctctttaaatgaaatgcgcttagctatataaaatatttacatcagtgtcctattttttttttcatctcactaagaactaggaaaactttgctgtgaaatgaattttgtgaactattactactgga

SEQ ID NO: 334839 - DNA, 305 bp, Homo sapiens
ctgtgaacctcagtatgtttcaaccccagagcactggaaggataggccacatttttgcaagtagcagagtattggcttaggaaagcatgtgtagatttaaattcctcctacaaactgccttccaaaaagattacaatacattcctccttcaaggaaagaacacttgctgatagggaggcattgaaggattttaagaattgtctggtgtgatttgtgctttaaatccctccaggagctgtgtaaaggatgcatttgaaggggtcaagatccaacgtgggtagaacagttaggagagagagcaacag

SEQ ID NO: 334840 - DNA, 725 bp, Homo sapiens
ttcaccagatcccagaggctgaacagctcgaccttctctgcacagcaggtccagcatcctttgaaacatgagttcttaccagcagaagcagacctttaccccaccacctcagcttcaacagcagcaggtgaaacaacccagccagcctccacctcaggaaatatttgttcccacaaccaaggagccatgccactcaaaggttccacaacctggaaacacaaagattccagagccaggctgtaccaaggtccctgagccaggctgtaccaaggtccctgagccaggttgtaccaaggtccctgagccaggatgtaccaaggtccctgagccaggttgtaccaaggtccctgagccaggctacaccaaggtccctgagccaggcagcatcaaggtccctgaccaaggcttcatcaagtttcctgagccaggtgccatcaaagttcctgagcaaggatacaccaaagttcctgtgccaggctacacaaaggtaccagagccatgtccttcaacggtcactccaggcccagctcagcagaagaccaagcagaagtaatttggtgcacagacaagcccttgagaagccaaccaccagatgctggacaccctcttcccatctgtttctgtgtcttaattgtctgtagaccttgtaatcagtatttcggaaaaacaaatctcaaaacaggctgtaagactagggtacacgagtatcgattcgtatctgccat

SEQ ID NO: 334841 - DNA, 1039 bp, Homo sapiens
ttcaccagatcccagaggctgaacagctcgaccttctctgcacagcagatgatccctgagcagctgaagaccagaaaagccactaagactttctgcttaattcaggagcttagaggattcttcaaagagtgtgtccagcatcctttgaaacatgagttcttaccagcagaagcagacctttaccccaccacctcagcttcaacagcagcaggtgaaacaacccagccagcctccacctcaggaaatatttgttcccacaaccaaggagccatgccactcaaaggttccacaacctggaaacacaaagattccagagccaggctgtaccaaggtccctgagccaggctgtaccaaggtccctgagccaggctgtaccaaggtccctgagccaggttgtaccaaggtccctgagccaggatgtaccaaggtccctgagccaggttgtaccaaggtccctgagccaggctacaccaaggtccctgagccaggcagcatcaaggtccctgaccaaggcttcatcaagtttcctgagccaggtgccatcaaagttcctgagcaaggatacaccaaagttcctgtgccaggctacacaaaggtaccagagccatgtccttcaacggtcactccaggcccagctcagcagaagaccaagcagaagtaatttggtgcacagacaagcccttgagaagccaaccaccagatgctggacaccctcttcccatctgtttctgtgtcttaattgtctgtagaccttgtaatcagtacattctcaccccaagccatagtctctctcttatttgtatcctaaaaatacgtactataaagcttttgttcacacacactctgaagaatcctgtaagcccctgaattaagcagaaagtcttcatggcttttctggtcttcggctgctcagggttcatctgaagattcgaatgaaaagaaatgcatgtttcctgctctgccctcattaaattgcttttaattccaaaaaaaaaaagtcgacgcggccgcgaatttagtagtagtagtaggcggccgc

SEQ ID NO: 334842 - DNA, 1015 bp, Homo sapiens
ttcaccagatcccagaggctgaacagctcgaccttctctgcacagcagatgatccctgagcagctgaagaccagaaaagccactaagactttctgcttaattcaggagcttagaggattcttcaaagagtgtgtccagcatcctttgaaacatgagttcttaccagcagaagcagacctttaccccaccacctcagcttcaacagcagcaggtgaaacaacccagccagcctccacctcaggaaatatttgttcccacaaccaaggagccatgccactcaaaggttccacaacctggaaacacaaagattccagagccaggctgtaccaaggtccctgagccaggctgtaccaaggtccctgagccaggttgtaccaaggtccctgagccaggatgtaccaaggtccctgagccaggttgtaccaaggtccctgagccaggctacaccaaggtccctgagccaggcagcatcaaggtccctgaccaaggcttcatcaagtttcctgagccaggtgccatcaaagttcctgagcaaggatacaccaaagttcctgtgccaggctacacaaaggtaccagagccatgtccttcaacggtcactccaggcccagctcagcagaagaccaagcagaagtaatttggtgcacagacaagcccttgagaagccaaccaccagatgctggacaccctcttcccatctgtttctgtgtcttaattgtctgtagaccttgtaatcagtacattctcaccccaagccatagtctctctcttatttgtatcctaaaaatacgtactataaagcttttgttcacacacactctgaagaatcctgtaagcccctgaattaagcagaaagtcttcatggcttttctggtcttcggctgctcagggttcatctgaagattcgaatgaaaagaaatgcatgtttcctgctctgccctcattaaattgcttttaattccaaaaaaaaaaagtcgacgcggccgcgaatttagtagtagtagtaggcggccgc

SEQ ID NO: 334843 - DNA, 873 bp, Homo sapiens
ttcaccagatcccagaggctgaacagctcgaccttctctgcacagcaggtccagcatcctttgaaacatgagttcttaccagcagaagcagacctttaccccaccacctcagcttcaacagcagcaggtgaaacaacccagccagcctccacctcaggaaatatttgttcccacaaccaaggagccatgccactcaaaggttccacaacctggaaacacaaagattccagagccaggctgtaccaaggtccctgagccaggctgtaccaaggtccctgagccaggttgtaccaaggtccctgagccaggatgtaccaaggtccctgagccaggttgtaccaaggtccctgagccaggctacaccaaggtccctgagccaggcagcatcaaggtccctgaccaaggcttcatcaagtttcctgagccaggtgccatcaaagttcctgagcaaggatacaccaaagttcctgtgccaggctacacaaaggtaccagagccatgtccttcaacggtcactccaggcccagctcagcagaagaccaagcagaagtaatttggtgcacagacaagcccttgagaagccaaccaccagatgctggacaccctcttcccatctgtttctgtgtcttaattgtctgtagaccttgtaatcagtacattctcaccccaagccatagtctctctcttatttgtatcctaaaaatacgtactataaagcttttgttcacacacactctgaagaatcctgtaagcccctgaattaagcagaaagtcttcatggcttttctggtcttcggctgctcagggttcatctgaagattcgaatgaaaagaaatgcatgtttcctgatatgccattcttgctgggggatcc

SEQ ID NO: 334844 - DNA, 444 bp, Homo sapiens
agaagtggagattacctgatatgccattcttgctgcagcaagaatggcatatccaagcagaagtaatttggtgcacagacaagcccttgagaagccaaccaccagatgctggacaccctcttcccatctgtttctgtgtcttaattgtctgtagaccttgtaatcagtacattctcaccccaagccatagtctctctcttatttgtatcctaaaaatacgtactataaagcttttgttcacacacactctgaagaatcctgtaagcccctgaattaagcagaaagtcttcatggcttttctggtcttcggctgctcagggttcatctgaagattcgaatgaaaagaaatgcatgtttcctgctctgccctcattaaattgcttttaattccaaaaaaaaaaagtcgacgcggccgcgaatttagtagtagtagtaggcggccgc

SEQ ID NO: 334845 - DNA, 539 bp, Homo sapiens
tcgctgtaccaaagcttcagttatgtttcctgtgtcaggttccatcgcactacttcatcatgtatctccctagcgttcctctgtgatgattattgtcctcagagccatgtccttcaacggtcactccaggcccagctcagcagaagaccaagcagaagtaatttggtgcacagacaagcccttgagaagccaaccaccagatgctggacaccctcttcccatctgtttctgtgtcttaattgtctgtagaccttgtaatcagtacattctcaccccaagccatagtctctctcttatttgtatcctaaaaatacgtactataaagcttttgttcacacacactctgaagaatcctgtaagcccctgaattaagcagaaagtcttcatggcttttctggtcttcggctgctcagggttcatctgaagattcgaatgaaaagaaatgcatgtttcctgctctgccctcattaaattgcttttaattccaaaaaaaaaaagtcgacgcggccgcgaatttagtagtagtagtaggcggccgc

SEQ ID NO: 334846 - DNA, 460 bp, Homo sapiens
ttcaccagatcccagaggctgaacagctcgaccttctctgcacagcagatgatccctgagcagctgaagaccagaaaagccactaagactttctgcttaattcaggagcttagaggattcttcaaagagtgtgtccagcatcctttgaaacatgagttcttaccagcagaagcagacctttaccccaccacctcagcttcaacagcagcaggtgaaacaacccagccagcctccacctcaggaaatatttgttcccacaaccaaggagccatgccactcaaaggttccacaacctggaaacacaaagttaaccatacctacgcacatcatagtctaactgctgataaaccaaagataaagaaaacaatcgtgaaagcagctggagtaagtacacatgaggacttataggtatgtaagttacagttgacttgtcattattatgctgagtcaattcgctctg

SEQ ID NO: 334847 - DNA, 931 bp, Homo sapiens
ttcaccagatcccagaggctgaacagctcgaccttctctgcacagcaggtccagcatcctttgaaacatgagttcttaccagcagaagcagacctttaccccaccacctcagcttcaacagcagcaggtgaaacaacccagccagcctccacctcaggaaatatttgttcccacaaccaaggagccatgccactcaaaggttccacaacctggaaacacaaagattccagagccaggctgtaccaaggtccctgagccaggctgtaccaaggtccctgagccaggttgtaccaaggtccctgagccaggatgtaccaaggtccctgagccaggttgtaccaaggtccctgagccaggctacaccaaggtccctgagccaggcagcatcaaggtccctgaccaaggcttcatcaagtttcctgagccaggtgccatcaaagttcctgagcaaggatacaccaaagttcctgtgccaggctacacaaaggtaccagagccatgtccttcaacggtcactccaggcccagctcagcagaagaccaagcagaagtaatttggtgcacagacaagcccttgagaagccaaccaccagatgctggacaccctcttcccatctgtttctgtgtcttaattgtctgtagaccttgtaatcagtacattctcaccccaagccatagtctctctcttatttgtatcctaaaaatacgtactataaagcttttgttcacacacactctgaagaatcctgtaagcccctgaattaagcagaaagtcttcatggcttttctggtcttcggctgctcagggttcatctgaagattcgaatgaaaagaaatgcatgtttcctgctctgccctcattaaattgcttttaattccaaaaaaaaaaagtcgacgcggccgcgaatttagtagtagtagtaggcggccgc

SEQ ID NO: 334848 - DNA, 995 bp, Homo sapiens
aagaaaagagaggctctcagttctgaaggagaatgaaatgacagatatttgtcattaaactgggcttcattcctacttaatcaaagcactgaattagctgttttgtctctaggtccagcatcctttgaaacatgagttcttaccagcagaagcagacctttaccccaccacctcagcttcaacagcagcaggtgaaacaacccagccagcctccacctcaggaaatatttgttcccacaaccaaggagccatgccactcaaaggttccacaacctggaaacacaaagattccagagccaggctgtaccaaggtccctgagccaggctgtaccaaggtccctgagccaggttgtaccaaggtccctgagccaggatgtaccaaggtccctgagccaggttgtaccaaggtccctgagccaggctacaccaaggtccctgagccaggcagcatcaaggtccctgaccaaggcttcatcaagtttcctgagccaggtgccatcaaagttcctgagcaaggatacaccaaagttcctgtgccaggctacacaaaggtaccagagccatgtccttcaacggtcactccaggcccagctcagcagaagaccaagcagaagtaatttggtgcacagacaagcccttgagaagccaaccaccagatgctggacaccctcttcccatctgtttctgtgtcttaattgtctgtagaccttgtaatcagtacattctcaccccaagccatagtctctctcttatttgtatcctaaaaatacgtactataaagcttttgttcacacacactctgaagaatcctgtaagcccctgaattaagcagaaagtcttcatggcttttctggtcttcggctgctcagggttcatctgaagattcgaatgaaaagaaatgcatgtttcctgctctgccctcattaaattgcttttaattccaaaaaaaaaaagtcgacgcggccgcgaatttagtagtagtagtaggcggccgc

SEQ ID NO: 334849 - DNA, 544 bp, Homo sapiens
atcggcgtcgttaactcaggaatcagctttgactgtgcgtcgtgctcacatgggcgtgatgcaacaatcaggaaagttccttttaccgggctacgtgatacacccagagccatgtccttcaacggtcactccaggcccagctcagcagaagaccaagcagaagtaatttggtgcacagacaagcccttgagaagccaaccaccagatgctggacaccctcttcccatctgtttctgtgtcttaattgtctgtagaccttgtaatcagtacattctcaccccaagccatagtctctctcttatttgtatcctaaaaatacgtactataaagcttttgttcacacacactctgaagaatcctgtaagcccctgaattaagcagaaagtcttcatggcttttctggtcttcggctgctcagggttcatctgaagattcgaatgaaaagaaatgcatgtttcctgctctgccctcattaaattgcttttaattccaaaaaaaaaaagtcgacgcggccgcgaatttagtagtagtagtaggcggccgc

SEQ ID NO: 334850 - DNA, 278 bp, Homo sapiens
aaaaaaaaatacaagaaagaacggcaactaaagaaactggtaaatctaaaaaagtattaactatataaaataataatagtggctcatgtgaaaagtataaaaatagagtgaaaatatattcctgggaaacataaaagatgcaaggggaggtatgaaaattaaagccttcttaggattctctgtgcgtgaggaagttagagatgccaagccaagaatgcactttgaaacgttaaagggtagccactaaaataatggaaatataatgtacacctagggtg

SEQ ID NO: 334851 - DNA, 90 bp, Homo sapiens
cttgtaattttttgttgaaacctgcacaatttgaagatgataatgtggttactttgaaaatcagatcctccgccctctgcagggttcatt

SEQ ID NO: 334852 - DNA, 1324 bp, Homo sapiens
cactcatcaactcttttatgccaacatggtgtttctgcccttgtctcagaagccaactactgatacctgcttcagaaaactgactatgaattccacaaagtcctgcttttttcttttggattgtacaatcaacaaacaagtcacccttctaaaactctgtttctgaaattttaacataattcctgaagttccagagtctcttaaatgctaaaatattaacaataccattccattttttcccctaacactcagaagcatactgatacccatcctgtacacagccttttcttgcctgataacaagagcactaatgacagagctattgcatcaggttgattaataaaccccgtcttaggcagcctcatcatgtggataaagaaaaggagttaagatgatgttcctgctgccttccccaacatagaaacacacccacaacacccccaatcctggaataaccagatgttatcttcatcatcacactagagcactgtaaaccacatcaaaacaaaacgaaacaaataacaacttccctggccaccaaaaatagatggcccagccagaaatagtgctgccagaggcagttaaatgagctgcaaggcaggaatgacagttgagctgcagtgatgctggggcctcccaaggattaccggactccaaactagattctccatcactttggtccaatcaacatcagcaggacttggtatttgttcacaattggttcaactcagattatttgctgagcttctggaattcagagagagtgacttatgggctcacctttttctctagattttaaataatcctttctccatttttttctaggagtgaaggcaattttgaaggcatgactacgacctgctctggccacaagagctaagagttgccaggtgttgtggctcaaacactttgagatgccaatcccaacactttgagaggccaaggcaggaggattgcttgaggctaggagcttgaaaccagcctgggcaacacagtgagaccccatctctacaaaaaataaaaaaacaggccaggcgcagtggcacttagggaggccaaggtgggtggatcacctgaggtcaggagttcgagaccagcctgaccaacatggagaaaccccgtctctacaaaaaatacaaagtttgccagtgtggtggcacatgcctgttatcccagctactcaggaggctgaggcaggagaatcgcttgaacccgaaaggcagaggttgcagtgagtggagatcacgccattgcactccagcctgcgcaacaagagtgaaactccatctcaaataaataaataaaataaagttttaaaaagtca

SEQ ID NO: 334853 - DNA, 1026 bp, Homo sapiens
ctgagataatctgaggcatggagagcacattcacagtgtgtctctgtgtgtgtgtgtgtgtgtgtatgtgcgtgtgcgtgcacatgtgtgcctgcgtgttggggataacatactatcgccccacaacacacccacaacacccccaatcctggaataaccagatgttatcttcatcatcacactagagcactgtaaaccacatcaaaacaaaacgaaacaaataacaacttccctggccaccaaaaatagatggcccagccagaaatagtgctgccagaggcagttaaatgagctgcaaggcaggaatgacagttgagctgcagtgatgctggggcctcccaaggattaccggactccaaactagattctccatcactttggtccaatcaacatcagcaggacttggtatttgttcacaattggttcaactcagattatttgctgagcttctggaattcagagagagtgacttatgggctcacctttttctctagattttaaataatcctttctccatttttttctaggagtgaaggcaattttgaaggcatgactacgacctgctctggccacaagagctaagagttgccaggtgttgtggctcaaacactttgagatgccaatcccaacactttgagaggccaaggcaggaggattgcttgaggctaggagcttgaaaccagcctgggcaacacagtgagaccccatctctacaaaaaataaaaaaacaggccaggcgcagtggcacttagggaggccaaggtgggtggatcacctgaggtcaggagttcgagaccagcctgaccaacatggagaaaccccgtctctacaaaaaatacaaagtttgccagtgtggtggcacatgcctgttatcccagctactcaggaggctgaggcaggagaatcgcttgaacccgaaaggcagaggttgcagtgagtggagatcacgccattgcactccagcctgcgcaacaagagtgaaactccatctcaaataaataaataaaataaagttttaaaaagtca

SEQ ID NO: 334854 - DNA, 355 bp, Homo sapiens
caggaaaggattagtgacgtgagatcaaaataaattaaagaacataaaagtaagtgaagatattcaaggcagagagacaagcccaggctaaatgcagaagcagaaatgaaggcgtaagtttggggatgaggaagggatgagagttaagcatggagaggttgccgacgaatagcgaccctggaaccactagactcttagtccagtgctcttcaggaccctggaggaccctctgcaatttggcctgagactccagccagcagctggaaactcctcgtccaggagactgtccaggtgaggagctcagcagtgaggagggcggaccccatcagcccacttgccaacctgcaatgccacc

SEQ ID NO: 334855 - DNA, 795 bp, Homo sapiens
gcgcacacagatgttagggttcgggcgagctatttggagcctgcgcagtcagatccgaggacatgttgacgtcgtccgagagtcttaaaatcctgctgtggccggattccagactcgtgggggaaaggctggatcttaatgcaagtcatgaacttgaatgtgccgatgaggcctggcattcttgtccagagacagagtaaggaagtgttggccacacccttagaaaacagaagggacatggaggcagaagaggagaaccaaataaatgagaagcaagagcctgagaatgctggagaaactggtcaagaagaggatgatggtttgcagaaaatacacacatctgtcactagaactccttcagttgttgaaagccaaaaaagacctttaaaaggagtgacattttctagggaggtaattgttgtggatcttgggaatgaataccctacacctcgaagctatactcgagaacataaagagaggaaatgaagctcaaaaaagggtaagagtgaaagaaaatgtaacgtttgactaacgttgaaagactgagggtacaaaatcatgttgaaacaacaaaacaatggggaattaagcaaataaagatattattttacctttgtgcagaaaggagtgagccatgtgcaaaattctgtaagtaaaatacttagagcttgaatataattttttaaaaattcaaatctgagttcaagaaattgattgtattgcccttaaaactatctactcaaacactgttctggcatgtgaataaagtgatttttgtttgtacaaatacctatt

SEQ ID NO: 334856 - DNA, 1182 bp, Homo sapiens
  misc_feature (327)..(327): n is a, c, g, or t
gcgcacacagatgttagggttcgggcgagctatttggagcctgcgcagtcagatccgaggacatgttgacgtcgtccgagagtcttaaaatcctgctgtggccggattccagactcgtgggggaaaggctggatttcaacagatcacatggatcaaggccttagggaggtggttggggattcacgtatgccctggaccatctggagcccaagttgctgcagatcctgtcaccacaagtgcacaccctctggccaccatagcaaagaagtctgcaggcaggagatggagtctcgctctgttgcctaggctggagtgcagtggcacganctcagctcactgcaacctctgccttcccagttcaagcaattctcctgcctcagcctcccaggtagctgggattacagtttccaaggcaggaaaggtaaagagacaaagaaagtgccttgtacagatgcaaacggaggtgtagactgtgcagctgccaaagtggtgacaagcaatccagaggaccatgaaaggatcttaatgcaagtcatgaacttgaatgtgccgatgaggcctggcattcttgtccagagacagagtaaggaagtgttggccacacccttagaaaacagaagggacatggaggcagaagaggagaaccaaataaatgagaagcaagagcctgagaatgctggagaaactggtcaagaagaggatgatggtttgcagaaaatacacacatctgtcactagaactccttcagttgttgaaagccaaaaaagacctttaaaaggagtgacattttctagggaggtaattgttgtggatcttgggaatgaataccctacacctcgaagctatactcgagaacataaagagaggaaatgaagctcaaaaaagggtaagagtgaaagaaaatgtaacgtttgactaacgttgaaagactgagggtacaaaatcatgttgaaacaacaaaacaatggggaattaagcaaataaagatattattttacctttgtgcagaaaggagtgagccatgtgcaaaattctgtaagtaaaatacttagagcttgaatataattttttaaaaattcaaatctgagttcaagaaattgattgtattgcccttaaaactatctactcaaacactgttctggcatgtgaataaagtgatttttgtttgtacaaatacctatt

SEQ ID NO: 334857 - DNA, 1031 bp, Homo sapiens
  misc_feature (176)..(176): n is a, c, g, or t
gcgcacacagatgttagggttcgggcgagctatttggagcctgcgcagtcagatccgaggacatgttgacgtcgtccgagagtcttaaaatcctgctgtggccggattccagactcgtgggggaaaggctgatggagtctcgctctgttgcctaggctggagtgcagtggcacganctcagctcactgcaacctctgccttcccagttcaagcaattctcctgcctcagcctcccaggtagctgggattacagtttccaaggcaggaaaggtaaagagacaaagaaagtgccttgtacagatgcaaacggaggtgtagactgtgcagctgccaaagtggtgacaagcaatccagaggaccatgaaaggatcttaatgcaagtcatgaacttgaatgtgccgatgaggcctggcattcttgtccagagacagagtaaggaagtgttggccacacccttagaaaacagaagggacatggaggcagaagaggagaaccaaataaatgagaagcaagagcctgagaatgctggagaaactggtcaagaagaggatgatggtttgcagaaaatacacacatctgtcactagaactccttcagttgttgaaagccaaaaaagacctttaaaaggagtgacattttctagggaggtaattgttgtggatcttgggaatgaataccctacacctcgaagctatactcgagaacataaagagaggaaatgaagctcaaaaaagggtaagagtgaaagaaaatgtaacgtttgactaacgttgaaagactgagggtacaaaatcatgttgaaacaacaaaacaatggggaattaagcaaataaagatattattttacctttgtgcagaaaggagtgagccatgtgcaaaattctgtaagtaaaatacttagagcttgaatataattttttaaaaattcaaatctgagttcaagaaattgattgtattgcccttaaaactatctactcaaacactgttctggcatgtgaataaagtgatttttgtttgtacaaatacctatt

SEQ ID NO: 334858 - DNA, 909 bp, Homo sapiens
gcgcacacagatgttagggttcgggcgagctatttggagcctgcgcagtcagatccgaggacatgttgacgtcgtccgagagtcttaaaatcctgctgtggccggattccagactcgtgggggaaaggctgtttccaaggcaggaaaggtaaagagacaaagaaagtgccttgtacagatgcaaacggaggtgtagactgtgcagctgccaaagtggtgacaagcaatccagaggaccatgaaaggatcttaatgcaagtcatgaacttgaatgtgccgatgaggcctggcattcttgtccagagacagagtaaggaagtgttggccacacccttagaaaacagaagggacatggaggcagaagaggagaaccaaataaatgagaagcaagagcctgagaatgctggagaaactggtcaagaagaggatgatggtttgcagaaaatacacacatctgtcactagaactccttcagttgttgaaagccaaaaaagacctttaaaaggagtgacattttctagggaggtaattgttgtggatcttgggaatgaataccctacacctcgaagctatactcgagaacataaagagaggaaatgaagctcaaaaaagggtaagagtgaaagaaaatgtaacgtttgactaacgttgaaagactgagggtacaaaatcatgttgaaacaacaaaacaatggggaattaagcaaataaagatattattttacctttgtgcagaaaggagtgagccatgtgcaaaattctgtaagtaaaatacttagagcttgaatataattttttaaaaattcaaatctgagttcaagaaattgattgtattgcccttaaaactatctactcaaacactgttctggcatgtgaataaagtgatttttgtttgtacaaatacctatt

SEQ ID NO: 334859 - DNA, 575 bp, Homo sapiens
actactacagaagaaaagatttatgaacttggagtgggaggtagtggtgtggaacatcagacaaaaatttgaagaaatattggctgaaaaatttccaaatttgatggaaatgataaatccacagatctaagagtctcaatgaacacagagcacgagaatcataaagaaaactacatcaaggcacgtaacaacaacaacagtgatagagaaacccttagaagcaatgaaacaatgcaacttccgagttatactaacatagttttcttatttatgaatcacgtctgaactaattcttgtaatagtaacatacaatataatagactgcttatattttacttatgtttgcaaaaagatgttctgggtgggttcccacgaaattattacagtggttaattgttaggggtttggaaacggggtggatgtagcatgagggtagaagaaagatttccacagatgcccgaactaggtaaatgtgtaacctgtttaaaaaattcatgtgtcttttttttttattacaaaaggaatatatcggagggaggggaactaaggagtgacgctaatggacatggggtttc

SEQ ID NO: 334860 - DNA, 559 bp, Homo sapiens
cttctgacatttttccctcaacacttcatatctgagttatctatttacatgtctatgtagcattgaatgaataactagaaacataaaataactcagatcagagatatgttactgttatttccaatattcaattactcctttattttaaaaaatgtttaaaagatacttgactaataacattttctggcactgtttcccaattctccagtgagatgtaaatgagctacagcccctagaaagcccatctaagcagtggctcaaatgctttatcttgcacttgacatattaatattgcacaaagaaaatgagctgaattcctaagtgaacagtaggacaaacaggaaatgtcactgtgatcaataccacttttatcatgtctttctggaagcagaagaaaagaaaaagaaagaacttccagaaaataaaatataattctaccaggtcaagtcagaatgagttctatcatatttaatcacattgttttcagtctttatggcctatggtcaagaatatagtgatattcttgtgagaaaccatctagggccaggtgtggtggctc

SEQ ID NO: 334861 - DNA, 1070 bp, Homo sapiens
agcgggctactcgctatccccggcctgttggcttcttccgcgctggagtatccagataggcgacacgccggcgggcggctgaggcgggaatggctgctgtactgcagcgcgtcgagcggctgtccaatcgagtcgtgcgtgtgttgggctgtaacccgggtcccatgaccctccaaggcaccaacacctacctagtggggaccggccccaggagaatcctcattgacactggagaaccagcaattccagaatacatcagctgtttaaagcaggctctaactgaatttaacacagcaatccaggaaattgtagtgactcactggcaccgagatcattctggaggcataggagatatttgtaaaagcatcaataatgacactacctattgcattaaaaaactcccacggaatcctcagagagaagaaattataggaaatggagagcaacaatatgtttatctgaaagatggagatgtgattaagactgagggagccactctaagagttctatatacccctggccacactgatgatcacatggctctactcttagaagaggaaaatgctatcttttctggagattgcatcctaggggaaggaacaacggtatttgaagacctctatgattatatgaactctttaaaagagttattgaaaatcaaagctgatattatatatccaggacatggcccagtaattcataatgctgaagctaaaattcaacaatacatttctcacagaaatattcgagagcagcaaattcttacattatttcgtgagaactttgagaaatcatttacagtaatggagcttgtaaaaattatttacaagaatactcctgagaatttacatgaaatggctaaacataatctcttacttcatttgaaaaaactagaaaaagaaggaaaaatatttagcaacacagatcctgacaagaaatggaaagctcatctttagtttcagattaaagaaagctttgttttattttgctttgagagaatggtatgttttcttaactataggttattttatagagaatataaaagtataaaacattaaaaataaccctag

SEQ ID NO: 334862 - DNA, 492 bp, Homo sapiens
  misc_feature (29)..(29): n is a, c, g, or t
aattataaagtgtgaattaataatatatnttatatgttttatgactagacactacctattgcattaaaaaactcccacggaatcctcagagagaagaaattataggaaatggagagcaacaatatgtttatctgaaagatggagatgtgattaagactgagggagccactctaaggtaagtaaatgtcccttagccagggaaggtgaagagtctgtgtatgtgtgttatagaaaaggatggaaggatcccagcattttgggaggctgagatgggaagatcgtttgagcccaggagttcaagaccagcctgggcaataccaaaaaaaaatttaattagctgagcatggtggcacatgcctataatcctgctattcaggaggctgagatgagatgattgcttgaacctgggaagcagaggctgcagtgagtcaagattgtaccactgcattccagcctgtgcaaccgagtgaaaccctgtctcaaaaaaaaaaa

SEQ ID NO: 334863 - DNA, 1036 bp, Homo sapiens
agcgggctactcgctatccccggcctgttggcttcttccgcgctggagtatccagataggcgacacgccggcgggcggctgaggcgggaatggctgctgtactgcagcgcgtcgagcggctgtccaatcgagtcgtgcgtgtgttgggctgtaacccgggtcccatgaccctccaaggcaccaacacctacctagtggggaccggccccaggagaatcctcattgacactggagaaccagcaattccagaatacatcagctgtttaaagcaggctctaactgaatttaacacagcaatccaggaaattgtagtgactcactggcaccgagatcattctggaggcataggagatatttgtaaaagcatcaataatgacactacctattgcattaaaaaactcccacggaatcctcagagagaagaaattataggaaatggagagcaacaatatgtttatctgaaagatggagatgtgattaagactgagggagccactctaagagttctatatacccctggccacactgatgatcacatggctctactcttagaagaggaaaatgctatcttttctggagattgcatcctaggggaaggaacaacggtatttgaagacctctatgattatatgaactctttaaaagagttattgaaaatcaaagctgatattatatatccaggacatggcccagtaattcataatgctgaagctaaaattcaacaatacatttctcacagaaatattcgagagcagcaaattcttacattatttcgtgagaactttgagaaatcatttacagtaatggagcttgtaaaaattatttacaagaatactcctgagaatttacatgaaatggctaaacataatctcttacttcatttgaaaaaactagaaaaagaaggaaaaatatgtgagtatgcttccaaattttcttctattaccagcatttaaaatatttttacagatgccttagtttcctttgaggaggcgctaggaaggtcagtagcacagggccagtggaccacaagctggaa

SEQ ID NO: 334864 - DNA, 1159 bp, Homo sapiens
agcgggctactcgctatccccggcctgttggcttcttccgcgctggagtatccagataggcgacacgccggcgggcggctgaggcgggaatggctgctgtactgcagcgcgtcgagcggctgtccaatcgagtcgtgcgtgtgttgggctgtaacccgggtcccatgaccctccaaggcaccaacacctacctagtggggaccggccccaggagaatcctcattgacactggagaaccagcaattccagaatacatcagctgtttaaagcaggctctaactgaatttaacacagcaatccaggaaattgtagtgactcactggcaccgagatcattctggaggcataggagatatttgtaaaagcatcaataatgacactacctattgcattaaaaaactcccacggaatcctcagagagaagaaattataggaaatggagagcaacaatatgtttatctgaaagatggagatgtgattaagactgagggagccactctaagagttctatatacccctggccacactgatgatcacatggctctactcttagaagaggaaaatgctatcttttctggagattgcatcctaggggaaggaacaacggtatttgaagacctctatgattatatgaactctttaaaagagttattgaaaatcaaagctgatattatatatccaggacatggcccagtaattcataatgctgaagctaaaattcaacaatacatttctcacagaaatattcgagagcagcaaattcttacattatttcgtgagaactttgagaaatcatttacagtaatggagcttgtaaaaattatttacaaggtaattttcagttttcttatttgtatgtagccacaaatttattagaattatctatttagtagactatagaaatgataaacttatatcccagatcagaagttacgccacttttctagatttgagaccagcagcctaaactttctacagtgctaaaattaaacaaaaactggccttagagaacaaagatagccatttcgagccatcattgaactttatatacttaactatgtaggagaaactgcctaactatgtaggagaaactaccaacagcctgatgattacattttgtaataatttttgcattattctagccatcttgattatcttgt

SEQ ID NO: 334865 - DNA, 992 bp, Homo sapiens
agcgggctactcgctatccccggcctgttggcttcttccgcgctggagtatccagataggcgacacgccggcgggcggctgaggcgggaatggctgctgtactgcagcgcgtcgagcggctgtccaatcgagtcgtgcgtgtgttgggctgtaacccgggtcccatgaccctccaaggcaccaacacctacctagtggggaccggccccaggagaatcctcattgacactggagaaccagcaattccagaatacatcagctgtttaaagcaggctctaactgaatttaacacagcaatccaggaaattgtagtgactcactggcaccgagatcattctggaggcataggagatatttgtaaaagcatcaataatgacactacctattgcattaaaaaactcccacggaatcctcagagagaagaaattataggaaatggagagcaacaatatgtttatctgaaagatggagatgtgattaagactgagggagccactctaagagttctatatacccctggccacactgatgatcacatggctctactcttagaagaggaaaatgctatcttttctggagattgcatcctaggggaaggaacaacggtatttgaagacctctatgattatatgaactctttaaaagagttattgaaaatcaaagctgatattatatatccagaatactcctgagaatttacatgaaatggctaaacataatctcttacttcatttgaaaaaactagaaaaagaaggaaaaatatttagcaacacagatcctgacaagaaatggaaagctcatctttagtttcaaaaggggaaaaacccttcttaaaaacgggaaaaaaaagctcttgttttattttgctttgagagcaatggtatgttcttcttaactataggttgtttttttagtaacttgtctaatattcctctataaaataacctatacgcttaagaaacatatccacttttttcccccccccttcctca

SEQ ID NO: 334866 - DNA, 405 bp, Homo sapiens
taaaaaaaaaggaatttttttcaccttcatttttcttttagaatactcctgagaatttacatgaaatggctaaacataatctcttacttcatttgaaaaaactagaaaaagaaggaaaaatatgtgagtatgcttccaaattttcttctattaccagcatttaaaatatttttacagatgccttagtttcctttgaggaaaaataatacccatcagagttctcccatgaatatcactttaagttggagagacaggcgctaggaaggtcagtagcacagggccagtggaccacaagctggaaccaaaagctcccaggggaattagaatctcagttggaattccaatccttacccaccagaatggcaatcaaagacatgtagcaggaagataacttttcttctccca

SEQ ID NO: 334867 - DNA, 355 bp, Homo sapiens
cgggaatggctgctgtactgcagcgcgtcgagcggctgtccaatcgagtcgtgcgtgtgttgggctgtaacccgggtcccatgaccctccaaggcaccaacacctacctagtggggaccggccccaggtaaacgtccctctccaacctccccaacgttcgcagccggccccggagcccgggctttgactgatcgcggctgcgcgggcagtggagagcgccgcgtcctgtccctagctgggcagccccgcgcctagcagccccgtcgggactgcacgcagacactcggatctcgaagctagctaaaatacgaccaccccaggtgatagctctctaatttagggagaaatggaaaaa

SEQ ID NO: 334868 - DNA, 1560 bp, Homo sapiens
agcgggctactcgctatccccggcctgttggcttcttccgcgctggagtatccagataggcgacacgccggcgggcggctgaggcgggaatggctgctgtactgcagcgcgtcgagcggctgtccaatcgagtcgtgcgtgtgttgggctgtaacccgggtcccatgaccctccaaggcaccaacacctacctagtggggaccggccccaggagaatcctcattgacactggagaaccagcaattccagaatacatcagctgtttaaagcaggctctaactgaatttaacacagcaatccaggaaattgtagtgactcactggcaccgagatcattctggaggcataggagatatttgtaaaagcatcaataatgacactacctattgcattaaaaaactcccacggaatcctcagagagaagaaattataggaaatggagagcaacaatatgtttatctgaaagatggagatgtgattaagactgagggagccactctaagagttctatatacccctggccacactgatgatcacatggctctactcttagaagaggaaaatgctatcttttctggagattgcatcctaggggaaggaacaacggtatttgaagacctctatgattatatgaactctttaaaagagttattgaaaatcaaagctgatattatatatccaggacatggcccagtaattcataatgctgaagctaaaattcaacaatacatttctcacagaaatattcgagagcagcaaattcttacattatttcgtgagaactttgagaaatcatttacagtaatggagcttgtaaaaattatttacaagaatactcctgagaatttacatgaaatggctaaacataatctcttacttcatttgaaaaaactagaaaaagaaggaaaaatatttagcaacacagatcctgacaagaaatggaaagctcatctttagtttcagattaaagaaagctttgttttattttgctttgagagaatggtatgttttcttaactataggttattttatagagaatataaaagtataaaacattaaaaataaccctagatatactttaaaataatgttatatttatgctaaaatatgtaaattacactatacaaccatatgataggttatttctctaaccttgtcttctaacgttttaccaaaaattcataatctaatagtttatcagttttcaatagattaaataaaatgattactttaaaaataataaaatttatctaatttaaagttgatattatttttggccgttagttatctattactagtgatcagttatactgttttctatagctactttatttaacagcacagatttctatgcacctttactctttcctcaacccttgtctctatctgtacataattgctttgtcttgatgtttctatcaactatatcatgactatctattggttccataactctgtatcatgtgtattttcttattctggtataccacaaatgattcatgcaaatgaatttttggtgattgaaaaatattaaattcccaatttaaagtattatatgata

SEQ ID NO: 334869 - DNA, 437 bp, Homo sapiens
agcgggctactcgctatccccggcctgttggcttcttccgcgctggagtatccagataggcgacacgccggcgggcggctgaggcgggaatggctgctgtactgcagcgcgtcgagcggctgtccaatcgagtcgtgcgtgtgttgggctgtaacccgggtcccatgaccctccaaggcaccaacacctacctagtggggaccggccccaggagaatcctcattgacactggagaaccagcaattccagaatacatcagctgtttaaagcaggctctaactgaatttaacacagcaatccaggaaattgtagtgactcactggcaccgagatcattctggaggcataggagatatttgtaaaagcatcaataatgacactacctattgcattaaatatgtttatctggatggagatgtgattgactgagggagccct

SEQ ID NO: 334870 - DNA, 1411 bp, Homo sapiens
agcgggctactcgctatccccggcctgttggcttcttccgcgctggagtatccagataggcgacacgccggcgggcggctgaggcgggaatggctgctgtactgcagcgcgtcgagcggctgtccaatcgagtcgtgcgtgtgttgggctgtaacccgggtcccatgaccctccaaggcaccaacacctacctagtggggaccggccccaggagaatcctcattgacactggagaaccagcaattccagaatacatcagctgtttaaagcaggctctaactgaatttaacacagcaatccaggaaattgtagtgactcactggcaccgagatcattctggaggcataggagatatttgtaaaagcatcaataatgacactacctattgcattaaaaaactcccacggaatcctcagagagaagaaattataggaaatggagagcaacaatatgtttatctgaaagatggagatgtgattaagactgagggagccactctaagagttctatatacccctggccacactgatgatcacatggctctactcttagaagaggaaaatgctatcttttctggagattgcatcctaggggaaggaacaacggtatttgaagacctctatgattatatgaactctttaaaagagttattgaaaatcaaagctgatattatatatccagaatactcctgagaatttacatgaaatggctaaacataatctcttacttcatttgaaaaaactagaaaaagaaggaaaaatatttagcaacacagatcctgacaagaaatggaaagctcatctttagtttcagattaaagaaagctttgttttattttgctttgagagaatggtatgttttcttaactataggttattttatagagaatataaaagtataaaacattaaaaataaccctagatatactttaaaataatgttatatttatgctaaaatatgtaaattacactatacaaccatatgataggttatttctctaaccttgtcttctaacgttttaccaaaaattcataatctaatagtttatcagttttcaatagattaaataaaatgattactttaaaaataataaaatttatctaatttaaagttgatattatttttggccgttagttatctattactagtgatcagttatactgttttctatagctactttatttaacagcacagatttctatgcacctttactctttcctcaacccttgtctctatctgtacataattgctttgtcttgatgtttctatcaactatatcatgactatctattggttccataactctgtatcatgtgtattttcttattctggtataccacaaatgattcatgcaaatgaatttttggtgattgaaaaatattaaattcccaatttaaagtattatatgata

SEQ ID NO: 334871 - DNA, 819 bp, Homo sapiens
agcgggctactcgctatccccggcctgttggcttcttccgcgctggagtatccagataggcgacacgccggcgggcggctgaggcgggaatggctgctgtactgcagcgcgtcgagcggctgtccaatcgagtcgtgcgtgtgttgggctgtaacccgggtcccatgaccctccaaggcaccaacacctacctagtggggaccggccccaggagaatcctcattgacactggagaaccagcaattccagaatacatcagctgtttaaagcaggctctaactgaatttaacacagcaatccaggaaattgtagtgactcactggcaccgagatcattctggaggcataggagatatttgtaaaagcatcaataatgacactacctattgcattaaaaaactcccacggaatcctcagagagaagaaattataggaaatggagagcaacaatatgtttatctgaaagatggagatgtgattaagactgagggagccactctaaggtaagtaaatgtcccttagccagggaaggtgaagagtctgtgtatgtgtgttatagaaaaggatggaaggatcccagcattttgggaggctgagatgggaagatcgtttgagcccaggagttcaagaccagcctgggcaataccaaaaaaaaatttaattagctgagcatggtggcacatgcctataatcctgctattcaggaggctgagatgagatgattgcttgaacctgggaagcagaggctgcagtgagtcaagattgtaccactgcattccagcctgtgcaaccgagtgaaaccctgtctcaaaaaaaaaaa

SEQ ID NO: 334872 - DNA, 387 bp, Homo sapiens
ctctgcctccctgagagctgggattataggcgtgagccaccgcgcccagcctgtttgtttgtttttaactcgttgtagcattacatctaaaagtaatgtggaaattacttgttctccttttgatttttttggcatgaaatacacacttcattctgactttttttggtgttgatgctttcttataatataaatcagcttatagtgccgtttctttacttgtattttttcctctgccttgagtacgttttctctatctgtatacctagtcccattccccactctacccccaactccctgaatctactttgtgaactcatgtttcaaggttcagctcagaagtcacttctttcaagttttctcccgcacccacagcagagttaggagctc

SEQ ID NO: 334873 - DNA, 214 bp, Homo sapiens
  misc_feature (23)..(23): n is a, c, g, or t
  misc_feature (26)..(26): n is a, c, g, or t
  misc_feature (30)..(31): n is a, c, g, or t
  misc_feature (33)..(34): n is a, c, g, or t
tgatctagaggatcccgaggctnctntgtnngnntgtagacatgcaagcccgaggcttcggctcggatcagtccgagaatgtcgaccggggcgcgggctccatccgggaagccggtggggccttcggaaagagagagcaggctgaagaggaacgatatttccgccacagagagagcgtcccccacagagagagcgtcccccacagagagagcgt

SEQ ID NO: 334874 - DNA, 1962 bp, Homo sapiens
taggcggaagggccatgggagtgtgcggaaattctgtgcacggatggggtggcccggtccactgtccattagcgcgtaacgagagactgcttgctgcggcagagacgccagaggtgcagctccagcagcaatggcagtgacggcgttggcggcgcggacgtggcttggcgtgtggggcgtgaggaccatgcaagcccgaggcttcggctcggatcagtccgagaatgtcgaccggggcgcgggctccatccgggaagccggtggggccttcggaaagagagagcaggctgaagaggaacgatatttccgttccggtgaggctcaccgggtcccaagtccagccctggatctcccaatggccttccaatccttaaactgccaatcgccccacccgttcctacctggtgccttgggcgccccatcccccaacagaactcccgggccccaatccagtataccctaacccttgatgtcccgaccgttgccacgtatagggcactcccagttacctgcacaacagtttcaggcccccaaaccgtttccaccggcgggtctccaaaacaacccacggctcaactcctcctttatcattaccatctcccgcgtggagttctcctcaggtcgtgcgaaacacccccagattcttcgcacagtgtctagatccgaccgcccaacgtttgcctcccagcctgactccctcggcccttacccacctgtcaccccctctacgctctccttcctcgccagcacgccttagctttgcaagcctgcatgcattcaggcttctcaggtgtttctagacccccgactccgcaagagtgaggatgatgggagctggtcatgggagctacttatggttggacaccatcttctaaaggcttttgccctactcagcccaacctagacctgtagatttccctctcctgcttaggagtatggagtgggctgggcctccctttgccagccttgagttatctttaactgacttctgtccactctggagagcagtgaggaattaatcttgcttttgcttgtcctttggcctttcacttctgccttctgttgagaattatcaccatgacacctgccataccgtatagagagccaaggtacagccgttagagactatctaattgagcccctacattttgtagttaaggaaaactgaggcctaaatgtgaccaaaccaacattgtaatccagtcccttcttggaacctaaattgaactgccaagtactgcgcatgcaagagaccctttattggccttacagtgggccattcatttctataggcaaagaaagctctagacagattggaataggaaatggatatttgccttttagctacacccctttgtctgtcttcctcattttgttcctttttttttccctaaaggggagtcaagttccctgggttgttcccctcataaggtattagggacttgtgtcacatctctctggagttttctattttaaagaggaatctgaaagcaataagctctttggtcttcttaagatggctacacctcaatttaagatggggtattctttcactagttgaggagtagaagaggatgaccagctagactcccatggaattggaactcctattccttgcttagacattacaggttatgctttgagatctctttggggtgaaggattgaaattaaaccctgagccaccgtgtccttgtagagcacagagtagagaacaactggcagctttgaaaaaacaccatgaagaagaaatcgttcatcataagaaggagattgagcgtctgcagaaagaaattgagcgccataagcagaagatcaaaatgctaaaacatgatgattaagtgcacaccgtgtgccatagaatggcacatgtcattgcccacttctgtgtagacatggttctggtttaactaatatttgtctgtgtgctactaacagattataataaattgtcatcagtgaa

SEQ ID NO: 334875 - DNA, 2099 bp, Homo sapiens
  misc_feature (2099)..(2099): n is a, c, g, or t
cccctccgtcgaccagattgggtgcttggccgtccctgccattagcgcgtaacgagagactgcttgctgcggcagagacgccagaggtgcagctccagcagcaatggcagtgacggcgttggcggcgcggacgtggcttggcgtgtggggcgtgaggaccatgcaagcccgaggcttcggctcggatcagtccgagaatgtcgaccggggcgcgggctccatccgggaagccggtggggccttcggaaagagagagcaggctgaagaggaacgatatttccgttccggtgaggctcaccgggtcccaagtccagccctggatctcccaatggccttccaatccttaaactgccaatcgccccacccgttcctacctggtgccttgggcgccccatcccccaacagaactcccgggccccaatccagtataccctaacccttgatgtcccgaccgttgccacgtatagggcactcccagttacctgcacaacagtttcaggcccccaaaccgtttccaccggcgggtctccaaaacaacccacggctcaactcctcctttatcattaccatctcccgcgtggagttctcctcaggtcgtgcgaaacacccccagattcttcgcacagtgtctagatccgaccgcccaacgtttgcctcccagcctgactccctcggcccttacccacctgtcaccccctctacgctctccttcctcgccagcacgccttagctttgcaagcctgcatgcattcaggcttctcaggtgtttctagacccccgactccgcaagagtgaggatgatgggagctggtcatgggagctacttatggttggacaccatcttctaaaggcttttgccctactcagcccaacctagacctgtagatttccctctcctgcttaggagtatggagtgggctgggcctccctttgccagccttgagttatctttaactgacttctgtccactctggagagcagtgaggaattaatcttgcttttgcttgtcctttggcctttcacttctgccttctgttgagaattatcaccatgacacctgccataccgtatagagagccaaggtacagccgttagagactatctaattgagcccctacattttgtagttaaggaaaactgaggcctaaatgtgaccaaaccaacattgtaatccagtcccttcttggaacctaaattgaactgccaagtactgcgcatgcaagagaccctttattggccttacagtgggccattcatttctataggcaaagaaagctctagacagattggaataggaaatggatatttgccttttagctacacccctttgtctgtcttcctcattttgttcctttttttttccctaaaggggagtcaagttccctgggttgttcccctcataaggtattagggacttgtgtcacatctctctggagttttctattttaaagaggaatctgaaagcaataagctctttggtcttcttaagatggctacacctcaatttaagatggggtattctttcactagttgaggagtagaagaggatgaccagctagactcccatggaattggaactcctattccttgcttagacattacaggttatgctttgagatctctttggggtgaaggattgaaattaaaccctgagccaccgtgtccttgtagagcacagagtagagaacaactggcagctttgaaaaaacaccatgaagaagaaatcgttcatcataagaaggagattgagcgtctgcagaaagaaattgagcgccataagcagaagatcaaaatgctaaaacatgatgattaagtgcacaccgtgtgccatagaatggcacatgtcattgcccacttctgtgtagacatggttctggtttaactaatatttgtctgtgtgctactaacagattataataaattgtcatcagtgaaaaaaaaaagggaaactcaggtggtccaccccgagacccctttgagcaccaacctagtcccccgcgcggccccttattcgctccgacaagatgaaagaaacaatcatgaaccaggaaaaactcgccaaactgcaggcacaagtgcgcattgggtgggaaaggaan

SEQ ID NO: 334876 - DNA, 872 bp, Homo sapiens
  misc_feature (47)..(47): n is a, c, g, or t
  misc_feature (60)..(60): n is a, c, g, or t
  misc_feature (74)..(74): n is a, c, g, or t
cccctatccaatctaacccgatccatactactaatctatactgaccnatctatactaccnatctatactgaccnatctatactgaccggtgcttggccgtccctgccattagcgcgtaacgagagactgcttgctgcggcagagacgccagaggtgcagctccagcagcaatggcagtgacggcgttggcggcgcggacgtggcttggcgtgtggggcgtgaggaccatgcaagcccgaggcttcggctcggatcagtccgagaatgtcgaccggggcgcgggctccatccgggaagccggtggggccttcggaaagagagagcaggctgaagaggaacgatatttccgagcacagagtagagaacaactggcagctttgaaaaaacaccatgaagaagaaatcgttcatcataagaaggagattgagcgtctgcagaaagaaattgagcgccataagcagaagatcaaaatgctaaaacatgatgattaagtgcacaccgtgtgccatagaatggcacatgtcattgcccacttctgtgtagacatggttctggtttaactaatatttgtctgtgtgctactaacagattataataaattgtcatcagtgaaaaaaaaaaaaaaaaaaaaaaaaaaaaaaaaaaaaaaaaaaaaaaaacaaaacaaacaaacaaaaacaaacaaaacaaaaaaaaaaaaaaaaaagcaacaacaaaagcaaaacacacaacacaaacaaaaaaagaaggatgggcttcgccgacagaaaacacaataaaatcaagtcgcatggcggggcgcagagacaaaatataacgagatggacaacatgaggaagaaacagtgctgtagggatgcgacaaaccaaacg

SEQ ID NO: 334877 - DNA, 1970 bp, Homo sapiens
  misc_feature (47)..(47): n is a, c, g, or t
  misc_feature (60)..(60): n is a, c, g, or t
  misc_feature (74)..(74): n is a, c, g, or t
cccctatccaatctaacccgatccatactactaatctatactgaccnatctatactaccnatctatactgaccnatctatactgaccggtgcttggccgtccctgccattagcgcgtaacgagagactgcttgctgcggcagagacgccagaggtgcagctccagcagcaatggcagtgacggcgttggcggcgcggacgtggcttggcgtgtggggcgtgaggaccatgcaagcccgaggcttcggctcggatcagtccgagaatgtcgaccggggcgcgggctccatccgggaagccggtggggccttcggaaagagagagcaggctgaagaggaacgatatttccgccctggatctcccaatggccttccaatccttaaactgccaatcgccccacccgttcctacctggtgccttgggcgccccatcccccaacagaactcccgggccccaatccagtataccctaacccttgatgtcccgaccgttgccacgtatagggcactcccagttacctgcacaacagtttcaggcccccaaaccgtttccaccggcgggtctccaaaacaacccacggctcaactcctcctttatcattaccatctcccgcgtggagttctcctcaggtcgtgcgaaacacccccagattcttcgcacagtgtctagatccgaccgcccaacgtttgcctcccagcctgactccctcggcccttacccacctgtcaccccctctacgctctccttcctcgccagcacgccttagctttgcaagcctgcatgcattcaggcttctcaggtgtttctagacccccgactccgcaagagtgaggatgatgggagctggtcatgggagctacttatggttggacaccatcttctaaaggcttttgccctactcagcccaacctagacctgtagatttccctctcctgcttaggagtatggagtgggctgggcctccctttgccagccttgagttatctttaactgacttctgtccactctggagagcagtgaggaattaatcttgcttttgcttgtcctttggcctttcacttctgccttctgttgagaattatcaccatgacacctgccataccgtatagagagccaaggtacagccgttagagactatctaattgagcccctacattttgtagttaaggaaaactgaggcctaaatgtgaccaaaccaacattgtaatccagtcccttcttggaacctaaattgaactgccaagtactgcgcatgcaagagaccctttattggccttacagtgggccattcatttctataggcaaagaaagctctagacagattggaataggaaatggatatttgccttttagctacacccctttgtctgtcttcctcattttgttcctttttttttccctaaaggggagtcaagttccctgggttgttcccctcataaggtattagggacttgtgtcacatctctctggagttttctattttaaagaggaatctgaaagcaataagctctttggtcttcttaagatggctacacctcaatttaagatggggtattctttcactagttgaggagtagaagaggatgaccagctagactcccatggaattggaactcctattccttgcttagacattacaggttatgctttgagatctctttggggtgaaggattgaaattaaaccctgagccaccgtgtccttgtagagcacagagtagagaacaactggcagctttgaaaaaacaccatgaagaagaaatcgttcatcataagaaggagattgagcgtctgcagaaagaaattgagcgccataagcagaagatcaaaatgctaaaacatgatgattaagtgcacaccgtgtgccatagaatggcacatgtcattgcccacttctgtgtagacatggttctggtttaactaatatttgtctgtgtgctactaacagattataataaattgtcatcagtgaa

SEQ ID NO: 334878 - DNA, 2092 bp, Homo sapiens
  misc_feature (47)..(47): n is a, c, g, or t
  misc_feature (60)..(60): n is a, c, g, or t
  misc_feature (74)..(74): n is a, c, g, or t
cccctatccaatctaacccgatccatactactaatctatactgaccnatctatactaccnatctatactgaccnatctatactgaccggtgcttggccgtccctgccattagcgcgtaacgagagactgcttgctgcggcagagacgccagaggtgcagctccagcagcaatggcagtgacggcgttggcggcgcggacgtggcttggcgtgtggggcgtgaggaccatgcaagcccgaggcttcggctcggatcaggtacgctgcggcagtgtccgctgctccagccccgcgggcggatcccatctttgcttccgtacctttaccagtgtccctgtctctctgcagtccgagaatgtcgaccggggcgcgggctccatccgggaagccggtggggccttcggaaagagagagcaggctgaagaggaacgatatttccgttccggtgaggctcaccgggtcccaagtccagccctggatctcccaatggccttccaatccttaaactgccaatcgccccacccgttcctacctggtgccttgggcgccccatcccccaacagaactcccgggccccaatccagtataccctaacccttgatgtcccgaccgttgccacgtatagggcactcccagttacctgcacaacagtttcaggcccccaaaccgtttccaccggcgggtctccaaaacaacccacggctcaactcctcctttatcattaccatctcccgcgtggagttctcctcaggtcgtgcgaaacacccccagattcttcgcacagtgtctagatccgaccgcccaacgtttgcctcccagcctgactccctcggcccttacccacctgtcaccccctctacgctctccttcctcgccagcacgccttagctttgcaagcctgcatgcattcaggcttctcaggtgtttctagacccccgactccgcaagagtgaggatgatgggagctggtcatgggagctacttatggttggacaccatcttctaaaggcttttgccctactcagcccaacctagacctgtagatttccctctcctgcttaggagtatggagtgggctgggcctccctttgccagccttgagttatctttaactgacttctgtccactctggagagcagtgaggaattaatcttgcttttgcttgtcctttggcctttcacttctgccttctgttgagaattatcaccatgacacctgccataccgtatagagagccaaggtacagccgttagagactatctaattgagcccctacattttgtagttaaggaaaactgaggcctaaatgtgaccaaaccaacattgtaatccagtcccttcttggaacctaaattgaactgccaagtactgcgcatgcaagagaccctttattggccttacagtgggccattcatttctataggcaaagaaagctctagacagattggaataggaaatggatatttgccttttagctacacccctttgtctgtcttcctcattttgttcctttttttttccctaaaggggagtcaagttccctgggttgttcccctcataaggtattagggacttgtgtcacatctctctggagttttctattttaaagaggaatctgaaagcaataagctctttggtcttcttaagatggctacacctcaatttaagatggggtattctttcactagttgaggagtagaagaggatgaccagctagactcccatggaattggaactcctattccttgcttagacattacaggttatgctttgagatctctttggggtgaaggattgaaattaaaccctgagccaccgtgtccttgtagagcacagagtagagaacaactggcagctttgaaaaaacaccatgaagaagaaatcgttcatcataagaaggagattgagcgtctgcagaaagaaattgagcgccataagcagaagatcaaaatgctaaaacatgatgattaagtgcacaccgtgtgccatagaatggcacatgtcattgcccacttctgtgtagacatggttctggtttaactaatatttgtctgtgtgctactaacagattataataaattgtcatcagtgaa

SEQ ID NO: 334879 - DNA, 1759 bp, Homo sapiens
catggtcagttcgagcttcgagagagggcagcgtggttcccatgccagcatggggggccgggacgacagtcctggcgcagggtggttataaacatgggaggctctcatctcctcgggggcagagatggacacggtcacgcagcaccaatagtgtgtctggcttgtccagttggtgtgcatttgaggtgggaacgccattcggggcagaggccatagagatgggctgtttaactcccgggccccaatccagtataccctaacccttgatgtcccgaccgttgccacgtatagggcactcccagttacctgcacaacagtttcaggcccccaaaccgtttccaccggcgggtctccaaaacaacccacggctcaactcctcctttatcattaccatctcccgcgtggagttctcctcaggtcgtgcgaaacacccccagattcttcgcacagtgtctagatccgaccgcccaacgtttgcctcccagcctgactccctcggcccttacccacctgtcaccccctctacgctctccttcctcgccagcacgccttagctttgcaagcctgcatgcattcaggcttctcaggtgtttctagacccccgactccgcaagagtgaggatgatgggagctggtcatgggagctacttatggttggacaccatcttctaaaggcttttgccctactcagcccaacctagacctgtagatttccctctcctgcttaggagtatggagtgggctgggcctccctttgccagccttgagttatctttaactgacttctgtccactctggagagcagtgaggaattaatcttgcttttgcttgtcctttggcctttcacttctgccttctgttgagaattatcaccatgacacctgccataccgtatagagagccaaggtacagccgttagagactatctaattgagcccctacattttgtagttaaggaaaactgaggcctaaatgtgaccaaaccaacattgtaatccagtcccttcttggaacctaaattgaactgccaagtactgcgcatgcaagagaccctttattggccttacagtgggccattcatttctataggcaaagaaagctctagacagattggaataggaaatggatatttgccttttagctacacccctttgtctgtcttcctcattttgttcctttttttttccctaaaggggagtcaagttccctgggttgttcccctcataaggtattagggacttgtgtcacatctctctggagttttctattttaaagaggaatctgaaagcaataagctctttggtcttcttaagatggctacacctcaatttaagatggggtattctttcactagttgaggagtagaagaggatgaccagctagactcccatggaattggaactcctattccttgcttagacattacaggttatgctttgagatctctttggggtgaaggattgaaattaaaccctgagccaccgtgtccttgtagagcacagagtagagaacaactggcagctttgaaaaaacaccatgaagaagaaatcgttcatcataagaaggagattgagcgtctgcagaaagaaattgagcgccataagcagaagatcaaaatgctaaaacatgatgattaagtgcacaccgtgtgccatagaatggcacatgtcattgcccacttctgtgtagacatggttctggtttaactaatatttgtctgtgtgctactaacagattataataaattgtcatcagtgaa

SEQ ID NO: 334880 - DNA, 689 bp, Homo sapiens
  misc_feature (47)..(47): n is a, c, g, or t
  misc_feature (60)..(60): n is a, c, g, or t
  misc_feature (74)..(74): n is a, c, g, or t
cccctatccaatctaacccgatccatactactaatctatactgaccnatctatactaccnatctatactgaccnatctatactgaccggtgcttggccgtccctgccattagcgcgtaacgagagactgcttgctgcggcagagacgccagaggtgcagctccagcagcaatggcagtgacggcgttggcggcgcggacgtggcttggcgtgtggggcgtgaggaccatgcaagcccgaggcttcggctcggatcagtccgagaatgtcgaccggggcgcgggctccatccgggaagccggtggggccttcggaaagagagagcaggctgaagaggaacgatatttccgacattacaggttatgctttgagatctctttggggtgaaggattgaaattaaaccctgagccaccgtgtccttgtagagcacagagtagagaacaactggcagctttgaaaaaacaccatgaagaagaaatcgttcatcataagaaggagattgagcgtctgcagaaagaaattgagcgccataagcagaagatcaaaatgctaaaacatgatgattaagtgcacaccgtgtgccatagaatggcacatgtcattgcccacttctgtgtagacatggttctggtttaactaatatttgtctgtgtgctactaacagattataataaattgtcatcagtgaa

SEQ ID NO: 334881 - DNA, 826 bp, Homo sapiens
  misc_feature (47)..(47): n is a, c, g, or t
  misc_feature (60)..(60): n is a, c, g, or t
  misc_feature (74)..(74): n is a, c, g, or t
cccctatccaatctaacccgatccatactactaatctatactgaccnatctatactaccnatctatactgaccnatctatactgaccggtgcttggccgtccctgccattagcgcgtaacgagagactgcttgctgcggcagagacgccagaggtgcagctccagcagcaatggcagtgacggcgttggcggcgcggacgtggcttggcgtgtggggcgtgaggaccatgcaagcccgaggcttcggctcggatcagtccgagaatgtcgaccggggcgcgggctccatccgggaagccggtggggccttcggaaagagagagcaggctgaagaggaacgatatttccgacattacaggttatgctttgagatctctttggggtgaaggattgaaattaaaccctgagccaccgtgtccttgtagagcacagagtagagaacaactggcagctttgaaaaaacaccatgaagaagaaatcgttcatcataagaaggagattgagcgtctgcagaaagaaattgagcgccataagcagaagatcaaaatgctaaaacatgatgattaagtgcacaccgtgtgccatagaatggcacatgtcattgcccacttctgtgtagacatggttctggtttaactaatatttgtctgtgtgctactaacagattataataaattgtcatcagtgaaaaaaaaaaaaaaaaaaaaaaaattcgggggcatctaaggcgggggggggaaaaaggggtttggaagtgggcctgggccaaaagtggtttcctggaccaagtttttttggccccagtggggaaattggcgggtcccta

SEQ ID NO: 334882 - DNA, 663 bp, Homo sapiens
  misc_feature (47)..(47): n is a, c, g, or t
  misc_feature (60)..(60): n is a, c, g, or t
  misc_feature (74)..(74): n is a, c, g, or t
cccctatccaatctaacccgatccatactactaatctatactgaccnatctatactaccnatctatactgaccnatctatactgaccggtgcttggccgtccctgccattagcgcgtaacgagagactgcttgctgcggcagagacgccagaggtgcagctccagcagcaatggcagtgacggcgttggcggcgcggacgtggcttggcgtgtggggcgtgaggaccatgcaagcccgaggcttcggctcggatcagtccgagaatgtcgaccggggcgcgggctccatccgggaagccggtggggccttcggaaagagagagcaggctgaagaggaacgatatttccgagcacttggagctaccttctgtttctttgctgtagaagccgttgtgtgaacaaatccgtttatttctctcatcagtctcctttgatagacatttgggtcacgtccggttttacgcttttacaatacatcagtgaacagcagtaatacgagctcaagacagaaggcctgaaaaacattgaaaaacacagagacggaaaaaaaaaaaccacagagggggaaatataatttcgggttatttcagtttcacctttacactttgttatattccacattttttgcaataaatataaatttggaagtaaaagcataaaacg

SEQ ID NO: 334883 - DNA, 847 bp, Homo sapiens
  misc_feature (47)..(47): n is a, c, g, or t
  misc_feature (60)..(60): n is a, c, g, or t
  misc_feature (74)..(74): n is a, c, g, or t
  misc_feature (824)..(824): n is a, c, g, or t
cccctatccaatctaacccgatccatactactaatctatactgaccnatctatactaccnatctatactgaccnatctatactgaccggtgcttggccgtccctgccattagcgcgtaacgagagactgcttgctgcggcagagacgccagaggtgcagctccagcagcaatggcagtgacggcgttggcggcgcggacgtggcttggcgtgtggggcgtgaggaccatgcaagcccgaggcttcggctcggatcagtccgagaatgtcgaccggggcgcgggctccatccgggaagccggtggggccttcggaaagagagagcaggctgaagaggaacgatatttccgagcacttggagctaccttctgtttctttgctgtagaagccgttgtgtgaacaaatccgtttatttctctcatcagtctcctttgatagacatttgggtcacgtccggttttacgcttttacaatacatcagtgaacagcagtaatacgagctcaagacagaaggcctgaaaaacattgaaaaacacagagacggaaaaaaaaaaaccacagagggggaaatataatttcgggttatttcagtttcacctttacactttgttatattccacattttttgcaataaatataaatttggaagtaaaagcataaaacgaaaatcaaacgattgattgattgattgattgactgagacggagtatcactctcgtcgtccaggctggagtgtagtggcgcgttctcggctcactgcaacagttagtggggcgtggtggcatgctcctgtagtctcagctactctggagctgagtctgtatnactgcttggggatcctcagacgc

SEQ ID NO: 334884 - DNA, 1944 bp, Homo sapiens
ggcacgaggctgcggctgggcctcaatgaccgcgtgctcttcgagctcactggccgcagctctggcattcctgacagaaacaccttgagcttgatggtaccctccagcagcaatggcagtgacggcgttggcggcgcggacgtggcttggcgtgtggggcgtgaggaccatgcaagcccgaggcttcggctcggatcagtccgagaatgtcgaccggggcgcgggctccatccgggaagccggtggggccttcggaaagagagagcaggctgaagaggaacgatatttccgttccggtgaggctcaccgggtcccaagtccagccctggatctcccaatggccttccaatccttaaactgccaatcgccccacccgttcctacctggtgccttgggcgccccatcccccaacagaactcccgggccccaatccagtataccctaacccttgatgtcccgaccgttgccacgtatagggcactcccagttacctgcacaacagtttcaggcccccaaaccgtttccaccggcgggtctccaaaacaacccacggctcaactcctcctttatcattaccatctcccgcgtggagttctcctcaggtcgtgcgaaacacccccagattcttcgcacagtgtctagatccgaccgcccaacgtttgcctcccagcctgactccctcggcccttacccacctgtcaccccctctacgctctccttcctcgccagcacgccttagctttgcaagcctgcatgcattcaggcttctcaggtgtttctagacccccgactccgcaagagtgaggatgatgggagctggtcatgggagctacttatggttggacaccatcttctaaaggcttttgccctactcagcccaacctagacctgtagatttccctctcctgcttaggagtatggagtgggctgggcctccctttgccagccttgagttatctttaactgacttctgtccactctggagagcagtgaggaattaatcttgcttttgcttgtcctttggcctttcacttctgccttctgttgagaattatcaccatgacacctgccataccgtatagagagccaaggtacagccgttagagactatctaattgagcccctacattttgtagttaaggaaaactgaggcctaaatgtgaccaaaccaacattgtaatccagtcccttcttggaacctaaattgaactgccaagtactgcgcatgcaagagaccctttattggccttacagtgggccattcatttctataggcaaagaaagctctagacagattggaataggaaatggatatttgccttttagctacacccctttgtctgtcttcctcattttgttcctttttttttccctaaaggggagtcaagttccctgggttgttcccctcataaggtattagggacttgtgtcacatctctctggagttttctattttaaagaggaatctgaaagcaataagctctttggtcttcttaagatggctacacctcaatttaagatggggtattctttcactagttgaggagtagaagaggatgaccagctagactcccatggaattggaactcctattccttgcttagacattacaggttatgctttgagatctctttggggtgaaggattgaaattaaaccctgagccaccgtgtccttgtagagcacagagtagagaacaactggcagctttgaaaaaacaccatgaagaagaaatcgttcatcataagaaggagattgagcgtctgcagaaagaaattgagcgccataagcagaagatcaaaatgctaaaacatgatgattaagtgcacaccgtgtgccatagaatggcacatgtcattgcccacttctgtgtagacatggttctggtttaactaatatttgtctgtgtgctactaacagattataataaattgtcatcagtgaa

SEQ ID NO: 334885 - DNA, 1935 bp, Homo sapiens
cccctccgtcgaccagattgggtgcttggccgtccctgccattagcgcgtaacgagagactgcttgctgcggcagagacgccagaggtgcagctccagcagcaatggcagtgacggcgttggcggcgcggacgtggcttggcgtgtggggcgtgaggaccatgcaagcccgaggcttcggctcggatcagtccgagaatgtcgaccggggcgcgggctccatccgggaagccggtggggccttcggaaagagagagcaggctgaagaggaacgatatttccgttccggtgaggctcaccgggtcccaagtccagccctggatctcccaatggccttccaatccttaaactgccaatcgccccacccgttcctacctggtgccttgggcgccccatcccccaacagaactcccgggccccaatccagtataccctaacccttgatgtcccgaccgttgccacgtatagggcactcccagttacctgcacaacagtttcaggcccccaaaccgtttccaccggcgggtctccaaaacaacccacggctcaactcctcctttatcattaccatctcccgcgtggagttctcctcaggtcgtgcgaaacacccccagattcttcgcacagtgtctagatccgaccgcccaacgtttgcctcccagcctgactccctcggcccttacccacctgtcaccccctctacgctctccttcctcgccagcacgccttagctttgcaagcctgcatgcattcaggcttctcaggtgtttctagacccccgactccgcaagagtgaggatgatgggagctggtcatgggagctacttatggttggacaccatcttctaaaggcttttgccctactcagcccaacctagacctgtagatttccctctcctgcttaggagtatggagtgggctgggcctccctttgccagccttgagttatctttaactgacttctgtccactctggagagcagtgaggaattaatcttgcttttgcttgtcctttggcctttcacttctgccttctgttgagaattatcaccatgacacctgccataccgtatagagagccaaggtacagccgttagagactatctaattgagcccctacattttgtagttaaggaaaactgaggcctaaatgtgaccaaaccaacattgtaatccagtcccttcttggaacctaaattgaactgccaagtactgcgcatgcaagagaccctttattggccttacagtgggccattcatttctataggcaaagaaagctctagacagattggaataggaaatggatatttgccttttagctacacccctttgtctgtcttcctcattttgttcctttttttttccctaaaggggagtcaagttccctgggttgttcccctcataaggtattagggacttgtgtcacatctctctggagttttctattttaaagaggaatctgaaagcaataagctctttggtcttcttaagatggctacacctcaatttaagatggggtattctttcactagttgaggagtagaagaggatgaccagctagactcccatggaattggaactcctattccttgcttagacattacaggttatgctttgagatctctttggggtgaaggattgaaattaaaccctgagccaccgtgtccttgtagagcacagagtagagaacaactggcagctttgaaaaaacaccatgaagaagaaatcgttcatcataagaaggagattgagcgtctgcagaaagaaattgagcgccataagcagaagatcaaaatgctaaaacatgatgattaagtgcacaccgtgtgccatagaatggcacatgtcattgcccacttctgtgtagacatggttctggtttaactaatatttgtctgtgtgctactaacagattataataaattgtcatcagtgaa

SEQ ID NO: 334886 - DNA, 613 bp, Homo sapiens
  misc_feature (47)..(47): n is a, c, g, or t
  misc_feature (60)..(60): n is a, c, g, or t
  misc_feature (74)..(74): n is a, c, g, or t
cccctatccaatctaacccgatccatactactaatctatactgaccnatctatactaccnatctatactgaccnatctatactgaccggtgcttggccgtccctgccattagcgcgtaacgagagactgcttgctgcggcagagacgccagaggtgcagctccagcagcaatggcagtgacggcgttggcggcgcggacgtggcttggcgtgtggggcgtgaggaccatgcaagcccgaggcttcggctcggatcagtccgagaatgtcgaccggggcgcgggctccatccgggaagccggtggggccttcggaaagagagagcaggctgaagaggaacgatatttccgagcacagagtagagaacaactggcagctttgaaaaaacaccatgaagaagaaatcgttcatcataagaaggagattgagcgtctgcagaaagaaattgagcgccataagcagaagatcaaaatgctaaaacatgatgattaagtgcacaccgtgtgccatagaatggcacatgtcattgcccacttctgtgtagacatggttctggtttaactaatatttgtctgtgtgctactaacagattataataaattgtcatcagtgaa

SEQ ID NO: 334887 - DNA, 1816 bp, Homo sapiens
  misc_feature (23)..(23): n is a, c, g, or t
  misc_feature (26)..(26): n is a, c, g, or t
  misc_feature (30)..(31): n is a, c, g, or t
  misc_feature (33)..(34): n is a, c, g, or t
tgatctagaggatcccgaggctnctntgtnngnntgtagacatgcaagcccgaggcttcggctcggatcagtccgagaatgtcgaccggggcgcgggctccatccgggaagccggtggggccttcggaaagagagagcaggctgaagaggaacgatatttccgttccggtgaggctcaccgggtcccaagtccagccctggatctcccaatggccttccaatccttaaactgccaatcgccccacccgttcctacctggtgccttgggcgccccatcccccaacagaactcccgggccccaatccagtataccctaacccttgatgtcccgaccgttgccacgtatagggcactcccagttacctgcacaacagtttcaggcccccaaaccgtttccaccggcgggtctccaaaacaacccacggctcaactcctcctttatcattaccatctcccgcgtggagttctcctcaggtcgtgcgaaacacccccagattcttcgcacagtgtctagatccgaccgcccaacgtttgcctcccagcctgactccctcggcccttacccacctgtcaccccctctacgctctccttcctcgccagcacgccttagctttgcaagcctgcatgcattcaggcttctcaggtgtttctagacccccgactccgcaagagtgaggatgatgggagctggtcatgggagctacttatggttggacaccatcttctaaaggcttttgccctactcagcccaacctagacctgtagatttccctctcctgcttaggagtatggagtgggctgggcctccctttgccagccttgagttatctttaactgacttctgtccactctggagagcagtgaggaattaatcttgcttttgcttgtcctttggcctttcacttctgccttctgttgagaattatcaccatgacacctgccataccgtatagagagccaaggtacagccgttagagactatctaattgagcccctacattttgtagttaaggaaaactgaggcctaaatgtgaccaaaccaacattgtaatccagtcccttcttggaacctaaattgaactgccaagtactgcgcatgcaagagaccctttattggccttacagtgggccattcatttctataggcaaagaaagctctagacagattggaataggaaatggatatttgccttttagctacacccctttgtctgtcttcctcattttgttcctttttttttccctaaaggggagtcaagttccctgggttgttcccctcataaggtattagggacttgtgtcacatctctctggagttttctattttaaagaggaatctgaaagcaataagctctttggtcttcttaagatggctacacctcaatttaagatggggtattctttcactagttgaggagtagaagaggatgaccagctagactcccatggaattggaactcctattccttgcttagacattacaggttatgctttgagatctctttggggtgaaggattgaaattaaaccctgagccaccgtgtccttgtagagcacagagtagagaacaactggcagctttgaaaaaacaccatgaagaagaaatcgttcatcataagaaggagattgagcgtctgcagaaagaaattgagcgccataagcagaagatcaaaatgctaaaacatgatgattaagtgcacaccgtgtgccatagaatggcacatgtcattgcccacttctgtgtagacatggttctggtttaactaatatttgtctgtgtgctactaacagattataataaattgtcatcagtgaa

SEQ ID NO: 334888 - DNA, 1830 bp, Homo sapiens
gacctcgattccctatccgtgtccggggttgacgcagcctacgctgatggacaccgggcgcgtgaggttcatgcatgcgagccgctgccgctctgatcagtccgaccctgctgaccgccgcgctgactacatccgagctgccgaggaatccttctgaaagagatagcggattctatattccggtgaggctcaccgggtcccaagtccagccctggatctcccaatggccttccaatccttaaactgccaatcgccccacccgttcctacctggtgccttgggcgccccatcccccaacagaactcccgggccccaatccagtataccctaacccttgatgtcccgaccgttgccacgtatagggcactcccagttacctgcacaacagtttcaggcccccaaaccgtttccaccggcgggtctccaaaacaacccacggctcaactcctcctttatcattaccatctcccgcgtggagttctcctcaggtcgtgcgaaacacccccagattcttcgcacagtgtctagatccgaccgcccaacgtttgcctcccagcctgactccctcggcccttacccacctgtcaccccctctacgctctccttcctcgccagcacgccttagctttgcaagcctgcatgcattcaggcttctcaggtgtttctagacccccgactccgcaagagtgaggatgatgggagctggtcatgggagctacttatggttggacaccatcttctaaaggcttttgccctactcagcccaacctagacctgtagatttccctctcctgcttaggagtatggagtgggctgggcctccctttgccagccttgagttatctttaactgacttctgtccactctggagagcagtgaggaattaatcttgcttttgcttgtcctttggcctttcacttctgccttctgttgagaattatcaccatgacacctgccataccgtatagagagccaaggtacagccgttagagactatctaattgagcccctacattttgtagttaaggaaaactgaggcctaaatgtgaccaaaccaacattgtaatccagtcccttcttggaacctaaattgaactgccaagtactgcgcatgcaagagaccctttattggccttacagtgggccattcatttctataggcaaagaaagctctagacagattggaataggaaatggatatttgccttttagctacacccctttgtctgtcttcctcattttgttcctttttttttccctaaaggggagtcaagttccctgggttgttcccctcataaggtattagggacttgtgtcacatctctctggagttttctattttaaagaggaatctgaaagcaataagctctttggtcttcttaagatggctacacctcaatttaagatggggtattctttcactagttgaggagtagaagaggatgaccagctagactcccatggaattggaactcctattccttgcttagacattacaggttatgctttgagatctctttggggtgaaggattgaaattaaaccctgagccaccgtgtccttgtagagcacagagtagagaacaactggcagctttgaaaaaacaccatgaagaagaaatcgttcatcataagaaggagattgagcgtctgcagaaagaaattgagcgccataagcagaagatcaaaatgctaaaacatgatgattaagtgcacaccgtgtgccatagaatggcacatgtcattgcccacttctgtgtagacatggttctggtttaactaatatttgtctgtgtgctactaacagattataataaattgtcatcagtgaa

SEQ ID NO: 334889 - DNA, 553 bp, Homo sapiens
  misc_feature (47)..(47): n is a, c, g, or t
  misc_feature (60)..(60): n is a, c, g, or t
  misc_feature (74)..(74): n is a, c, g, or t
cccctatccaatctaacccgatccatactactaatctatactgaccnatctatactaccnatctatactgaccnatctatactgaccggtgcttggccgtccctgccattagcgcgtaacgagagactgcttgctgcggcagagacgccagaggtgcagctccagcagcaatggcagtgacggcgttggcggcgcggacgtggcttggcgtgtggggcgtgaggaccatgcaagcccgaggcttcggctcggatcagtccgagaatgtcgaccggggcgcgggctccatccgggaagccggtggggccttcggaaagagagagcaggctgaagaggaacgatatttccgacattacaggttatgctttgagatctctttggggtgaaggattgaaattaaaccctgagccaccgtgtccttgtagagcacagagtagagaacaactggcagctttgaaaaaacaccatgaagaagaaatcgttcatcataagaaggagattgagcgtctgcagaaagaaattgagcgcgccgacgccgtcgagcgcgccgacg

SEQ ID NO: 334890 - DNA, 718 bp, Homo sapiens
tccttccctctctcacggggatgctgcgaggattaagcaagataattaaagttgaaacatcagttcccattccccagcatggcccacctccctttccagcttcactttctcttagcacttgtcaccttcccagaatagagagccttttgctcgtttttgttgtaaattttccttctcctcatgctgaaatagaggcctcacgtgagtagggagatgaccattctgttcactgttctatcccaagagcctagaacagcgcttggcacacagttggtactctgcaaatatttgctgaatatatgatccacataaagccacttaggagtgcgcttggtatcagtgactaccaggtaaaggtagcaatgacaacagtggtgatgatattgataaaggtgaattctatttgaggcacataaaagccaggttccatgcagatacaattgatcccatttgacagatgaggaaactgagggaggttccaagaggcagagtgacctgccccagccatgatgtcagtggtagaactacaccagactctgctcttctggttggtcatgggatggacttccccaaggctacagaggtggctcttccctgggcagaaggcccctctggggatgacaaacacccagtggagtagccctgagtgggacaagggctttggaacggggtgggcgttgacaggcttggctcctgtggtgacgcccaatgtctcatg

SEQ ID NO: 334891 - DNA, 4625 bp, Homo sapiens
gcgaactggctggaggagctaggggactagaggcggggtgggaggggggcgggtggaagggggaggaagtcccgtaacggagacgctggtcaggacgttcccacctcctctgacactgccgagtccgatcggagaggggtcaccgcctccttcagcgaggaggaggggggcggagcccgactcaggatcatggattttcctggtcactttgaacaaatcttccagcagctgaactaccagagacttcatggccagctctgtgattgtgtcattgtagtggggaatagacactttaaagcccaccgctccgtgctggcagcatgcagcacgcatttccgagccctgttctcagtggcagaaggagatcagaccatgaacatgatccagctggatagcgaggtggtgacagcagaggcctttgctgcactgattgacatgatgtatacctccaccctcatgctgggggagagcaatgtaatggatgtcttattggcagcctctcacctgcatttgaactctgttgttaaggcatgtaaacattacttaacgacaaggacgctgcccatgtctccccccagtgagcgcgttcaggagcagagcgcccgcatgcagcgctcctttatgctacagcagctgggactaagcatcgtgagctcagccctcaattccagccagaatggcgaggagcagccagcccccatgagctcttccatgcgcagtaacctggatcagcgcacgcccttccccatgagacgccttcataagcgcaagcagtctgcagaggagcgggccaggcagcgcctccgaccctccatagatgagtctgccatttcagatgttacaccggagaatgggccttcaggggttcattctcgggaggagttcttttcaccagattctctgaaaattgtggataatcctaaagctgacggaatgactgataaccaggaagatagtgcgatcatgtttgatcagtcttttggcactcaagaagatgcccaggtgcccagccagtctgataacagtgctggcaacatggcacagttgtccatggcctctcgtgcaactcaggttgagactagttttgatcaggaagctgcacctgagaaaagtagttttcagtgtgaaaaccctgaggttggccttggtgagaaggagcacatgagagtggtggttaaatctgagcccctgagctcacctgagcctcaggatgaagtgagcgatgtgacctcacaagcagaaggcagcgagtctgtggaagtggaaggagttgtggtcagtgccgagaagatagacctcagccctgaaagcagtgatcggagtttttcagatccccagtctagcacagacagggtaggtgatatccatattttggaagtcacaaataacctagagcataagtccacttttagtatttcgaattttcttaacaagagcagaggaaataactttactgcaaatcagaacaatgatgataatattccaaacaccactagtgactgcaggctggagagtgaggccccctatttgttgagtccagaggctgggcctgcaggtgggccctcctctgcccctggctcccatgtagagaacccatttagtgaacctgcagactcccacttcgtcaggcctatgcaggaggtgatgggcctgccgtgtgtgcagacttcaggctaccaaggaggagaacagtttgggatggacttttccaggtctggtttgggcctccactcctccttctccagggtaatgataggttccccaaggggaggagccagtaactttccttactaccgccgcatagctcccaaaatgccagttgtaacttccgtcaggagctcacagatcccagaaaactctaccagttctcagctaatgatgaatggagctacgtcctcatttgaaaatggccatccttcccagcctggccctccacagttgaccagggcatctgcagatgttctgtcaaagtgcaagaaggccttatcagagcacaatgttttggttgtagagggagctcgcaagtatgcctgcaaaatctgctgcaaaacttttctgactttgacagattgcaagaagcacatccgtgttcacacaggtgaaaagccttacgcctgcctgaagtgtggcaagaggtttagtcagtccagccacctgtataagcactcaaagactacctgcctgcgctggcagagcagcaatcttcccagcactttgctctagctgtttgtccttacaagacaacgctgaggccagttgtcagactgaatttcttttggtaagcagttaatgcctttgggttcgaggcttccagctgcccagtggctcttaaacagtttagcaactaataaccggagaactaacatgtagtatttgtgctgctgcatttctgagtgaagtgcacgtcttgggaaagggatgcaatccctgaaaccaggtgcttccttggggttgagtaatgcagtcagaaagtagtttgtaattgatattaaaagtggcacatttaaaaatttaaaaattgaagtgcaaaaaaaattttttagcaatttttgtaaaactgtgtagcatttaaatttcctataccttctgatgggagtattatatccctgtatagtgatgcaaaatgcacttatgtgtaaccagtggtgatttggtgcctgtcttaaaggaaggcctttgaggacacacctgtctgccacaaatgctttaaagtgtatcatgagctagtcctaggcctcaaagtactgtattttttatttttacctgatttgcagtcataaacactgcactttggtgctgacactgggtccagagtgagcattctcttggactattagatgtatatacttttgaatacatcactgttggatagatgttttaacagttttttctggtttaaaaaccaaattgtaaatggagtgtgtacttgtagagagtgacaaggtattgtttccctatgtgctgtttgagcagtattttaaccaacttgtattacagatgttacagttccatgttaggaagtcagaaaagacttgtgtttgtctttgttctgctgatgtggagtcatgttttgtggggtcttccatggcacatttacctgttgctccgtccagatgttgagggccagtctaggctgacacatcctacccgaggacaagcctgttctccatttcttcactctcccctccccatatagcaactctcccaggtttagattaccgttttcgacgacagattaaccaaaaatgccccacacaggttttattactgttatatactatacttttaacagtacagaccctaaattttattatttgttgctcccccaatctgataccaaatgtttaaagttgtttgaaatccaaacatggtagtgttcatgggtaaatattttctaggctatgtaagagttagcagcccatagcatagaagtaatcaagtagcatctgagactgttggaggcactagggcctctctgggccctacagcctcacttccccagcctcaccttgctgtcctctgacactgccatcagggctgttagtggcacctgtatgaggccaagtgtgcgtccaggggaacagcacaggttaatgcgtctccctagaactcatgaagtcagtttaattcatgcatgaacatgagttcattttatgttttatatagctttcttagacataccaaaccatcattcataaatcagataaattattcagtttttgtgtttagaaagctaagtatgtgtagctggaaacaaaaatgagcgtgttttctctcctgttaatctagagtgtgcagttacacatgtgtggataatttcatgttccaggggcgcttggcatctcccatggactgattcccaggaagaaaagcccaaagggaaacccacgattcctttcgagtagatgtgggaaagagcccattggaggatatgaggtcctgtgaaattcagttgtgtgtgtggctccttgttagcagtcatgttgacatggtgttaggaggctccccatccaccctttacatgatgtagggaccagtgtcttgtgagattaaccttgggacacagtgggttagcctggagaaaatgagaggccctgcctggacccagggagaggagccagtgacacaggcagagcggtgcagccctccttcccttccatttggaggaggtggtgccaggagcctgcccgcttacctctgctgaagcataagtggactttgcttttggggcttatctctgatacatgctggagccctgcctctccactgctagatggaacctggaatctctcatctacctcttagtctgtcagtttctacgtgtgagaagcaagcttgtgggccagtgtccttgtacatgctgtagcacttaaaaaataattccagggttccctggaaaaccagtcccagggttcctatgatctgtagtttctacctggattataactggttttgggtacctgaattttgattggttagccttaattatagtctggcgtgatcatgtagaatcttttctggtgaacagatcataaagttctatcaaggagttctatcaaggcatccatgtcagtggtgctatgctggttacaacttgagatttttgaaataaaaaatttgtcata

SEQ ID NO: 334892 - DNA, 2718 bp, Homo sapiens
ggcaagaaggccttatcagagcatctgcactttgaccagggcatctgcagatgttctgtcaaagtgcaagaaggccttatcagagcacaatgttttggttgtagagggagctcgcaagtatgcctgcaaaatctgctgcaaaacttttctgactttgacagattgcaagaagcacatccgtgttcacacaggtgaaaagccttacgcctgcctgaagtgtggcaagaggtttagtcagtccagccacctgtataagcactcaaagactacctgcctgcgctggcagagcagcaatcttcccagcactttgctctagctgtttgtccttacaagacaacgctgaggccagttgtcagactgaatttcttttggtaagcagttaatgcctttgggttcgaggcttccagctgcccagtggctcttaaacagtttagcaactaataaccggagaactaacatgtagtatttgtgctgctgcatttctgagtgaagtgcacgtcttgggaaagggatgcaatccctgaaaccaggtgcttccttggggttgagtaatgcagtcagaaagtagtttgtaattgatattaaaagtggcacatttaaaaatttaaaaattgaagtgcaaaaaaaattttttagcaatttttgtaaaactgtgtagcatttaaatttcctataccttctgatgggagtattatatccctgtatagtgatgcaaaatgcacttatgtgtaaccagtggtgatttggtgcctgtcttaaaggaaggcctttgaggacacacctgtctgccacaaatgctttaaagtgtatcatgagctagtcctaggcctcaaagtactgtattttttatttttacctgatttgcagtcataaacactgcactttggtgctgacactgggtccagagtgagcattctcttggactattagatgtatatacttttgaatacatcactgttggatagatgttttaacagttttttctggtttaaaaaccaaattgtaaatggagtgtgtacttgtagagagtgacaaggtattgtttccctatgtgctgtttgagcagtattttaaccaacttgtattacagatgttacagttccatgttaggaagtcagaaaagacttgtgtttgtctttgttctgctgatgtggagtcatgttttgtggggtcttccatggcacatttacctgttgctccgtccagatgttgagggccagtctaggctgacacatcctacccgaggacaagcctgttctccatttcttcactctcccctccccatatagcaactctcccaggtttagattaccgttttcgacgacagattaaccaaaaatgccccacacaggttttattactgttatatactatacttttaacagtacagaccctaaattttattatttgttgctcccccaatctgataccaaatgtttaaagttgtttgaaatccaaacatggtagtgttcatgggtaaatattttctaggctatgtaagagttagcagcccatagcatagaagtaatcaagtagcatctgagactgttggaggcactagggcctctctgggccctacagcctcacttccccagcctcaccttgctgtcctctgacactgccatcagggctgttagtggcacctgtatgaggccaagtgtgcgtccaggggaacagcacaggttaatgcgtctccctagaactcatgaagtcagtttaattcatgcatgaacatgagttcattttatgttttatatagctttcttagacataccaaaccatcattcataaatcagataaattattcagtttttgtgtttagaaagctaagtatgtgtagctggaaacaaaaatgagcgtgttttctctcctgttaatctagagtgtgcagttacacatgtgtggataatttcatgttccaggggcgcttggcatctcccatggactgattcccaggaagaaaagcccaaagggaaacccacgattcctttcgagtagatgtgggaaagagcccattggaggatatgaggtcctgtgaaattcagttgtgtgtgtggctccttgttagcagtcatgttgacatggtgttaggaggctccccatccaccctttacatgatgtagggaccagtgtcttgtgagattaaccttgggacacagtgggttagcctggagaaaatgagaggccctgcctggacccagggagaggagccagtgacacaggcagagcggtgcagccctccttcccttccatttggaggaggtggtgccaggagcctgcccgcttacctctgctgaagcataagtggactttgcttttggggcttatctctgatacatgctggagccctgcctctccactgctagatggaacctggaatctctcatctacctcttagtctgtcagtttctacgtgtgagaagcaagcttgtgggccagtgtccttgtacatgctgtagcacttaaaaaataattccagggttccctggaaaaccagtcccagggttcctatgatctgtagtttctacctggattataactggttttgggtacctgaattttgattggttagccttaattatagtctggcgtgatcatgtagaatcttttctggtgaacagatcataaagttctatcaaggagttctatcaaggcatccatgtcagtggtgctatgctggttacaacttgagatttttgaaataaaaaatttgtcata

SEQ ID NO: 334893 - DNA, 4647 bp, Homo sapiens
gcgaactggctggaggagctaggggactagaggcggggtgggaggggggcgggtggaagggggaggaagtcccgtaacggagacgctggtcaggacgttcccacctcctctgacactgccgagtccgatcggagaggggtcaccgcctccttcagcgaggaggaggggggcggagcccgactcaggatcatggattttcctggtcactttgaacaaatcttccagcagctgaactaccagagacttcatggccagctctgtgattgtgtcattgtagtggggaatagacactttaaagcccaccgctccgtgctggcagcatgcagcacgcatttccgagccctgttctcagtggcagaaggagatcagaccatgaacatgatccagctggatagcgaggtggtgacagcagaggcctttgctgcactgattgacatgatgtatacctccaccctcatgctgggggagagcaatgtaatggatgtcttattggcagcctctcacctgcatttgaactctgttgttaaggcatgtaaacattacttaacgacaaggacgctgcccatgtctccccccagtgagcgcgttcaggagcagagcgcccgcatgcagcgctcctttatgctacagcagctgggactaagcatcgtgagctcagccctcaattccagccagaatggcgaggagcagccagcccccatgagctcttccatgcgcagtaacctggatcagcgcacgcccttccccatgagacgccttcataagcgcaagcagtctgcagaggagcgggccaggcagcgcctccgaccctccatagatgagtctgccatttcagatgttacaccggagaatgggccttcaggggttcattctcgggaggagttcttttcaccagattctctgaaaattgtggataatcctaaagctgacggaatgactgataaccaggaagatagtgcgatcatgtttgatcagtcttttggcactcaagaagatgcccaggtgcccagccagtctgataacagtgctggcaacatggcacagttgtccatggcctctcgtgcaactcaggttgagactagttttgatcaggaagctgcacctgagaaaagtagttttcagtgtgaaaaccctgaggttggccttggtgagaaggagcacatgagagtggtggttaaatctgagcccctgagctcacctgagcctcaggatgaagtgagcgatgtgacctcacaagcagaaggcagcgagtctgtggaagtggaaggagttgtggtcagtgccgagaagatagacctcagccctgaaagcagtgatcggagtttttcagatccccagtctagcacagacagggtaggtgatatccatattttggaagtcacaaataacctagagcataagtccacttttagtatttcgaattttcttaacaagagcagaggaaataactttactgcaaatcagaacaatgatgataatattccaaacaccactagtgactgcaggctggagagtgaggccccctatttgttgagtccagaggctgggcctgcaggtgggccctcctctgcccctggctcccatgtagagaacccatttagtgaacctgcagactcccacttcgtcaggcctatgcaggaggtgatgggcctgccgtgtgtgcagacttcaggctaccaaggaggagaacagtttgggatggacttttccaggtctggtttgggcctccactcctccttctccagggtaatgataggttccccaaggggaggagccagtaactttccttactaccgccgcatagctcccaaaatgccagttgtaacttccgtcaggagctcacagatcccagaaaactctaccagttctcagctaatgatgaatggagctacgtcctcatttgaaaatggccatccttcccagcctggccctccacagttgaccagggcatctgcagatgttctgtcaaagtgcaagaaggccttatcagagcacaatgttttggttgtagagggagctcgcaagtatgcctgcaaaatctgctgcaaaacttttctgactttgacagattgcaagaagcacatccgtgttcacacaggtgaaaagccttacgcctgcctgaagtgtggcaagaggtttagtcagtccagccacctgtataagcactcaaagactacctgcctgcgctggcagagcagcaatcttcccagcactttgctctagctgtttgtccttacaagacaacgctgaggccagttgtcagactgaatttcttttggtaagcagttaatgcctttgggttcgaggcttccagctgcccagtggctcttaaacagtttagcaactaataaccggagaactaacatgtagtatttgtgctgctgcatttctgagtgaagtgcacgtcttgggaaagggatgcaatccctgaaaccaggtgcttccttggggttgagtaatgcagtcagaaagtagtttgtaattgatattaaaagtggcacatttaaaaatttaaaaattgaagtgcaaaaaaaattttttagcaatttttgtaaaactgtgtagcatttaaatttcctataccttctgatgggagtattatatccctgtatagtgatgcaaaatgcacttatgtgtaaccagtggtgatttggtgcctgtcttaaaggaaggcctttgaggacacacctgtctgccacaaatgctttaaagtgtatcatgagctagtcctaggcctcaaagtactgtattttttatttttacctgatttgcagtcataaacactgcactttggtgctgacactgggtccagagtgagcattctcttggactattagatgtatatacttttgaatacatcactgttggatagatgttttaacagttttttctggtttaaaaaccaaattgtaaatggagtgtgtacttgtagagagtgacaaggtattgtttccctatgtgctgtttgagcagtattttaaccaacttgtattacagatgttacagttccatgttaggaagtcagaaaagacttgtgtttgtctttgttctgctgatgtggagtcatgttttgtggggtcttccatggcacatttacctgttgctccgtccagatgttgagggccagtctaggctgacacatcctacccgaggacaagcctgttctccatttcttcactctcccctccccatatagcaactctcccaggtttagattaccgttttcgacgacagattaaccaaaaatgccccacacaggttttattactgttatatactatacttttaacagtacagaccctaaattttattatttgttgctcccccaatctgataccaaatgtttaaagttgtttgaaatccaaacatggtagtgttcatgggtaaatattttctaggctatgtaagagttagcagcccatagcatagaagtaatcaagtagcatctgagactgttggaggcactagggcctctctgggccctacagcctcacttccccagcctcaccttgctgtcctctgacactgccatcagggctgttagtggcacctgtatgaggccaagtgtgcgtccaggggaacagcacaggttaatgcgtctccctagaactcatgaagtcagtttaattcatgcatgaacatgagttcattttatgttttatatagctttcttagacataccaaaccatcattcataaatcagataaattattcagtttttgtgtttagaaagctaagtatgtgtagctggaaacaaaaatgagcgtgttttctctcctgttaatctagagtgtgcagttacacatgtgtggataatttcatgttccaggggcgcttggcatctcccatggactgattcccaggaagaaaagcccaaagggaaacccacgattcctttcgagtagatgtgggaaagagcccattggaggatatgaggtcctgtgaaattcagttgtgtgtgtggctccttgttagcagtcatgttgacatggtgttaggaggctccccatccaccctttacatgatgtagggaccagtgtcttgtgagattaaccttgggacacagtgggttagcctggagaaaatgagaggccctgcctggacccagggagaggagccagtgacacaggcagagcggtgcagccctccttcccttccatttggaggaggtggtgccaggagcctgcccgcttacctctgctgaagcataagtggactttgcttttggggcttatctctgatacatgctggagccctgcctctccactgctagatggaacctggaatctctcatctacctcttagtctgtcagtttctacgtgtgagaagcaagcttgtgggccagtgtccttgtacatgctgtagcacttaaaaaataattccagggttccctggaaaaccagtcccagggttcctatgatctgtagtttctacctggattataactggttttgggtacctgaattttgattggttagccttaattatagtctggcgtgatcatgtagaatcttttctggtgaacagatcataaagttctatcaaggagttctatcaaggcatccatgtcagtggtgctatgctggttacaacttgagatttttgaaataaaaaatttgtcatattcatgcctctaaaaaaaaatt

SEQ ID NO: 334894 - DNA, 4667 bp, Homo sapiens
gcgaactggctggaggagctaggggactagaggcggggtgggaggggggcgggtggaagggggaggaagtcccgtaacggagacgctggtcaggacgttcccacctcctctgacactgccgagtccgatcggagaggggtcaccgcctccttcagcgaggaggaggggggcggagcccgactcaggatcatggattttcctggtcactttgaacaaatcttccagcagctgaactaccagagacttcatggccagctctgtgattgtgtcattgtagtggggaatagacactttaaagcccaccgctccgtgctggcagcatgcagcacgcatttccgagccctgttctcagtggcagaaggagatcagaccatgaacatgatccagctggatagcgaggtggtgacagcagaggcctttgctgcactgattgacatgatgtatacctccaccctcatgctgggggagagcaatgtaatggatgtcttattggcagcctctcacctgcatttgaactctgttgttaaggcatgtaaacattacttaacgacaaggacgctgcccatgtctccccccagtgagcgcgttcaggagcagagcgcccgcatgcagcgctcctttatgctacagcagctgggactaagcatcgtgagctcagccctcaattccagccagaatggcgaggagcagccagcccccatgagctcttccatgcgcagtaacctggatcagcgcacgcccttccccatgagacgccttcataagcgcaagcagtctgcagaggagcgggccaggcagcgcctccgaccctccatagatgagtctgccatttcagatgttacaccggagaatgggccttcaggggttcattctcgggaggagttcttttcaccagattctctgaaaattgtggataatcctaaagctgacggaatgactgataaccaggaagatagtgcgatcatgtttgatcagtcttttggcactcaagaagatgcccaggtgcccagccagtctgataacagtgctggcaacatggcacagttgtccatggcctctcgtgcaactcaggttgagactagttttgatcaggaagctgcacctgagaaaagtagttttcagtgtgaaaaccctgaggttggccttggtgagaaggagcacatgagagtggtggttaaatctgagcccctgagctcacctgagcctcaggatgaagtgagcgatgtgacctcacaagcagaaggcagcgagtctgtggaagtggaaggagttgtggtcagtgccgagaagatagacctcagccctgaaagcagtgatcggagtttttcagatccccagtctagcacagacagggtaggtgatatccatattttggaagtcacaaataacctagagcataagtccacttttagtatttcgaattttcttaacaagagcagaggaaataactttactgcaaatcagaacaatgatgataatattccaaacaccactagtgactgcaggctggagagtgaggccccctatttgttgagtccagaggctgggcctgcaggtgggccctcctctgcccctggctcccatgtagagaacccatttagtgaacctgcagactcccacttcgtcaggcctatgcaggaggtgatgggcctgccgtgtgtgcagacttcaggctaccaaggaggagaacagtttgggatggacttttccaggtctggtttgggcctccactcctccttctccagggtaatgataggttccccaaggggaggagccagtaactttccttactaccgccgcatagctcccaaaatgccagttgtaacttccgtcaggagctcacagatcccagaaaactctaccagttctcagctaatgatgaatggagctacgtcctcatttgaaaatggccatccttcccagcctggccctccacagttgaccagggcatctgcagatgttctgtcaaagtgcaagaaggccttatcagagcacaatgttttggttgtagagggagctcgcaagtatgcctgcaaaatctgctgcaaaacttttctgactttgacagattgcaagaagcacatccgtgttcacacaggtgaaaagccttacgcctgcctgaagtgtggcaagaggtttagtcagtccagccacctgtataagcactcaaagactacctgcctgcgctggcagagcagcaatcttcccagcactttgctctagctgtttgtccttacaagacaacgctgaggccagttgtcagactgaatttcttttggtaagcagttaatgcctttgggttcgaggcttccagctgcccagtggctcttaaacagtttagcaactaataaccggagaactaacatgtagtatttgtgctgctgcatttctgagtgaagtgcacgtcttgggaaagggatgcaatccctgaaaccaggtgcttccttggggttgagtaatgcagtcagaaagtagtttgtaattgatattaaaagtggcacatttaaaaatttaaaaattgaagtgcaaaaaaaattttttagcaatttttgtaaaactgtgtagcatttaaatttcctataccttctgatgggagtattatatccctgtatagtgatgcaaaatgcacttatgtgtaaccagtggtgatttggtgcctgtcttaaaggaaggcctttgaggacacacctgtctgccacaaatgctttaaagtgtatcatgagctagtcctaggcctcaaagtactgtattttttatttttacctgatttgcagtcataaacactgcactttggtgctgacactgggtccagagtgagcattctcttggactattagatgtatatacttttgaatacatcactgttggatagatgttttaacagttttttctggtttaaaaaccaaattgtaaatggagtgtgtacttgtagagagtgacaaggtattgtttccctatgtgctgtttgagcagtattttaaccaacttgtattacagatgttacagttccatgttaggaagtcagaaaagacttgtgtttgtctttgttctgctgatgtggagtcatgttttgtggggtcttccatggcacatttacctgttgctccgtccagatgttgagggccagtctaggctgacacatcctacccgaggacaagcctgttctccatttcttcactctcccctccccatatagcaactctcccaggtttagattaccgttttcgacgacagattaaccaaaaatgccccacacaggttttattactgttatatactatacttttaacagtacagaccctaaattttattatttgttgctcccccaatctgataccaaatgtttaaagttgtttgaaatccaaacatggtagtgttcatgggtaaatattttctaggctatgtaagagttagcagcccatagcatagaagtaatcaagtagcatctgagactgttggaggcactagggcctctctgggccctacagcctcacttccccagcctcaccttgctgtcctctgacactgccatcagggctgttagtggcacctgtatgaggccaagtgtgcgtccaggggaacagcacaggttaatgcgtctccctagaactcatgaagtcagtttaattcatgcatgaacatgagttcattttatgttttatatagctttcttagacataccaaaccatcattcataaatcagataaattattcagtttttgtgtttagaaagctaagtatgtgtagctggaaacaaaaatgagcgtgttttctctcctgttaatctagagtgtgcagttacacatgtgtggataatttcatgttccaggggcgcttggcatctcccatggactgattcccaggaagaaaagcccaaagggaaacccacgattcctttcgagtagatgtgggaaagagcccattggaggatatgaggtcctgtgaaattcagttgtgtgtgtggctccttgttagcagtcatgttgacatggtgttaggaggctccccatccaccctttacatgatgtagggaccagtgtcttgtgagattaaccttgggacacagtgggttagcctggagaaaatgagaggccctgcctggacccagggagaggagccagtgacacaggcagagcggtgcagccctccttcccttccatttggaggaggtggtgccaggagcctgcccgcttacctctgctgaagcataagtggactttgcttttggggcttatctctgatacatgctggagccctgcctctccactgctagatggaacctggaatctctcatctacctcttagtctgtcagtttctacgtgtgagaagcaagcttgtgggccagtgtccttgtacatgctgtagcacttaaaaaataattccagggttccctggaaaaccagtcccagggttcctatgatctgtagtttctacctggattataactggttttgggtacctgaattttgattggttagccttaattatagtctggcgtgatcatgtagaatcttttctggtgaacagatcataaagttctatcaaggagttctatcaaggcatccatgtcagtggtgctatgctggttacaacttgagatttttgaaataaaaaatttgtcataaaaaaaaaagtcgacgcggccgcgaatttagtagtagtagta

SEQ ID NO: 334895 - DNA, 479 bp, Homo sapiens
tgtctgagaaagtctttatctatgttgatgattcttttcttgcaatgctttaaatatttcaccctgctcttttcttgcttgcttggtttctaaagagaaattcaatataattcttatccttactcttctataaacaaggtgtttttccccgctagtatcttccaaataattctctttgcatttgaaattcttcagtttgaaaatcatatgcctaagcataggctgttatgtttgtgtgttcgtttgtttgccattatcctgctcaatgttctctgagcattcctggatctgtggtttggtgtccggcattaatcttgggatattctcagtcactatttctatacatatctcctctgtttctttctctcttgcttttgtttctgatattctcattacacatacgttgcatcttctgttatgatcccacagttcttagattttctgttctgttttcttaagtctttctctttgcttttcag

SEQ ID NO: 334896 - DNA, 334 bp, Homo sapiens
ccaggggtgattatactcttgaacttcaaatatgtaaacttaagcttgacacaacaagaaatagcgatggtgaaataaattggaaactccagtagaccagagttagttggtagcccgaggttgtgttctagctttgccactggctcacgctgtgaacttaagcagatccccactaatccctaggcctcagtgttcccatgtacacgaggggtgggattcgatggtatccaaaggccttcctggtattgatggtttgacattctaggccatctggtcccagaaggtactgtggggcaggagaccagctcatggtggagacctgagcaagccagga

SEQ ID NO: 334897 - DNA, 508 bp, Homo sapiens
agaggtccaacaacatgtaattatctgttctaattcatggtgaattacagtatttaataatattttttaaaattatcataaaaagctaattcatttgtgaacacaaatttttcttaattcccacttcatgacgtattagttttatgatcacgttaggcttactccacaaacatttattggtatctgctttatccatggagtcacagcaggtgatagaggatttgtaaccctctcccctttccctgccactccactgagaagcagatatcatggcatgaatgattaaataggagactatatttcatttataaaatggcttaggaacttttacagatgaaagaaactgttcttgaaactgccaataatatcaggaaagtgaatactaggtcttatttgttctttttaatgattttttcatacccattaaccattctcacccccacctccccatcctccatggccccactacccttctcagcctctggtaaccatccttctactctctgtg

SEQ ID NO: 334898 - DNA, 550 bp, Homo sapiens
tggtcatagccgattcctgagtgtacaacgacgcatatggcctacgattcatcgacatagctgttttcgtgctaattcatggtgaattacagtatttaataatattttttaaaattatcataaaaagctaattcatttgtgaacacaaatttttcttaattcccacttcatgacgtattagttttatgatcacgttaggcttactccacaaacatttattggtatctgctttatccatggagtcacagcaggtgatagaggatttgtaaccctctcccctttccctgccactccactgagaagcagatatcatggcatgaatgattaaataggagactatatttcatttataaaatggcttaggaacttttacagatgaaagaaactgttcttgaaactgccaataatatcaggaaagtgaatactaggtcttatttgttctttttaatgattttttcatacccattaaccattctcacccccacctccccatcctccatggccccactacccttctcagcctctggtaaccatccttctactctctgtg

SEQ ID NO: 334899 - DNA, 142 bp, Homo sapiens
ccagttgctgacatagactcatggctgtcggccaaaggtctcaaccacccttggagcattctggagtggtcagacactactggacaatggatgagcttgtgccctgcatggtcagtctcccttccaggcccccttctgctct

SEQ ID NO: 334900 - DNA, 430 bp, Homo sapiens
gcccaaagagaaagcctttcccttaaaattggtctctccagccctgataagttccccgtctccactagccatatgcctgttcttgcaggtgccaaagttcaaaatgttaatatctttgactctcccatctccctggcagcttcccgtggtcaccagggcttggctctgcatctctcctctccttctgggccccactgtgaccccaccactcttcttcattgatctccctgctctgggctcgtccctaccaaacccctgtgaactaatggcccactttattgtaagagttattgtcttaaaatagcacgggttgagaaaatttccacaatggctattgaataatgcaggaattccttggtcctaaacctgttctcaacctacctttctggacctatccgtaggttccctctccctgaacaggtccaggcag

SEQ ID NO: 334901 - DNA, 717 bp, Homo sapiens
aatttaagtatttttaattctcccagttgtgtgtaatttatttcagttgtaatttatttgcattagaaaagcgaactctatgtgttattgtactttgattcaaaatagctatgttaaaaaattaaaattttctaaactgtacatttaaattgtatgctacagtgtcccgattggcaagttagaagaaaacttcaccagcaagcaaaatataggatttgaattcttaatggttttttgcacttctgttttttaatatccatcgtcaccatctttctatttagtcttagaagagttattactgtccaaataaattttcagcgatgatggaaatttttatatcagcactgtccattgtggtagccacttgaatgtgcctcatctgaggaactatatttaattttatttaattgtaattagttcaagtaggtacatgtgcttagtggctactatatggatagcacagctctagaacctaggtcaacaggagcatctggatcacacaggagtatctggctgtgtaggaagatttttgaagcaatatcaggcctggatatcttcagtggaatcaatttacagatccttgactttctaaactgatgagcctaagaaagtgtctgggtctgttagtgctgctttctgacctcctctttaatacttgcttttttactgctttgcaaaagaaagagttatcgcacctgttctctgggggtgaaaatg

SEQ ID NO: 334902 - DNA, 331 bp, Homo sapiens
acacacacacacacacacacacacacacacacacaatacttgccatatcaagttaaaattgttaattttaatatgaaatgtgtgagataggtatccagtttcattccctattaaatatggaacgtttttcttgcacaatgtattttaagattccatctttcctcatttttttctgttttaaatgaagtttgtctgtttatggatttcctattttgtttcatttatcagtactgtctttatgccagtagcacattgtctaattctatcgttatagttttcctttgtattttcgttaacaaaaactccctccgctttcttttccttgaagtat

SEQ ID NO: 334903 - DNA, 714 bp, Homo sapiens
gcagcgtgtccactaaagacgctccctctatgtgcctctgccttgagagtgggcgtggggggaggcgtggcagaccggaggcagagcttcctgggcgccaaggcaaagggaggaaacaaaagccatgtctggctaaaggccagactcaaaccatgggggcagcggcagggagtcttcagtgatgtggaaagatgggttctgctgctcatctcagaggagaggacaagaaacccagacatgctaggccgtgtgcggtggctcacgcctgtaatcccagcactttgggaggccaaggcaggcggatcatgaggtcaggagatcgagatcatcctggctaacatggtgaaaccccgtctctactaaaaatacaaaaataaaattagctgggtgtggtggtggatgcctatagtcccagctactcgggaggctgaggtgggagaatggcgtgaacccgggaggcggagcttgcagtggtgcagagatcatgccactgcactccagcctgggcgacagagcatgactccgtctcaaaaaaaaatacaaaaatttagccgggcatggtggtgtgcacctgtagtcccagctacttgggaggctgaggcgggagaattgattgaacctgggaggtggaggttgcagtgagccgagatcgcgccattgcactccagcctgggcaacagggtgagactccatctcaaaaaaaaaaaaagaaag

SEQ ID NO: 334904 - DNA, 163 bp, Homo sapiens
catgcacaaacataaactttcagcaccagaaatgtcatccaatggcccatttaaaaaagtcagtgaatttgtttggttgtatttctgccatcgtacagaatctgagcatctccataacttcaatttccctttcttttttttccagctttattgaggcattctt

SEQ ID NO: 334905 - DNA, 337 bp, Homo sapiens
gaggatcacttgagaccgggagtccaagaccagcctcgttaatataatgagagcttatctctacaaaaaataaacaaaattagccaggcatggtggcatgtgcctgtagttccagctactcaggaggctgaggtaggatcaccggagcccagggggtggaggagcagtaagccaagattctgccactgcactccagcctggctgacagagtaagaccctatctcaaaaaacaaaaagcagaaagaacaaagaagtaaacagaagcttaaaagtaaatcagccatgagccacggtgcccagcctgtttatggacattttaagttgtgcatatgccaaa

SEQ ID NO: 334906 - DNA, 435 bp, Homo sapiens
tccgcctgctactcggtcccggcgctgggctgaggggaggggttgtcttaaaagtctctccttccccctgtaggggcggccggcgagtcccagtgagagcggagggtgccagaggtagggggccgagaaacaaagttcccggggcttcctccggggccgcggtcggggctgcgcgtttgaccgcccccctcctcgcgaaggcaatggcttccaaactcctgcgcgcggtcatcctcgggccgcccggctcgggcaagggcaccgtgtgccagaggatcgcccagaactttggtctccagcatctctccagcggccacttcttgcgggagaacatcaaggccagcaccgaagttggtgagatggcaaagcagtatatagagaaaagtcttttggttccagaccatgtgatcacacgcctaatgatgtctgagttgg

SEQ ID NO: 334907 - DNA, 178 bp, Homo sapiens
agggaggttgaggctgcagtgagtcatgattgtgccacgtaccccagtctgggtgacagagtgaaaccctatctcaaaaaaaaaagaaaacgttgaatgaaagagatgtttagattagaagcaatgcaggaatttgcggaagaccttaacaggttaaaaaaaaaaaaagtaggaaaaa

SEQ ID NO: 334908 - DNA, 324 bp, Homo sapiens
agggagttccccgaccccttgcacttcccgggtgaggcaacaccacaccctccttcggctcatcctccgtgggcttcacccgctgtctaaccagtcccagtgagatgagccatgtaactcagttggaaatgcagaaatcacccaccttttgtgttgatcttgctgggatttgcagactggagctgttcctattaggacattttgccagccactccactattttttttcattattacttcatcatttagtttttctatttaagtgatgtttatgcaccacatttacagtgttatattagtctgtgttttctgtctccttactatt

SEQ ID NO: 334909 - DNA, 93 bp, Homo sapiens
tcatgagaagataatttccaagagggagagtgagcagtagtcaaaactataaaaattagagctaaactgagaaataaaaacatatacaactaa

SEQ ID NO: 334910 - DNA, 147 bp, Homo sapiens
ctaagcactctccattgtaggtcagtgtatatcagagaaacacaggcagttcttccacaagggcaggactttaatcagacatcaagtactgagttaatgatttaaaatgcccacattgcacagccttgttgttgttgtttttttttt

SEQ ID NO: 334911 - DNA, 642 bp, Homo sapiens
agggtcattaacggaccatgggctgctgggaaacggcttaggagcagcacccggctggcgctggccggccggcgccggggactttcttccgcctggccagacagatccctgttttttgtttttcaaaattcagaaagcatctccgaatatttgcccagaggagtgtgaaacatactttcctggagttgtaagacgttcatcgccgtgttatccttgagtaaagaatgaactctggaagcccagccagggacaatgcaccttcacagagattctgcactaatctgagtgaaggtctaaggtttggaatctccccctcatggagagaagctttgtatggctgtcatgcttagacagtgattcctgcaacttgaccttcaggctgggagaggtggagagccatgcctgttctccttccttgctatggaatttgctgacacaatatcttccgcctggtgctgggcatatcctaagaacttacaactttcctgtattatcctgtgtgagcagctgtcaccttattgggggaaaaatgcctgaaaattagggggcacttcaagtagatagcttctatttcctatatttgtcttatatacaagtatttgcttttatcaaaataattccaataaagcattttaaagtaaa

SEQ ID NO: 334912 - DNA, 697 bp, Homo sapiens
gcgcatgcttgtgcgtgaagctagccgattgtcaccaccgcgtagttattcgtggtgtcatttagcattgtcaactggccgaccgtcgttacaagggggaactcggctagcggccccacagcccctgctgactcaaaacaactgagttgtaagacgttcatcgccgtgttatccttgagtaaagaagcgggcttttgccatgttgtccaggctggtctctactcctgggctcaagcagtcctcctgcctcagtctcccaaagtgctggaattacagggaatgaactctggaagcccagccagggacaatgcaccttcacagagattctgcactaatctgagtgaaggtctaaggtttggaatctccccctcatggagagaagctttgtatggctgtcatgcttagacagtgattcctgcaacttgaccttcaggctgggagaggtggagagccatgcctgttctccttccttgctatggaatttgctgacacaatatcttccgcctggtgctgggcatatcctaagaacttacaactttcctgtattatcctgtgtgagcagctgtcaccttattgggggaaaaatgcctgaaaattagggggcacttcaagtagatagcttctatttcctatatttgtcttatatacaagtatttgcttttatcaaaataattccaataaagcattttaaagtaaa

SEQ ID NO: 334913 - DNA, 832 bp, Homo sapiens
ataaatccccgtatttttgttaaaggctgggtaacctgactcctcccctcatttctactgcaaaataggagtacactggggcctcccagtggagctgttctctgctgttttaaattactttctactcctccctttctaacgtccactcctggactcatttgttagatcaatatatactgggactgttgtgttttctttgagtgtactagatctctttccagaagagcttcccttgatccagatctccctaattgggaatgatgatttcacagactagagtctccgatgctggtcatgatgtcaaaactaagttctgactcatttagggaactggatacttgggtctccagaagggccaatgggagggccataattctgtttattttcaaattgtcttgttttcaccttgttagaatgaactctggaagcccagccagggacaatgcaccttcacagagattctgcactaatctgagtgaaggtctaaggtttggaatctccccctcatggagagaagctttgtatggctgtcatgcttagacagtgattcctgcaacttgaccttcaggctgggagaggtggagagccatgcctgttctccttccttgctatggaatttgctgacacaatatcttccgcctggtgctgggcatatcctaagaacttacaactttcctgtattatcctgtgtgagcagctgtcaccttattgggggaaaaatgcctgaaaattagggggcacttcaagtagatagcttctatttcctatatttgtcttatatacaagtatttgcttttatcaaaataattccaataaagcattttaaagtaaa

SEQ ID NO: 334914 - DNA, 1120 bp, Homo sapiens
  misc_feature (657)..(657): n is a, c, g, or t
agggtcattaacggaccatgggctgctgggaaacggcttaggagcagcacccggctggcgctggccggccggcgccggggactttcttccgcctggccagacagatccctgttttttgtttttcaaaattcagaaagcatctccgaatatttgcccagaggagtgtgaaacatactttcctggagttgtaagacgttcatcgccgtgttatccttgagtaaagaatgaactctggaagcccagccagggacaatgcaccttcacagagattctgcactaatctgagtgaaggtctaaggtttggaatctccccctcatggagagaagctttgtatggctgtcatgcttagacagtgattcctgcaacttgaccttcaggctgggagaggtggagagccatgcctgttctccttccttgctatggaatttgctgacacaatatcttccgcctggtgctgggcatatcctaagaacttacaactttcctgtattatcctgtgtgagcagctgtcaccttattgggggaaaaatgcctgaaaattagggggcacttcaagtagatagcttctatttcctatatttgtcttatatacaagtatttgcttttatcaaaataattccaataaagcattttaaagtaaaaaaaaaaaaaaaaanaaaaaaaaaaaaaaaaaggggggggcccacatcagaagagatacccgagaggggggccccacgtattagcgggcaaccacgcgtatcgtcgggacaacaagtggagcgccacagtagtaggaagcacgacaataaacagccacgggaaagtggcacgccgatgttacaaaacagacgacacagtggtaaaacaccggcaggtaggggacacaccatctgggagggaaaagcgaaacacccttacaacacatccgaggaggggggggacaccaatccactggggacaaacaaacttcccacaaaagaagagagttaaaaagccccgtaggggaacgcatacaaacgacgtgcaaccccgctacaacgcggagccagacacccaacacgcgacaaaaataggcgagcaggcgaacaacaaagccggcgcgacaaggggactacatgcggacagaaaattttaccg

SEQ ID NO: 334915 - DNA, 512 bp, Homo sapiens
ggtttggggtaggattatccccatcacccaggtagtgggcatagtacccaatagttattaaacctttgccccatttcctctccccagtgtctgttgccatctttatgtccatgtatactcaacatttagctcccacttacaagtaagaacatatggtatctggttttctgttctgtattgattcactgaggatcatggcctgtggttgcatccatgttgctgcaaaggatatgaaatcgtttttttattggtgcatctcatatggttctaatgttctttttattatttttcaggaatttgctgacacaatatcttccgcctggtgctgggcatatcctaagaacttacaactttcctgtattatcctgtgtgagcagctgtcaccttattgggggaaaaatgcctgaaaattagggggcacttcaagtagatagcttctatttcctatatttgtcttatatacaagtatttgcttttatcaaaataattccaataaagcattttaaagtaaa

SEQ ID NO: 334916 - DNA, 454 bp, Homo sapiens
tccccgactagcccgacaggcccggatacacgttcgtcgccgtgttatccttgagtaaagaatgaactctggaagcccagccagggacaatgcaccttcacagagattctgcactaatctgagtgaaggtctaaggtttggaatctccccctcatggagagaagctttgtatggctgtcatgcttagacagtgattcctgcaacttgaccttcaggctgggagaggtggagagccatgcctgttctccttccttgctatggaatttgctgacacaatatcttccgcctggtgctgggcatatcctaagaacttacaactttcctgtattatcctgtgtgagcagctgtaatcccaactactcgggaggctgaggcaggagaatggctttgaaccagggagtccaaggttgcagtgagccgagatcgtgccactgcacttccagcctggcgacag

SEQ ID NO: 334917 - DNA, 635 bp, Homo sapiens
ttttttgagatggagtcttgatcttgttgcccgggctggcaatggtacgatctccctgcaacctctgcctcccgggttcaatcgattgtcctgcctcagcctgccgattagctgggactacaggcccgcgccaccacactcggctaatttttctgtttttagtagaaggggtttcaccatgttggccaggatggtctccatctcctgacctcgtgagccgctgtgcccggccactttttcttttttgagctataatccatgtaccacaggtggtgacttccatttgtttgtttttgctattttgtttttgagacagggcgcaatgccaggatctccctgcaacatccaccgtcagggctcaagtggtctttccacctcagcttcctgggactgcaggcacgtgctaccaccacgcctggctaatttttagtttttttacagaagcgggcttttgccatgttgtccaggctggtctctactcctgggctcaagcagtcctcctgcctcagtctcccaaagtgctggaattacaggggtgagttgctgcgtctggtgttggtgactttctagagattactttttggtttacatcattttccttgtgactatttttacttttttggggggcgggggga

SEQ ID NO: 334918 - DNA, 375 bp, Homo sapiens
tctccctctgtcacccaggctggagtgcagtggcgcggtctttgctcactgcaacctccacctcccaggttcaagcaattctcctcagcctggccaagatggtgaaaccccgtctctactaaaaatacaaaaattagcacgtgctaccaccacgcctggctaatttttagtttttttacagaagcgggcttttgccatgttgtccaggctggtctctactcctgggctcaagcagtcctcctgcctcagtctcccaaagtgctggaattacaggggtgagttgctgcgtctggtgttggtgactttctagagattactttttggtttacatcattttccttgtgactatttttacttttttggggggcgggggga

SEQ ID NO: 334919 - DNA, 1074 bp, Homo sapiens
agggtcattaacggaccatgggctgctgggaaacggcttaggagcagcacccggctggcgctggccggccggcgccggggactttcttccgcctggccagacagatccctgttttttgtttttcaaaattcagaaagcatctccgaatatttgcccagaggagtgtgaaacatactttcctggtctttctttcactttgttttatttctgtgtggacaaacaatggggaaaatgccgcgcgtctagccaggcagataagaaaacaactatacccgtcaggcccccaacccggcgccgccataaatggccccggcctcgccattttagttctttttgcgaagtgggctcgtgggttggcagtatgagagttgtaatggcccgactgttgagtgagggggagcaggggatcccaacggcttgcgctgcctttgcgcagcagccggcgggcggccacgtcgcggcctggctggggtaggagagggcggtccccagtgcagttgggtgaactaccgttgcacactggagtttctggtgtctttgcttggaactgacctagctcgtggcagggggaactcggctagcggccccacagcccctgctgactcaaaacaactgagttgtaagacgttcatcgccgtgttatccttgagtaaagaatgaactctggaagcccagccagggacaatgcaccttcacagagattctgcactaatctgagtgaaggtctaaggtttggaatctccccctcatggagagaagctttgtatggctgtcatgcttagacagtgattcctgcaacttgaccttcaggctgggagaggtggagagccatgcctgttctccttccttgctatggaatttgctgacacaatatcttccgcctggtgctgggcatatcctaagaacttacaactttcctgtattatcctgtgtgagcagctgtcaccttattgggggaaaaatgcctgaaaattagggggcacttcaagtagatagcttctatttcctatatttgtcttatatacaagtatttgcttttatcaaaataattccaataaagcattttaaagtaaa

SEQ ID NO: 334920 - DNA, 754 bp, Homo sapiens
tacggctaggtacgaggctggtgggctcgtgggttggcagtatgagagttgtaatggcccgactgttgagtgagggggagcaggggatcccaacggcttgcgctgcctttgcgcagcagccggcgggcggccacgtcgcggcctggctggggtaggagagggcggtccccagtgcagttgggtgaactaccgttgcacactggagtttctggtgtctttgcttggaactgacctagctcgtggcagggggaactcggctagcggccccacagcccctgctgactcaaaacaactgagttgtaagacgttcatcgccgtgttatccttgagtaaagaatgaactctggaagcccagccagggacaatgcaccttcacagagattctgcactaatctgagtgaaggtctaaggtttggaatctccccctcatggagagaagctttgtatggctgtcatgcttagacagtgattcctgcaacttgaccttcaggctgggagaggtggagagccatgcctgttctccttccttgctatggaatttgctgacacaatatcttccgcctggtgctgggcatatcctaagaacttacaactttcctgtattatcctgtgtgagcagctgtcaccttattgggggaaaaatgcctgaaaattagggggcacttcaagtagatagcttctatttcctatatttgtcttatatacaagtatttgcttttatcaaaataattccaataaagcattttaaagtaaa

SEQ ID NO: 334921 - DNA, 1168 bp, Homo sapiens
agggtcattaacggaccatgggctgctgggaaacggcttaggagcagcacccggctggcgctggccggccggcgccggggactttcttccgcctggccagacagatccctgttttttgtttttcaaaattcagaaagcatctccgaatatttgcccagaggagtgtgaaacatactttcctggtctttctttcactttgttttatttctgtgtggacaaacaatggggaaaatgccgcgcgtctagccaggcagataagaaaacaactatacccgtcaggcccccaacccggcgccgccataaatggccccggcctcgccattttagttctttttgcgaagtgggctcgtgggttggcagtatgagagttgtaatggcccgactgttgagtgagggggagcaggggatcccaacggcttgcgctgcctttgcgcagcagccggcgggcggccacgtcgcggcctggctggggtaggagagggcggtccccagtgcagttgggtgaactaccgttgcacactggagtttctggtgtctttgcttggaactgacctagctcgtggcagggggaactcggctagcggccccacagcccctgctgactcaaaacaactgagttgtaagacgttcatcgccgtgttatccttgagtaaagaagcgggcttttgccatgttgtccaggctggtctctactcctgggctcaagcagtcctcctgcctcagtctcccaaagtgctggaattacagggaatgaactctggaagcccagccagggacaatgcaccttcacagagattctgcactaatctgagtgaaggtctaaggtttggaatctccccctcatggagagaagctttgtatggctgtcatgcttagacagtgattcctgcaacttgaccttcaggctgggagaggtggagagccatgcctgttctccttccttgctatggaatttgctgacacaatatcttccgcctggtgctgggcatatcctaagaacttacaactttcctgtattatcctgtgtgagcagctgtcaccttattgggggaaaaatgcctgaaaattagggggcacttcaagtagatagcttctatttcctatatttgtcttatatacaagtatttgcttttatcaaaataattccaataaagcattttaaagtaaa

SEQ ID NO: 334922 - DNA, 1186 bp, Homo sapiens
agggtcattaacggaccatgggctgctgggaaacggcttaggagcagcacccggctggcgctggccggccggcgccggggactttcttccgcctggccagacagatccctgttttttgtttttcaaaattcagaaagcatctccgaatatttgcccagaggagtgtgaaacatactttcctggtctttctttcactttgttttatttctgtgtggacaaacaatggggaaaatgccgcgcgtctagccaggcagataagaaaacaactatacccgtcaggcccccaacccggcgccgccataaatggccccggcctcgccattttagttctttttgcgaagtgggctcgtgggttggcagtatgagagttgtaatggcccgactgttgagtgagggggagcaggggatcccaacggcttgcgctgcctttgcgcagcagccggcgggcggccacgtcgcggcctggctggggtaggagagggcggtccccagtgcagttgggtgaactaccgttgcacactggagtttctggtgtctttgcttggaactgacctagctcgtggcagggggaactcggctagcggccccacagcccctgctgactcaaaacaactgagttgtaagacgttcatcgccgtgttatccttgagtaaagaatgaactctggaagcccagccagggacaatgcaccttcacagagattctgcactaatctgagtgaaggtctaaggtttggaatctccccctcatggagagaagctttgtatggctgtcatgcttagacagtgattcctgcaacttgaccttcaggctgggagaggtggagagccatgcctgttctccttccttgctatggaatttgctgacacaatatcttccgcctggtgctgggcatatcctaagaacttacaactttcctgtattatcctgtgtgagcagctgtcaccttattgggggaaaaatgcctgaaaattagggggcacttcaagtagatagcttctatttcctatatttgtcttatatacaagtatttgcttttatcaaaataattccaataaagcattttaaagtaaaaaaaaaaaaaaatccgggttctatggggtgcgggaaaaggtagaatggctggcttgttcggaccgttttgcaggggaattgcggcccctttggggggttatgaaagcgatga

SEQ ID NO: 334923 - DNA, 1283 bp, Homo sapiens
agggtcattaacggaccatgggctgctgggaaacggcttaggagcagcacccggctggcgctggccggccggcgccggggactttcttccgcctggccagacagatccctgttttttgtttttcaaaattcagaaagcatctccgaatatttgcccagaggagtgtgaaacatactttcctggtctttctttcactttgttttatttctgtgtggacaaacaatggggaaaatgccgcgcgtctagccaggcagataagaaaacaactatacccgtcaggcccccaacccggcgccgccataaatggccccggcctcgccattttagttctttttgcgaagtgggctcgtgggttggcagtatgagagttgtaatggcccgactgttgagtgagggggagcaggggatcccaacggcttgcgctgcctttgcgcagcagccggcgggcggccacgtcgcggcctggctggggtaggagagggcggtccccagtgcagttgggtgaactaccgttgcacactggagtttctggtgtctttgcttggaactgacctagctcgtggcagggggaactcggctagcggccccacagcccctgctgactcaaaacaactgtgagtggggttgggcgagtgattgcaaaatgggggtggcggtcgcccggggataggaagggagtgatgatgaccccaggtaactctgagtgtgtcgctgatgccatcaccgcagcgctctgaccgccccctcggtccagcatttctcaggctcaacgagttcatggccaagattcctaatcttttgttctgtttcatttccccgttaggagttgtaagacgttcatcgccgtgttatccttgagtaaagaatgaactctggaagcccagccagggacaatgcaccttcacagagattctgcactaatctgagtgaaggtctaaggtttggaatctccccctcatggagagaagctttgtatggctgtcatgcttagacagtgattcctgcaacttgaccttcaggctgggagaggtggagagccatgcctgttctccttccttgctatggaatttgctgacacaatatcttccgcctggtgctgggcatatcctaagaacttacaactttcctgtattatcctgtgtgagcagctgtcaccttattgggggaaaaatgcctgaaaattagggggcacttcaagtagatagcttctatttcctatatttgtcttatatacaagtatttgcttttatcaaaataattccaataaagcattttaaagtaaa

SEQ ID NO: 334924 - DNA, 611 bp, Homo sapiens
tacggctaggtacgaggctggtgggctcgtgggttggcagtatgagagttgtaatggcccgactgttgagtgagggggagcaggggatcccaacggcttgcgctgcctttgcgcagcagccggcgggcggccacgtcgcggcctggctggggagttgtaagacgttcatcgccgtgttatccttgagtaaagaatgaactctggaagcccagccagggacaatgcaccttcacagagattctgcactaatctgagtgaaggtctaaggtttggaatctccccctcatggagagaagctttgtatggctgtcatgcttagacagtgattcctgcaacttgaccttcaggctgggagaggtggagagccatgcctgttctccttccttgctatggaatttgctgacacaatatcttccgcctggtgctgggcatatcctaagaacttacaactttcctgtattatcctgtgtgagcagctgtcaccttattgggggaaaaatgcctgaaaattagggggcacttcaagtagatagcttctatttcctatatttgtcttatatacaagtatttgcttttatcaaaataattccaataaagcattttaaagtaaa

SEQ ID NO: 334925 - DNA, 1033 bp, Homo sapiens
agggtcattaacggaccatgggctgctgggaaacggcttaggagcagcacccggctggcgctggccggccggcgccggggactttcttccgcctggccagacagatccctgttttttgtttttcaaaattcagaaagcatctccgaatatttgcccagaggagtgtgaaacatactttcctggtctttctttcactttgttttatttctgtgtggacaaacaatggggaaaatgccgcgcgtctagccaggcagataagaaaacaactatacccgtcaggcccccaacccggcgccgccataaatggccccggcctcgccattttagttctttttgcgaagtgggctcgtgggttggcagtatgagagttgtaatggcccgactgttgagtgagggggagcaggggatcccaacggcttgcgctgcctttgcgcagcagccggcgggcggccacgtcgcggcctggctggggtaggagagggcggtccccagtgcagttgggtgaactaccgttgcacactggagtttctggtgtctttgcttggaactgacctagctcgtggcagggggaactcggctagcggccccacagcccctgctgactcaaaacaactaatgaactctggaagcccagccagggacaatgcaccttcacagagattctgcactaatctgagtgaaggtctaaggtttggaatctccccctcatggagagaagctttgtatggctgtcatgcttagacagtgattcctgcaacttgaccttcaggctgggagaggtggagagccatgcctgttctccttccttgctatggaatttgctgacacaatatcttccgcctggtgctgggcatatcctaagaacttacaactttcctgtattatcctgtgtgagcagctgtcaccttattgggggaaaaatgcctgaaaattagggggcacttcaagtagatagcttctatttcctatatttgtcttatatacaagtatttgcttttatcaaaataattccaataaagcattttaaagtaaa

SEQ ID NO: 334926 - DNA, 705 bp, Homo sapiens
tacggctaggtacgaggctggtgggctcgtgggttggcagtatgagagttgtaatggcccgactgttgagtgagggggagcaggggatcccaacggcttgcgctgcctttgcgcagcagccggcgggcggccacgtcgcggcctggctggggagttgtaagacgttcatcgccgtgttatccttgagtaaagaagcgggcttttgccatgttgtccaggctggtctctactcctgggctcaagcagtcctcctgcctcagtctcccaaagtgctggaattacagggaatgaactctggaagcccagccagggacaatgcaccttcacagagattctgcactaatctgagtgaaggtctaaggtttggaatctccccctcatggagagaagctttgtatggctgtcatgcttagacagtgattcctgcaacttgaccttcaggctgggagaggtggagagccatgcctgttctccttccttgctatggaatttgctgacacaatatcttccgcctggtgctgggcatatcctaagaacttacaactttcctgtattatcctgtgtgagcagctgtcaccttattgggggaaaaatgcctgaaaattagggggcacttcaagtagatagcttctatttcctatatttgtcttatatacaagtatttgcttttatcaaaataattccaataaagcattttaaagtaaa

SEQ ID NO: 334927 - DNA, 954 bp, Homo sapiens
ttttttgagatggagtcttgatcttgttgcccgggctggcaatggtacgatctccctgcaacctctgcctcccgggttcaatcgattgtcctgcctcagcctgccgattagctgggactacaggcccgcgccaccacactcggctaatttttctgtttttagtagaaggggtttcaccatgttggccaggatggtctccatctcctgacctcgtgagccgctgtgcccggccactttttcttttttgagctataatccatgtaccacaggtggtgacttccatttgtttgtttttgctattttgtttttgagacagggcgcaatgccaggatctccctgcaacatccaccgtcagggctcaagtggtctttccacctcagcttcctgggactgcaggcacgtgctaccaccacgcctggctaatttttagtttttttacagaagcgggcttttgccatgttgtccaggctggtctctactcctgggctcaagcagtcctcctgcctcagtctcccaaagtgctggaattacagggaatgaactctggaagcccagccagggacaatgcaccttcacagagattctgcactaatctgagtgaaggtctaaggtttggaatctccccctcatggagagaagctttgtatggctgtcatgcttagacagtgattcctgcaacttgaccttcaggctgggagaggtggagagccatgcctgttctccttccttgctatggaatttgctgacacaatatcttccgcctggtgctgggcatatcctaagaacttacaactttcctgtattatcctgtgtgagcagctgtcaccttattgggggaaaaatgcctgaaaattagggggcacttcaagtagatagcttctatttcctatatttgtcttatatacaagtatttgcttttatcaaaataattccaataaagcattttaaagtaaa

SEQ ID NO: 334928 - DNA, 1772 bp, Homo sapiens
agggtcattaacggaccatgggctgctgggaaacggcttaggagcagcacccggctggcgctggccggccggcgccggggactttcttccgcctggccagacagatccctgttttttgtttttcaaaattcagaaagcatctccgaatatttgcccagaggagtgtgaaacatactttcctggtctttctttcactttgttttatttctgtgtggacaaacaatggggaaaatgccgcgcgtctagccaggcagataagaaaacaactatacccgtcaggcccccaacccggcgccgccataaatggccccggcctcgccattttagttctttttgcgaagtgggctcgtgggttggcagtatgagagttgtaatggcccgactgttgagtgagggggagcaggggatcccaacggcttgcgctgcctttgcgcagcagccggcgggcggccacgtcgcggcctggctggggtaggagagggcggtccccagtgcagttgggtgaactaccgttgcacactggagtttctggtgtctttgcttggaactgacctagctcgtggcagggggaactcggctagcggccccacagcccctgctgactcaaaacaactgagttgtaagacgttcatcgccgtgttatccttgagtaaagaatgaactctggaagcccagccagggacaatgcaccttcacagagattctgcactaatctgagtgaaggtctaaggtttggaatctccccctcatggagagaagctttgtatggctgtcatgcttagacagtgattcctgcaacttgaccttcaggctgggagaggtggagagccatgcctgttctccttccttgctatggaatttgctgacacaatatcttccgcctggtgctgggcatatcctaagaacttacaactttcctgtattatcctgtgtgagcagctgtcaccttattgggggaaaaatgcctgaaaattagggggcacttcaagtagatagcttctatttcctatatttgtcttatatacaagtatttgcttttatcaaaataattccaataaagcattttaaagtaaaaaaaaaacaaaaaaaaaaaaaaaaaaaaaaaaaaaaaaaaaaaaaaaaaaaaaaaaaaatggtgggggggggtgggcccgggagaagttttaaaaaccaatatgtgggggggagaggggcacccagatgagatagaagaaaacggcgcaacaagggttcccaaagagaaacccgggcagagaaaagcgcggaggctttccacaaaataaaaacgcgccgggacacacacgagctgtgtttgagcaaaacaccacaacgggagcgctctagcagggccaaaacaggggggaccacaacacaaggaagcaaaagggagcgagaaaataatcggccagccgacgtggtgtgcgcaaccacaaacgcgcacccaaaagcacgaagaaagagctaaaaacagcgagaacagaagcaaaacgacagcgtgcgaagaaaggagaagaagaggagcgggggagagacaaagaagacgcgggaggaggcagaggacacaacggaggggggagcgggaggaggaagcgagagacagaacggacaggccggacggcagccgcaaaagagcaccagacacgagggagagcggggctgaggcggagggagaagcaggacaggagagaaggcaggcgcgaggacgagaacaacagacgacgagtggggaggggagcagaggagaggcgcgcggggcgagaagacagaacgat

SEQ ID NO: 334929 - DNA, 1611 bp, Homo sapiens
  misc_feature (1148)..(1148): n is a, c, g, or t
agggtcattaacggaccatgggctgctgggaaacggcttaggagcagcacccggctggcgctggccggccggcgccggggactttcttccgcctggccagacagatccctgttttttgtttttcaaaattcagaaagcatctccgaatatttgcccagaggagtgtgaaacatactttcctggtctttctttcactttgttttatttctgtgtggacaaacaatggggaaaatgccgcgcgtctagccaggcagataagaaaacaactatacccgtcaggcccccaacccggcgccgccataaatggccccggcctcgccattttagttctttttgcgaagtgggctcgtgggttggcagtatgagagttgtaatggcccgactgttgagtgagggggagcaggggatcccaacggcttgcgctgcctttgcgcagcagccggcgggcggccacgtcgcggcctggctggggtaggagagggcggtccccagtgcagttgggtgaactaccgttgcacactggagtttctggtgtctttgcttggaactgacctagctcgtggcagggggaactcggctagcggccccacagcccctgctgactcaaaacaactgagttgtaagacgttcatcgccgtgttatccttgagtaaagaatgaactctggaagcccagccagggacaatgcaccttcacagagattctgcactaatctgagtgaaggtctaaggtttggaatctccccctcatggagagaagctttgtatggctgtcatgcttagacagtgattcctgcaacttgaccttcaggctgggagaggtggagagccatgcctgttctccttccttgctatggaatttgctgacacaatatcttccgcctggtgctgggcatatcctaagaacttacaactttcctgtattatcctgtgtgagcagctgtcaccttattgggggaaaaatgcctgaaaattagggggcacttcaagtagatagcttctatttcctatatttgtcttatatacaagtatttgcttttatcaaaataattccaataaagcattttaaagtaaaaaaaaaacaaaaaaaaaaaaaaaaaaaaaaaaaaaaaaaaaaaaaaaaaaaaaaaaaaaaaaaaaaaaaaaaanaaaaaaaaaaaaaaaaaggggggggcccacatcagaagagatacccgagaggggggccccacgtattagcgggcaaccacgcgtatcgtcgggacaacaagtggagcgccacagtagtaggaagcacgacaataaacagccacgggaaagtggcacgccgatgttacaaaacagacgacacagtggtaaaacaccggcaggtaggggacacaccatctgggagggaaaagcgaaacacccttacaacacatccgaggaggggggggacaccaatccactggggacaaacaaacttcccacaaaagaagagagttaaaaagccccgtaggggaacgcatacaaacgacgtgcaaccccgctacaacgcggagccagacacccaacacgcgacaaaaataggcgagcaggcgaacaacaaagccggcgcgacaaggggactacatgcggacagaaaattttaccg

SEQ ID NO: 334930 - DNA, 1025 bp, Homo sapiens
  misc_feature (1000)..(1000): n is a, c, g, or t
  misc_feature (1025)..(1025): n is a, c, g, or t
agggtcattaacggaccatgggctgctgggaaacggcttaggagcagcacccggctggcgctggccggccggcgccggggactttcttccgcctggccagacagatccctgttttttgtttttcaaaattcagaaagcatctccgaatatttgcccagaggagtgtgaaacatactttcctggtctttctttcactttgttttatttctgtgtggacaaacaatggggaaaatgccgcgcgtctagccaggcagataagaaaacaactatacccgtcaggcccccaacccggcgccgccataaatggccccggcctcgccattttagttctttttgcgaagtgggctcgtgggttggcagtatgagagttgtaatggcccgactgttgagtgagggggagcaggggatcccaacggcttgcgctgcctttgcgcagcagccggcgggcggccacgtcgcggcctggctggggtaggagagggcggtccccagtgcagttgggtgaactaccgttgcacactggagtttctggtgtctttgcttggaactgacctagctcgtggcagggggaactcggctagcggccccacagcccctgctgactcaaaacaactgagttgtaagacgttcatcgccgtgttatccttgagtaaagaatgaactctggaagcccagccagggacaatgcaccttcacagagattctgcactaatctgagtgaaggtctaaggtttggaatctccccctcatggagagaagctttgtatggctgtcatgcttagacagtgattcctgcaacttgaccttcaggctgggagaggtggagagccatgcctgttctccttccttgctatggaatttgctgacacaatatcttccgcctggtgctgggcatatcctaagaacttacaactttcctgtattatcctgtgtgagcagctgtcaccttattgggggaaaaatgcctgatacaagactttgcttttaatataatattccncataaagccatttacagtaacatan

SEQ ID NO: 334931 - DNA, 1198 bp, Homo sapiens
agggtcattaacggaccatgggctgctgggaaacggcttaggagcagcacccggctggcgctggccggccggcgccggggactttcttccgcctggccagacagatccctgttttttgtttttcaaaattcagaaagcatctccgaatatttgcccagaggagtgtgaaacatactttcctggtctttctttcactttgttttatttctgtgtggacaaacaatggggaaaatgccgcgcgtctagccaggcagataagaaaacaactatacccgtcaggcccccaacccggcgccgccataaatggccccggcctcgccattttagttctttttgcgaagtgggctcgtgggttggcagtatgagagttgtaatggcccgactgttgagtgagggggagcaggggatcccaacggcttgcgctgcctttgcgcagcagccggcgggcggccacgtcgcggcctggctggggtaggagagggcggtccccagtgcagttgggtgaactaccgttgcacactggagtttctggtgtctttgcttggaactgacctagctcgtggcagggggaactcggctagcggccccacagcccctgctgactcaaaacaactgagttgtaagacgttcatcgccgtgttatccttgagtaaagaagcgggcttttgccatgttgtccaggctggtctctactcctgggctcaagcagtcctcctgcctcagtctcccaaagtgctggaattacagggaatgaactctggaagcccagccagggacaatgcaccttcacagagattctgcactaatctgagtgaaggtctaaggtttggaatctccccctcatggagagaagctttgtatggctgtcatgcttagacagtgattcctgcaacttgaccttcaggctgggagaggtggagagccatgcctgttctccttccttgctatggaatttgctgacacaatatcttccgcctggtgctgggcatatcctaagaacttacaactttcctgtattatcctgtgtgagcagctgtcaccttattgggggaaaaatgcctgaaaattagggggcacttcaagtagatagcttctatttcctatatttgtcttatatacaagtatttgcttttatcaaaataattccaataaagcattttaaagtaaaaaaaaaaaaccggggcttatgtcgggggga

SEQ ID NO: 334932 - DNA, 1038 bp, Homo sapiens
agggtcattaacggaccatgggctgctgggaaacggcttaggagcagcacccggctggcgctggccggccggcgccggggactttcttccgcctggccagacagatccctgttttttgtttttcaaaattcagaaagcatctccgaatatttgcccagaggagtgtgaaacatactttcctggtctttctttcactttgttttatttctgtgtggacaaacaatggggaaaatgccgcgcgtctagccaggcagataagaaaacaactatacccgtcaggcccccaacccggcgccgccataaatggccccggcctcgccattttagttctttttgcgaagtgggctcgtgggttggcagtatgagagttgtaatggcccgactgttgagtgagggggagcaggggatcccaacggcttgcgctgcctttgcgcagcagccggcgggcggccacgtcgcggcctggctggggtaggagagggcggtccccagtgcagttgggtgaactaccgttgcacactggagtttctggtgtctttgcttggaactgacctagctcgtggcagggggaactcggctagcggccccacagcccctgctgactcaaaacaactgagttgtaagacgttcatcgccgtgttatccttgagtaaagaatgaactctggaagcccagccagggacaatgcaccttcacagagattctgcactaatctgagtgaaggtctaagtggctgtcatgcttagacagtgattcctgcaacttgaccttcaggctgggagaggtggagagccatgcctgttctccttccttgctatggaatttgctgacacaatatcttccgcctggtgctgggcatatcctaagaacttacaactttcctgtattatcctgtgtgagcagctgtcaccttattgggggaaaaatgcctgaaaattagggggcacttcaagtagatagcttctatttcctatatttgtcttatatacaagtatttgcttttatcaaaataattccaataaagcattttaaagtaaa

SEQ ID NO: 334933 - DNA, 1050 bp, Homo sapiens
agggtcattaacggaccatgggctgctgggaaacggcttaggagcagcacccggctggcgctggccggccggcgccggggactttcttccgcctggccagacagatccctgttttttgtttttcaaaattcagaaagcatctccgaatatttgcccagaggagtgtgaaacatactttcctggtctttctttcactttgttttatttctgtgtggacaaacaatggggaaaatgccgcgcgtctagccaggcagataagaaaacaactatacccgtcaggcccccaacccggcgccgccataaatggccccggcctcgccattttagttctttttgcgaagtgggctcgtgggttggcagtatgagagttgtaatggcccgactgttgagtgagggggagcaggggatcccaacggcttgcgctgcctttgcgcagcagccggcgggcggccacgtcgcggcctggctggggtaggagagggcggtccccagtgcagttgggtgaactaccgttgcacactggagtttctggtgtctttgcttggaactgacctagctcgtggcagggggaactcggctagcggccccacagcccctgctgactcaaaacaactgagttgtaagacgttcatcgccgtgttatccttgagtaaagaatgaactctggaagcccagccagggacaatgcaccttcacagagattctgcactaatctgagtgaaggtctaagtggctgtcatgcttagacagtgattcctgcaacttgaccttcaggctgggagaggtggagagccatgcctgttctccttccttgctatggaatttgctgacacaatatcttccgcctggtgctgggcatatcctaagaacttacaactttcctgtattatcctgtgtgagcagctgtcaccttattgggggaaaaatgcctgaaaattagggggcacttcaagtagatagcttctatttcctatattattctttactttaaaatgctttattggaattattttgataaaagcagatacttgtatataagacaaatatagg

SEQ ID NO: 334934 - DNA, 1403 bp, Homo sapiens
tacggctaggtacgaggctggtgggctcgtgggttggcagtatgagagttgtaatggcccgactgttgagtgagggggagcaggggatcccaacggcttgcgctgcctttgcgcagcagccggcgggcggccacgtcgcggcctggctggggagttgtaagacgttcatcgccgtgttatccttgagtaaagaagcgggcttttgccatgttgtccaggctggtctctactcctgggctcaagcagtcctcctgcctcagtctcccaaagtgctggaattacagggaatgaactctggaagcccagccagggacaatgcaccttcacagagattctgcactaatctgagtgaaggtctaaggtttggaatctccccctcatggagagaagctttgtatggctgtcatgcttagacagtgattcctgcaacttgaccttcaggctgggagaggtggagagccatgcctgttctccttccttgctatggaatttgctgacacaatatcttccgcctggtgctgggcatatcctaagaacttacaactttcctgtattatcctgtgtgagcagctgtcaccttattgggggaaaaatgcctgaaaattagggggcacttcaagtagatagcttctatttcctatatttgtcttatatacaagtatttgcttttatcaaaataattccaataaagcattttaaagtaaaaaaaaaacaaaaaaaaaaaaaaaaaaaaaaaaaaaaaaaaaaaaaaaaaaaaaaaaaaatggtgggggggggtgggcccgggagaagttttaaaaaccaatatgtgggggggagaggggcacccagatgagatagaagaaaacggcgcaacaagggttcccaaagagaaacccgggcagagaaaagcgcggaggctttccacaaaataaaaacgcgccgggacacacacgagctgtgtttgagcaaaacaccacaacgggagcgctctagcagggccaaaacaggggggaccacaacacaaggaagcaaaagggagcgagaaaataatcggccagccgacgtggtgtgcgcaaccacaaacgcgcacccaaaagcacgaagaaagagctaaaaacagcgagaacagaagcaaaacgacagcgtgcgaagaaaggagaagaagaggagcgggggagagacaaagaagacgcgggaggaggcagaggacacaacggaggggggagcgggaggaggaagcgagagacagaacggacaggccggacggcagccgcaaaagagcaccagacacgagggagagcggggctgaggcggagggagaagcaggacaggagagaaggcaggcgcgaggacgagaacaacagacgacgagtggggaggggagcagaggagaggcgcgcggggcgagaagacagaacgat

SEQ ID NO: 334935 - DNA, 921 bp, Homo sapiens
agggtcattaacggaccatgggctgctgggaaacggcttaggagcagcacccggctggcgctggccggccggcgccggggactttcttccgcctggccagacagatccctgttttttgtttttcaaaattcagaaagcatctccgaatatttgcccagaggagtgtgaaacatactttcctggtctttctttcactttgttttatttctgtgtggacaaacaatggggaaaatgccgcgcgtctagccaggcagataagaaaacaactatacccgtcaggcccccaacccggcgccgccataaatggccccggcctcgccattttagttctttttgcgaagtgggctcgtgggttggcagtatgagagttgtaatggcccgactgttgagtgagggggagcaggggatcccaacggcttgcgctgcctttgcgcagcagccggcgggcggccacgtcgcggcctggctggggtaggagagggcggtccccagtgcagttgggtgaactaccgttgcacactggagtttctggtgtctttgcttggaactgacctagctcgtggcagggggaactcggctagcggccccacagcccctgctgactcaaaacaactgtgagtggggttgggcgagtgattgcaaaatgggggtggcggtcgcccggggataggaagggagtgatgatgaccccaggtaactctgagtgtgtcgctgatgccatcaccgcagcgctctgaccgccccctcggtccagcatttctcaggctcaacgagttcatggccaagattcctaatcttttgttctgtttcatttccccgttaggagttgtaagacgttcatcgccgtgttatccttgagtaaaggtgagtattaggtgcgagagccttttgaatgcctcttcggaaagctttgttcccaag

SEQ ID NO: 334936 - DNA, 465 bp, Homo sapiens
cgatccatccctttccccatcccccaacaggccccggtgtgtgatgttcccctccctgtgtccatatgttctcattgttcaactcccacttacaagtaagaacatatggtatctggttttctgttctgtattgattcactgaggatcatggcctgtggttgcatccatgttgctgcaaaggatatgaaatcgtttttttattggtgcatctcatatggttctaatgttctttttattatttttcaggaatttgctgacacaatatcttccgcctggtgctgggcatatcctaagaacttacaactttcctgtattatcctgtgtgagcagctgtcaccttattgggggaaaaatgcctgaaaattagggggcacttcaagtagatagcttctatttcctatatttgtcttatatacaagtatttgcttttatcaaaataattccaataaagcattttaaagtaaa

SEQ ID NO: 334937 - DNA, 923 bp, Homo sapiens
ggtttggggtaggattatccccatcacccaggtagtgggcatagtacccaatagttattaaacctttgccccatttcctctccccagtgtctgttgccatctttatgtccatgtatactcaacatttagctcccacttacaagtaagaacatatggtatctggttttctgttctgtattgattcactgaggatcatggcctgtggttgcatccatgttgctgcaaaggatatgaaatcgtttttttattggtgcatctcatatggttctaatgttctttttattatttttcaggaatttgctgacacaatatcttccgcctggtgctgggcatatcctaagaacttacaactttcctgtattatcctgtgtgagcagctgtcaccttattgggggaaaaatgcctgaaaattagggggcacttcaagtagatagcttctatttcctatatttgtcttatatacaagtatttgcttttatcaaaataattccaataaagcattttaaagtaaaaaaaaaacaaaaaaaaaaaaaaaaaaaaaaaaaaaaaaaaaaaaaaaaaaaaaaaaaaataaaaaaaaacaaaattaaaaataccataccaaattttaaactcctttgcccatttcccctcttactactttcattacaattcacttttccccttttactacattctcacctttaaaaccctttctttcccacactcatctctcttctccatatcctctttcccaacttttctatttctcaaaactcccctcctaacgcctttccatttcttaccattctcattggcaatctaactggctaacctctgctcataacccggtccattatgtacaaacctctctgtcttatcccaatgtgccgctttgcattcccttttccctgctttgcctctttgggtccttttgcccccct

SEQ ID NO: 334938 - DNA, 913 bp, Homo sapiens
  misc_feature (721)..(721): n is a, c, g, or t
  misc_feature (725)..(726): n is a, c, g, or t
  misc_feature (729)..(729): n is a, c, g, or t
  misc_feature (731)..(731): n is a, c, g, or t
  misc_feature (735)..(735): n is a, c, g, or t
  misc_feature (741)..(741): n is a, c, g, or t
tacggctaggtacgaggctggtgggctcgtgggttggcagtatgagagttgtaatggcccgactgttgagtgagggggagcaggggatcccaacggcttgcgctgcctttgcgcagcagccggcgggcggccacgtcgcggcctggctggggtaggagagggcggtccccagtgcagttgggtgaactaccgttgcacactggagtttctggtgtctttgcttggaactgacctagctcgtggcagggggaactcggctagcggccccacagcccctgctgactcaaaacaactgagttgtaagacgttcatcgccgtgttatccttgagtaaagaatgaactctggaagcccagccagggacaatgcaccttcacagagattctgcactaatctgagtgaaggtctaaggtttggaatctccccctcatggagagaagctttgtatggctgtcatgcttagacagtgattcctgcaacttgaccttcaggctgggagaggtggagagccatgcctgttctccttccttgctatggaatttgctgacacaatatcttccgcctggtgctgggcatatcctaagaacttacaactttcctgtattatcctgtgtgagcagctgtcaccttattgggggaaaaatgcctgaaaattagggggcacttcaagtagatagcttctatttcctatatttgtcttatatacaagtatttgcttttcnaatnntcntnagcntttaantaaacacaaaccagacgaaaaaaaaaaggggggtaaatacccgggggcaagtgggcccgtttggaagggcccaaggggggtaaagaaggggggggtaaaaggggggaagggggttgggagccttgggggtgggaccaagaagggggaaaaaggttggaaggtggggaggtaa

SEQ ID NO: 334939 - DNA, 1293 bp, Homo sapiens
agggtcattaacggaccatgggctgctgggaaacggcttaggagcagcacccggctggcgctggccggccggcgccggggactttcttccgcctggccagacagatccctgttttttgtttttcaaaattcagaaagcatctccgaatatttgcccagaggagtgtgaaacatactttcctggtctttctttcactttgttttatttctgtgtggacaaacaatggggaaaatgccgcgcgtctagccaggcagataagaaaacaactatacccgtcaggcccccaacccggcgccgccataaatggccccggcctcgccattttagttctttttgcgaagtgggctcgtgggttggcagtatgagagttgtaatggcccgactgttgagtgagggggagcaggggatcccaacggcttgcgctgcctttgcgcagcagccggcgggcggccacgtcgcggcctggctggggtaggagagggcggtccccagtgcagttgggtgaactaccgttgcacactggagtttctggtgtctttgcttggaactgacctagctcgtggcagggggaactcggctagcggccccacagcccctgctgactcaaaacaactgagttgtaagacgttcatcgccgtgttatccttgagtaaagggcgcaatgccaggatctccctgcaacatccaccgtcagggctcaagtggtctttccacctcagcttcctgggactgcaggcacgtgctaccaccacgcctggctaatttttagtttttttacagaagcgggcttttgccatgttgtccaggctggtctctactcctgggctcaagcagtcctcctgcctcagtctcccaaagtgctggaattacagggaatgaactctggaagcccagccagggacaatgcaccttcacagagattctgcactaatctgagtgaaggtctaaggtttggaatctccccctcatggagagaagctttgtatggctgtcatgcttagacagtgattcctgcaacttgaccttcaggctgggagaggtggagagccatgcctgttctccttccttgctatggaatttgctgacacaatatcttccgcctggtgctgggcatatcctaagaacttacaactttcctgtattatcctgtgtgagcagctgtcaccttattgggggaaaaatgcctgaaaattagggggcacttcaagtagatagcttctatttcctatatttgtcttatatacaagtatttgcttttatcaaaataattccaataaagcattttaaagtaaa

SEQ ID NO: 334940 - DNA, 1233 bp, Homo sapiens
  misc_feature (1041)..(1041): n is a, c, g, or t
  misc_feature (1045)..(1046): n is a, c, g, or t
  misc_feature (1049)..(1049): n is a, c, g, or t
  misc_feature (1051)..(1051): n is a, c, g, or t
  misc_feature (1055)..(1055): n is a, c, g, or t
  misc_feature (1061)..(1061): n is a, c, g, or t
agggtcattaacggaccatgggctgctgggaaacggcttaggagcagcacccggctggcgctggccggccggcgccggggactttcttccgcctggccagacagatccctgttttttgtttttcaaaattcagaaagcatctccgaatatttgcccagaggagtgtgaaacatactttcctggtctttctttcactttgttttatttctgtgtggacaaacaatggggaaaatgccgcgcgtctagccaggcagataagaaaacaactatacccgtcaggcccccaacccggcgccgccataaatggccccggcctcgccattttagttctttttgcgaagtgggctcgtgggttggcagtatgagagttgtaatggcccgactgttgagtgagggggagcaggggatcccaacggcttgcgctgcctttgcgcagcagccggcgggcggccacgtcgcggcctggctggggtaggagagggcggtccccagtgcagttgggtgaactaccgttgcacactggagtttctggtgtctttgcttggaactgacctagctcgtggcagggggaactcggctagcggccccacagcccctgctgactcaaaacaactgagttgtaagacgttcatcgccgtgttatccttgagtaaagaatgaactctggaagcccagccagggacaatgcaccttcacagagattctgcactaatctgagtgaaggtctaaggtttggaatctccccctcatggagagaagctttgtatggctgtcatgcttagacagtgattcctgcaacttgaccttcaggctgggagaggtggagagccatgcctgttctccttccttgctatggaatttgctgacacaatatcttccgcctggtgctgggcatatcctaagaacttacaactttcctgtattatcctgtgtgagcagctgtcaccttattgggggaaaaatgcctgaaaattagggggcacttcaagtagatagcttctatttcctatatttgtcttatatacaagtatttgcttttcnaatnntcntnagcntttaantaaacacaaaccagacgaaaaaaaaaaggggggtaaatacccgggggcaagtgggcccgtttggaagggcccaaggggggtaaagaaggggggggtaaaaggggggaagggggttgggagccttgggggtgggaccaagaagggggaaaaaggttggaaggtggggaggtaa

SEQ ID NO: 334941 - DNA, 1102 bp, Homo sapiens
agggtcattaacggaccatgggctgctgggaaacggcttaggagcagcacccggctggcgctggccggccggcgccggggactttcttccgcctggccagacagatccctgttttttgtttttcaaaattcagaaagcatctccgaatatttgcccagaggagtgtgaaacatactttcctggtctttctttcactttgttttatttctgtgtggacaaacaatggggaaaatgccgcgcgtctagccaggcagataagaaaacaactatacccgtcaggcccccaacccggcgccgccataaatggccccggcctcgccattttagttctttttgcgaagtgggctcgtgggttggcagtatgagagttgtaatggcccgactgttgagtgagggggagcaggggatcccaacggcttgcgctgcctttgcgcagcagccggcgggcggccacgtcgcggcctggctggggtaggagagggcggtccccagtgcagttgggtgaactaccgttgcacactggagtttctggtgtctttgcttggaactgacctagctcgtggcagggggaactcggctagcggccccacagcccctgctgactcaaaacaactgagttgtaagacgttcatcgccgtgttatccttgagtaaagaatgaactctggaagcccagccagggacaatgcaccttcacagagattctgcactaatctgagtgaaggtctaaggtttggaatctccccctcatggagagaagctttgtatggctgtcatgcttagacagtgattcctgcaacttgaccttcaggctgggagaggtggagagccatgcctgttctccttccttgctatggaatttgctgacacaatatcttccgcctggtgctgggcatatcctaagaacttacaactttcctgtattatcctgtgtgagcagctgtcaccttattgggggaaaaatgcctgaaaattagggggcacttcaagtagatagcttctatttcctatatttgtcttatatacaagtatttgcttttatcaaaataattccaataaagcattttaaagtaaaaagaagacgtggtttggtctcagaacaa

SEQ ID NO: 334942 - DNA, 1049 bp, Homo sapiens
agggtcattaacggaccatgggctgctgggaaacggcttaggagcagcacccggctggcgctggccggccggcgccggggactttcttccgcctggccagacagatccctgttttttgtttttcaaaattcagaaagcatctccgaatatttgcccagaggagtgtgaaacatactttcctggtctttctttcactttgttttatttctgtgtggacaaacaatggggaaaatgccgcgcgtctagccaggcagataagaaaacaactatacccgtcaggcccccaacccggcgccgccataaatggccccggcctcgccattttagttctttttgcgaagtgggctcgtgggttggcagtatgagagttgtaatggcccgactgttgagtgagggggagcaggggatcccaacggcttgcgctgcctttgcgcagcagccggcgggcggccacgtcgcggcctggctggggtaggagagggcggtccccagtgcagttgggtgaactaccgttgcacactggagtttctggtgtctttgcttggaactgacctagctcgtggcagggggaactcggctagcggccccacagcccctgctgactcaaaacaactgagttgtaagacgttcatcgccgtgttatccttgagtaaagaatgaactctggaagcccagccagggacaatgcaccttcacagagattctgcactaatctgagtgaaggtctaaggtttggaatctccccctcatggagagaagctttgtatggctgtcatgcttagacagtgattcctgcaacttgaccttcaggctgggagaggtggagagccatgcctgttctccttccttgctatggaatttgctgacacaatatcttccgcctggtgctgggcatatcctaagaacttacaactttcctgtattatcctgtgtgagcagctgtaatcccaactactcgggaggctgaggcaggagaatggctttgaaccagggagtccaaggttgcagtgagccgagatcgtgccactgcacttccagcctggcgacag

SEQ ID NO: 334943 - DNA, 1866 bp, Homo sapiens
agggtcattaacggaccatgggctgctgggaaacggcttaggagcagcacccggctggcgctggccggccggcgccggggactttcttccgcctggccagacagatccctgttttttgtttttcaaaattcagaaagcatctccgaatatttgcccagaggagtgtgaaacatactttcctggtctttctttcactttgttttatttctgtgtggacaaacaatggggaaaatgccgcgcgtctagccaggcagataagaaaacaactatacccgtcaggcccccaacccggcgccgccataaatggccccggcctcgccattttagttctttttgcgaagtgggctcgtgggttggcagtatgagagttgtaatggcccgactgttgagtgagggggagcaggggatcccaacggcttgcgctgcctttgcgcagcagccggcgggcggccacgtcgcggcctggctggggtaggagagggcggtccccagtgcagttgggtgaactaccgttgcacactggagtttctggtgtctttgcttggaactgacctagctcgtggcagggggaactcggctagcggccccacagcccctgctgactcaaaacaactgagttgtaagacgttcatcgccgtgttatccttgagtaaagaagcgggcttttgccatgttgtccaggctggtctctactcctgggctcaagcagtcctcctgcctcagtctcccaaagtgctggaattacagggaatgaactctggaagcccagccagggacaatgcaccttcacagagattctgcactaatctgagtgaaggtctaaggtttggaatctccccctcatggagagaagctttgtatggctgtcatgcttagacagtgattcctgcaacttgaccttcaggctgggagaggtggagagccatgcctgttctccttccttgctatggaatttgctgacacaatatcttccgcctggtgctgggcatatcctaagaacttacaactttcctgtattatcctgtgtgagcagctgtcaccttattgggggaaaaatgcctgaaaattagggggcacttcaagtagatagcttctatttcctatatttgtcttatatacaagtatttgcttttatcaaaataattccaataaagcattttaaagtaaaaaaaaaacaaaaaaaaaaaaaaaaaaaaaaaaaaaaaaaaaaaaaaaaaaaaaaaaaaatggtgggggggggtgggcccgggagaagttttaaaaaccaatatgtgggggggagaggggcacccagatgagatagaagaaaacggcgcaacaagggttcccaaagagaaacccgggcagagaaaagcgcggaggctttccacaaaataaaaacgcgccgggacacacacgagctgtgtttgagcaaaacaccacaacgggagcgctctagcagggccaaaacaggggggaccacaacacaaggaagcaaaagggagcgagaaaataatcggccagccgacgtggtgtgcgcaaccacaaacgcgcacccaaaagcacgaagaaagagctaaaaacagcgagaacagaagcaaaacgacagcgtgcgaagaaaggagaagaagaggagcgggggagagacaaagaagacgcgggaggaggcagaggacacaacggaggggggagcgggaggaggaagcgagagacagaacggacaggccggacggcagccgcaaaagagcaccagacacgagggagagcggggctgaggcggagggagaagcaggacaggagagaaggcaggcgcgaggacgagaacaacagacgacgagtggggaggggagcagaggagaggcgcgcggggcgagaagacagaacgat

SEQ ID NO: 334944 - DNA, 852 bp, Homo sapiens
agggtcattaacggaccatgggctgctgggaaacggcttaggagcagcacccggctggcgctggccggccggcgccggggactttcttccgcctggccagacagatccctgttttttgtttttcaaaattcagaaagcatctccgaatatttgcccagaggagtgtgaaacatactttcctggtctttctttcactttgttttatttctgtgtggacaaacaatggggaaaatgccgcgcgtctagccaggcagataagaaaacaactatacccgtcaggcccccaacccggcgccgccataaatggccccggcctcgccattttagttctttttgcgaagtgggctcgtgggttggcagtatgagagttgtaatggcccgactgttgagtgagggggagcaggggatcccaacggcttgcgctgcctttgcgcagcagccggcgggcggccacgtcgcggcctggctggggtaggagagggcggtccccagtgcagttgggtgaactaccgttgcacactggagtttctggtgtctttgcttggaactgacctagctcgtggcagggggaactcggctagcggccccacagcccctgctgactcaaaacaactgagttgtaagacgttcatcgccgtgttatccttgagtaaagaatgaactctggaagcccagccagggacaatgcaccttcacagagattctgcactaatctgagtgaaggtctaaggtttggaatctccccctcatggagagaagctttgtagggctagtcggggactgtcgggctagtcggggactgtcgggcttgtcggggactgtcgggctagtcgggacgtcgggctagtcggg

SEQ ID NO: 334945 - DNA, 658 bp, Homo sapiens
  misc_feature (632)..(632): n is a, c, g, or t
agggtcattaacggaccatgggctgctgggaaacggcttaggagcagcacccggctggcgctggccggccggcgccggggactttcttccgcctggccagacagatccctgttttttgtttttcaaaattcagaaagcatctccgaatatttgcccagaggagtgtgaaacatactttcctggtctttctttcactttgttttatttctgtgtggacaaacaatggggaaaatgccgcgcgtctagccaggcagataagaaaacaactatacccgtcaggcccccaacccggcgccgccataaatggccccggcctcgccattttagttctttttgcgaagtgggctcgtgggttggcagtatgagagttgtaatggcccgactgttgagtgagggggagcaggggatcccaacggcttgcgctgcctttgcgcagcagccggcgggcggccacgtcgcggcctggctggggtaggagagggcggtccccagtgcagttgggtgaactaccgttgcacactggagtttctggtgtctttgcttggaactgacctagctcgtggcagggggaactcggctagcggccccacagcccctgctgactcaaaacaactagttgtaggccattcaangcctccgggccattcaacgcctccag

SEQ ID NO: 334946 - DNA, 407 bp, Homo sapiens
  misc_feature (42)..(43): n is a, c, g, or t
tgtgtaggaggaagacggtgggaggctgagctagaaatcacnnacctacgctttttgtggctcccaaactgcagagtcaatccccctggggtccctgcccctgccagcaagggtgggggtgtgatttctagctcagcgtttcccactcagctttgtgctcagatcccaggtcccaaggagtgacaggggcttcctcccaccttctgtccttgtccagtcatgtaaataatgtgctatttctctccccgagtctttttttttaaaacctaccgtggttcctcagctaactgcattccctacccaggcagagactgtcctatgcctcgagcttccaaacgagactcagaccgcgacacagccaccgtatttatggaatgacaaaataaataaagcccaaacccatcggt

SEQ ID NO: 334947 - DNA, 185 bp, Homo sapiens
gactagttctagatcgcgagcggcgccctctttttttttaaaacctaccgtggttcctcagctaactgcattccctacccaggcagagactgtcctatgcctcgagcttccaaacgagactcagaccgcgacacagccaccgtatttatggaatgacaaaataaataaagcccaaacccatcggt

SEQ ID NO: 334948 - DNA, 3918 bp, Homo sapiens
ggcagtgcatagctctggcacgcgctgcaccaacttcctgttgggtgctgtggtcccaaggcgcgtgctttgcagcagatgtgtgacctggcgttcccctgagtgctcggaaaatggccttgtctccggtcgttcccgttcaggagcagaattttcccactgtaaaaaaccgagcaagtctggataagtgaggctggctccatgtatccagaatcaacgacgggctccccggctcggctctcgctgcggcagacgggctcccccgggatgatctacagtactcggtatgggagtcccaaaagacagctccagttttacaggaacctgggcaagtctggcctgcgggtctcctgcctgggacttggaacatgggtgaccttcggaggccagatcaccgatgagatggcagagcagctcatgaccttggcctatgataatggcatcaacctcttcgatacagcagaagtctacgcagccggcaaggctgaagtggtactgggaaacatcattaagaagaaaggatggaggcggtccagcctcgtcatcaccaccaagatcttctggggcggaaaggcggagacggagcggggcctgtccaggaagcacataatcgaaggtctgaaagcttccctggagcgactgcagctggagtacgtggatgtggtgtttgccaaccgcccggaccccaacaccccgatggaagagaccgtccgcgccatgacccacgtcatcaaccaggggatggccatgtactggggcacgtcacgctggagctccatggagatcatggaggcctactccgtggcccggcagttcaacctgaccccgcccatctgcgagcaggctgagtaccacatgttccagcgtgagaaagtggaggtgcagctgccggagctgttccacaagataggagtgggcgccatgacctggtcccctctggcctgtggcattgtttctggcaagtacgacagtggcatcccaccctactcaagagcctccttgaagggctaccagtggctgaaggacaagatcctcagtgaggagggccggcgccagcaagccaagctgaaggagctgcaggccatcgccgagcgcctgggctgcaccctgccccagctggccatagcctggtgcctgaggaatgagggagtcagctccgtgctcctgggggcctccaatgcggaccagctcatggagaacattggggcaatacaggtccttccgaaactgtcatcttccattatccacgagattgatagtattttgggcaataaaccctacagcaaaaaggactacagatcctaagccgcccccgcccgcctgctcggacagtttccgttccctcctagtctctgttcgctcgcttaagctgttttgaagccaagtgaagagtgtggtttgcatccaagagaaaacaccacactgtgatgtcatcgggaaatgatctcccaagtcgctgccagacaccacccactgcttcgccggacaatgtcgaagtccagtctgtgccggggaaggcactggttaggaaggatgttcaaacggtcccacccaagcctgtcacctctgctcatcctccaagaccacccagctttctcccagccacagccaagattcccaaagtcaaggcccaaagatttccaaggttcccaaagtcaaggccaggccaaggcctggttgggtccttggggcgggcagggccggcctctcctctgctgagaatccccacttggtgtagggggagaggggaaaggggtctggcccatcgaggggccccttctgccagggccttggttgctggggcagggcctccccactgggggtcttcctccacctcccactttccaagggctccaggaatctggggcctgaccacagattcctctcccatccttttctgctccaacctgccccactgggtcccggcaggggccatgcctaccaagctcgagctggcccttgacccccacccacccccacccttgctggcaggggcagggaccccagggggattgactctgcagtttgggagccacaaaaagcgtagcggtgtgatttctagctcagcctcccaccgtcttcctcctacacaccaatgatgagcctcatgccagtgaggcccggagcgcttgggaggggtcccagtggggcaggcccctctgtctggccacccctctgtcctggccccggaaggccctgtggtcatgtgctcctagctgcacggtggctgctggccacaccacggcaagtggcagcaggggccggccctgtgcacaaggatgcactcctctcggcccctgtagactttctctaaagccgcccgccagcccaggccgctgctctgcaccgagctggtgggcttgggttttgtggagcgcatgcttggaccctttcagtaaggaagggtctttggggttttctgtgcccatgacttgggggctgcacccccacagcacccccacaatgtaggaaaagacctcagggaacctctccctggaaagacgggcagggctggttagcccctcccactgcctgacacctgggacaggctgggcagaggggagagagggcaggacaggccagagtgacgcccccgtgcagcttgggccggagggcaagggatgccagtaagtctgcaggtgcggggtgccacctacaggcccaggcctgtgtcccaagcagtacccaggctttgcagaccacgcggggcagggctccactgaagccacccccacccctcgccagctagctccatagggaagcctgtgtctcctgcccccagggcgcaccctcagtgcaggcacctctgttcccgctttgcccctggaggagccactattccagaaggctccaccctgccgtcctgcgggagcctgctgtccagtcctggccgggccaaggcctgggaaactgtgaaagtcagaaaggccagcggggagaggctggggcgaggggaggagggggatcagcttctgctattaccgaccccccttcatgctgcccctggcgcctagaacccttgcccctcctcatagaccaagtcccgggggtctccactcagtcctgctgcctgcttcaccagaagcagccctgtgagtgtggggtggggaagtcccttcccaacggaggtcccagcctatggccctgggcccaggtgggggtcgcctgcttccttcccggacagggtcctgcagtggccaatggtgccagagggcaggtggcccaccctcgccgtcagggagggtggctggccccatccccactgccacccagccccacccactgttggaagagggaccagcgcgaggtggtgcccagggtgggcactgctgcttaatgcgaggcacacctggggcagctgagccccccgaaggctgcgggtttgccaaacacagagaggccaggccccagtgtcaggatgcagtcagcctctggcgcagctctttccacgacctggttcctggatgtcctgcttgctccacacccatctacagggaggatgtgagggggctctgcctcctagggccaggtcccccctctcgggagggggtattgggtaggaccatccaagaaagggcagaagaccaagggcagtcggggtctagaaaggagggcgctggccctgctgggcgcttcggagcccccactgtttcccactcagctttgtgctcagatcccaggtcccaaggagtgacaggggcttcctcccaccttctgtccttgtccagtcatgtaaataatgtgctatttctctccccgagtctttttttttaaaacctaccgtggttcctcagctaactgcattccctacccaggcagagactgtcctatgcctcgagcttccaaacgagactcagaccgcgacacagccaccgtatttatggaatgacaaaataaataaagcccaaacccatcggt

SEQ ID NO: 334949 - DNA, 4037 bp, Homo sapiens
agatgctgctggcggaacctgcaggagctagcgggattcgggggcgctaaagtcgcaggggcagggcgggaaggaagatccggcgcggggcacaggatccggagctggagcccccagaattttcccactgtaaaaaaccgagcaagtctggataagtgaggctggctccatgtatccagaatcaacgacgggctccccggctcggctctcgctgcggcagacgggctcccccgggatgatctacagtactcggtatgggagtcccaaaagacagctccagttttacaggaacctgggcaagtctggcctgcgggtctcctgcctgggacttggaacatgggtgaccttcggaggccagatcaccgatgagatggcagagcagctcatgaccttggcctatgataatggcatcaacctcttcgatacagcagaagtctacgcagccggcaaggctgaagtggtactgggaaacatcattaagaagaaaggatggaggcggtccagcctcgtcatcaccaccaagatcttctggggcggaaaggcggagacggagcggggcctgtccaggaagcacataatcgaaggtctgaaagcttccctggagcgactgcagctggagtacgtggatgtggtgtttgccaaccgcccggaccccaacaccccgatggaagagaccgtccgcgccatgacccacgtcatcaaccaggggatggccatgtactggggcacgtcacgctggagctccatggagatcatggaggcctactccgtggcccggcagttcaacctgaccccgcccatctgcgagcaggctgagtaccacatgttccagcgtgagaaagtggaggtgcagctgccggagctgttccacaagataggagtgggcgccatgacctggtcccctctggcctgtggcattgtttctggcaagtacgacagtggcatcccaccctactcaagagcctccttgaagggctaccagtggctgaaggacaagatcctcagtgaggagggccggcgccagcaagccaagctgaaggagctgcaggccatcgccgagcgcctgggctgcaccctgccccagctggccatagcctggtgcctgaggaatgagggagtcagctccgtgctcctgggggcctccaatgcggaccagctcatggagaacattggggcaatacaggtccttccgaaactgtcatcttccattatccacgagattgatagtattttgggcaataaaccctacagcaaaaaggactacagatcctaagccgcccccgcccgcctgctcggacagtttccgttccctcctagtctctgttcgctcgcttaagctgttttgaagccaagtgaagagtgtggtttgcatccaagagaaaacaccacactgtgatgtcatcgggaaatgatctcccaagtcgctgccagacaccacccactgcttcgccggacaatgtcgaagtccagtctgtgccggggaaggcactggttaggaaggatgttcaaacggtcccacccaagcctgtcacctctgctcatcctccaagaccacccagctttctcccagccacagccaagattcccaaagtcaaggcccaaagatttccaaggttcccaaagtcaaggccaggccaaggcctggttgggtccttggggcgggcagggccggcctctcctctgctgagaatccccacttggtgtagggggagaggggaaaggggtctggcccatcgaggggccccttctgccagggccttggttgctggggcagggcctccccactgggggtcttcctccacctcccactttccaagggctccaggaatctggggcctgaccacagattcctctcccatccttttctgctccaacctgccccactgggtcccggcaggggccatgcctaccaagctcgagctggcccttgacccccacccacccccacccttgctggcaggggcagggaccccagggggattgactctgcagtttgggagccacaaaaagcgtagcggtgtgatttctagctcagcctcccaccgtcttcctcctacacaccaatgatgagcctcatgccagtgaggcccggagcgcttgggaggggtcccagtggggcaggcccctctgtctggccacccctctgtcctggccccggaaggccctgtggtcatgtgctcctagctgcacggtggctgctggccacaccacggcaagtggcagcaggggccggccctgtgcacaaggatgcactcctctcggcccctgtagactttctctaaagccgcccgccagcccaggccgctgctctgcaccgagctggtgggcttgggttttgtggagcgcatgcttggaccctttcagtaaggaagggtctttggggttttctgtgcccatgacttgggggctgcacccccacagcacccccacaatgtaggaaaagacctcagggaacctctccctggaaagacgggcagggctggttagcccctcccactgcctgacacctgggacaggctgggcagaggggagagagggcaggacaggccagagtgacgcccccgtgcagcttgggccggagggcaagggatgccagtaagtctgcaggtgcggggtgccacctacaggcccaggcctgtgtcccaagcagtacccaggctttgcagaccacgcggggcagggctccactgaagccacccccacccctcgccagctagctccatagggaagcctgtgtctcctgcccccagggcgcaccctcagtgcaggcacctctgttcccgctttgcccctggaggagccactattccagaaggctccaccctgccgtcctgcgggagcctgctgtccagtcctggccgggccaaggcctgggaaactgtgaaagtcagaaaggccagcggggagaggctggggcgaggggaggagggggatcagcttctgctattaccgaccccccttcatgctgcccctggcgcctagaacccttgcccctcctcatagaccaagtcccgggggtctccactcagtcctgctgcctgcttcaccagaagcagccctgtgagtgtggggtggggaagtcccttcccaacggaggtcccagcctatggccctgggcccaggtgggggtcgcctgcttccttcccggacagggtcctgcagtggccaatggtgccagagggcaggtggcccaccctcgccgtcagggagggtggctggccccatccccactgccacccagccccacccactgttggaagagggaccagcgcgaggtggtgcccagggtgggcactgctgcttaatgcgaggcacacctggggcagctgagccccccgaaggctgcgggtttgccaaacacagagaggccaggccccagtgtcaggatgcagtcagcctctggcgcagctctttccacgacctggttcctggatgtcctgcttgctccacacccatctacagggaggatgtgagggggctctgcctcctagggccaggtcccccctctcgggagggggtattgggtaggaccatccaagaaagggcagaagaccaagggcagtcggggtctagaaaggagggcgctggccctgctgggcgcttcggagcccccactgtttcccactcagctttgtgctcagatcccaggtcccaaggagtgacaggggcttcctcccaccttctgtccttgtccagtcatgtaaataatgtgctatttctctccccgagtctttttttttaaaacctaccgtggttcctcagctaactgcattccctacccaggcagagactgtcctatgcctcgagcttccaaacgagactcagaccgcgacacagccaccgtatttatggaatgacaaaataaataaagcccaaacccatcggttttaaaaaaatattacttataaaaaaggtttaatatattatataaatatttttttgggggggaccctgtgggagttattcctcttggggggggcttggaccataacagccctatttaaatattcttcggggggggcccgggcccttacccc

SEQ ID NO: 334950 - DNA, 3844 bp, Homo sapiens
agatgctgctggcggaacctgcaggagctagcgggattcgggggcgctaaagtcgcaggggcagggcgggaaggaagatccggcgcggggcacaggatccggagctggagcccccagaattttcccactgtaaaaaaccgagcaagtctggataagtgaggctggctccatgtatccagaatcaacgacgggctccccggctcggctctcgctgcggcagacgggctcccccgggatgatctacaggaacctgggcaagtctggcctgcgggtctcctgcctgggacttggaacatgggtgaccttcggaggccagatcaccgatgagatggcagagcagctcatgaccttggcctatgataatggcatcaacctcttcgatacagcagaagtctacgcagccggcaaggctgaagtggtactgggaaacatcattaagaagaaaggatggaggcggtccagcctcgtcatcaccaccaagatcttctggggcggaaaggcggagacggagcggggcctgtccaggaagcacataatcgaaggtctgaaagcttccctggagcgactgcagctggagtacgtggatgtggtgtttgccaaccgcccggaccccaacaccccgatggaagagaccgtccgcgccatgacccacgtcatcaaccaggggatggccatgtactggggcacgtcacgctggagctccatggagatcatggaggcctactccgtggcccggcagttcaacctgaccccgcccatctgcgagcaggctgagtaccacatgttccagcgtgagaaagtggaggtgcagctgccggagctgttccacaagataggagtgggcgccatgacctggtcccctctggcctgtggcattgtttctggcaagtacgacagtggcatcccaccctactcaagagcctccttgaagggctaccagtggctgaaggacaagatcctcagtgaggagggccggcgccagcaagccaagctgaaggagctgcaggccatcgccgagcgcctgggctgcaccctgccccagctggccatagcctggtgcctgaggaatgagggagtcagctccgtgctcctgggggcctccaatgcggaccagctcatggagaacattggggcaatacaggtccttccgaaactgtcatcttccattatccacgagattgatagtattttgggcaataaaccctacagcaaaaaggactacagatcctaagccgcccccgcccgcctgctcggacagtttccgttccctcctagtctctgttcgctcgcttaagctgttttgaagccaagtgaagagtgtggtttgcatccaagagaaaacaccacactgtgatgtcatcgggaaatgatctcccaagtcgctgccagacaccacccactgcttcgccggacaatgtcgaagtccagtctgtgccggggaaggcactggttaggaaggatgttcaaacggtcccacccaagcctgtcacctctgctcatcctccaagaccacccagctttctcccagccacagccaagattcccaaagtcaaggcccaaagatttccaaggttcccaaagtcaaggccaggccaaggcctggttgggtccttggggcgggcagggccggcctctcctctgctgagaatccccacttggtgtagggggagaggggaaaggggtctggcccatcgaggggccccttctgccagggccttggttgctggggcagggcctccccactgggggtcttcctccacctcccactttccaagggctccaggaatctggggcctgaccacagattcctctcccatccttttctgctccaacctgccccactgggtcccggcaggggccatgcctaccaagctcgagctggcccttgacccccacccacccccacccttgctggcaggggcagggaccccagggggattgactctgcagtttgggagccacaaaaagcgtagcggtgtgatttctagctcagcctcccaccgtcttcctcctacacaccaatgatgagcctcatgccagtgaggcccggagcgcttgggaggggtcccagtggggcaggcccctctgtctggccacccctctgtcctggccccggaaggccctgtggtcatgtgctcctagctgcacggtggctgctggccacaccacggcaagtggcagcaggggccggccctgtgcacaaggatgcactcctctcggcccctgtagactttctctaaagccgcccgccagcccaggccgctgctctgcaccgagctggtgggcttgggttttgtggagcgcatgcttggaccctttcagtaaggaagggtctttggggttttctgtgcccatgacttgggggctgcacccccacagcacccccacaatgtaggaaaagacctcagggaacctctccctggaaagacgggcagggctggttagcccctcccactgcctgacacctgggacaggctgggcagaggggagagagggcaggacaggccagagtgacgcccccgtgcagcttgggccggagggcaagggatgccagtaagtctgcaggtgcggggtgccacctacaggcccaggcctgtgtcccaagcagtacccaggctttgcagaccacgcggggcagggctccactgaagccacccccacccctcgccagctagctccatagggaagcctgtgtctcctgcccccagggcgcaccctcagtgcaggcacctctgttcccgctttgcccctggaggagccactattccagaaggctccaccctgccgtcctgcgggagcctgctgtccagtcctggccgggccaaggcctgggaaactgtgaaagtcagaaaggccagcggggagaggctggggcgaggggaggagggggatcagcttctgctattaccgaccccccttcatgctgcccctggcgcctagaacccttgcccctcctcatagaccaagtcccgggggtctccactcagtcctgctgcctgcttcaccagaagcagccctgtgagtgtggggtggggaagtcccttcccaacggaggtcccagcctatggccctgggcccaggtgggggtcgcctgcttccttcccggacagggtcctgcagtggccaatggtgccagagggcaggtggcccaccctcgccgtcagggagggtggctggccccatccccactgccacccagccccacccactgttggaagagggaccagcgcgaggtggtgcccagggtgggcactgctgcttaatgcgaggcacacctggggcagctgagccccccgaaggctgcgggtttgccaaacacagagaggccaggccccagtgtcaggatgcagtcagcctctggcgcagctctttccacgacctggttcctggatgtcctgcttgctccacacccatctacagggaggatgtgagggggctctgcctcctagggccaggtcccccctctcgggagggggtattgggtaggaccatccaagaaagggcagaagaccaagggcagtcggggtctagaaaggagggcgctggccctgctgggcgcttcggagcccccactgtttcccactcagctttgtgctcagatcccaggtcccaaggagtgacaggggcttcctcccaccttctgtccttgtccagtcatgtaaataatgtgctatttctctccccgagtctttttttttaaaacctaccgtggttcctcagctaactgcattccctacccaggcagagactgtcctatgcctcgagcttccaaacgagactcagaccgcgacacagccaccgtatttatggaatgacaaaataaataaagcccaaacccatcggt

SEQ ID NO: 334951 - DNA, 3508 bp, Homo sapiens
tcaccggtgcctttaccaggtgagtgccgcaggcagcccatttttcagatgtggacactgtggcacagagaggttcagtaacatgccaaggtcacacagcttgggccaagattaacatccaggctgtgtggttcagagcctgggctgctcataactggaccctccggcctgggggtcccaccacccacctccttttcccagctcaccagggcctgcctggctcccagggaagctatgagtgtgagcagtggggagcccgggctgcagctgctgggccagcctgctccggggacaccttggtgccctctccatggctgccccggcagcctcccgcctgctcacaggcaagggccctcggggtccctttctgccttcacaggaggcctactccgtggcccggcagttcaacctgaccccgcccatctgcgagcaggctgagtaccacatgttccagcgtgagaaagtggaggtgcagctgccggagctgttccacaagataggagtgggcgccatgacctggtcccctctggcctgtggcattgtttctggcaagtacgacagtggcatcccaccctactcaagagcctccttgaagggctaccagtggctgaaggacaagatcctcagtgaggagggccggcgccagcaagccaagctgaaggagctgcaggccatcgccgagcgcctgggctgcaccctgccccagctggccatagcctggtgcctgaggaatgagggagtcagctccgtgctcctgggggcctccaatgcggaccagctcatggagaacattggggcaatacaggtccttccgaaactgtcatcttccattatccacgagattgatagtattttgggcaataaaccctacagcaaaaaggactacagatcctaagccgcccccgcccgcctgctcggacagtttccgttccctcctagtctctgttcgctcgcttaagctgttttgaagccaagtgaagagtgtggtttgcatccaagagaaaacaccacactgtgatgtcatcgggaaatgatctcccaagtcgctgccagacaccacccactgcttcgccggacaatgtcgaagtccagtctgtgccggggaaggcactggttaggaaggatgttcaaacggtcccacccaagcctgtcacctctgctcatcctccaagaccacccagctttctcccagccacagccaagattcccaaagtcaaggcccaaagatttccaaggttcccaaagtcaaggccaggccaaggcctggttgggtccttggggcgggcagggccggcctctcctctgctgagaatccccacttggtgtagggggagaggggaaaggggtctggcccatcgaggggccccttctgccagggccttggttgctggggcagggcctccccactgggggtcttcctccacctcccactttccaagggctccaggaatctggggcctgaccacagattcctctcccatccttttctgctccaacctgccccactgggtcccggcaggggccatgcctaccaagctcgagctggcccttgacccccacccacccccacccttgctggcaggggcagggaccccagggggattgactctgcagtttgggagccacaaaaagcgtagcggtgtgatttctagctcagcctcccaccgtcttcctcctacacaccaatgatgagcctcatgccagtgaggcccggagcgcttgggaggggtcccagtggggcaggcccctctgtctggccacccctctgtcctggccccggaaggccctgtggtcatgtgctcctagctgcacggtggctgctggccacaccacggcaagtggcagcaggggccggccctgtgcacaaggatgcactcctctcggcccctgtagactttctctaaagccgcccgccagcccaggccgctgctctgcaccgagctggtgggcttgggttttgtggagcgcatgcttggaccctttcagtaaggaagggtctttggggttttctgtgcccatgacttgggggctgcacccccacagcacccccacaatgtaggaaaagacctcagggaacctctccctggaaagacgggcagggctggttagcccctcccactgcctgacacctgggacaggctgggcagaggggagagagggcaggacaggccagagtgacgcccccgtgcagcttgggccggagggcaagggatgccagtaagtctgcaggtgcggggtgccacctacaggcccaggcctgtgtcccaagcagtacccaggctttgcagaccacgcggggcagggctccactgaagccacccccacccctcgccagctagctccatagggaagcctgtgtctcctgcccccagggcgcaccctcagtgcaggcacctctgttcccgctttgcccctggaggagccactattccagaaggctccaccctgccgtcctgcgggagcctgctgtccagtcctggccgggccaaggcctgggaaactgtgaaagtcagaaaggccagcggggagaggctggggcgaggggaggagggggatcagcttctgctattaccgaccccccttcatgctgcccctggcgcctagaacccttgcccctcctcatagaccaagtcccgggggtctccactcagtcctgctgcctgcttcaccagaagcagccctgtgagtgtggggtggggaagtcccttcccaacggaggtcccagcctatggccctgggcccaggtgggggtcgcctgcttccttcccggacagggtcctgcagtggccaatggtgccagagggcaggtggcccaccctcgccgtcagggagggtggctggccccatccccactgccacccagccccacccactgttggaagagggaccagcgcgaggtggtgcccagggtgggcactgctgcttaatgcgaggcacacctggggcagctgagccccccgaaggctgcgggtttgccaaacacagagaggccaggccccagtgtcaggatgcagtcagcctctggcgcagctctttccacgacctggttcctggatgtcctgcttgctccacacccatctacagggaggatgtgagggggctctgcctcctagggccaggtcccccctctcgggagggggtattgggtaggaccatccaagaaagggcagaagaccaagggcagtcggggtctagaaaggagggcgctggccctgctgggcgcttcggagcccccactgtttcccactcagctttgtgctcagatcccaggtcccaaggagtgacaggggcttcctcccaccttctgtccttgtccagtcatgtaaataatgtgctatttctctccccgagtctttttttttaaaacctaccgtggttcctcagctaactgcattccctacccaggcagagactgtcctatgcctcgagcttccaaacgagactcagaccgcgacacagccaccgtatttatggaatgacaaaataaataaagcccaaacccatcggt

SEQ ID NO: 334952 - DNA, 1836 bp, Homo sapiens
acagacgtccaccaaagccacacatcgcgacacacggaggcagaaagcagcggtctcctaagaagttagacacgaggaatctcgggcagcgagaattttcccactgtaaaaaaccgagcaagtctggataagtgaggctggctccatgtatccagaatcaacgacgggctccccggctcggctctcgctgcggcagacgggctcccccgggatgatctacagtactcggtatgggagtcccaaaagacagctccagttttacaggaacctgggcaagtctggcctgcgggtctcctgcctgggacttggaacatgggtgaccttcggaggccagatcaccgatgagatggcagagcagctcatgaccttggcctatgataatggcatcaacctcttcgatacagcagaagtctacgcagccggcaaggctgaagtggtactgggaaacatcattaagaagaaaggatggaggcagaggggagagagggcaggacaggccagagtgacgcccccgtgcagcttgggccggagggcaagggatgccagtaagtctgcaggtgcggggtgccacctacaggcccaggcctgtgtcccaagcagtacccaggctttgcagaccacgcggggcagggctccactgaagccacccccacccctcgccagctagctccatagggaagcctgtgtctcctgcccccagggcgcaccctcagtgcaggcacctctgttcccgctttgcccctggaggagccactattccagaaggctccaccctgccgtcctgcgggagcctgctgtccagtcctggccgggccaaggcctgggaaactgtgaaagtcagaaaggccagcggggagaggctggggcgaggggaggagggggatcagcttctgctattaccgaccccccttcatgctgcccctggcgcctagaacccttgcccctcctcatagaccaagtcccgggggtctccactcagtcctgctgcctgcttcaccagaagcagccctgtgagtgtggggtggggaagtcccttcccaacggaggtcccagcctatggccctgggcccaggtgggggtcgcctgcttccttcccggacagggtcctgcagtggccaatggtgccagagggcaggtggcccaccctcgccgtcagggagggtggctggccccatccccactgccacccagccccacccactgttggaagagggaccagcgcgaggtggtgcccagggtgggcactgctgcttaatgcgaggcacacctggggcagctgagccccccgaaggctgcgggtttgccaaacacagagaggccaggccccagtgtcaggatgcagtcagcctctggcgcagctctttccacgacctggttcctggatgtcctgcttgctccacacccatctacagggaggatgtgagggggctctgcctcctagggccaggtcccccctctcgggagggggtattgggtaggaccatccaagaaagggcagaagaccaagggcagtcggggtctagaaaggagggcgctggccctgctgggcgcttcggagcccccactgtttcccactcagctttgtgctcagatcccaggtcccaaggagtgacaggggcttcctcccaccttctgtccttgtccagtcatgtaaataatgtgctatttctctccccgagtctttttttttaaaacctaccgtggttcctcagctaactgcattccctacccaggcagagactgtcctatgcctcgagcttccaaacgagactcagaccgcgacacagccaccgtatttatggaatgacaaaataaataaagcccaaacccatcggt

SEQ ID NO: 334953 - DNA, 954 bp, Homo sapiens
ggcagtgcatagctctggcacgcgctgcaccaacttcctgttgggtgctgtggtcccaaggcgcgtgctttgcagcagatgtgtgacctggcgttcccctgagtgctcggaaaatggccttgtctccggtcgttcccgttcaggagcagaattttcccactgtaaaaaaccgagcaagtctggataagtgaggctggctccatgtatccagaatcaacgacgggctccccggctcggctctcgctgcggcagacgggctcccccgggatgatctacaggaacctgggcaagtctggcctgcgggtctcctgcctgggacttggaacatgggtgaccttcggaggccagatcaccgatgagatggcagagcagctcatgaccttggcctatgataatggcatcaacctcttcgatacagcagaagtctacgcagccggcaaggctgaagtggtactgggaaacatcattaagaagaaaggatggaggcggtccagcctcgtcatcaccaccaagatcttctggggcggaaaggcggagacggagcggggcctgtccaggaagcacataatcgaaggtctgaaagcttccctggagcgactgcagctggagtacgtggatgtggtgtttgccaaccgcccggaccccaacaccccgatggaagagaccgtccgcgccatgacccacgtttcccactcagctttgtgctcagatcccaggtcccaaggagtgacaggggcttcctcccaccttctgtccttgtccagtcatgtaaataatgtgctatttctctccccgagtctttttttttaaaacctaccgtggttcctcagctaactgcattccctacccaggcagagactgtcctatgcctcgagcttccaaacgagactcagaccgcgacacagccaccgtatttatggaatgacaaaataaataaagcccaaacccatcggt

SEQ ID NO: 334954 - DNA, 1109 bp, Homo sapiens
ggcagtgcatagctctggcacgcgctgcaccaacttcctgttgggtgctgtggtcccaaggcgcgtgctttgcagcagatgtgtgacctggcgttcccctgagtgctcggaaaatggccttgtctccggtcgttcccgttcaggagcagaattttcccactgtaaaaaaccgagcaagtctggataagtgaggctggctccatgtatccagaatcaacgacgggctccccggctcggctctcgctgcggcagacgggctcccccgggatgatctacaggaacctgggcaagtctggcctgcgggtctcctgcctgggacttggaacatgggtgaccttcggaggccagatcaccgatgagatggcagagcagctcatgaccttggcctatgataatggcatcaacctcttcgatacagcagaagtctacgcagccggcaaggctgaagtggtactgggaaacatcattaagaagaaaggatggaggatcttcgcggcgtctcagcctctccggagctcactgttcccatctgtaagagggtgtgtgtgggaccgttccggcagggctatcctgagggtcagtggccccaagtctgtaaatcacccacccagctcagggcgggacgtgtcacactcctctgggaagtggtcccctccagcacagaccggggagcggtccccgggtgtgatggagcccaaaggtcgcagatcgggggccatccacccttctctcccaggagcctatgggcccttcccaggccaaggtcctcacccaccttgggaccaactgggctgagcacttgcctacattttgaggctccccagacccctggacacagctttatctcaaggtgctgacaagccccggggccctgttccttaataaatgcgtctttattttcagaaacatcagaagcagttataaagttgggcctccctcctccctcccctcgaaatgccactcagaatcccagtgccaaggggagcccccgccccctcccccatggattcctgacaccccttcctcttgtcccatcaaatttgttttttggcaactctgatcccaaaacaaattcctcctcaccctgtaattaaacgaaattgcacgta

SEQ ID NO: 334955 - DNA, 3886 bp, Homo sapiens
agatgctgctggcggaacctgcaggagctagcgggattcgggggcgctaaagtcgcaggggcagggcgggaaggaagatccggcgcggggcacaggatccggagctggagcccccagaattttcccactgtaaaaaaccgagcaagtctggataagtgaggctggctccatgtatccagaatcaacgacgggctccccggctcggctctcgctgcggcagacgggctcccccgggatgatctacagtactcggtatgggagtcccaaaagacagctccagttttacaggaacctgggcaagtctggcctgcgggtctcctgcctgggacttggaacatgggtgaccttcggaggccagatcaccgatgagatggcagagcagctcatgaccttggcctatgataatggcatcaacctcttcgatacagcagaagtctacgcagccggcaaggctgaagtggtactgggaaacatcattaagaagaaaggatggaggcggtccagcctcgtcatcaccaccaagatcttctggggcggaaaggcggagacggagcggggcctgtccaggaagcacataatcgaaggtctgaaagcttccctggagcgactgcagctggagtacgtggatgtggtgtttgccaaccgcccggaccccaacaccccgatggaagagaccgtccgcgccatgacccacgtcatcaaccaggggatggccatgtactggggcacgtcacgctggagctccatggagatcatggaggcctactccgtggcccggcagttcaacctgaccccgcccatctgcgagcaggctgagtaccacatgttccagcgtgagaaagtggaggtgcagctgccggagctgttccacaagataggagtgggcgccatgacctggtcccctctggcctgtggcattgtttctggcaagtacgacagtggcatcccaccctactcaagagcctccttgaagggctaccagtggctgaaggacaagatcctcagtgaggagggccggcgccagcaagccaagctgaaggagctgcaggccatcgccgagcgcctgggctgcaccctgccccagctggccatagcctggtgcctgaggaatgagggagtcagctccgtgctcctgggggcctccaatgcggaccagctcatggagaacattggggcaatacaggtccttccgaaactgtcatcttccattatccacgagattgatagtattttgggcaataaaccctacagcaaaaaggactacagatcctaagccgcccccgcccgcctgctcggacagtttccgttccctcctagtctctgttcgctcgcttaagctgttttgaagccaagtgaagagtgtggtttgcatccaagagaaaacaccacactgtgatgtcatcgggaaatgatctcccaagtcgctgccagacaccacccactgcttcgccggacaatgtcgaagtccagtctgtgccggggaaggcactggttaggaaggatgttcaaacggtcccacccaagcctgtcacctctgctcatcctccaagaccacccagctttctcccagccacagccaagattcccaaagtcaaggcccaaagatttccaaggttcccaaagtcaaggccaggccaaggcctggttgggtccttggggcgggcagggccggcctctcctctgctgagaatccccacttggtgtagggggagaggggaaaggggtctggcccatcgaggggccccttctgccagggccttggttgctggggcagggcctccccactgggggtcttcctccacctcccactttccaagggctccaggaatctggggcctgaccacagattcctctcccatccttttctgctccaacctgccccactgggtcccggcaggggccatgcctaccaagctcgagctggcccttgacccccacccacccccacccttgctggcaggggcagggaccccagggggattgactctgcagtttgggagccacaaaaagcgtagcggtgtgatttctagctcagcctcccaccgtcttcctcctacacaccaatgatgagcctcatgccagtgaggcccggagcgcttgggaggggtcccagtggggcaggcccctctgtctggccacccctctgtcctggccccggaaggccctgtggtcatgtgctcctagctgcacggtggctgctggccacaccacggcaagtggcagcaggggccggccctgtgcacaaggatgcactcctctcggcccctgtagactttctctaaagccgcccgccagcccaggccgctgctctgcaccgagctggtgggcttgggttttgtggagcgcatgcttggaccctttcagtaaggaagggtctttggggttttctgtgcccatgacttgggggctgcacccccacagcacccccacaatgtaggaaaagacctcagggaacctctccctggaaagacgggcagggctggttagcccctcccactgcctgacacctgggacaggctgggcagaggggagagagggcaggacaggccagagtgacgcccccgtgcagcttgggccggagggcaagggatgccagtaagtctgcaggtgcggggtgccacctacaggcccaggcctgtgtcccaagcagtacccaggctttgcagaccacgcggggcagggctccactgaagccacccccacccctcgccagctagctccatagggaagcctgtgtctcctgcccccagggcgcaccctcagtgcaggcacctctgttcccgctttgcccctggaggagccactattccagaaggctccaccctgccgtcctgcgggagcctgctgtccagtcctggccgggccaaggcctgggaaactgtgaaagtcagaaaggccagcggggagaggctggggcgaggggaggagggggatcagcttctgctattaccgaccccccttcatgctgcccctggcgcctagaacccttgcccctcctcatagaccaagtcccgggggtctccactcagtcctgctgcctgcttcaccagaagcagccctgtgagtgtggggtggggaagtcccttcccaacggaggtcccagcctatggccctgggcccaggtgggggtcgcctgcttccttcccggacagggtcctgcagtggccaatggtgccagagggcaggtggcccaccctcgccgtcagggagggtggctggccccatccccactgccacccagccccacccactgttggaagagggaccagcgcgaggtggtgcccagggtgggcactgctgcttaatgcgaggcacacctggggcagctgagccccccgaaggctgcgggtttgccaaacacagagaggccaggccccagtgtcaggatgcagtcagcctctggcgcagctctttccacgacctggttcctggatgtcctgcttgctccacacccatctacagggaggatgtgagggggctctgcctcctagggccaggtcccccctctcgggagggggtattgggtaggaccatccaagaaagggcagaagaccaagggcagtcggggtctagaaaggagggcgctggccctgctgggcgcttcggagcccccactgtttcccactcagctttgtgctcagatcccaggtcccaaggagtgacaggggcttcctcccaccttctgtccttgtccagtcatgtaaataatgtgctatttctctccccgagtctttttttttaaaacctaccgtggttcctcagctaactgcattccctacccaggcagagactgtcctatgcctcgagcttccaaacgagactcagaccgcgacacagccaccgtatttatggaatgacaaaataaataaagcccaaacccatcggt

SEQ ID NO: 334956 - DNA, 3930 bp, Homo sapiens
  misc_feature (35)..(35): n is a, c, g, or t
  misc_feature (47)..(47): n is a, c, g, or t
  misc_feature (50)..(50): n is a, c, g, or t
  misc_feature (62)..(62): n is a, c, g, or t
tcacacacaatcgggactatggactaccaaagttntggatccacaanaangcagcgcgtttnttatataacggaccgcatacaacgtctagtacgagctggtggaatcgcaggcgtaagtcgaggcagcggagagacgcgcggcaagatcggagtgagcccaattttcccactgtaaaaaaccgagcaagtctggataagtgaggctggctccatgtatccagaatcaacgacgggctccccggctcggctctcgctgcggcagacgggctcccccgggatgatctacagtactcggtatgggagtcccaaaagacagctccagttttacaggaacctgggcaagtctggcctgcgggtctcctgcctgggacttggaacatgggtgaccttcggaggccagatcaccgatgagatggcagagcagctcatgaccttggcctatgataatggcatcaacctcttcgatacagcagaagtctacgcagccggcaaggctgaagtggtactgggaaacatcattaagaagaaaggatggaggcggtccagcctcgtcatcaccaccaagatcttctggggcggaaaggcggagacggagcggggcctgtccaggaagcacataatcgaaggtctgaaagcttccctggagcgactgcagctggagtacgtggatgtggtgtttgccaaccgcccggaccccaacaccccgatggaagagaccgtccgcgccatgacccacgtcatcaaccaggggatggccatgtactggggcacgtcacgctggagctccatggagatcatggaggcctactccgtggcccggcagttcaacctgaccccgcccatctgcgagcaggctgagtaccacatgttccagcgtgagaaagtggaggtgcagctgccggagctgttccacaagataggagtgggcgccatgacctggtcccctctggcctgtggcattgtttctggcaagtacgacagtggcatcccaccctactcaagagcctccttgaagggctaccagtggctgaaggacaagatcctcagtgaggagggccggcgccagcaagccaagctgaaggagctgcaggccatcgccgagcgcctgggctgcaccctgccccagctggccatagcctggtgcctgaggaatgagggagtcagctccgtgctcctgggggcctccaatgcggaccagctcatggagaacattggggcaatacaggtccttccgaaactgtcatcttccattatccacgagattgatagtattttgggcaataaaccctacagcaaaaaggactacagatcctaagccgcccccgcccgcctgctcggacagtttccgttccctcctagtctctgttcgctcgcttaagctgttttgaagccaagtgaagagtgtggtttgcatccaagagaaaacaccacactgtgatgtcatcgggaaatgatctcccaagtcgctgccagacaccacccactgcttcgccggacaatgtcgaagtccagtctgtgccggggaaggcactggttaggaaggatgttcaaacggtcccacccaagcctgtcacctctgctcatcctccaagaccacccagctttctcccagccacagccaagattcccaaagtcaaggcccaaagatttccaaggttcccaaagtcaaggccaggccaaggcctggttgggtccttggggcgggcagggccggcctctcctctgctgagaatccccacttggtgtagggggagaggggaaaggggtctggcccatcgaggggccccttctgccagggccttggttgctggggcagggcctccccactgggggtcttcctccacctcccactttccaagggctccaggaatctggggcctgaccacagattcctctcccatccttttctgctccaacctgccccactgggtcccggcaggggccatgcctaccaagctcgagctggcccttgacccccacccacccccacccttgctggcaggggcagggaccccagggggattgactctgcagtttgggagccacaaaaagcgtagcggtgtgatttctagctcagcctcccaccgtcttcctcctacacaccaatgatgagcctcatgccagtgaggcccggagcgcttgggaggggtcccagtggggcaggcccctctgtctggccacccctctgtcctggccccggaaggccctgtggtcatgtgctcctagctgcacggtggctgctggccacaccacggcaagtggcagcaggggccggccctgtgcacaaggatgcactcctctcggcccctgtagactttctctaaagccgcccgccagcccaggccgctgctctgcaccgagctggtgggcttgggttttgtggagcgcatgcttggaccctttcagtaaggaagggtctttggggttttctgtgcccatgacttgggggctgcacccccacagcacccccacaatgtaggaaaagacctcagggaacctctccctggaaagacgggcagggctggttagcccctcccactgcctgacacctgggacaggctgggcagaggggagagagggcaggacaggccagagtgacgcccccgtgcagcttgggccggagggcaagggatgccagtaagtctgcaggtgcggggtgccacctacaggcccaggcctgtgtcccaagcagtacccaggctttgcagaccacgcggggcagggctccactgaagccacccccacccctcgccagctagctccatagggaagcctgtgtctcctgcccccagggcgcaccctcagtgcaggcacctctgttcccgctttgcccctggaggagccactattccagaaggctccaccctgccgtcctgcgggagcctgctgtccagtcctggccgggccaaggcctgggaaactgtgaaagtcagaaaggccagcggggagaggctggggcgaggggaggagggggatcagcttctgctattaccgaccccccttcatgctgcccctggcgcctagaacccttgcccctcctcatagaccaagtcccgggggtctccactcagtcctgctgcctgcttcaccagaagcagccctgtgagtgtggggtggggaagtcccttcccaacggaggtcccagcctatggccctgggcccaggtgggggtcgcctgcttccttcccggacagggtcctgcagtggccaatggtgccagagggcaggtggcccaccctcgccgtcagggagggtggctggccccatccccactgccacccagccccacccactgttggaagagggaccagcgcgaggtggtgcccagggtgggcactgctgcttaatgcgaggcacacctggggcagctgagccccccgaaggctgcgggtttgccaaacacagagaggccaggccccagtgtcaggatgcagtcagcctctggcgcagctctttccacgacctggttcctggatgtcctgcttgctccacacccatctacagggaggatgtgagggggctctgcctcctagggccaggtcccccctctcgggagggggtattgggtaggaccatccaagaaagggcagaagaccaagggcagtcggggtctagaaaggagggcgctggccctgctgggcgcttcggagcccccactgtttcccactcagctttgtgctcagatcccaggtcccaaggagtgacaggggcttcctcccaccttctgtccttgtccagtcatgtaaataatgtgctatttctctccccgagtctttttttttaaaacctaccgtggttcctcagctaactgcattccctacccaggcagagactgtcctatgcctcgagcttccaaacgagactcagaccgcgacacagccaccgtatttatggaatgacaaaataaataaagcccaaacccatcggt

SEQ ID NO: 334957 - DNA, 3876 bp, Homo sapiens
ggcagtgcatagctctggcacgcgctgcaccaacttcctgttgggtgctgtggtcccaaggcgcgtgctttgcagcagatgtgtgacctggcgttcccctgagtgctcggaaaatggccttgtctccggtcgttcccgttcaggagcagaattttcccactgtaaaaaaccgagcaagtctggataagtgaggctggctccatgtatccagaatcaacgacgggctccccggctcggctctcgctgcggcagacgggctcccccgggatgatctacaggaacctgggcaagtctggcctgcgggtctcctgcctgggacttggaacatgggtgaccttcggaggccagatcaccgatgagatggcagagcagctcatgaccttggcctatgataatggcatcaacctcttcgatacagcagaagtctacgcagccggcaaggctgaagtggtactgggaaacatcattaagaagaaaggatggaggcggtccagcctcgtcatcaccaccaagatcttctggggcggaaaggcggagacggagcggggcctgtccaggaagcacataatcgaaggtctgaaagcttccctggagcgactgcagctggagtacgtggatgtggtgtttgccaaccgcccggaccccaacaccccgatggaagagaccgtccgcgccatgacccacgtcatcaaccaggggatggccatgtactggggcacgtcacgctggagctccatggagatcatggaggcctactccgtggcccggcagttcaacctgaccccgcccatctgcgagcaggctgagtaccacatgttccagcgtgagaaagtggaggtgcagctgccggagctgttccacaagataggagtgggcgccatgacctggtcccctctggcctgtggcattgtttctggcaagtacgacagtggcatcccaccctactcaagagcctccttgaagggctaccagtggctgaaggacaagatcctcagtgaggagggccggcgccagcaagccaagctgaaggagctgcaggccatcgccgagcgcctgggctgcaccctgccccagctggccatagcctggtgcctgaggaatgagggagtcagctccgtgctcctgggggcctccaatgcggaccagctcatggagaacattggggcaatacaggtccttccgaaactgtcatcttccattatccacgagattgatagtattttgggcaataaaccctacagcaaaaaggactacagatcctaagccgcccccgcccgcctgctcggacagtttccgttccctcctagtctctgttcgctcgcttaagctgttttgaagccaagtgaagagtgtggtttgcatccaagagaaaacaccacactgtgatgtcatcgggaaatgatctcccaagtcgctgccagacaccacccactgcttcgccggacaatgtcgaagtccagtctgtgccggggaaggcactggttaggaaggatgttcaaacggtcccacccaagcctgtcacctctgctcatcctccaagaccacccagctttctcccagccacagccaagattcccaaagtcaaggcccaaagatttccaaggttcccaaagtcaaggccaggccaaggcctggttgggtccttggggcgggcagggccggcctctcctctgctgagaatccccacttggtgtagggggagaggggaaaggggtctggcccatcgaggggccccttctgccagggccttggttgctggggcagggcctccccactgggggtcttcctccacctcccactttccaagggctccaggaatctggggcctgaccacagattcctctcccatccttttctgctccaacctgccccactgggtcccggcaggggccatgcctaccaagctcgagctggcccttgacccccacccacccccacccttgctggcaggggcagggaccccagggggattgactctgcagtttgggagccacaaaaagcgtagcggtgtgatttctagctcagcctcccaccgtcttcctcctacacaccaatgatgagcctcatgccagtgaggcccggagcgcttgggaggggtcccagtggggcaggcccctctgtctggccacccctctgtcctggccccggaaggccctgtggtcatgtgctcctagctgcacggtggctgctggccacaccacggcaagtggcagcaggggccggccctgtgcacaaggatgcactcctctcggcccctgtagactttctctaaagccgcccgccagcccaggccgctgctctgcaccgagctggtgggcttgggttttgtggagcgcatgcttggaccctttcagtaaggaagggtctttggggttttctgtgcccatgacttgggggctgcacccccacagcacccccacaatgtaggaaaagacctcagggaacctctccctggaaagacgggcagggctggttagcccctcccactgcctgacacctgggacaggctgggcagaggggagagagggcaggacaggccagagtgacgcccccgtgcagcttgggccggagggcaagggatgccagtaagtctgcaggtgcggggtgccacctacaggcccaggcctgtgtcccaagcagtacccaggctttgcagaccacgcggggcagggctccactgaagccacccccacccctcgccagctagctccatagggaagcctgtgtctcctgcccccagggcgcaccctcagtgcaggcacctctgttcccgctttgcccctggaggagccactattccagaaggctccaccctgccgtcctgcgggagcctgctgtccagtcctggccgggccaaggcctgggaaactgtgaaagtcagaaaggccagcggggagaggctggggcgaggggaggagggggatcagcttctgctattaccgaccccccttcatgctgcccctggcgcctagaacccttgcccctcctcatagaccaagtcccgggggtctccactcagtcctgctgcctgcttcaccagaagcagccctgtgagtgtggggtggggaagtcccttcccaacggaggtcccagcctatggccctgggcccaggtgggggtcgcctgcttccttcccggacagggtcctgcagtggccaatggtgccagagggcaggtggcccaccctcgccgtcagggagggtggctggccccatccccactgccacccagccccacccactgttggaagagggaccagcgcgaggtggtgcccagggtgggcactgctgcttaatgcgaggcacacctggggcagctgagccccccgaaggctgcgggtttgccaaacacagagaggccaggccccagtgtcaggatgcagtcagcctctggcgcagctctttccacgacctggttcctggatgtcctgcttgctccacacccatctacagggaggatgtgagggggctctgcctcctagggccaggtcccccctctcgggagggggtattgggtaggaccatccaagaaagggcagaagaccaagggcagtcggggtctagaaaggagggcgctggccctgctgggcgcttcggagcccccactgtttcccactcagctttgtgctcagatcccaggtcccaaggagtgacaggggcttcctcccaccttctgtccttgtccagtcatgtaaataatgtgctatttctctccccgagtctttttttttaaaacctaccgtggttcctcagctaactgcattccctacccaggcagagactgtcctatgcctcgagcttccaaacgagactcagaccgcgacacagccaccgtatttatggaatgacaaaataaataaagcccaaacccatcggt

SEQ ID NO: 334958 - DNA, 3279 bp, Homo sapiens
ccctagggccaggaggttcttctgggccacgggtggcagccgagaccccaggctgccaagtttcctaagagaaggaaggccagcacctcgcctccttgtcctgacttggggttgggccagcaccacagtctttgcacttcagagcctggacaggccccgctcatccaccagcccgtgcccggcccactgcccactctcccctacttgagaggcctggggcaggggcactgccctggcttcaagatgagaagagcccctatgagggagaagggtccagaaggaatgagcccatcggccccctgcacgtgggggtccaggtgacctgctctcatctgtagctgtgctgctcccctcccccgcaaccagggctaccagtggctgaaggacaagatcctcagtgaggagggccggcgccagcaagccaagctgaaggagctgcaggccatcgccgagcgcctgggctgcaccctgccccagctggccatagcctggtgcctgaggaatgagggagtcagctccgtgctcctgggggcctccaatgcggaccagctcatggagaacattggggcaatacaggtccttccgaaactgtcatcttccattatccacgagattgatagtattttgggcaataaaccctacagcaaaaaggactacagatcctaagccgcccccgcccgcctgctcggacagtttccgttccctcctagtctctgttcgctcgcttaagctgttttgaagccaagtgaagagtgtggtttgcatccaagagaaaacaccacactgtgatgtcatcgggaaatgatctcccaagtcgctgccagacaccacccactgcttcgccggacaatgtcgaagtccagtctgtgccggggaaggcactggttaggaaggatgttcaaacggtcccacccaagcctgtcacctctgctcatcctccaagaccacccagctttctcccagccacagccaagattcccaaagtcaaggcccaaagatttccaaggttcccaaagtcaaggccaggccaaggcctggttgggtccttggggcgggcagggccggcctctcctctgctgagaatccccacttggtgtagggggagaggggaaaggggtctggcccatcgaggggccccttctgccagggccttggttgctggggcagggcctccccactgggggtcttcctccacctcccactttccaagggctccaggaatctggggcctgaccacagattcctctcccatccttttctgctccaacctgccccactgggtcccggcaggggccatgcctaccaagctcgagctggcccttgacccccacccacccccacccttgctggcaggggcagggaccccagggggattgactctgcagtttgggagccacaaaaagcgtagcggtgtgatttctagctcagcctcccaccgtcttcctcctacacaccaatgatgagcctcatgccagtgaggcccggagcgcttgggaggggtcccagtggggcaggcccctctgtctggccacccctctgtcctggccccggaaggccctgtggtcatgtgctcctagctgcacggtggctgctggccacaccacggcaagtggcagcaggggccggccctgtgcacaaggatgcactcctctcggcccctgtagactttctctaaagccgcccgccagcccaggccgctgctctgcaccgagctggtgggcttgggttttgtggagcgcatgcttggaccctttcagtaaggaagggtctttggggttttctgtgcccatgacttgggggctgcacccccacagcacccccacaatgtaggaaaagacctcagggaacctctccctggaaagacgggcagggctggttagcccctcccactgcctgacacctgggacaggctgggcagaggggagagagggcaggacaggccagagtgacgcccccgtgcagcttgggccggagggcaagggatgccagtaagtctgcaggtgcggggtgccacctacaggcccaggcctgtgtcccaagcagtacccaggctttgcagaccacgcggggcagggctccactgaagccacccccacccctcgccagctagctccatagggaagcctgtgtctcctgcccccagggcgcaccctcagtgcaggcacctctgttcccgctttgcccctggaggagccactattccagaaggctccaccctgccgtcctgcgggagcctgctgtccagtcctggccgggccaaggcctgggaaactgtgaaagtcagaaaggccagcggggagaggctggggcgaggggaggagggggatcagcttctgctattaccgaccccccttcatgctgcccctggcgcctagaacccttgcccctcctcatagaccaagtcccgggggtctccactcagtcctgctgcctgcttcaccagaagcagccctgtgagtgtggggtggggaagtcccttcccaacggaggtcccagcctatggccctgggcccaggtgggggtcgcctgcttccttcccggacagggtcctgcagtggccaatggtgccagagggcaggtggcccaccctcgccgtcagggagggtggctggccccatccccactgccacccagccccacccactgttggaagagggaccagcgcgaggtggtgcccagggtgggcactgctgcttaatgcgaggcacacctggggcagctgagccccccgaaggctgcgggtttgccaaacacagagaggccaggccccagtgtcaggatgcagtcagcctctggcgcagctctttccacgacctggttcctggatgtcctgcttgctccacacccatctacagggaggatgtgagggggctctgcctcctagggccaggtcccccctctcgggagggggtattgggtaggaccatccaagaaagggcagaagaccaagggcagtcggggtctagaaaggagggcgctggccctgctgggcgcttcggagcccccactgtttcccactcagctttgtgctcagatcccaggtcccaaggagtgacaggggcttcctcccaccttctgtccttgtccagtcatgtaaataatgtgctatttctctccccgagtctttttttttaaaacctaccgtggttcctcagctaactgcattccctacccaggcagagactgtcctatgcctcgagcttccaaacgagactcagaccgcgacacagccaccgtatttatggaatgacaaaataaataaagcccaaacccatcggt

SEQ ID NO: 334959 - DNA, 1850 bp, Homo sapiens
ggcagtgcatagctctggcacgcgctgcaccaacttcctgttgggtgctgtggtcccaaggcgcgtgctttgcagcagatgtgtgacctggcgttcccctgagtgctcggaaaatggccttgtctccggtcgttcccgttcaggagcagaattttcccactgtaaaaaaccgagcaagtctggataagtgaggctggctccatgtatccagaatcaacgacgggctccccggctcggctctcgctgcggcagacgggctcccccgggatgatctacaggaacctgggcaagtctggcctgcgggtctcctgcctgggacttggaacatgggtgaccttcggaggccagatcaccgatgagatggcagagcagctcatgaccttggcctatgataatggcatcaacctcttcgatacagcagaagtctacgcagccggcaaggctgaagtggtactgggaaacatcattaagaagaaaggatggaggcggtccagcctcgtcatcaccaccaagatcttctggggcggaaaggcggagacggagcggggcctgtccaggaagcacataatcgaaggtctgaaagcttccctggagcgactgcagctggagtacgtggatgtggtgtttgccaaccgcccggaccccaacaccccgatggaagagaccgtccgcgccatgacccacgtcatcaaccaggggatggccatgtactggggcacgtcacgctggagctccatggagatcatggaggcctactccgtggcccggcagttcaacctgaccccgcccatctgcgagcaggctgagtaccacatgttccagcgtgagaaagtggaggtgcagctgccggagctgttccacaagataggagtgggcgccatgacctggtcccctctggcctgtggcattgtttctggcaagtacgacagtggcatcccaccctactcaagagcctccttgaagggctaccagtggctgaaggacaagatcctcagtgaggagggccggcgccagcaagccaagctgaaggagctgcaggccatcgccgagcgcctgggctgcaccctgccccagctggccatagcctggtgcctgaggaatgagggagtcagctccgtgctcctgggggcctccaatgcggaccagctcatggagaacattggggcaatacaggtccttccgaaactgtcatcttccattatccacgagattgatagtattttgggcaataaaccctacagcaaaaaggactacagatcctaagccgcccccgcccgcctgctcggacagtttccgttccctcctagtctctgttcgctcgcttaagctgttttgaagccaagtgaagagtgtggtttgcatccaagagaaaacaccacactgtgatgtcatcgggaaatgatctcccaagtcgctgccagacaccacccactgcttcgccggacaatgtcgaagtccagtctgtgccggggaaggcactggttaggaaggatgttcaaacggtcccacccaagcctgtcacctctgctcatcctccaagaccacccagctttctcccagccacagccaagattcccaaagtttcccactcagctttgtgctcagatcccaggtcccaaggagtgacaggggcttcctcccaccttctgtccttgtccagtcatgtaaataatgtgctatttctctccccgagtctttttttttaaaacctaccgtggttcctcagctaactgcattccctacccaggcagagactgtcctatgcctcgagcttccaaacgagactcagaccgcgacacagccaccgtatttatggaatgacaaaataaataaagcccaaacccatcggt

SEQ ID NO: 334960 - DNA, 745 bp, Homo sapiens
ggcagtgcatagctctggcacgcgctgcaccaacttcctgttgggtgctgtggtcccaaggcgcgtgctttgcagcagatgtgtgacctggcgttcccctgagtgctcggaaaatggccttgtctccggtcgttcccgttcaggagcagaattttcccactgtaaaaaaccgagcaagtctggataagtgaggctggctccatgtatccagaatcaacgacgggctccccggctcggctctcgctgcggcagacgggctcccccgggatgatctacaggaacctgggcaagtctggcctgcgggtctcctgcctgggacttggaacatgggtgaccttcggaggccagatcaccgatgagatggcagagcagctcatgaccttggcctatgataatggcatcaacctcttcgatacagcagaagtctacgcagccggcaaggctgaagtggtactgggaaacatcattaagaagaaaggatggaggatcttcgcggcgtctcagcctctccggagctcactgttcccatctgtaagaggaaacatcagaagcagttataaagttgggcctccctcctccctcccctcgaaatgccactcagaatcccagtgccaaggggagcccccgccccctcccccatggattcctgacaccccttcctcttgtcccatcaaatttgttttttggcaactctgatcccaaaacaaattcctcctcaccctgtaattaaacgaaattgcacgta

SEQ ID NO: 334961 - DNA, 633 bp, Homo sapiens
ccattccagaagaagatgattttggtgatgttctgtgggacatacatgatgaacaagagcaaatggaaacttttcagcaggcttctaattcagcccatgagttgggatttgagaaatattaccaacgccttaatgatctagtggcagcaccagccccgattccacctcttctcgtgtctggaggaccaggttctgggaagtctcttcttttatcaaagtggattcaattacaacagaagaattcccccaacacactgattctttcccattttgtgggaaggcccatgtcaaccagctcagagtcctccttgattattaaacgactaactctaaagttgatgcagcactcttggtcagtctctgctctgacactggatcctgctaagcttctggaagaatttccacgttggctggaaaaactctctgctcgtcatcaaggcagcatcatcatcgttattgattctatagatcaagttcaggttgtggcctacacttcatcttgatcccttaagtccaaaagatgcaaaatctattataattgcagaatgccactctgtagacattaaattgagtaaagagcagtctctcatctttcctatgaaacatcttatgtgagacttaaaattcaatata

SEQ ID NO: 334962 - DNA, 814 bp, Homo sapiens
ccattccagaagaagatgattttggtgatgttctgtgggacatacatgatgaacaagagcaaatggaaacttttcagcaggcttctaattcagcccatgagttgggatttgagaaatattaccaacgccttaatgatctagtggcagcaccagccccgattccacctcttctcgtgtctggaggaccaggttctgggaagtctcttcttttatcaaagtggattcaattacaacagaagaattcccccaacacactgattctttcccattttgtgggaaggcccatgtcaaccagctcagagtcctccttgattattaaacgactaactctaaagttgatgcagcactcttggtcagtctctgctctgacactggatcctgctaagcttctggaagaatttccacgttggctggaaaaactctctgctcgtcatcaaggcagcatcatcatcgttattgattctatagatcaagttcagcaagttgaaaaacacatgaaatggctgatagatccactgccagtgaatgtaagagtaattgtttctgtgaatgtagaaacatgccctccagcatggaggttgtggcctacacttcatcttgatcccttaagtccaaaagatgcaaaatctattataattgcagaatgccactctgtagacattaaattgagtaaagagcaggagaagaagctagaacgacactgtcgttctgctacaacctgcaatgccctttatgtcacccttttcggcaaaatgatcgcgcgtgctgggagagcaggcaatttagataaaatccttcatcagtgtttccagtg

SEQ ID NO: 334963 - DNA, 1264 bp, Homo sapiens
ccattccagaagaagatgattttggtgatgttctgtgggacatacatgatgaacaagagcaaatggaaacttttcagcaggcttctaattcagcccatgagttgggatttgagaaatattaccaacgccttaatgatctagtggcagcaccagccccgattccacctcttctcgtgtctggaggaccaggttctgggaagtctcttcttttatcaaagtggattcaattacaacagaagaattcccccaacacactgattctttcccattttgtgggaaggcccatgtcaaccagctcagagtcctccttgattattaaacgactaactctaaagttgatgcagcactcttggtcagtctctgctctgacactggatcctgctaagcttctggaagaatttccacgttggctggaaaaactctctgctcgtcatcaaggcagcatcatcatcgttattgattctatagatcaagttcaggttgtggcctacacttcatcttgatcccttaagtccaaaagatgcaaaatctattataattgcagaatgccactctgtagacattaaattgagtaaagagcaggagaagaagctagaacgacactgtcgttctgctacaacctgcaatgccctttatgtcacccttttcggcaaaatgatcgcgcggtgagtggtgattattttacatgatcttctgcatgttttgtgtttgctgcagaccctttctcaccctgcaaaactgagaactgatcactacaccagtctgttgagccactcagattttatttgaatagtgatactaacatttgtgagaacatggcttacaggtgcctactgtccatgattgtcagaacttgatagatttgtctaattttcttcacactaatctgttccctattggaggttgcaaaagaaagccatcctcaccctcatttgtggcccctagctttgggaaagtgaaggaaacaactgagggttacaatattatttcaggtatctttgaatatcaggaggtagatatatggatatgaatttttaattgtctctgttctcaagtcctgataaactttttaattataaaaatagttctattttagatatccattagtaatctgcctttagataagcattagagtatcactacttttatttcctcagtatagctttaccctattctatctattctcaaccgttagaatgttttactacttttatttcttcttcagtatagcatcactctactttgtcttttctcaatctgaggt

SEQ ID NO: 334964 - DNA, 614 bp, Homo sapiens
ccattccagaagaagatgattttggtgatgttctgtgggacatacatgatgaacaagagcaaatggaaacttttcagcaggcttctaattcagcccatgagttgggatttgagaaatattaccaacgccttaatgatctagtggcagcaccagccccgattccacctcttctcgtgtctggaggaccaggttctgggaagtctcttcttttatcaaagtggattcaattacaacagaagaattcccccaacacactgattctttcccattttgtgggaaggcccatgtcaaccagctcagagtcctccttgattattaaacgactaactctaaagttgatgcagcactcttggtcagtctctgctctgacactggatcctgctaagcttctggaagaatttccacgttggctggaaaaactctctgctcgtcatcaaggcagcatcatcatcgttattgattctatagatcaagttcaggttgtggcctacacttcatcttgatcccttaagtccaaaagatgcgagcaggtgtgtatttttcattttgatgcaatcttttactctctcatctttcctatgaaacatcttatgtgagacttaaaattcaatata

SEQ ID NO: 334965 - DNA, 2170 bp, Homo sapiens
gacgcagatgtgaagggcgctgctctcaggagcagacagaggtggggatgaatcagtacacgcccacctcgggcccacaggggaggatgcgcggagctgtgggtgtggggaggagacccctctgcgtcatgctgacggtgtcggcagagtcgccagcttctgcaggagcggtacctgtgggttcttctgtgacttgtttaaccgcatcttttgcccagtagttagtcttttcctgttgggacaccatgttggtagtttggaaatggtttcttccatccattgcctgccttttagctttgtcgatggtgttctgttgtaaattttggtgcacgtttaatgtgaacaatggttatgagacgagtgccatgagttcctgtgtgcctgtcacccagcccggccacaagaggtgctgggggcagtgtccacacccccctttcttaggacgcctgagtctcagatgtgacttatagggtatttcttatggcaagacagttaaaacaaacttcagcgtctcgtctgtccttctatggctgtggcttctgatgttctaatggcgttctcgtcagccggggctgaggaacaaaataacatagactgtggggcttaaacagcagaaacttacttcccatggttctggaggttgggagtcttggatcaccgtgtagcatggtcaggttcctggtgagggtgggattcctgggctaacgtaacgaaggctccctctcctgataccgtgtcactgggggtgaggcttcaacacaggaattttggggggacacatcagcattcactccatcacaggtggttagccctttaatccacgggaattttgtttggggttgtgtgagatacgggtctaacgttttctttttcaaatacgtagccagttgtcacatcatttattgaaaaaggaatcttttctccaccgactgacatgaaatgctaccatcatcgtaaataaaattcccgtaaatacttgctgtctctgctgtctcagtcctgactcacgggctgagttctctttctgcacagtagcactggcattaactgtgacagctttacagcaggctccctccccgaggccgttcagaagcattcctcagcgggtcctacacgtttcctctcccatgtcaagtttagaagcagtgtcaagacccacagcagtcctgcgggagttttaagggatgcacggagtttatggggacagtttggaaaattgacattcatgtgacttagagtcctactacttgaaaatggattccagctctcaacgaatttagagctttggcaaaatttttaagatttctttgatgtccgatgtgctcatttcttggtttgttcttgagtattttgtggatttttatgaaatccacaaagtttttgttataatgaatgggacactttcccataaaatgttgtaattctgtattgctgttttagtaaacactgttgattgatgtatattgatgttacacttggtcacttgtaatagtttgtccgttcattattttgaactttttaggtaaacagtcatataattatgcaaataattatagttgtgtctctgcctttctaatatttatactttgtgtatattatcatgttggccaggactcaagcgtctttctcttgtttctgactaatgcgaatgattctaatgcaggggtttccaaactggtggccggggggccaaatccagccaatggtctcttcttgtaaataaagttttattggaacacagttacacacatttttctacatattgtctgatggctactgtcacgccacagcaatggtgttaaatagtccagacagaggcggtattgcccgaaaaacctagaatattcaccatctgagcttttacgggaaaatttgctaatatctgttctcatgcattaaatacaatgtttgttacaggttaaggaagtttctgactatttttagctttctgaatatcttgtggttgtgtgtgctttaaaattaggactaaatattaaatttaccagttgcttgttaggggcctatcttttgagatgcccaaagtttcccttttttagtctcttcatgtagtgagttgtactaacagaaggtttttccaggcacgatactgtcctgggtcgaacgagggcagtgtattcgcaattaaggtaatagacagcctcagggcgtt

SEQ ID NO: 334966 - DNA, 655 bp, Homo sapiens
tgagctcaacccattgagctcttcgtgttcgaattcatggactctcatctgttcctatctccttctctttatgaaatgactaatgcgaatgattctaatgcaggggtttccaaactggtggccggggggccaaatccagccaatggtctcttcttgtaaataaagttttattggaacacagttacacacatttttctacatattgtctgatggctactgtcacgccacagcaatggtgttaaatagtccagacagaggcggtattgcccgaaaaacctagaatattcaccatctgagcttttacgggaaaatttgctaatatctgttctcatgcattaaatacaatgtttgttacaggttaaggaagtttctgactatttttagctttctgaatatcttgtggttgtgtgtgctttaaaattaggactaaatattaaatttaccagttgcttgttaggggcctatcttttgagatgcccaaagtttcccttttttagtctcttcatgtagtgagttgtactaacagattctctaatgttgaaccgtctttgctttccggagatagactttacttgctcctggtggattggattctgtttgttaatacttttatttttgggtaattacatccctattataaataatatgtcagcat

SEQ ID NO: 334967 - DNA, 1740 bp, Homo sapiens
gacgcagatgtgaagggcgctgctctcaggagcagacagaggtggggatgaatcagtacacgcccacctcgggcccacaggggaggatgcgcggagctgtgggtgtggggaggagacccctctgcgtcatgctgacggtgtcggcagagtcgccagcttctgcaggagcggtacctgtgggttcttctgtgacttgtttaaccgcatcttttgcccagtagttagtcttttcctgttgggacaccatgttggtagtttggaaatggtttcttccatccattgcctgccttttagctttgtcgatggtgttctgttgtaaattttggtgcacgtttaatgtgaacaatggttatgagacgagtgccatgagttcctgtgtgcctgtcacccagcccggccacaagaggtgctgggggcagtgtccacacccccctttcttaggacgcctgagtctcagatgtgacttatagggtatttcttatggcaagacagttaaaacaaacttcagcgtctcgtctgtccttctatggctgtggcttctgatgttctaatggcgttctcgtcagccggggctgaggaacaaaataacatagactgtggggcttaaacagcagaaacttacttcccatggttctggaggttgggagtcttggatcaccgtgtagcatggtcaggttcctggtgagggtgggattcctgggctaacgtaacgaaggctccctctcctgataccgtgtcactgggggtgaggcttcaacacaggaattttggggggacacatcagcattcactccatcacaggtggttagccctttaatccacgggaattttgtttggggttgtgtgagatacgggtctaacgttttctttttcaaatacgtagccagttgtcacatcatttattgaaaaaggaatcttttctccaccgactgacatgaaatgctaccatcatcgtaaataaaattcccgtaaatacttgctgtctctgctgtctcagtcctgactcacgggctgagttctctttctgcacagtagcactggcattaactgtgacagctttacagcaggctccctccccgaggccgttcagaagcattcctcagcgggtcctacacgtttcctctcccatgtcaagtttagaagcagtgtcaagacccacagcagtcctgcgggagttttaagggatgcacggagtttatggggacagtttggaaaattgacattcatgtgacttagagtcctactacttgaaaatggattccagctctcaacgaatttagagctttggcaaaatttttaagatttctttgatgtccgatgtgctcatttcttggtttgttcttgagtattttgtggatttttatgaaatccacaaagtttttgttataatgaatgggacactttcccataaaatgttgtaattctgtattgctgttttagtaaacactgttgattgatgtatattgatgttacacttggtcacttgtaatagtttgtccgttcattattttgaactttttaggtaaacagtcatataattatgcaaataattatagttgtgtctctgcctttctaatatttatactttgtgtatattatcatgttggccaggactcaagcgtctttctcttgtttctgactaatgcgaatgattctaatgcaggggtttccaaactggtggccggggggccaaatccagccaatggtctcttcttgtaaataaagttttattggaacaca

SEQ ID NO: 334968 - DNA, 2215 bp, Homo sapiens
gacgcagatgtgaagggcgctgctctcaggagcagacagaggtggggatgaatcagtacacgcccacctcgggcccacaggggaggatgcgcggagctgtgggtgtggggaggagacccctctgcgtcatgctgacggtgtcggcagagtcgccagcttctgcaggagcggtacctgtgggttcttctgtgacttgtttaaccgcatcttttgcccagtagttagtcttttcctgttgggacaccatgttggtagtttggaaatggtttcttccatccattgcctgccttttagctttgtcgatggtgttctgttgtaaattttggtgcacgtttaatgtgaacaatggttatgagacgagtgccatgagttcctgtgtgcctgtcacccagcccggccacaagaggtgctgggggcagtgtccacacccccctttcttaggacgcctgagtctcagatgtgacttatagggtatttcttatggcaagacagttaaaacaaacttcagcgtctcgtctgtccttctatggctgtggcttctgatgttctaatggcgttctcgtcagccggggctgaggaacaaaataacatagactgtggggcttaaacagcagaaacttacttcccatggttctggaggttgggagtcttggatcaccgtgtagcatggtcaggttcctggtgagggtgggattcctgggctaacgtaacgaaggctccctctcctgataccgtgtcactgggggtgaggcttcaacacaggaattttggggggacacatcagcattcactccatcacaggtggttagccctttaatccacgggaattttgtttggggttgtgtgagatacgggtctaacgttttctttttcaaatacgtagccagttgtcacatcatttattgaaaaaggaatcttttctccaccgactgacatgaaatgctaccatcatcgtaaataaaattcccgtaaatacttgctgtctctgctgtctcagtcctgactcacgggctgagttctctttctgcacagtagcactggcattaactgtgacagctttacagcaggctccctccccgaggccgttcagaagcattcctcagcgggtcctacacgtttcctctcccatgtcaagtttagaagcagtgtcaagacccacagcagtcctgcgggagttttaagggatgcacggagtttatggggacagtttggaaaattgacattcatgtgacttagagtcctactacttgaaaatggattccagctctcaacgaatttagagctttggcaaaatttttaagatttctttgatgtccgatgtgctcatttcttggtttgttcttgagtattttgtggatttttatgaaatccacaaagtttttgttataatgaatgggacactttcccataaaatgttgtaattctgtattgctgttttagtaaacactgttgattgatgtatattgatgttacacttggtcacttgtaatagtttgtccgttcattattttgaactttttaggtaaacagtcatataattatgcaaataattatagttgtgtctctgcctttctaatatttatactttgtgtatattatcatgttggccaggactcaagcgtctttctcttgtttctgactaatgcgaatgattctaatgcaggggtttccaaactggtggccggggggccaaatccagccaatggtctcttcttgtaaataaagttttattggaacacagttacacacatttttctacatattgtctgatggctactgtcacgccacagcaatggtgttaaatagtccagacagaggcggtattgcccgaaaaacctagaatattcaccatctgagcttttacgggaaaatttgctaatatctgttctcatgcattaaatacaatgtttgttacaggttaaggaagtttctgactatttttagctttctgaatatcttgtggttgtgtgtgctttaaaattaggactaaatattaaatttaccagttgcttgttaggggcctatcttttgagatgcccaaagtttcccttttttagtctcttcatgtagtgagttgtactaacagattctctaatgttgaaccgtctttgctttccggagatagactttacttgctcctggtggattggattctgtttgttaatacttttatttttgggtaattacatccctattataaataatatgtcagcat

SEQ ID NO: 334969 - DNA, 1389 bp, Homo sapiens
agcagggtcggcagtgaagagcagagaaaggcagttggggatgttgccactgtcccccgagaccaccctgccatggagacgagggagctgtcccttcgcggaagggggctggccagcaagaaggacagagagtggactggccgaggaccgctgagctcaggacccaaggaggactcttctaggagacgagagagcgaacgccagggaccctgtgcaggcctgctcctccgtttgcaagcaggctccctccccgaggccgttcagaagcattcctcagcgggtcctacacgtttcctctcccatgtcaagtttagaagcagtgtcaagacccacagcagtcctgcgggagttttaagggatgcacggagtttatggggacagtttggaaaattgacattcatgtgacttagagtcctactacttgaaaatggattccagctctcaacgaatttagagctttggcaaaatttttaagatttctttgatgtccgatgtgctcatttcttggtttgttcttgagtattttgtggatttttatgaaatccacaaagtttttgttataatgaatgggacactttcccataaaatgttgtaattctgtattgctgttttagtaaacactgttgattgatgtatattgatgttacacttggtcacttgtaatagtttgtccgttcattattttgaactttttaggtaaacagtcatataattatgcaaataattatagttgtgtctctgcctttctaatatttatactttgtgtatattatcatgttggccaggactcaagcgtctttctcttgtttctgactaatgcgaatgattctaatgcaggggtttccaaactggtggccggggggccaaatccagccaatggtctcttcttgtaaataaagttttattggaacacagttacacacatttttctacatattgtctgatggctactgtcacgccacagcaatggtgttaaatagtccagacagaggcggtattgcccgaaaaacctagaatattcaccatctgagcttttacgggaaaatttgctaatatctgttctcatgcattaaatacaatgtttgttacaggttaaggaagtttctgactatttttagctttctgaatatcttgtggttgtgtgtgctttaaaattaggactaaatattaaatttaccagttgcttgttaggggcctatcttttgagatgcccaaagtttcccttttttagtctcttcatgtagtgagttgtactaacagattctctaatgttgaaccgtctttgctttccggagatagactttacttgctcctggtggattggattctgtttgttaatacttttatttttgggtaattacatccctattataaataatatgtcagcat

SEQ ID NO: 334970 - DNA, 141 bp, Homo sapiens
tctgagcactagtttaaactcctggtcccacatcggtgcagacctaggcataataatcactgttccatggatgaagggctgtttctttgagacggagtcttgctctgtcatccaggctggagtgcagtggtgtgatctcgg

SEQ ID NO: 334971 - DNA, 310 bp, Homo sapiens
gcggaggttgcagtgagccacaagatctggccaccgcactccaacctgggtgacagagtgagattatctcaaaaaaacaaaaaaaaaaaaacaaaaaaaaaaaaagagaaaaagaaagaaaagaaataaaggatattcacagttataaaagtgtagatagtgaaactagaaatgatttttcttgtactttcctgtatttttcaagttttctgtagaaaaaacttttaaaaaaggatgcaagtattaacagcactttgagagtttctatatcatttttttcactttctagtggaaagccccacccttatgc

SEQ ID NO: 334972 - DNA, 491 bp, Homo sapiens
gcactgttgtatgcaatgcattgacttgtctcttctgcatccagaatgattttggttctatgccatcctcaggagagttgagaagtcactcccatcagcttctgtgttctgcagagtagcactgcactgggaaaggctgcaaggttatttgtgcctgtctttccccctgatggactgtgagcctccctagggcagagaccactttctttttttgtttgtttgtttgctttgagacggagtctggctcggtcacccagggtggagtgtcgtggcgtgatcttggctcactgcaacctccgcctcccaggttcaagtgattctcctgcctcggcctcctgagtagctgggattacaggcgcgagccaccacgcctggctaatttttgtatttttagtagagacggggttttaccatgttggtcaggctggtctcgaactcctgacctcgtgatctgcccgcctaggcctcccaaagtgctgggattacaggcg

SEQ ID NO: 334973 - DNA, 219 bp, Homo sapiens
gctgaggcaggagaatggtgtgaacccaggaggcggaggttgcagtgagccgagattgcgccactacactccagcctgggtgacagagcaagactctgcctcagaaaaaaaaaaaaagatgtcaagatctcagtagtgacagtacaagcaaacacctctcattcccagcacccagcacgggccaaatcagaatttgctgatctggaaaaagagatgtac

SEQ ID NO: 334974 - DNA, 408 bp, Homo sapiens
tggaaccaattcctccaacccacagatactgagggacagctatattgttacatatatatatgaatatatatgtcagcatataaatcacatatgcttggaaatataactaaaaaaaaacttcagaggtctgataacctagaacattagaacatgtatgccccaacagctcagagaactcacatcctgggatgtacatccataaagagctcaaagatcaaacatctcatagggcatgcttttacaaatagatcagaaaattcagatcctatgttaaaaccctcaacaaaggtcaaagacttcacacagtggttcattcaccagtgaacacatcagacatttcacaccatcagacaccacccacaaacagatcagggaattaacatcctgagacatataccaacagatcag

SEQ ID NO: 334975 - DNA, 559 bp, Homo sapiens
gagaaattggaaccctattgttgatgatggtacagccactttggaaaacagtttttctgcctttcctcaaacagttaaaacatagttactatatgatccagtaatttcactcttaagtaaatactcaagagaactgaaaatgtatgtccacacagaaacttatgtgagaatgtgttcagagcatgattcataataatcaaaaagtagacataacccaaatgtccatcatctaatgaatgaataaacaatggaatattttggaatataatgtacattgtatgtacagtagaatatatacaatggagtgttattcagctataaataagagtggaatactgaatcatgttaaacagggaagaaccttgaaaacatgctaagtgaaagaaaataacaaaaggccacatatgcccagaataagtgaaaaaaagatacggaagataacgtagtagttgccagaggttgtgggaggtgaataatgggagctgtctactgtttggtatgtggtttctttttgttatgataaaagtgttctgcaattagatagtggtggtggttgcac

SEQ ID NO: 334976 - DNA, 406 bp, Homo sapiens
atgtctgctcccaaacccaagatccttatagtttcactgaagatcacccttcatctgctcccatgacctcagtccctcctgggccaagaggcagtcctgcatagtgatttggaatgtatcctgaagtcacactgcttagtttgaatcctgccctgccatgcccaagccatgtgccatagagcaactaatttaccaaggtcttgactttagctttaaaatatctgcctcaggtttgttgtgagaagtaaatgtaaagtccttaaaacagtgtctagcaagaaacacaattaatacaagtaatgttattagtcccagtgaggggaagaggaggaatcaagagtataggtgtgcctgaacttaatcaaaactgtgacttgatgacaaaaaggttgccacgcactgagcc

SEQ ID NO: 334977 - DNA, 486 bp, Homo sapiens
agaacaattaacaaacattttggaattaacctgtgtatataggtgcagacaacactctgtttattaaattcttgccttttgtgtgtgtgtgtgtgtgtgtggcttactgttgttttgttttagaatcttggggttgttcaataatagtaaataagacaaaaatgtctgtttctatcatgggcagtatcaacagtttaccatccaatgagagcatcctcctctgcttttctttttctgtcccttttaaattctattatgtctgtttctgaggaactacacagatggcaattatcatgagagtcagttgaatgttggggatactttctccattttactttacatttttttgctgtggccttgcctatactttgattatttttcttagctgctacttcttacatggctatatatgtgtgtgtgtgtgtgtgtgtgtgtgtgtgtgtgtgtgtgtgtgtgtgtattcccccatctgttcatgtgttctca

SEQ ID NO: 334978 - DNA, 587 bp, Homo sapiens
ttttcaaattatgatgtctggtgttgctttcagggtttgtgagatagtcttttgaatgctctcagtgttgactcttgaaagtagatttgattttaaaaaacaatcaagggttctgggccaaatctggtgaactaggggggcggtcaaactgtgtaatgccaagaggggtgactctaatgtatccaggctgatttttcttgagtgaatttgtagtcaccagaaggcactttctgaagacaaactcagacatgaagtaaacatgttataagcatgacatcaagcttgagtttggggaggagagttggaagatggtgactgcgctgaaggaaaccccactcatttgggtatgcaagttttctaggatctcctctacccagaatatttcttcaggtccagatctatcctatttcacaggaccacagttcccagacttacaaggatcctactgccttagtcaacttttaacccccaacctgagtacttccctcccccccgggcaaagacagggtcttgctcttttgtacagtggtgggattacagctcattgcagctttgaactcctgggctcgagtaatcctcccgcctca

SEQ ID NO: 334979 - DNA, 1670 bp, Homo sapiens
acgcgtccgaaagcggccatgttttacatatttcttgattttgtttgttttctcgtgagcttaggccgctggttttggtgatttttgtctgattgcaatgtctggacgtggtaagcaaggaggcaaagctcgcgccaaagcgaaatcccgctcttctcgcgctggtctccagttcccggtgggccgagtgcaccgcctgctccgtaaaggcaactacgcagagcgggttggggcaggcgcgccggtgtacctggcggcggtgttagagtacctgaccgccgagatcctggagctggccggcaacgcggctcgcgacaacaagaagactcgcatcatcccgcgccacttgcagctggccatccgcaacgacgaggagctcaacaaactgctaggccgggtgaccattgctcagggcggcgtccttcctaacatccaggccgtgcttctgcctaagaagaccgagagtcaccacaaggccaagggcaagtgatttgacaggtatctgagctcccggaaacgctatcaaacccaaaggctcttttcagagcccccctaccgtttcaaaggaagagctaacctcactgcttgtaggtagaaggaaaaaaggcactaaggttgcaaaagcttctcatttcagagagatgccaggatcctaagtgcctgccaaacttaccaattctaaggaataagtggatggatggcattactgattcctacattactgattgattctgcatccgcaaattgttttattaaaaacattctacatcatgtgtggggagataaggaggataaaatgaagagaaagaatattattgaggggaagttcttctgaatacaaaatgtgtttaattttttaaataagtattacattcacagggttcaaactatttgaagtaaagagattatatataaagaatccatccctcaacttacccaggtggtcacttttctttttcttgtgtatctgcccagtattcattcctgctgatatcagtcaataatgaatgatacgtgttttcttcacttttttcattcttgtcaggtagcagactgtgtagacttttctgcacttgcccttttcataacaatctatcttggagaactttccctatgagaacatacagagcttcctgtacacagttgcatgtactgcattatgcaaatgcattatattttatgtaacctgtccactgttggtaggcacttgagttgttttagtcttttgctatcaaacagttctgggatgattaaccctgatttactgcaaaattgaaattgctctgctattctgctggaatggtggtaagtgaactgaaaattccagtcactcttgggctagactcaacgttcttaaaaactatgtggccatcaccaaattagttattttgaaccttaatttcttcacctctaaaatggaggtaatacttaccttaagtggctatgagaatgaagatcatgtgtatgaattgttggtgctctaaagaacagcacaaataaaattattttcaaatttaattttaattgaactatgtgtaatttcttaattttgaaataattttatttgtaatgtgcataatcttatttaatgtataatgtatacattgtaatagaaacagatttcccaaattccagcctggcatgaggtaataaaaggtaatgcaaaggga

SEQ ID NO: 334980 - DNA, 1518 bp, Homo sapiens
acgcgtccgaaagcggccatgttttacatatttcttgattttgtttgttttctcgtgagcttaggccgctggttttggtgatttttgtctgattgcaatgtctggacgtggtaagcaaggaggcaaagctcgcgccaaagcgaaatcccgctcttctcgcgctggtctccagttcccggtgggccgagtgcaccgcctgctccgtaaaggcaactacgcagagcgggttggggcaggcgcgccggtgtacctggcggcggtgttagagtacctgaccgccgagatcctggagctggccggcaacgcggctcgcgacaacaagaagactcgcatcatcccgcgccacttgcagctggccatccgcaacgacgaggagctcaacaaactgctaggccgggtgaccattgctcagggcggcgtccttcctaacatccaggccgtgcttctgcctaagaagaccgagagtcaccacaaggccaagggcaagtgatttgacaggtatctgagctcccggaaacgctatcaaacccaaaggctcttttcagagcccccctaccgtttcaaaggaagagctaacctcactgcttgtaggtagaaggaaaaaaggcactaaggttgcaaaagcttctcatttcagagagatgccaggatcctaagtgcctgccaaacttaccaattctaaggaataagtggatggatggcattactgattcctacattactgattgattctgcatccgcaaattgttttattaaaaacattctacatcatgtgtggggagataaggaggataaaatgaagagaaagaatattattgaggggaagttcttctgaatacaaaatgtgtttaattttttaaataagtattacattcacagggttcaaactatttgaagtaaagagattatatataaagaatccatccctcaacttacccaggtggtcacttttctttttcttgtgtatctgcccagtattcattcctgctgatatcagtcaataatgaatgatacgtgttttcttcacttttttcattcttgtcaggtagcagactgtgtagacttttctgcacttgcccttttcataacaatctatcttggagaactttccctatgagaacatacagagcttcctgtacacagttgcatgtactgcattatgcaaatgcattatattttatgtaacctgtccactgttggtaggcacttgagttgttttagtcttttgctatcaaacagttctgggatgattaaccctgatttactgcaaaattgaaattgctctgctattctgctggaatggtggtaagtgaactgaaaattccagtcactcttgggctagactcaacgttcttaaaaactatgtggccatcaccaaattagttattttgaaccttaatttcttcacctctaaaatggaggtaatacttaccttaagtggctatgagaatgaagatcatgtgtatgaattgttggtgctctaaagaacagcacaaataaaattattttcaaatttaa

SEQ ID NO: 334981 - DNA, 1490 bp, Homo sapiens
cccccgggctgcaggaattcggcacagtgagcttaggccgctggttttggtgatttttgtctgattgcaatgtctggacgtggtaagcaaggaggcaaagctcgcgccaaagcgaaatcccgctcttctcgcgctggtctccagttcccggtgggccgagtgcaccgcctgctccgtaaaggcaactacgcagagcgggttggggcaggcgcgccggtgtacctggcggcggtgttagagtacctgaccgccgagatcctggagctggccggcaacgcggctcgcgacaacaagaagactcgcatcatcccgcgccacttgcagctggccatccgcaacgacgaggagctcaacaaactgctaggccgggtgaccattgctcagggcggcgtccttcctaacatccaggccgtgcttctgcctaagaagaccgagagtcaccacaaggccaagggcaagtgatttgacaggtatctgagctcccggaaacgctatcaaacccaaaggctcttttcagagcccccctaccgtttcaaaggaagagctaacctcactgcttgtaggtagaaggaaaaaaggcactaaggttgcaaaagcttctcatttcagagagatgccaggatcctaagtgcctgccaaacttaccaattctaaggaataagtggatggatggcattactgattcctacattactgattgattctgcatccgcaaattgttttattaaaaacattctacatcatgtgtggggagataaggaggataaaatgaagagaaagaatattattgaggggaagttcttctgaatacaaaatgtgtttaattttttaaataagtattacattcacagggttcaaactatttgaagtaaagagattatatataaagaatccatccctcaacttacccaggtggtcacttttctttttcttgtgtatctgcccagtattcattcctgctgatatcagtcaataatgaatgatacgtgttttcttcacttttttcattcttgtcaggtagcagactgtgtagacttttctgcacttgcccttttcataacaatctatcttggagaactttccctatgagaacatacagagcttcctgtacacagttgcatgtactgcattatgcaaatgcattatattttatgtaacctgtccactgttggtaggcacttgagttgttttagtcttttgctatcaaacagttctgggatgattaaccctgatttactgcaaaattgaaattgctctgctattctgctggaatggtggtaagtgaactgaaaattccagtcactcttgggctagactcaacgttcttaaaaactatgtggccatcaccaaattagttattttgaaccttaatttcttcacctctaaaatggaggtaatacttaccttaagtggctatgagaatgaagatcatgtgtatgaattgttggtgctctaaagaacagcacaaataaaattattttcaaatttaa

SEQ ID NO: 334982 - DNA, 1402 bp, Homo sapiens
acgcgtccgaaagcggccatgttttacatatttcttgattttgtttgttttctcgtgagcttaggccgctggttttggtgatttttgtctgattgcaatgtctggacgtggtaagcaaggaggcaaagctcgcgccaaagcgaaatcccgctcttctcgcgctggtctccagttcccggtgggccgagtgcaccgcctgctccgtaaaggcaactacgcagagcgggttggggcaggcgcgccggtgtacctggcggcggtgttagagtacctgaccgccgagatcctggagctggccggcaacgcggctcgcgacaacaagaagactcgcatcatcccgcgccacttgcagctggccatccgcaacgacgaggagctcaacaaactgctaggccgggtgaccattgctcagggcggcgtccttcctaacatccaggccgtgcttctgcctaagaagaccgagagtcaccacaaggccaagggcaagtgatttgacaggttgcaaaagcttctcatttcagagagatgccaggatcctaagtgcctgccaaacttaccaattctaaggaataagtggatggatggcattactgattcctacattactgattgattctgcatccgcaaattgttttattaaaaacattctacatcatgtgtggggagataaggaggataaaatgaagagaaagaatattattgaggggaagttcttctgaatacaaaatgtgtttaattttttaaataagtattacattcacagggttcaaactatttgaagtaaagagattatatataaagaatccatccctcaacttacccaggtggtcacttttctttttcttgtgtatctgcccagtattcattcctgctgatatcagtcaataatgaatgatacgtgttttcttcacttttttcattcttgtcaggtagcagactgtgtagacttttctgcacttgcccttttcataacaatctatcttggagaactttccctatgagaacatacagagcttcctgtacacagttgcatgtactgcattatgcaaatgcattatattttatgtaacctgtccactgttggtaggcacttgagttgttttagtcttttgctatcaaacagttctgggatgattaaccctgatttactgcaaaattgaaattgctctgctattctgctggaatggtggtaagtgaactgaaaattccagtcactcttgggctagactcaacgttcttaaaaactatgtggccatcaccaaattagttattttgaaccttaatttcttcacctctaaaatggaggtaatacttaccttaagtggctatgagaatgaagatcatgtgtatgaattgttggtgctctaaagaacagcacaaataaaattattttcaaatttaa

SEQ ID NO: 334983 - DNA, 1146 bp, Homo sapiens
aatgaccagcgttcatttatttttcctagtcattttgaactgcctgtagcattgatgtaatatagcctcaaacgcacacatacacacacaacactgtgctgtcactacagaaaacttttcctggcagacaggaaagggcccattgttggtaatgtcatgggtcaccagtcgtcacgccgcaccgcgtttcaaaggaagagctaacctcactgcttgtaggtagaaggaaaaaaggcactaaggttgcaaaagcttctcatttcagagagatgccaggatcctaagtgcctgccaaacttaccaattctaaggaataagtggatggatggcattactgattcctacattactgattgattctgcatccgcaaattgttttattaaaaacattctacatcatgtgtggggagataaggaggataaaatgaagagaaagaatattattgaggggaagttcttctgaatacaaaatgtgtttaattttttaaataagtattacattcacagggttcaaactatttgaagtaaagagattatatataaagaatccatccctcaacttacccaggtggtcacttttctttttcttgtgtatctgcccagtattcattcctgctgatatcagtcaataatgaatgatacgtgttttcttcacttttttcattcttgtcaggtagcagactgtgtagacttttctgcacttgcccttttcataacaatctatcttggagaactttccctatgagaacatacagagcttcctgtacacagttgcatgtactgcattatgcaaatgcattatattttatgtaacctgtccactgttggtaggcacttgagttgttttagtcttttgctatcaaacagttctgggatgattaaccctgatttactgcaaaattgaaattgctctgctattctgctggaatggtggtaagtgaactgaaaattccagtcactcttgggctagactcaacgttcttaaaaactatgtggccatcaccaaattagttattttgaaccttaatttcttcacctctaaaatggaggtaatacttaccttaagtggctatgagaatgaagatcatgtgtatgaattgttggtgctctaaagaacagcacaaataaaattattttcaaatttaa

SEQ ID NO: 334984 - DNA, 2365 bp, Homo sapiens
gacaccggctcagggcggatccagccttttccgctcttccctccctccaccccctcctttccctacaactactctcaaaggaaaagggttggatgtcccatttgggtgaaaacaaagtggcataaaagcaaatgatcacctttgatagccacatattagaattttccgagggtatttttaaattacaacgattctaatgggcagctgggctgagaatcatcagatttgaaggtctggtttcacatggctcttgggctgagaagaccggattttcccccccccagcatttcctgtatgtccgagaatttcgatcctaaggttagaattgccttatgggccttggaatcctttttattcactgaccaaattgcctttgattccagctcccttggcctagggcttaatctcttcctacctccatctcttccttgtatgcttttgctcaccttgaaatgaaaagaacctggctcagcaagtgtagattctgaaatcagaaaacaggctgaataagagagatggtttattaggcactactgtgtgccaggcacatttcatgagcttccagtatgttaattcatttaatccaacaatctaagagataggttttatccttattccgaattttgagatgagcaaactaagaaacagttaaagaacttaagttgtaaggccaggaaaacagtacttataacagctgactattctataaccacacctccttaagagattattgtcagaaaaatagaaagagtaaaacatccatacataatgggtaaactttgtccacataccagaatgttactaatggctttctaacctctgaagaatttaagggaaggaggaaaggtaattttccccagggaatctacacgaagaggtaaatcttgacaatgtattaatactgtaaacccagggaaaaaaagccagtacaatttttatttagggtgtggcaaataaaacaaagggacacgtgaaaacatggctcagtaaagagctacaagacttggtgcaactgacttattgtggtgagtgagaaaaggagagagagaaaacttgaatttcaattcttctctctgggctccaataacaagattttgtattcggtctatttagtagtgaatgatacattgtgttaagttgttaacctagaggctttcatcttaagcagtacttaagatgtagaccccctcttattcaaatactgataatcagcatagaacttggcatacaagagacacttggctgttgggcattgagaaaatgttgaactgaatgaatcaatgacttaggcagccaggaagcactttgttgtagagagttggtttattactaaggaagacattaagtattaaatattagactaataggttgctaatagtgttttctctttccaatagaaaatgtcttctgaggctgatctggtgtctcacatctgtaatcccagcacttggggaggctgaggttgcaaaagcttctcatttcagagagatgccaggatcctaagtgcctgccaaacttaccaattctaaggaataagtggatggatggcattactgattcctacattactgattgattctgcatccgcaaattgttttattaaaaacattctacatcatgtgtggggagataaggaggataaaatgaagagaaagaatattattgaggggaagttcttctgaatacaaaatgtgtttaattttttaaataagtattacattcacagggttcaaactatttgaagtaaagagattatatataaagaatccatccctcaacttacccaggtggtcacttttctttttcttgtgtatctgcccagtattcattcctgctgatatcagtcaataatgaatgatacgtgttttcttcacttttttcattcttgtcaggtagcagactgtgtagacttttctgcacttgcccttttcataacaatctatcttggagaactttccctatgagaacatacagagcttcctgtacacagttgcatgtactgcattatgcaaatgcattatattttatgtaacctgtccactgttggtaggcacttgagttgttttagtcttttgctatcaaacagttctgggatgattaaccctgatttactgcaaaattgaaattgctctgctattctgctggaatggtggtaagtgaactgaaaattccagtcactcttgggctagactcaacgttcttaaaaactatgtggccatcaccaaattagttattttgaaccttaatttcttcacctctaaaatggaggtaatacttaccttaagtggctatgagaatgaagatcatgtgtatgaattgttggtgctctaaagaacagcacaaataaaattattttcaaatttaa

SEQ ID NO: 334985 - DNA, 1555 bp, Homo sapiens
ctctgatacagtagccattagccacatgtgatattttaaatttaaataattaagtcaaaaattcagtttcctcagtctcaccacatttcaggttgctggtgtctactgtattggatacacagacatagaacatgtctatcatcacagaaaattctattgcattgcactgggataggtactttttgtgcccttgggctgataagttcaagtgcacttaactagcttcctccaagtggaatcagaggataaatttaccatacaaaatacaggatacccaattatatttgaatttcaaacaggcaacaaataattgcttaagtatgcccctcactgcacacccaaatattacatgagacattctatacatatatatatatatatatatatatttgaaattcagatttaactggacatttggtatttttaatgtgccaaatctagcaaccctatctgaagagcaaaactggagtgtctagtctggataggtccttttacaccacagggagttatttgaggaattgagaagggctgtggtacctgtaaagaactaactcattatgaagaaaaggatctgtaagtttttctgtatgtgtaaggaaggccaagaaggtggtttccagatatatttactttttcttctctctctcttaggttgcaaaagcttctcatttcagagagatgccaggatcctaagtgcctgccaaacttaccaattctaaggaataagtggatggatggcattactgattcctacattactgattgattctgcatccgcaaattgttttattaaaaacattctacatcatgtgtggggagataaggaggataaaatgaagagaaagaatattattgaggggaagttcttctgaatacaaaatgtgtttaattttttaaataagtattacattcacagggttcaaactatttgaagtaaagagattatatataaagaatccatccctcaacttacccaggtggtcacttttctttttcttgtgtatctgcccagtattcattcctgctgatatcagtcaataatgaatgatacgtgttttcttcacttttttcattcttgtcaggtagcagactgtgtagacttttctgcacttgcccttttcataacaatctatcttggagaactttccctatgagaacatacagagcttcctgtacacagttgcatgtactgcattatgcaaatgcattatattttatgtaacctgtccactgttggtaggcacttgagttgttttagtcttttgctatcaaacagttctgggatgattaaccctgatttactgcaaaattgaaattgctctgctattctgctggaatggtggtaagtgaactgaaaattccagtcactcttgggctagactcaacgttcttaaaaactatgtggccatcaccaaattagttattttgaaccttaatttcttcacctctaaaatggaggtaatacttaccttaagtggctatgagaatgaagatcatgtgtatgaattgttggtgctctaaagaacagcacaaataaaattattttcaaatttaa

SEQ ID NO: 334986 - DNA, 993 bp, Homo sapiens
acgcgtccgaaagcggccatgttttacatatttcttgattttgtttgttttctcgtgagcttaggccgctggttttggtgatttttgtctgattgcaatgtctggacgtggtaagcaaggaggcaaagctcgcgccaaagcgaaatcccgctcttctcgcgctggtctccagttcccggtgggccgagtgcaccgcctgctccgtaaaggcaactacgcagagcgggttggggcaggcgcgccggtgtacctggcggcggtgttagagtacctgaccgccgagatcctggagctggccggcaacgcggctcgcgacaacaagaagactcgcatcatcccgcgccacttgcagctggccatccgcaacgacgaggagctcaacaaactgctaggccgggtgaccattgctcagggcggcgtccttcctaacatccaggccgtgcttctgcctaagaagaccgagagtcaccacaaggccaagggcaagtgatttgacaggtatctgagctcccggaaacgctatcaaacccaaaggctcttttcagagcccccctaccgtttcaaaggaagagctaacctcactgcttgtaggtagaaggaaaaaaggcactaagaaaatgtcttctgaggctgatctggtgtctcacatctgtaatcccagcacttggggaggctgaggttgcaaaagcttctcatttcagagagatgccaggatcctaagtgcctgccaaacttaccaattctaaggaataagtggatggatggcattactgattcctacattactgattgattctgcatccgcaaattgttttattaaaaacattctacatcatgtgtggggagataaggaggataaaatgaagagaaagaatattattgaggggaagttcttctgaatacaaaatgtgtttaattttttaaataagtattacattcacagggttcaaactatttgaagtaaagagattatatataaagaatccatccctc

SEQ ID NO: 334987 - DNA, 813 bp, Homo sapiens
acgcgtccgaaagcggccatgttttacatatttcttgattttgtttgttttctcgtgagcttaggccgctggttttggtgatttttgtctgattgcaatgtctggacgtggtaagcaaggaggcaaagctcgcgccaaagcgaaatcccgctcttctcgcgctggtctccagttcccggtgggccgagtgcaccgcctgctccgtaaaggcaactacgcagagcgggttggggcaggcgcgccggtgtacctggcggcggtgttagagtacctgaccgccgagatcctggagctggccggcaacgcggctcgcgacaacaagaagactcgcatcatcccgcgccacttgcagctggccatccgcaacgacgaggagctcaacaaactgctaggccgggtgaccattgctcagggcggcgtccttcctaacatccaggccgtgcttctgcctaagaagaccgagagtcaccacaaggccaagggcaagtgatttgacaggttgcaaaagcttctcatttcagagagatgccaggatcctaagtgcctgccaaacttaccaattctaaggaataagtggatggatggcattactgattcctacattactgattgattctgcatccgcaaattgttttattaaaaacattctacatcatgtgtggggagataaggaggataaaatgaagagaaagaatattattgaggggaagttcttctgaatacaaaatgtgtttaattttttaaataagtattacattcacagggttcaaactatttgaagtaaagagattatatataaagaatccatccctc

SEQ ID NO: 334988 - DNA, 1302 bp, Homo sapiens
tgcaacctccaccccccgggtttaagcgattcttcagcctcagcctcccgagtagctgggaccacagaagcacatcaccatgcccagctaatttttgtatttttagtagagacagggtttcgccatattggccaggctggtctcaaactcccgacctcgtgattctgctattctgctggaatggtggtaagtgaactgaaaattccagtcactcttgggctagactcaacgttcttaaaaactatgtggccatcaccaaattagttattttgaaccttaatttcttcacctctaaaatggaggtaatacttaccttaagtggctatgagaatgaagatcatgtgtatgaattgttggtgctctaaagaacagcacaaataaaattattttcaaatttaattttaattgaactatgtgtaatttcttaattttgaaataattttatttgtaatgtgcataatcttatttaatgtataatgtatacattgtaatagaaacagatttcccaaattccagcctggcatgaggtaataaaaggtaatgcaaagggagaggaaagcatgtgtcattaattttctgcctaggacacctccctggttaaattgccatttcctttcttccttgcataatgattaggaaacacatcctcctgacctgcctgccctcttttgcctactttttcatctgcagtcaaggtctggttttaagactgactgttacttttacaaatctgtgtgtattggtggctaagggcctgtatgggtccactgctgtattcccagggtcccagcatggtgcctgacgctgcctggcaaatagtagtcacccgagaaatggctgatgaattcatgaggcctactctgtatggaaatttcaattctggccccgaattttcaggagctggcaagagagccaccttaatatcataggctgagttggaagaagggaacacccaacttattcttaagaagtactttgcccaggtactgtggcttaggccagtaatcctagcatttggggaagccaagttgggcagatggcttgaacccaggatttcgagatcagcctggacaacatggagaaaccccatctctacaaaatatgtaaaatttaactgcttggtgggcctgcacttctggtcccagctattccagggctagggtgggaggattgtttgatccctggaggtcaaggctgcagtgagccatgatcacagcaatgcgctccagctctgggcaacagagcgagaccctgtctcaaaaaaaacaaaaatgcctatacaataaatctataaaaagtggg

SEQ ID NO: 334989 - DNA, 2221 bp, Homo sapiens
gacaccggctcagggcggatccagccttttccgctcttccctccctccaccccctcctttccctacaactactctcaaaggaaaagggttggatgtcccatttgggtgaaaacaaagtggcataaaagcaaatgatcacctttgatagccacatattagaattttccgagggtatttttaaattacaacgattctaatgggcagctgggctgagaatcatcagatttgaaggtctggtttcacatggctcttgggctgagaagaccggattttcccccccccagcatttcctgtatgtccgagaatttcgatcctaaggttagaattgccttatgggccttggaatcctttttattcactgaccaaattgcctttgattccagctcccttggcctagggcttaatctcttcctacctccatctcttccttgtatgcttttgctcaccttgaaatgaaaagaacctggctcagcaagtgtagattctgaaatcagaaaacaggctgaataagagagatggtttattaggcactactgtgtgccaggcacatttcatgagcttccagtatgttaattcatttaatccaacaatctaagagataggttttatccttattccgaattttgagatgagcaaactaagaaacagttaaagaacttaagttgtaaggccaggaaaacagtacttataacagctgactattctataaccacacctccttaagagattattgtcagaaaaatagaaagagtaaaacatccatacataatgggtaaactttgtccacataccagaatgttactaatggctttctaacctctgaagaatttaagggaaggaggaaaggtaattttccccagggaatctacacgaagaggtaaatcttgacaatgtattaatactgtaaacccagggaaaaaaagccagtacaatttttatttagggtgtggcaaataaaacaaagggacacgtgaaaacatggctcagtaaagagctacaagacttggtgcaactgacttattgtggtgagtgagaaaaggagagagagaaaacttgaatttcaattcttctctctgggctccaataacaagattttgtattcggtctatttagtagtgaatgatacattgtgttaagttgttaacctagaggctttcatcttaagcagtacttaagatgtagaccccctcttattcaaatactgataatcagcatagaacttggcatacaagagacacttggctgttgggcattgagaaaatgttgaactgaatgaatcaatgacttaggcagccaggaagcactttgttgtagagagttggtttattactaaggaagacattaagtattaaatattagactaataggttgctaatagtgttttctctttccaatagaaaatgtcttctgaggctgatctggtgtctcacatctgtaatctcagcctctcaaatgctaggattacaggtatgagccaccgcgcccagtctgataaatctatattaaaaagaataaatataaccattgcatcttcaacagaaattggaatatggcatgtagatttcaaaataaaatgaattctctggcattgaattactgtactcatgttgaagaaatgtcagaacttcattggatgttattatattacagttgtttgtttgagttgtagtttgggcagagtaaaggagccaacatgtcttaggatttagaacttgtgcacattgcctacagttgaaagaagaaagcatgctaaattccagcctctttggtatgtggttgggacgtaaagttttaccacatccttcattgtcttagcctactcaggctgccataacaaaataccagagactggatggcttaaacaacagaatctttttttccatatctaagaggcttggaacagaaattcattttctcacagttttggagcctggaagtttaagatcaaggtgccaacatagtttatggtgagaatctgttcctggctaacagatggctgccatctcactgtgtgtttgtatggtgtttccttggtgcctgcgtggagagagagctctaagtgtctcatcttctgtaaggacaccagccccaatgggattagggccctatcctgtgatctttagttttatgtaccccctaaaggctctatgtccaaatgcagtcacactggggtttagggttttaataaatgaattttggggggacacagtttagtccataa

SEQ ID NO: 334990 - DNA, 419 bp, Homo sapiens
aatacaggatacccaattatatttgaatttcaaacaggcaacaaataattgcttaagtatgcccctcactgcacacccaaatattacatgagacattctatacatatatatatatatatatatatatatatatatatatatatatatatatatatatttgaaattcagatttaactggacatttggtatttttaatgtgccaaatctagcaaccctatctgaagagcaaaactggagtgtctagtctggataggtccttttacaccacagggagttatttgaggaattgagaagggctgtggtacctgtaaagaactaactcattatgaagaaaaggatctgtaagtttttctgtatgtgtaaggaaggccaagaaggtggtttccagatatatttactttttcttctctctctcttag

SEQ ID NO: 334991 - DNA, 384 bp, Homo sapiens
gtttattactaaggaagacattaagtattaaatattagactaataggttgctaatagtgttttctctttccaatagaaaatgtcttctgaggctgatctggtgtctcacatctgtaatcccagcacttggggaggctgaggtgggtagatcacctgaggtcaggagtttgagaccagcctggccaacatggcgaaaccccatctctaataaaactacacaaattagtcaggtgtggcggtgttcacctgtaggcgcctgtagtcccagctactcaggagactgaggcagaagaatcacttgaaccccgggaggtggaggttgtagtgagccaagatcgtgccactgcactccagcctgggcgacaaagtgaaactccgtctcaa

SEQ ID NO: 334992 - DNA, 900 bp, Homo sapiens
acgcgtccgaaagcggccatgttttacatatttcttgattttgtttgttttctcgtgagcttaggccgctggttttggtgatttttgtctgattgcaatgtctggacgtggtaagcaaggaggcaaagctcgcgccaaagcgaaatcccgctcttctcgcgctggtctccagttcccggtgggccgagtgcaccgcctgctccgtaaaggcaactacgcagagcgggttggggcaggcgcgccggtgtacctggcggcggtgttagagtacctgaccgccgagatcctggagctggccggcaacgcggctcgcgacaacaagaagactcgcatcatcccgcgccacttgcagctggccatccgcaacgacgaggagctcaacaaactgctaggccgggtgaccattgctcagggcggcgtccttcctaacatccaggccgtgcttctgcctaagaagaccgagagtcaccacaaggccaagggcaagtgatttgacaggtatctgagctcccggaaacgctatcaaacccaaaggctcttttcagagcccccctaccgtttcaaaggaagagctaacctcactgcttgtaggtagaaggaaaaaaggcactaaggtaagttaattttatgccaaccttgagcaaagcgtattactgcttttcggtttttggggagcgctgttactaaaggttggtctgtttgtatgtaatagtaggtcagttacgtactatcatactctaaagaaatattctagttaatgctttgtaagatcgaccatagttagtgcctaacagtttacatgcagggatgcctcgtgatctaaacacttcgttgtgattactttaaaaatgtaaattgaaggcaaaactctaacgtgttggtaaccttgtttggtcctcc

SEQ ID NO: 334993 - DNA, 2421 bp, Homo sapiens
acgcgtccgaaagcggccatgttttacatatttcttgattttgtttgttttctcgtgagcttaggccgctggttttggtgatttttgtctgattgcaatgtctggacgtggtaagcaaggaggcaaagctcgcgccaaagcgaaatcccgctcttctcgcgctggtctccagttcccggtgggccgagtgcaccgcctgctccgtaaaggcaactacgcagagcgggttggggcaggcgcgccggtgtacctggcggcggtgttagagtacctgaccgccgagatcctggagctggccggcaacgcggctcgcgacaacaagaagactcgcatcatcccgcgccacttgcagctggccatccgcaacgacgaggagctcaacaaactgctaggccgggtgaccattgctcagggcggcgtccttcctaacatccaggccgtgcttctgcctaagaagaccgagagtcaccacaaggccaagggcaagtgatttgacaggtatctgagctcccggaaacgctatcaaacccaaaggctcttttcagagcccccctaccgtttcaaaggaagagctaacctcactgcttgtaggtagaaggaaaaaaggcactaaggttgcaaaagcttctcatttcagagagatgccaggatcctaagtgcctgccaaacttaccaattctaaggaataagtggatggatggcattactgattcctacattactgattgattctgcatccgcaaattgttttattaaaaacattctacatcatgtgtggggagataaggaggataaaatgaagagaaagaatattattgaggggaagttcttctgaatacaaaatgtgtttaattttttaaataagtattacattcacagggttcaaactatttgaagtaaagagattatatataaagaatccatccctcaacttacccaggtggtcacttttctttttcttgtgtatctgcccagtattcattcctgctgatatcagtcaataatgaatgatacgtgttttcttcacttttttcattcttgtcaggtagcagactgtgtagacttttctgcacttgcccttttcataacaatctatcttggagaactttccctatgagaacatacagagcttcctgtacacagttgcatgtactgcattatgcaaatgcattatattttatgtaacctgtccactgttggtaggcacttgagttgttttagtcttttgctatcaaacagttctgggatgattaaccctgatttactgcaaaattgaaattgctctgctattctgctggaatggtggtaagtgaactgaaaattccagtcactcttgggctagactcaacgttcttaaaaactatgtggccatcaccaaattagttattttgaaccttaatttcttcacctctaaaatggaggtaatacttaccttaagtggctatgagaatgaagatcatgtgtatgaattgttggtgctctaaagaacagcacaaataaaattattttcaaatttaattttaattgaactatgtgtaatttcttaattttgaaataattttatttgtaatgtgcataatcttatttaatgtataatgtatacattgtaatagaaacagatttcccaaattccagcctggcatgaggtaataaaaggtaatgcaaagggagaggaaagcatgtgtcattaattttctgcctaggacacctccctggttaaattgccatttcctttcttccttgcataatgattaggaaacacatcctcctgacctgcctgccctcttttgcctactttttcatctgcagtcaaggtctggttttaagactgactgttacttttacaaatctgtgtgtattggtggctaagggcctgtatgggtccactgctgtattcccagggtcccagcatggtgcctgacgctgcctggcaaatagtagtcacccgagaaatggctgatgaattcatgaggcctactctgtatggaaatttcaattctggccccgaattttcaggagctggcaagagagccaccttaatatcataggctgagttggaagaagggaacacccaacttattcttaagaagtactttgcccaggtactgtggcttaggccagtaatcctagcatttggggaagccaagttgggcagatggcttgaacccaggatttcgagatcagcctggacaacatggagaaaccccatctctacaaaatatgtaaaatttaactgcttggtgggcctgcacttctggtcccagctattccagggctagggtgggaggattgtttgatccctggaggtcaaggctgcagtgagccatgatcacagcaatgcgctccagctctgggcaacagagcgagaccctgtctcaaaaaaaacaaaaatgcctatacaataaatctataaaaagtggg

SEQ ID NO: 334994 - DNA, 1582 bp, Homo sapiens
acgcgtccgaaagcggccatgttttacatatttcttgattttgtttgttttctcgtgagcttaggccgctggttttggtgatttttgtctgattgcaatgtctggacgtggtaagcaaggaggcaaagctcgcgccaaagcgaaatcccgctcttctcgcgctggtctccagttcccggtgggccgagtgcaccgcctgctccgtaaaggcaactacgcagagcgggttggggcaggcgcgccggtgtacctggcggcggtgttagagtacctgaccgccgagatcctggagctggccggcaacgcggctcgcgacaacaagaagactcgcatcatcccgcgccacttgcagctggccatccgcaacgacgaggagctcaacaaactgctaggccgggtgaccattgctcagggcggcgtccttcctaacatccaggccgtgcttctgcctaagaagaccgagagtcaccacaaggccaagggcaagtgatttgacaggtatctgagctcccggaaacgctatcaaacccaaaggctcttttcagagcccccctaccgtttcaaaggaagagctaacctcactgcttgtaggtagaaggaaaaaaggcactaagaaaatgtcttctgaggctgatctggtgtctcacatctgtaatcccagcacttggggaggctgaggttgcaaaagcttctcatttcagagagatgccaggatcctaagtgcctgccaaacttaccaattctaaggaataagtggatggatggcattactgattcctacattactgattgattctgcatccgcaaattgttttattaaaaacattctacatcatgtgtggggagataaggaggataaaatgaagagaaagaatattattgaggggaagttcttctgaatacaaaatgtgtttaattttttaaataagtattacattcacagggttcaaactatttgaagtaaagagattatatataaagaatccatccctcaacttacccaggtggtcacttttctttttcttgtgtatctgcccagtattcattcctgctgatatcagtcaataatgaatgatacgtgttttcttcacttttttcattcttgtcaggtagcagactgtgtagacttttctgcacttgcccttttcataacaatctatcttggagaactttccctatgagaacatacagagcttcctgtacacagttgcatgtactgcattatgcaaatgcattatattttatgtaacctgtccactgttggtaggcacttgagttgttttagtcttttgctatcaaacagttctgggatgattaaccctgatttactgcaaaattgaaattgctctgctattctgctggaatggtggtaagtgaactgaaaattccagtcactcttgggctagactcaacgttcttaaaaactatgtggccatcaccaaattagttattttgaaccttaatttcttcacctctaaaatggaggtaatacttaccttaagtggctatgagaatgaagatcatgtgtatgaattgttggtgctctaaagaacagcacaaataaaattattttcaaatttaa

SEQ ID NO: 334995 - DNA, 1438 bp, Homo sapiens
cccccgggctgcaggaattcggcacagtgagcttaggccgctggttttggtgatttttgtctgattgcaatgtctggacgtggtaagcaaggaggcaaagctcgcgccaaagcgaaatcccgctcttctcgcgctggtctccagttcccggtgggccgagtgcaccgcctgctccgtaaaggcaactacgcagagcgggttggggcaggcgcgccggtgtacctggcggcggtgttagagtacctgaccgccgagatcctggagctggccggcaacgcggctcgcgacaacaagaagactcgcatcatcccgcgccacttgcagctggccatccgcaacgacgaggagctcaacaaactgctaggccgggtgaccattgctcagggcggcgtccttcctaacatccaggccgtgcttctgcctaagaagaccgagagtcaccacaaggccaagggcaagtgatttgacagaaaatgtcttctgaggctgatctggtgtctcacatctgtaatcccagcacttggggaggctgaggttgcaaaagcttctcatttcagagagatgccaggatcctaagtgcctgccaaacttaccaattctaaggaataagtggatggatggcattactgattcctacattactgattgattctgcatccgcaaattgttttattaaaaacattctacatcatgtgtggggagataaggaggataaaatgaagagaaagaatattattgaggggaagttcttctgaatacaaaatgtgtttaattttttaaataagtattacattcacagggttcaaactatttgaagtaaagagattatatataaagaatccatccctcaacttacccaggtggtcacttttctttttcttgtgtatctgcccagtattcattcctgctgatatcagtcaataatgaatgatacgtgttttcttcacttttttcattcttgtcaggtagcagactgtgtagacttttctgcacttgcccttttcataacaatctatcttggagaactttccctatgagaacatacagagcttcctgtacacagttgcatgtactgcattatgcaaatgcattatattttatgtaacctgtccactgttggtaggcacttgagttgttttagtcttttgctatcaaacagttctgggatgattaaccctgatttactgcaaaattgaaattgctctgctattctgctggaatggtggtaagtgaactgaaaattccagtcactcttgggctagactcaacgttcttaaaaactatgtggccatcaccaaattagttattttgaaccttaatttcttcacctctaaaatggaggtaatacttaccttaagtggctatgagaatgaagatcatgtgtatgaattgttggtgctctaaagaacagcacaaataaaattattttcaaatttaa

SEQ ID NO: 334996 - DNA, 1438 bp, Homo sapiens
acgcgtccgaaagcggccatgttttacatatttcttgattttgtttgttttctcgtgagcttaggccgctggttttggtgatttttgtctgattgcaatgtctggacgtggtaagcaaggaggcaaagctcgcgccaaagcgaaatcccgctcttctcgcgctggtctccagttcccggtgggccgagtgcaccgcctgctccgtaaaggcaactacgcagagcgggttggggcaggcgcgccggtgtacctggcggcggtgttagagtacctgaccgccgagatcctggagctggccggcaacgcggctcgcgacaacaagaagactcgcatcatcccgcgccacttgcagctggccatccgcaacgacgaggagctcaacaaactgctaggccgggtgaccattgctcagggcggcgtccttcctaacatccaggccgtgcttctgcctaagaagaccgagagtcaccacaaggccaagggcaagtgatttgacaggtatctgagctcccggaaacgctatcaaacccaaaggctcttttcagagcccccctaccgtttcaaaggaagagctaacctcactgcttgtaggtagaaggaaaaaaggcactaagaaaatgtcttctgaggctgatctggtgtctcacatctgtaatctcagcctctcaaatgctaggattacaggtatgagccaccgcgcccagtctgataaatctatattaaaaagaataaatataaccattgcatcttcaacagaaattggaatatggcatgtagatttcaaaataaaatgaattctctggcattgaattactgtactcatgttgaagaaatgtcagaacttcattggatgttattatattacagttgtttgtttgagttgtagtttgggcagagtaaaggagccaacatgtcttaggatttagaacttgtgcacattgcctacagttgaaagaagaaagcatgctaaattccagcctctttggtatgtggttgggacgtaaagttttaccacatccttcattgtcttagcctactcaggctgccataacaaaataccagagactggatggcttaaacaacagaatctttttttccatatctaagaggcttggaacagaaattcattttctcacagttttggagcctggaagtttaagatcaaggtgccaacatagtttatggtgagaatctgttcctggctaacagatggctgccatctcactgtgtgtttgtatggtgtttccttggtgcctgcgtggagagagagctctaagtgtctcatcttctgtaaggacaccagccccaatgggattagggccctatcctgtgatctttagttttatgtaccccctaaaggctctatgtccaaatgcagtcacactggggtttagggttttaataaatgaattttggggggacacagtttagtccataa

SEQ ID NO: 334997 - DNA, 273 bp, Homo sapiens
cagcctggacaacatcatgagaccctgtctctttaaaacacacacacacacacacacacacacgcacacacacgcacacacgtatgcatgtaagaaacccaattcaaaaaggggcaaaggacttgaagagatatttctccaaagacatgtaaatggccgatgaacatgtgaaaagatgctccacatcacacacgcaaacgcacagcacacacaaacgcacagcacacacgcacacacagcacacacacgagcacacagcacacaaacgcacag

SEQ ID NO: 334998 - DNA, 847 bp, Homo sapiens
gattagaaggtacttgataattagggggattagaagaacctcctaatctgagtaatttgaataaactgagggaaattgtggaaaagaaagattacaaggtgatgaaaaagagagtagataatgaagagggtgtaaaaacttataaggtactggaaagggcagccatgaaattcctgaccatggaacccaaactgagagatgacagacttgaaggatatggagaaaaagattcaagttcttggcggagaaggtcatgttcagaagcaagtaaggtagtgagagcggtgagaacaggaaacagttaaagaaggagagctccagagtgaaaatcttgtgtttgatggtcccttcagtgatgctgatgcggttgaggtgtgttatttttatgaatagttgagcagaatggaggtgaagtgggtgagaaagtgtgaaactgtgtgtatgtagttttacaacgtgtctgtaaatcctttgatatttttccctcgtgaagtatagtgtaatttccttctccttaggtatggctagccttagtcatatgtttctaacaaataaaatgcaatgcatatgatgctgtgtgggttctgaggctaggccctaagaggtgatatggcttctgtctgtctctctcttgggatgcttgtcattggaacccagctgctatgctttgaggaagcccagggtacatggagagatctatatacagggacacttaagcctgggaccctcagcctaggctgagctcctggacaaatccagcactagcttagcagtcctggaggtgaaccatctggaaagcagaccctcaaatcttgctccagcttctccacatcagaactcgttagga

SEQ ID NO: 334999 - DNA, 405 bp, Homo sapiens
aagatgaaccctattagcacttcacttctctagctagtactttagccattattcttgtcctttcacaaactttttccattggcagtcataagagtatcttaccctcctgtgctctcagcaatcatttttgccctgctaggagaagatctgaattcatctttgtactatgctctgtctgcgctattgcacactcttggtaagatgctggctgcatggcaagttgtaggttcacactgcctagcagatatgttggctgacctcataccatgcagtctataccagagactagctttagcaacttcctttggaattttaagaccattatctctagatgctgaatattgagaatttactagtaaatttagtgcttctaggacgtagtggggagggataaggaaaaaaata

SEQ ID NO: 335000 - DNA, 3191 bp, Homo sapiens
  misc_feature (122)..(123): n is a, c, g, or t
tgagaaaccctatgaatgtaaagagtgtggggaagcttttaggactagccgtcaacttactgtacatcatagatttcattatggtgagaaaccctacgaatgtaaggaatgtggcaaggccnnagtgtgtatggacgacttagtcgacatcagagtattcacactggtgagaagccctttgaatgtaacaaatgtgggaagtcctttaggctcaaagcaggccttaaagtacatcagagtattcatactggagagaagccacatgaatgtaaggaatgtggaaaggcctttcgtcagttttcccaccttgtgggtcataaaagaattcatactggagaaaaaccctatgaatgcaaggaatgcgggaagggctttacatgtaggtatcaacttaccatgcatcagagaatttattcaggggagaaacactatgaatgtaaagaaaatggggaggcttttagtagtggccatcaacttactgcacctcatacatttgaaagtgttgagaaaccttataagtgtgaggaatgtgggaaagcctttagtgtgcatggacgacttactcgacatcagggtattcatagtggtaagaaaccctatgaatgtaacaaatgtgggaagtcctttaggctcaattcatcccttaaaatacatcaaaatattcataccggtgagaaaccctacaaatgtaaggaatgtgggaaggccttcagtcagcgtgcacaccttgcccatcataacagaattcatactggttacaaaccctttgaatgtaaagaatgtgggaagtcctttcgttgtgcctcatatcttgttatacatgagagaattcatacgggagagaaaccctatgtatgtcaagagtgtgggaagggttttagttatagccataaactcactatacatcgcagagttcatactggtgagaaaccttatgaatgtaaggaatgtgggaaggcctttagtgtatctggacaacttactcagcatctgagtattcacagtggtaagaaaccctttgaatgcaacaaatgcgggaagtcttttaggttcatttctgtacttaaagcccatcagaatattcatagcgctgagaaaccctacgaatgtaaggaatgtggcaaggcctttcgtcatgccacaagcctcatatatcatgaccgaactcatgctggtgaaaagtcctatgaatgtaaagaatgtggggaaacttttagtcatgcttcacatcttattattcatgagagaattcataccagtgataaaccctatgaatgtaaaagatgtgggaaggcatttcactgtgcctcatatcttgttagacatgaaagcgttcatgctgatggaaatccctatatgtgtgaagagtgtgggaaagcttttaatagtagccatgaacttagtatacatcatagagttcatactggtgagaaaccctttaaatgtaacaaatgcagaaggtcctttaggcttagatccatccttgaagtacatcagagaattcatatttgatagagaaattgtggcatatacaggtagtaaagaaagcacattgtgtcaatggatttatcccactgaacaatttgaatgaagacaatgtggaatggctttgagatacagttcagtttttattaggcatcaatttgtattggtgtgaacttttcaaaatgtaaatcatatatgcagtttctttggtatgacctgtgttaactcagattcagagaatttataatgtatttttttaataacataagaaaacttttctgatattcctctagttttggattgccaaaatattcatagtagaggaaaactgagaaaacgtaggaaaccattctttatacttgcatgtaaacatcttccagcaacaatcatttattgttaaacctggaaaaagccattacacaggaaacctctgttgatataagcgatgatgggaaaggctatttagccactctgcatatttaatgctcatgatcaacatctgcttcctatagctgggatgatatgggggaagatatttatcccttctggggatcatatataaatgatgatagtagtacctacagtatagtgctgttagaattacatgagttagatgtggaggtcagagtggaagcaggtgtgagagggtcccgcagaagaaaacatggctgccaaagtgtttgagtccatcggcaagtttggcctggccttagctgttgcaggaggcatggtgaactctgccttatgtaatgtggatgctgggcacagagctgccatctttgaccaattccgtggagtacagaacattgtggtaggggaagggactcactttctcatcccatgtgtacaaaaaccaattatctttgactgctgttctcaaccacgtagtgcgccagtcatcactggtagcaaagatttacagaatgtcaacatcacactgtgcatcctcttccggcccatcactagccagcttcctcgcatcttcaccagcattggagaggactacgatgagtgtgtgctgccgttcattaccacggagatcctcaagtcactggtggctcgctttgatgctggagaactaatcacccagagggagctggtctccagccaggtgagcaacaaccttatggagtgagcagccacctttgggctcattctggacgacgtgtctttgacacatctgaccttcttgaaggagttaacagacaggtggccccccaggaagcagagagcgccagatttgtggtggaaaaggcggccatcatctctgctgagggtgactccaaggcagctgagctgatcgccaactcactggccactgcaggggacggccagagcgagctgtgcaagctggaagctgcagaagacattgcataccagctctcatgctctcggaacatcacctgcctgccggcagggcagtccgtgctcctccagctgccctagtgaggccccagcctacctgcacctccgtgaggcaactgggccacagccccgatgattcgtaacaccacctttcgccctcaccccagaaatcactgaaatttcatgattggcttaaagtgaaggaagtaaaggtaaaatcacttcagatctctaaaaaacaaagaattacatgagttagtacatgaaaaaattatgggaaactacatgaaatatactgttacgttcaataaacattagcttctgtatataataatatcaaa

SEQ ID NO: 335001 - DNA, 1728 bp, Homo sapiens
ccctgcagggtcatttctgaacgcattcccaaatatcctggtcctcaagcccttaccaccccctagcacacgaagccccagctggcggtggagcaggtgtgttgctggtagctcatcgctggcttggagatagaggtgcttggtacctgtcccctttccgacaacacctgaaaccgtatcggggcacacccctcatccaaatatccacgtttaaggtgtccggattcgtttggcttgaccaccccctccccgcgccaaccctggaggcatcttccgtggggtctgtctcttcgaacccaaaggggtacgcgtctgggtgagccaggtccgcctcttccctggcgctggccgggggcgggggtgggtaggctgggacctgtgtctgattagctgggagggggaagccatggtcccaaccgctgtctgctgagctccagtccgtccaggctcttccaggaggaagaggcacgatacaagagaggaggggcaggggtcgcagcactgaacaccctggccggggttttgacagctgccacagtctctgagctccagcctcgcgcctgaacccggtccctgccatggggcccccttccagctcaggcttctatgtgagccgcgcagtggccctgctgctggctgggctggtagccgccctcctgctggcgctggccgtactcgccgccttgtacggccactgcgagcgcgtcccaccgtcggagctgcctggactgcagggacttggaagccgagtcttcccctcccctcaggcagaagccgacgccgaccccgaaacccagcagtgcacgcgagctagcggtgacgaccaccccgagcaactggcgacccccggggccctgggaccagctacgcctgccgccctggctcgtgccgctgcactacgatctggagctgtggccgcagctgaggcccgacgagcttccggccgggtctttgcccttcactggccgcgtgaacatcacggtgcgctgcacggtggccacctctcgactgctgctgcatagcctcttccaggactgcgagcgcgccgaggtgcggggacccctttccccgggcactgggaacgccacagtgggccgcgtgcccgtggacgacgtgtggttcgcgctggacacggaatacatggtgctggagctcagtgagcccctgaaacctggtagcagctacgagctgcagcttagcttctcgggcctggtgaaggaagacctcagggagggactcttcctcaacgtctacaccgaccagggcgagcgcaggtaagggctgtacagcccggggcccctctcggcccccgcccctgcgtcccggtgcaggctgcgggtccagctgactaccgtgtccaggtgcgcgtctgctgccctttccaaagaatccccttgcgacgttttcttttttctttttatttatttattttattatactttaagttctagggtacatgtgcacaacgtgcaggtttgttacatatgtatacgtgtgccatattggtgtgctgcacccattaagaaatatacccattaggtatatctcccaatgcaaactatcgcaaggacaaaaaaccaaacagcgcatgttctcacccataggtaggaattgaacaatgagaacacttggacacaggaaggggaacatcacacaccgcgacgttttctttcaaagccagacagagtgcgagcgcctcctttctcccttttcctataaccttgctcc

SEQ ID NO: 335002 - DNA, 586 bp, Homo sapiens
gcctcctggatgatacaccccttgtatccccaaagtcacatcaaacctggacatcccaactgaaacacatcacctccccaagctgctccctctggggtttaccatgttggtgaccgctgcaatactccctcagtctctcccaggccagagacaggttctgtctcttctgcctccagtcactctgtttccacagcaactggggtaacagaatgaaatgtgatttccctggagtcacttgatcataagagagcccagtggaatcatcacccactaagtaataaaaacacaaatccctccctctacacaaacacctacatgttgacagagcacttgtgcagacattatgtcaccgaattttcacaactccgggcttggatgtcattattcccaatggacacatgagaaaacaggttagagaaatgaaacaattttcttgaggtcaccgattaagaggaagagctgggggcttgaatctagatctcaagactaaaactgtcagcaatctgtatctatcacagtttaaaagactgaggtcaggtgcagtggctcatgcctgtaatcccaacattttgggaggccaaggtgg

SEQ ID NO: 335003 - DNA, 237 bp, Homo sapiens
aatgccaactgtactagctaggctaacactgctaatagactccaccaattgtattaactttgctaatactactaagtattattagtatgctaataataactatgctaacaatacaaaccaacaatactaactatactaactgcactagaaatcctaactaaaaaagttaaatgggaaaaaagaaaaaagtgagaaaaattgcaaagaaaatagatgaaatgggaaaaagaaaaaata

SEQ ID NO: 335004 - DNA, 788 bp, Homo sapiens
aattaatatttgcaccagttgtaaatagttaaaaacaaatcaaaactatagattttgcctggtggtaaagtttttgcaatttcctctgaaaaatgataaagattgatttactttgtgcttattacatggctactgcaaaccaaatccccctattaaagtactttgccaaatagacgataattagaagtaaatctagttgtgggatagtggaaaaattccatgaattttgcagctttaattgtgataataaagtatactgtttgttttacaataaacctgcagtatagtatatcataatctcaaaatgccttttcatcaagtgacatagaaatgtctgaattggacaatgagactttttaaaacaagtatttggctcatttaatatctctttttgggcagaatggaacccagttaagtgtaatattcagtgtttatcttaataagtttaaacttgcagtttaagataacttcaggttggctgtgtttaagctagcaaagaggaactatgtcagggttaatgcatgtatagagaagtaccagtcacttttttgactttataaataaattggaaaaaaaagtttctgcgttgtatttgtaggtttgtgtagtaattgagaacaaagtttcaaaaatcagaactaaatttggatataccttttcaccggttttgggtactccatgtacagtatttgttagaaaggactatatgctcatcgtttggggattaatgttttgtgtgattttctttgtgactgtgggtactaactgtaatgtatgtaaactgccat

SEQ ID NO: 335005 - DNA, 1350 bp, Homo sapiens
cggcaaacagccggggctccagcgggagaacgataatgcaaagtgctatgttcttggctgttcaacacgactgcagacccatggacaagagcgcaggcagtggccacaagagcgaggagaagcgagaaaagatgaaacggacccttttaaaagattggaagacccgtttgagctacttcttacaaaattcctctactcctgggaagcccaaaaccggcaaaaaaagcaaacagcaagctttcatcaagccttctcctgaggaagcacagctgtggtcagaagcatttgacgagctgctagccagcaaatatggtcttgctgcattcagggcttttttaaagtcggaattctgtgaagaaaatattgaattctggctggcctgtgaagacttcaaaaaaaccaaatcaccccaaaagctgtcctcaaaagcaaggaaaatatatactgacttcatagaaaaggaagctccaaaagagataaacatagattttcaaaccaaaactctgattgcccagaatatacaagaagctacaagtggctgctttacaactgcccagaaaagggtatacagcttgatggagaacaactcttatcctcgtttcttggagtcagaattctaccaggacttgtgtaaaaagccacaaatcaccacagagcctcatgctacatgaaatgtaaaagggagcccagaaatggaggacatttcattctttttcctgaggggaaggactgtgacctgccataaagactgaccttgaattcagcctgggtgttcaggaaacatcactcagaactattgattcaaagttgggtagtgaatcaggaagccagtaactgactaggagaagctggtatcagaacagcttccctcactgtgtacagaacgcaagaagggaataggtggtctgaacgtggtgtctcactctgaaaagcaggaatgtaagatgatgaaagagacaatgtaatactgttggtccaaaagcatttaaaatcaatagatctgggattatgtggccttaggtagctggttgtacatctttccctaaatcgatccatgttaccacatagtagttttagtttaggattcagtaacagtgaagtgtttactatgtgcaacggtattgaagttcttatgaccacagatcatcagtactgttgtctcatgtaatgctaaaactgaaatggtccgtgtttgcattgttaaaaatgatgtgtgaaatagaatgagtgctatggtgttgaaaactgcagtgtccgttatgagtgccaaaaatctgtcttgaaggcagctacactttgaagtggtctttgaatacttttaataaatttattttgataaataatattgaa

SEQ ID NO: 335006 - DNA, 955 bp, Homo sapiens
cggcaaacagccggggctccagcgggagaacgataatgcaaagtgctatgttcttggctgttcaacacgactgcagacccatggacaagagcgcaggcagtggccacaagagcgaggagaagcgagaaaagatgaaacggaccctgtgagtatggctttcttccctctcccgccaccccctgccccacactgcaagctgcaaacgcggtactttcgggctcgcctttgacgttaggaaactagcctgagcctatgcagggaaaaaaaatcgaaaaggtcaatttgttaagtaaggttaaatctgggtgatgctcgggtacagtttaagaaccgagggagacagttgatatgagggcggtggttgatgcgctaagaaattgcgggttggctttttgtcctcctgcattcaaaatgacatcagaatcctgcggctgaagcgcgtccccagcattcatacgttgcatgatgagttctcatcagcttacacagctactggaaggtgatgctcttgctggttctgaatatactcgtttaaaatccatttttgttttttaattatagagcagatctcacccagtccgaatgtggaacaaataattgttatgcagcgtctgcttaaaagaagtgtcgtaggtggggaaggaagagcgcaggggaatcagtcacccacctctttgtacagtctctggcgtggtccagaacctcctgctctaaagagagaagcgtgggccggctccagacagttccatgtctgtccttttcattaaagtgcaaaacgtctcggaattgtaattaaccttgcaaacaaactgatgccctttgtgagccagaaatagtgtctgccttttgaactaaattcattaacaattctttaaaataccctagtgattataggtagccctgcccttagttgtaaaactagtagatacggtcagattaatggacgaaactgctc

SEQ ID NO: 335007 - DNA, 320 bp, Homo sapiens
cggcacgaggctgttgtctcatgcaatgcaaacacggaccatttcagttttagcattacatgagacaacagtactgatgatctgtggtcataagaacttcaataccgttgcacatagtaaacacttcactgttactgaatcctaaactgaaatggtccgtgtttgcattgttaaaaatgatgtgtgaaatagaatgagtgctatggtgttgaaaactgcagtgtccgttatgagtgccaaaaatctgtcttgaaggcagctacactttgaagtggtctttgaatacttttaataaatttattttgataaataatattgaa

SEQ ID NO: 335008 - DNA, 1428 bp, Homo sapiens
cggcaaacagccggggctccagcgggagaacgataatgcaaagtgctatgttcttggctgttcaacacgactgcagacccatggacaagagcgcaggcagtggccacaagagcgaggagaagcgagaaaagatgaaacggaccctaatcctgcggctgaagcgcgtccccagcattcatacgttgcatgatgagttctcatcagcttacacagctactggaagtttaaaagattggaagacccgtttgagctacttcttacaaaattcctctactcctgggaagcccaaaaccggcaaaaaaagcaaacagcaagctttcatcaagccttctcctgaggaagcacagctgtggtcagaagcatttgacgagctgctagccagcaaatatggtcttgctgcattcagggcttttttaaagtcggaattctgtgaagaaaatattgaattctggctggcctgtgaagacttcaaaaaaaccaaatcaccccaaaagctgtcctcaaaagcaaggaaaatatatactgacttcatagaaaaggaagctccaaaagagataaacatagattttcaaaccaaaactctgattgcccagaatatacaagaagctacaagtggctgctttacaactgcccagaaaagggtatacagcttgatggagaacaactcttatcctcgtttcttggagtcagaattctaccaggacttgtgtaaaaagccacaaatcaccacagagcctcatgctacatgaaatgtaaaagggagcccagaaatggaggacatttcattctttttcctgaggggaaggactgtgacctgccataaagactgaccttgaattcagcctgggtgttcaggaaacatcactcagaactattgattcaaagttgggtagtgaatcaggaagccagtaactgactaggagaagctggtatcagaacagcttccctcactgtgtacagaacgcaagaagggaataggtggtctgaacgtggtgtctcactctgaaaagcaggaatgtaagatgatgaaagagacaatgtaatactgttggtccaaaagcatttaaaatcaatagatctgggattatgtggccttaggtagctggttgtacatctttccctaaatcgatccatgttaccacatagtagttttagtttaggattcagtaacagtgaagtgtttactatgtgcaacggtattgaagttcttatgaccacagatcatcagtactgttgtctcatgtaatgctaaaactgaaatggtccgtgtttgcattgttaaaaatgatgtgtgaaatagaatgagtgctatggtgttgaaaactgcagtgtccgttatgagtgccaaaaatctgtcttgaaggcagctacactttgaagtggtctttgaatacttttaataaatttattttgataaataatattgaa

SEQ ID NO: 335009 - DNA, 1186 bp, Homo sapiens
cggcaaacagccggggctccagcgggagaacgataatgcaaagtgctatgttcttggctgttcaacacgactgcagacccatggacaagagcgcaggcagtggccacaagagcgaggagaagcgagaaaagatgaaacggaccctatggtcttgctgcattcagggcttttttaaagtcggaattctgtgaagaaaatattgaattctggctggcctgtgaagacttcaaaaaaaccaaatcaccccaaaagctgtcctcaaaagcaaggaaaatatatactgacttcatagaaaaggaagctccaaaagagataaacatagattttcaaaccaaaactctgattgcccagaatatacaagaagctacaagtggctgctttacaactgcccagaaaagggtatacagcttgatggagaacaactcttatcctcgtttcttggagtcagaattctaccaggacttgtgtaaaaagccacaaatcaccacagagcctcatgctacatgaaatgtaaaagggagcccagaaatggaggacatttcattctttttcctgaggggaaggactgtgacctgccataaagactgaccttgaattcagcctgggtgttcaggaaacatcactcagaactattgattcaaagttgggtagtgaatcaggaagccagtaactgactaggagaagctggtatcagaacagcttccctcactgtgtacagaacgcaagaagggaataggtggtctgaacgtggtgtctcactctgaaaagcaggaatgtaagatgatgaaagagacaatgtaatactgttggtccaaaagcatttaaaatcaatagatctgggattatgtggccttaggtagctggttgtacatctttccctaaatcgatccatgttaccacatagtagttttagtttaggattcagtaacagtgaagtgtttactatgtgcaacggtattgaagttcttatgaccacagatcatcagtactgttgtctcatgtaatgctaaaactgaaatggtccgtgtttgcattgttaaaaatgatgtgtgaaatagaatgagtgctatggtgttgaaaactgcagtgtccgttatgagtgccaaaaatctgtcttgaaggcagctacactttgaagtggtctttgaatacttttaataaatttattttgataaataatattgaa

SEQ ID NO: 335010 - DNA, 1604 bp, Homo sapiens
cggcaaacagccggggctccagcgggagaacgataatgcaaagtgctatgttcttggctgttcaacacgactgcagacccatggacaagagcgcaggcagtggccacaagagcgaggagaagcgagaaaagatgaaacggacccttttaaaagattggaagacccgtttgagctacttcttacaaaattcctctactcctgggaagcccaaaaccggcaaaaaaagcaaacagcaagctttcatcaagccttctcctgaggaagcacagctgtggtcagaagcatttgacgagctgctagccagcaaatatggtcttgctgcattcagggcttttttaaagtcggaattctgtgaagaaaatattgaattctggctggcctgtgaagacttcaaaaaaaccaaatcaccccaaaagctgtcctcaaaagcaaggaaaatatatactgacttcatagaaaaggaagctccaaaagaggtaaggaaacaagttcctaatttcagcacaatctggacatctttagcacaaaagtgaaacaaagtaatcaaggacaaagcgggctaggaggggtaaaaagtccctccacgttgtagctttcagttatgttaaagttctcctgtgacttagctagtaaagctaatcacacataatttttattttttgttttcaaatactaaattttaatctttaactctgaataccaaataaacaacttttttgttttatttcagataaacatagattttcaaaccaaaactctgattgcccagaatatacaagaagctacaagtggctgctttacaactgcccagaaaagggtatacagcttgatggagaacaactcttatcctcgtttcttggagtcagaattctaccaggacttgtgtaaaaagccacaaatcaccacagagcctcatgctacatgaaatgtaaaagggagcccagaaatggaggacatttcattctttttcctgaggggaaggactgtgacctgccataaagactgaccttgaattcagcctgggtgttcaggaaacatcactcagaactattgattcaaagttgggtagtgaatcaggaagccagtaactgactaggagaagctggtatcagaacagcttccctcactgtgtacagaacgcaagaagggaataggtggtctgaacgtggtgtctcactctgaaaagcaggaatgtaagatgatgaaagagacaatgtaatactgttggtccaaaagcatttaaaatcaatagatctgggattatgtggccttaggtagctggttgtacatctttccctaaatcgatccatgttaccacatagtagttttagtttaggattcagtaacagtgaagtgtttactatgtgcaacggtattgaagttcttatgaccacagatcatcagtactgttgtctcatgtaatgctaaaactgaaatggtccgtgtttgcattgttaaaaatgatgtgtgaaatagaatgagtgctatggtgttgaaaactgcagtgtccgttatgagtgccaaaaatctgtcttgaaggcagctacactttgaagtggtctttgaatacttttaataaatttattttgataaataatattgaa

SEQ ID NO: 335011 - DNA, 1706 bp, Homo sapiens
cggcaaacagccggggctccagcgggagaacgataatgcaaagtgctatgttcttggctgttcaacacgactgcagacccatggacaagagcgcaggcagtggccacaagagcgaggagaagcgagaaaagatgaaacggacccttttaaaagattggaagacccgtttgagctacttcttacaaaattcctctactcctgggaagcccaaaaccggcaaaaaaagcaaacagcaagctttcatcaagtaagttgagaatcctgtgcttgcaaatatcaatagttagctgctgaactgaaaaggggaactctgatgtgcgtaagctaacatacagaacctctcttgcaggccttctcctgaggaagcacagctgtggtcagaagcatttgacgagctgctagccagcaaatatggtcttgctgcattcagggcttttttaaagtcggaattctgtgaagaaaatattgaattctggctggcctgtgaagacttcaaaaaaaccaaatcaccccaaaagctgtcctcaaaagcaaggaaaatatatactgacttcatagaaaaggaagctccaaaagaggtaaggaaacaagttcctaatttcagcacaatctggacatctttagcacaaaagtgaaacaaagtaatcaaggacaaagcgggctaggaggggtaaaaagtccctccacgttgtagctttcagttatgttaaagttctcctgtgacttagctagtaaagctaatcacacataatttttattttttgttttcaaatactaaattttaatctttaactctgaataccaaataaacaacttttttgttttatttcagataaacatagattttcaaaccaaaactctgattgcccagaatatacaagaagctacaagtggctgctttacaactgcccagaaaagggtatacagcttgatggagaacaactcttatcctcgtttcttggagtcagaattctaccaggacttgtgtaaaaagccacaaatcaccacagagcctcatgctacatgaaatgtaaaagggagcccagaaatggaggacatttcattctttttcctgaggggaaggactgtgacctgccataaagactgaccttgaattcagcctgggtgttcaggaaacatcactcagaactattgattcaaagttgggtagtgaatcaggaagccagtaactgactaggagaagctggtatcagaacagcttccctcactgtgtacagaacgcaagaagggaataggtggtctgaacgtggtgtctcactctgaaaagcaggaatgtaagatgatgaaagagacaatgtaatactgttggtccaaaagcatttaaaatcaatagatctgggattatgtggccttaggtagctggttgtacatctttccctaaatcgatccatgttaccacatagtagttttagtttaggattcagtaacagtgaagtgtttactatgtgcaacggtattgaagttcttatgaccacagatcatcagtactgttgtctcatgtaatgctaaaactgaaatggtccgtgtttgcattgttaaaaatgatgtgtgaaatagaatgagtgctatggtgttgaaaactgcagtgtccgttatgagtgccaaaaatctgtcttgaaggcagctacactttgaagtggtctttgaatacttttaataaatttattttgataaataatattgaa

SEQ ID NO: 335012 - DNA, 1397 bp, Homo sapiens
tattgtttaaaatttgctgagtacaacagtgacctccatcaattttttgagtttctgtacaaccatgggattggaaccctgtcatcccctctgtacattgcctgggcggggcatctggaagcccaaggagagctgcagcatgccagtgctgtccttcagagaggaattcaaaaccaggctgaacccagagagttcctgcaacaacaatacaggttatttcagacacgcctcactgaaacccatttgccagctcaagctagaacctcagaacctctgcataatgttcaggttttaaatcaaatgataacatcaaaatcaaatccaggaaataacatggcctgcatttctaagaatcagggttcagagctttctggagtgatatcttcagcttgtgataaagagtcaaatatggaacgaagagtgatcacgatttctaaatcagaatattctgtgcactcatctttggcatccaaagttgatgttgagcaggttgttatgtattgcaaggagaagcttattcgtggggaatcagaattttcctttgaagaatctgattgcccagaatatacaagaagctacaagtggctgctttacaactgcccagaaaagggtatacagcttgatggagaacaactcttatcctcgtttcttggagtcagaattctaccaggacttgtgtaaaaagccacaaatcaccacagagcctcatgctacatgaaatgtaaaagggagcccagaaatggaggacatttcattctttttcctgaggggaaggactgtgacctgccataaagactgaccttgaattcagcctgggtgttcaggaaacatcactcagaactattgattcaaagttgggtagtgaatcaggaagccagtaactgactaggagaagctggtatcagaacagcttccctcactgtgtacagaacgcaagaagggaataggtggtctgaacgtggtgtctcactctgaaaagcaggaatgtaagatgatgaaagagacaatgtaatactgttggtccaaaagcatttaaaatcaatagatctgggattatgtggccttaggtagctggttgtacatctttccctaaatcgatccatgttaccacatagtagttttagtttaggattcagtaacagtgaagtgtttactatgtgcaacggtattgaagttcttatgaccacagatcatcagtactgttgtctcatgtaatgctaaaactgaaatggtccgtgtttgcattgttaaaaatgatgtgtgaaatagaatgagtgctatggtgttgaaaactgcagtgtccgttatgagtgccaaaaatctgtcttgaaggcagctacactttgaagtggtctttgaatacttttaataaatttattttgataaataatattgaa

SEQ ID NO: 335013 - DNA, 920 bp, Homo sapiens
cggcaaacagccggggctccagcgggagaacgataatgcaaagtgctatgttcttggctgttcaacacgactgcagacccatggacaagagcgcaggcagtggccacaagagcgaggagaagcgagaaaagatgaaacggacccttttaaaagattggaagacccgtttgagctacttcttacaaaattcctctactcctgggaagcccaaaaccggcaaaaaaagcaaacagcaagctttcatcaagccttctcctgaggaagcacagctgtggtcagaagcatttgacgagctgctagccagcaaatatggtcttgctgcattcagggcttttttaaagtcggaattctgtgaagaaaatattgaattctggctggcctgtgaagacttcaaaaaaaccaaatcaccccaaaagctgtcctcaaaagcaaggaaaatatatactgacttcatagaaaaggaagctccaaaagagataaacatagattttcaaaccaaaactctgattgcccagaatatacaagaagctacaagtggctgctttacaactgcccagaaaagggtatacagcttgatgggagcaagatgcgccatcttgctcccatcaggatttcattaatgtatataaatgacaatgctaggattaatgtcttcctatactatccatgtattccccgcccctcctagataccctgtgtcaaacaggaaacttccacagatacagaagaggcatggtacaatgttctaacacatgaaatcaagttaagatttctgttcctcttgatttgggttctcaaacaatcctgtttctctgtattcccaattaaatcttaaaactgctctgagctgagaaagggattcagcagccagactacctttaagcaacatagccctgtgacaacactgatgggagaagatg

SEQ ID NO: 335014 - DNA, 690 bp, Homo sapiens
ctgtggtcagaagcatttgacgagctgctagccagcaaatgtaagttaactcttgagcttgagccattgctaacatcgcaaaagcctggaaaggctgcgtccacctaacaaaagagcagcttgcctgagggggattagactgcagtcactataggataaagcctgtttttctttcctttatttcccagggtttaacaaataaatgcatatattctctccaggtggggaagaaaatcagcctaaacaaattaaagtggcagttgcttatagttaaggttgagtcagtttttccattgcatacaatgttttcaagaggcttagttcccagagaatttatggctcccctataaatatttactttgcattgacagcaaagtacttatatttttgcagcagagtgccaacataagccttttgcctactggtatcttagtctttaaaaagctaaattttgagaattacaggtttgagcgaaatctagaaaattcatttagaaataattaaaatgtgagggataggagaaacataaggaatcatttggtctctcagttcttcacattctgcatgctctcttttctccccccttcagatggtcttgctgcattcagggcttttttaaagtcggaattctgtgaagaaaatattgaattctggctggcctgtgaagacttcaaaaaaaccaaatcaccc

SEQ ID NO: 335015 - DNA, 1704 bp, Homo sapiens
cggcaaacagccggggctccagcgggagaacgataatgcaaagtgctatgttcttggctgttcaacacgactgcagacccatggacaagagcgcaggcagtggccacaagagcgaggagaagcgagaaaagatgaaacggaccctgtgagtatggctttcttccctctcccgccaccccctgccccacactgcaagctgcaaacgcggtactttcgggctcgcctttgacgttaggaaactagcctgagcctatgcagggaaaaaaaatcgaaaaggtcaatttgttaagtaaggttaaatctgggtgatgctcgggtacagtttaagaaccgagggagacagttgatatgagggcggtggttgatgcgctaagaaattgcgggttggctttttgtcctcctgcattcaaaatgacatcagaatcctgcggctgaagcgcgtccccagcattcatacgttgcatgatgagttctcatcagcttacacagctactggaagtttaaaagattggaagacccgtttgagctacttcttacaaaattcctctactcctgggaagcccaaaaccggcaaaaaaagcaaacagcaagctttcatcaagccttctcctgaggaagcacagctgtggtcagaagcatttgacgagctgctagccagcaaatatggtcttgctgcattcagggcttttttaaagtcggaattctgtgaagaaaatattgaattctggctggcctgtgaagacttcaaaaaaaccaaatcaccccaaaagctgtcctcaaaagcaaggaaaatatatactgacttcatagaaaaggaagctccaaaagagataaacatagattttcaaaccaaaactctgattgcccagaatatacaagaagctacaagtggctgctttacaactgcccagaaaagggtatacagcttgatggagaacaactcttatcctcgtttcttggagtcagaattctaccaggacttgtgtaaaaagccacaaatcaccacagagcctcatgctacatgaaatgtaaaagggagcccagaaatggaggacatttcattctttttcctgaggggaaggactgtgacctgccataaagactgaccttgaattcagcctgggtgttcaggaaacatcactcagaactattgattcaaagttgggtagtgaatcaggaagccagtaactgactaggagaagctggtatcagaacagcttccctcactgtgtacagaacgcaagaagggaataggtggtctgaacgtggtgtctcactctgaaaagcaggaatgtaagatgatgaaagagacaatgtaatactgttggtccaaaagcatttaaaatcaatagatctgggattatgtggccttaggtagctggttgtacatctttccctaaatcgatccatgttaccacatagtagttttagtttaggattcagtaacagtgaagtgtttactatgtgcaacggtattgaagttcttatgaccacagatcatcagtactgttgtctcatgtaatgctaaaactgaaatggtccgtgtttgcattgttaaaaatgatgtgtgaaatagaatgagtgctatggtgttgaaaactgcagtgtccgttatgagtgccaaaaatctgtcttgaaggcagctacactttgaagtggtctttgaatacttttaataaatttattttgataaataatattgaa

SEQ ID NO: 335016 - DNA, 1896 bp, Homo sapiens
  misc_feature (1366)..(1366): n is a, c, g, or t
  misc_feature (1896)..(1896): n is a, c, g, or t
cggcaaacagccggggctccagcgggagaacgataatgcaaagtgctatgttcttggctgttcaacacgactgcagacccatggacaagagcgcaggcagtggccacaagagcgaggagaagcgagaaaagatgaaacggacccttttaaaagattggaagacccgtttgagctacttcttacaaaattcctctactcctgggaagcccaaaaccggcaaaaaaagcaaacagcaagctttcatcaagccttctcctgaggaagcacagctgtggtcagaagcatttgacgagctgctagccagcaaatatggtcttgctgcattcagggcttttttaaagtcggaattctgtgaagaaaatattgaattctggctggcctgtgaagacttcaaaaaaaccaaatcaccccaaaagctgtcctcaaaagcaaggaaaatatatactgacttcatagaaaaggaagctccaaaagagataaacatagattttcaaaccaaaactctgattgcccagaatatacaagaagctacaagtggctgctttacaactgcccagaaaagggtatacagcttgatggagaacaactcttatcctcgtttcttggagtcagaattctaccaggacttgtgtaaaaagccacaaatcaccacagagcctcatgctacatgaaatgtaaaagggagcccagaaatggaggacatttcattctttttcctgaggggaaggactgtgacctgccataaagactgaccttgaattcagcctgggtgttcaggaaacatcactcagaactattgattcaaagttgggtagtgaatcaggaagccagtaactgactaggagaagctggtatcagaacagcttccctcactgtgtacagaacgcaagaagggaataggtggtctgaacgtggtgtctcactctgaaaagcaggaatgtaagatgatgaaagagacaatgtaatactgttggtccaaaagcatttaaaatcaatagatctgggattatgtggccttaggtagctggttgtacatctttccctaaatcgatccatgttaccacatagtagttttagtttaggattcagtaacagtgaagtgtttactatgtgcaacggtattgaagttcttatgaccacagatcatcagtactgttgtctcatgtaatgctaaaactgaaatggtccgtgtttgcattgttaaaaatgatgtgtgaaatagaatgagtgctatggtgttgaaaactgcagtgtccgttatgagtgccaaaaatctgtcttgaaggcagctacactttgaagtggtctttgaatacttttaataaatttattttgataaataatattgaaaaaaaaaaaaaaaaanaaaaaaaaaaaaaaagggggggggggcaaaaagataccccctccgagaggggccgcaagtcttaagcgcgcggttacgcccgaggtttttctctgggtcaaaaaggggggggcccctagataaagggaggagaacgcgcaaattaataaaagccagaggacagcggggcccggccgtgtaacacacaaccagttgcgggacgtgggagaaagacgcggtctcagcctggggagatccgttggggaaaggggagaccccctatattcttgcgtgggggggggcgaccctatactgtgggcgaccaaaactatacccttaaggagaagatattttaaagcgcgaccccaagggggaacaattaatttaaacaccttttttcaagggtgtttttacgtgggggtgtttaacaccatgaccggggtatttgtgccctcgccggtcttagaaaaaaatttggtcctcaccagcgaaatatgaatatttggcaataattttttatccgccggacgctgtggctaataataaaagan

SEQ ID NO: 335017 - DNA, 1655 bp, Homo sapiens
  misc_feature (1399)..(1399): n is a, c, g, or t
cggcaaacagccggggctccagcgggagaacgataatgcaaagtgctatgttcttggctgttcaacacgactgcagacccatggacaagagcgcaggcagtggccacaagagcgaggagaagcgagaaaagatgaaacggacccttttaaaagattggaagacccgtttgagctacttcttacaaaattcctctactcctgggaagcccaaaaccggcaaaaaaagcaaacagcaagctttcatcaagccttctcctgaggaagcacagctgtggtcagaagcatttgacgagctgctagccagcaaatatggtcttgctgcattcagggcttttttaaagtcggaattctgtgaagaaaatattgaattctggctggcctgtgaagacttcaaaaaaaccaaatcaccccaaaagctgtcctcaaaagcaaggaaaatatatactgacttcatagaaaaggaagctccaaaagagataaacatagattttcaaaccaaaactctgattgcccagaatatacaagaagctacaagtggctgctttacaactgcccagaaaagggtatacagcttgatggagaacaactcttatcctcgtttcttggagtcagaattctaccaggacttgtgtaaaaagccacaaatcaccacagagcctcatgctacatgaaatgtaaaagggagcccagaaatggaggacatttcattctttttcctgaggggaaggactgtgacctgccataaagactgaccttgaattcagcctgggtgttcaggaaacatcactcagaactattgattcaaagttgggtagtgaatcaggaagccagtaactgactaggagaagctggtatcagaacagcttccctcactgtgtacagaacgcaagaagggaataggtggtctgaacgtggtgtctcactctgaaaagcaggaatgtaagatgatgaaagagacaatgtaatactgttggtccaaaagcatttaaaatcaatagatctgggattatgtggccttaggtagctggttgtacatctttccctaaatcgatccatgttaccacatagtagttttagtttaggattcagtaacagtgaagtgtttactatgtgcaacggtattgaagttcttatgaccacagatcatcagtactgttgtctcatgtaatgctaaaactgaaatggtccgtgtttgcattgttaaaaatgatgtgtgaaatagaatgagtgctatggtgttgaaaactgcagtgtccgttatgagtgccaaaaatctgtcttgaaggcagctacactttgaagtggtctttgaatacttttaataaatttattttgataaataatattgaaaaaaaaaaaaacacctcttattacaaaaaacctaaaaaaaaaaaaaaanaaaacccaaactataataacatcttaaaaaaaaaaaacatggtggcccggttgggccaagcggatttatgacttgggcaaggttatggcatgcggcccgaattcggggtctaattggccaaattgcccttaaaggggggcgatttaaattccaatggcccgcgttttacaaaggtcgaacttggccctgtgggttccccaacttaatcgctttggaagaacaacccctttttcgcggtggggtatatcggggcccc

SEQ ID NO: 335018 - DNA, 1278 bp, Homo sapiens
cggcaaacagccggggctccagcgggagaacgataatgcaaagtgctatgttcttggctgttcaacacgactgcagacccatggacaagagcgcaggcagtggccacaagagcgaggagaagcgagaaaagatgaaacggacccttttaaaagattggaagacccgtttgagctacttcttacaaaattcctctactcctgggaagcccaaaaccggcaaaaaaagcaaacagcaagctttcatcaagccttctcctgaggaagcacagctgtggtcagaagcatttgacgagctgctagccagcaaatatggtcttgctgcattcagggcttttttaaagtcggaattctgtgaagaaaatattgaattctggctggcctgtgaagacttcaaaaaaaccaaatcaccccaaaagctgtcctcaaaagcaaggaaaatatatactgacttcatagaaaaggaagctccaaaagagataaacatagattttcaaaccaaaactctgattgcccagaatatacaagaagctacaagtggctgctttacaactgcccagaaaagggtatacagcttgatggagaacaactcttatcctcgtttcttggagtcagaattctaccaggacttgtgtaaaaagccacaaatcaccacagagcctcatgctacatgaaatgtaaaagggagcccagaaatggaggacatttcattctttttcctgaggggaaggactgtgacctgccataaagactgaccttgaattcagcctgggtgttcaggaaacatcactcagaactattgattcaaagttgggtagtgaatcaggaagccagtaactgactaggagaagctggtatcagaacagcttccctcactgtgtacagaacgcaagaagggaataggtggtctgaacgtggtgtctcactctgaaaagcaggaatgtaagatgatgaaagagacaatgtaatactgttggtccaaaagcatttaaaatcaatagatctgggattatgtggccttaggtagctggttgtacatctttccctaaatcgatccatgttaccacatagtagttttagtttaggattcagtaacagtgaagtgtttactatgtgcaacggtattgaagttcttatgaccacagatcatcagtactgttgtctcatgtaatgctaaaactgaaatggtccgtgtttgcattgcatgagacgacaggagagatgaactgggagcatgtgggctgaggtagctggtggtacatctgaccctaaatcgtttca

SEQ ID NO: 335019 - DNA, 993 bp, Homo sapiens
cggcaaacagccggggctccagcgggagaacgataatgcaaagtgctatgttcttggctgttcaacacgactgcagacccatggacaagagcgcaggcagtggccacaagagcgaggagaagcgagaaaagatgaaacggacccttttaaaagattggaagacccgtttgagctacttcttacaaaattcctctactcctgggaagcccaaaaccggcaaaaaaagcaaacagcaagctttcatcaagccttctcctgaggaagcacagctgtggtcagaagcatttgacgagctgctagccagcaaatatggtcttgctgcattcagggcttttttaaagtcggaattctgtgaagaaaatattgaattctggctggcctgtgaagacttcaaaaaaaccaaatcaccccaaaagctgtcctcaaaagcaaggaaaatatatactgacttcatagaaaaggaagctccaaaagagataaacatagattttcaaaccaaaactctgattgcccagaatatacaagaagctacaagtggctgctttacaactgcccagaaaagggtatacagcttgatggagaacaactcttatcctcgtttcttggagtcagaattctaccaggacttgtgtaaaaagccacaaatcaccacagagcctcatgctacatgaaatgtaaaagggagcccagaaatggaggacatttcattctttttcctgaggggaaggactgtgacctgccataaagactgaccttgaattcagcctgggtgttcaggaaacatcactcagaactattgattcaaagttgggtagtgaatcaggaagccagtaactgactaggagaagctggtatcagaacagcttccctcactgtgtacagaacgcaagaagggaataggtggtctgaacgtggtgtctcactctgaaaagccgcagggtttttccagttcaagaaccaaggtaaaagacgtgctgcgaaagcattgaaaat

SEQ ID NO: 335020 - DNA, 1183 bp, Homo sapiens
atagtattgggcatccttcttatttgtgttatttgatgctgagtgtgagcactttctctgtgtcagggtaagccaatgatctgagtagggcttgataatgccattggagagtctgacaagatcaaagtgtaaatgggagagaagaggaaaagaaggaaagaaatgagagccacatatctactggcaaaaggaaaagtgcaaaatttccaagggcaggctgctgaaggcctgccagagcgggatggaaggcaaaggttgttgaagttatgaatgtctgtttcacagaactaaatatgaacagctttattaaggagatggctcatcccaggataaagacagcaacagatgatatagagaagattacaccaaacaaatctgctgtaaactgcatttacccttaggagatgataaactaaagatgaagggaagggataatgaatgaatgttaagagctaaaaactataaaactcttagaagaaaatatagcagtaaatcaacaaaaccttggattaggcaacagtttctcagatatctcatcaaaagcacaagcgacaaaattaaaaaatagataaattggacttcatcaaagtaaaacttttgcgttccaaagaataccatcaagaaagtaaaaagacaacccacagaatggaagaaaatatttgcaaatcatatatcttaagagaattgtagccagaatataaaaactctcacaactcaacaataaaaaaacaaataactcaattttgaaagtggacaaagggatagacctacaaatgttcaataaacacatgaaaagatactcagtatcattagccatcagggaaatgccagtcaaaaccacaatagataccattttatgcccactagaatggctataagatagataatactaaattttgtcaaagatttggagaaatcaaacccttacacattgttgatgagaatgtaaaatggtacacaatttttggaaaacaatctggcagttcttcagagttaaaacaaaaagttaccttgtgacctagcaatcccattcgaagagagttaaaaacatattttccaacaaaagcttgtacatgaatgtttatagcaacattattcattatggccaaaaagtggaaacagcccaaataaatgttcctcagctgatgagtgggtaaataaacgtggtatgaacttaaaaaaa

SEQ ID NO: 335021 - DNA, 1509 bp, Homo sapiens
aaagtgaattgtttcttgttttggaagggattcagataaataaaaagttaaagatttgccaacaaatacgagaacaaatacaccatttggaggggatcaactaccatacatatccaatgcccaaggaaacaaaaactaattttgcccccaacttacaaagatcaatgaatacagaattcagagagaaagtgtgatattattttctcaaaggcataatgaaaaatttccaaacccaaacatcttggcagacaatggctcaactgaataatcaaaaccccaggaacaatgggccacagatgcagaaagggccctgggtggtcaggtttgtggtggggtgacagcttgccaagcagcaagggcccctctgaagagttctgcagttgtattctttcttcctcaggatttaggtcacaggagatggtcctgctttaaaccaccaaccttcaaaccacctccaaagctgtcaatgcctggaggaactccagtctttgtctgtggtagggcagacaaagctgactggaagttggaaagcatattttattacatatgtgtttgttttttgacaggatggaaggcaaaggttgttgaagttatgaatgtctgtttcacagaactaaatatgaacagctttattaaggagatggctcatcccaggataaagacagcaacagatgatatagagaagattacaccaaacaaatctgctgtaaactgcatttacccttaggagatgataaactaaagatgaagggaagggataatgaatgaatgttaagagctaaaaactataaaactcttagaagaaaatatagcagtaaatcaacaaaaccttggattaggcaacagtttctcagatatctcatcaaaagcacaagcgacaaaattaaaaaatagataaattggacttcatcaaagtaaaacttttgcgttccaaagaataccatcaagaaagtaaaaagacaacccacagaatggaagaaaatatttgcaaatcatatatcttaagagaattgtagccagaatataaaaactctcacaactcaacaataaaaaaacaaataactcaattttgaaagtggacaaagggatagacctacaaatgttcaataaacacatgaaaagatactcagtatcattagccatcagggaaatgccagtcaaaaccacaatagataccattttatgcccactagaatggctataagatagataatactaaattttgtcaaagatttggagaaatcaaacccttacacattgttgatgagaatgtaaaatggtacacaatttttggaaaacaatctggcagttcttcagagttaaaacaaaaagttaccttgtgacctagcaatcccattcgaagagagttaaaaacatattttccaacaaaagcttgtacatgaatgtttatagcaacattattcattatggccaaaaagtggaaacagcccaaataaatgttcctcagctgatgagtgggtaaataaacgtggtatgaacttaaaaaaa

SEQ ID NO: 335022 - DNA, 1001 bp, Homo sapiens
  misc_feature (56)..(56): n is a, c, g, or t
  misc_feature (58)..(58): n is a, c, g, or t
aatctacattctagtggctgcggtacattcaaatagaaattcacaaccacccttgngngatggaaggcaaaggttgttgaagttatgaatgtctgtttcacagaactaaatatgaacagctttattaaggagatggctcatcccaggataaagacagcaacagatgatatagagaagattacaccaaacaaatctgctgtaaactgcatttacccttaggagatgataaactaaagatgaagggaagggataatgaatgaatgttaagagctaaaaactataaaactcttagaagaaaatatagcagtaaatcaacaaaaccttggattaggcaacagtttctcagatatctcatcaaaagcacaagcgacaaaattaaaaaatagataaattggacttcatcaaagtaaaacttttgcgttccaaagaataccatcaagaaagtaaaaagacaacccacagaatggaagaaaatatttgcaaatcatatatcttaagagaattgtagccagaatataaaaactctcacaactcaacaataaaaaaacaaataactcaattttgaaagtggacaaagggatagacctacaaatgttcaataaacacatgaaaagatactcagtatcattagccatcagggaaatgccagtcaaaaccacaatagataccattttatgcccactagaatggctataagatagataatactaaattttgtcaaagatttggagaaatcaaacccttacacattgttgatgagaatgtaaaatggtacacaatttttggaaaacaatctggcagttcttcagagttaaaacaaaaagttaccttgtgacctagcaatcccattcgaagagagttaaaaacatattttccaacaaaagcttgtacatgaatgtttatagcaacattattcattatggccaaaaagtggaaacagcccaaataaatgttcctcagctgatgagtgggtaaataaacgtggtatgaacttaaaaaaa

SEQ ID NO: 335023 - DNA, 924 bp, Homo sapiens
tcgtctggtagccggatcgctgagtgtactgggtggtactgagtcctagacgtatcgggatatgttcgggtacagaaagtgcggtgttgaagtcctcgctgccactctgtttttagatctgccaagactgacctttgaactttcctgtagtcaatcttcctcgatctaccagatgggagagacccttggacaactttataaactcctgtttgccttttttggatcagcgacagcccccatcgctgtgactattggggaaaagacgaagctctttcataaattccatggagaggaatcaatatcccactggaaggctagaaatggacaagatagtgtatttgcaatcacaaacaaaaccctagtgatgaaaaataatttgtgatggcagatgcttctgatggtgtgatagaatatgtttttgaaaacaaaccatcgaaccccccgccccacccccaaaacgggcttccctgtgtttagggagctttgggctagaactagctacgatttttaggtgaaatgtccttgtaattgtacaaagcacttggtgcagtgtttgcgtggagcagcctgctgctttctgatgcattccctgtttaagtgcgtttaacatctacctcacaagccctgaaaccccaggcaaaacccacagaaagctcatacccggtgcaggagtttgccatcccaagtggctttttttccatatgtagccaaaaaggattgcagatagcgtcggtgcgtcccattcgaaccttgtcacgtttgagctatctttaccctgtgatttacttttagtaagggtgatcatggtgaaaatatttgcagacagctgttacagtacactatatggtcaccaagtaaccttatatttttctttatatattttacaaatgtaacccctgtcattgaagcaaccgtggaagaggc

SEQ ID NO: 335024 - DNA, 149 bp, Homo sapiens
tctcacctcagctgaaaccatggcagcaagaaagacatgggtggtttatctgggatttgtattttctacattaatgcttcctccagtaacgaggttaattgagagttgacagtaattgctgtatgtgagcatgaagccctaaatatgat

SEQ ID NO: 335025 - DNA, 336 bp, Homo sapiens
cacaagctctgagatccaacagcaggccgtgaatctcagctccaccttggaggagctgtgtgaccttgggcatgttcctgaacctctctgggcctcagtttcctaacccacagaatggactggtaacaataccagttctcaggggcttcacgtagatgtgggcacacagcaagtaccatcacccagggccaccccagtcagctccagacaccagggtgagcagcctgagaaatcgtgacataaacaggcactggggacacacttcagtaccagggtctcagcctcacttcctgcctgcccccaaagggcagctctgctcttgtacccatgcccagg

SEQ ID NO: 335026 - DNA, 461 bp, Homo sapiens
cacatagttttcactttttcattcatttgttaatacgacaggtatttcctgagcacctaatatacaccaggcactgttctaggtactggagatgaagaaacccctgctcttacggttcttcataattaacatttggagactctatacaagcacatgtgttgttggggacttaaattcagtttgttgtatgaataagaaaagccatgattgatatgagagccaccagctttccgtgtcttcatatcagcttctgacctgtaattgtctccggtcccagggagaagatagcattcttcacaaggccaaggatcaacatacctcctctcccagccgacgacgtctgatggagtgcattgtgcacatgaagtatttatccacctgttttattttcatgaagttcttagactagctgaatttgtctttaaaatatttgtgcaaagctattaatatacacattttgt

SEQ ID NO: 335027 - DNA, 3314 bp, Homo sapiens
cacatagttttcactttttcattcatttgttaatacgacaggtatttcctgagcacctaatatacaccaggcactgttctaggtactggagatgaagaaacccctgctcttacggttcttcataattaacatttggagactctatacaagcacatgtgttgttggggacttaaattcagtttgttgtatgaataagaaaagccatgattgatatgagagccaccagctttccgtgtcttcatatcagcttctgacctgtaattgtctccggtcccagggagaagatagcattcttcacaaggccaaggatcaacatacctcctctcccagccgacgacgtctgatggagtgcattgtgcacatgaagtatttatccacctgttttattttcatgaagttcttagactagctgaatttgtctttaaaatatttgtgcaaagctattaatatacacattttgtaaaaaaaaaaaaaaaacacgtatatctatacatatatattttataatagtgacggcaacagggcttggtttttccttgttgtgaaatcgacatctctgaagacaggttattttataaaagatcaactatcatgttaagaatgtacagtttttatgctgttttatttgacttaaaggctggaagacagaaacgaagtgagttcaggcaaattcactgtattgtaatttatttatagtacttttttttccttgaaggaaaatactgactttaagatgtattttaagactgaaattttgttctttagtacttttcatgcagtagaacggaacttggggctggtttggtttttgacacctgaaatgcgaacgctatgtgctaaatttgtcaccgtatcatatgtgcatttaccatgtatattgtacacattcactcccttgatgtcatgttaaaatgtcccctgcagtggttcaatcgtgactcggaagcatgtgtgtgttgcagaggtcagtctctggcgtgggccgcacgccaaccgctcatttctgtgttgcctttggaagcatctttctgtgctcagcgtgagtctgaagcaggcgccagggcctctggtgtacggggcttcagcctgcttgcttgtggtggctgtctgtggggcttcagcctgactgtccgtggtggctgtccatgctgcccgcctccccccaccccgccctgtccgactgtaacagaccaggagggtggcggaggaactcctgccacgccactgtgtcatgaaggaaagtgaaagggaacgaggaagtaggaatgcccacgctcgttgactccgtgggtgaatacagcagttaggacatacacaccatcacctttgaaagtgcttgtttgggggagggaaggacatacgggtaactagaactacccagcgagtcgtccagaggagaggatcaggtttgagtcaggaggctccctgtactggagtcgtcccactattcctcaagaaatcttagaaccagcttgtgaggaaaaacattttttaatgtaataaaaatatgccattattctttgaaatgccaaatgatataaatattttgcctaatacatatttattgtagatgaaatgcactcttctcgatgaggcctcgatttgaatcaatggggtgggccacaggaaatgtcagaggaaccagaactcagaactcttcctcctggacctttcttcccttcccttggaggtatccctttgaatcaggcctctctcttctcatcagtctgtagcttccccccttgtataacctgctttcctttttacatttattaaaagtggattttgtaaaagcatttcattgacacgcgacctatcacagacaatggaattcgtcagtggtggtaagactgaaatcctgatgcttttcacacttcttgtctcttgctatgtatttctgcctctagccttgccatgttttgccttttttttttctttttggccaattcctttttatatgtgcccacaacagaggtggggagacacggagcaccctgggtccttcccagcgctgctgggcaggccccgtctccaggccccagctgttgaaactttgaagggcaacaaacaaccatccacactgccggaccctaggctgttcagggaggcagctcatttccaccccggccccaggacacccagcctgtgccccacaaggatctctctaaatgggagggattgaggctacttttctgccaagccctattaagtagtaatgtggggaaacccactgtgtcagtgcaggaagccctagacaaatgttttcaaataaatttcactgcccagcctgcacagatttccatttgaagtacttcccatccaccctgacacccaaaggggtttttttgttttgttttgtttttgagacagggtcttgctttgttgcccaggctggagtgcagtgacgtggtcatagctcactgcagcctcaacctcctgggctcaagtgaccctcctgcctcagcctcccaaagttctgagatgataggcatgagccattgtgcctagcctattttgatttttttcttagagtcaaggtcttgctctgttgcccaggctgatcttggacttgcgagccaccatgcctggctgggttttttaaaaatagaatctcactgatagcctgcaagaaacagatgcagtgcctgcttccgtatcagtccaaggagccctcgtgtttgccacctttacctttgaacctccccctgcctccctgcctgtgtccgcttttgcagctcaatgcagccatgacaaggaaagaaaagacaaaggaaggccagagagccgcgcagttctctgcaggtgcagatgcaggcagtggaggtggcctgagcaggcagaaggacaccaagcgccctatgttgcttgtcattcatgacgtggtcttggagcttctgactagttcagactgccacgccaaccccagaaaataccccacatgccagaaaagtgaagtcctaggtgtttccatctatgtttcaatctgtccatctaccaggcctcgcgataaaaacaaaacaaaaaaacgctgccaggttttagaagcagttctggtctcaaaaccatcaggatcctgccaccagggttcttttgaaatagtaccacatgtaaaagggaatttggctttcacttcatctaatcactgaattgtcaggctttgattgataattgtagaaataagtagccttctgttgtgggaataagttataatcagtattcatctctttgttttttgtcactcttttctctctaattgtgtcatttgtactgtttgaaaaatatttcttctataaaattaaactaacctgccttaa

SEQ ID NO: 335028 - DNA, 1008 bp, Homo sapiens
actaagttctagatcgcgagcggccgcccttgggtttttttgttttgttttgtttttgagacagggtcttgctttgttgcccaggctggagtgcagtgacgtggtcatagctcactgcagcctcaacctcctgggctcaagtgaccctcctgcctcagcctcccaaagttctgagatgataggcatgagccattgtgcctagcctattttgatttttttcttagagtcaaggtcttgctctgttgcccaggctgatcttggacttgcgagccaccatgcctggctgggttttttaaaaatagaatctcactgatagcctgcaagaaacagatgcagtgcctgcttccgtatcagtccaaggagccctcgtgtttgccacctttacctttgaacctccccctgcctccctgcctgtgtccgcttttgcagctcaatgcagccatgacaaggaaagaaaagacaaaggaaggccagagagccgcgcagttctctgcaggtgcagatgcaggcagtggaggtggcctgagcaggcagaaggacaccaagcgccctatgttgcttgtcattcatgacgtggtcttggagcttctgactagttcagactgccacgccaaccccagaaaataccccacatgccagaaaagtgaagtcctaggtgtttccatctatgtttcaatctgtccatctaccaggcctcgcgataaaaacaaaacaaaaaaacgctgccaggttttagaagcagttctggtctcaaaaccatcaggatcctgccaccagggttcttttgaaatagtaccacatgtaaaagggaatttggctttcacttcatctaatcactgaattgtcaggctttgattgataattgtagaaataagtagccttctgttgtgggaataagttataatcagtattcatctctttgttttttgtcactcttttctctctaattgtgtcatttgtactgtttgaaaaatatttcttctataaaattaaactaacctgccttaa

SEQ ID NO: 335029 - DNA, 7125 bp, Homo sapiens
gcggccgcccccgcgccccgggcgccgggccttagtgctggcgcgggcccgggagagcgccgagctgccgctgcccgccggctgggaggaggcgcgagactacgacggtcgcgtcttttacattgaccacaacacgcgccagacgtcgtggatcgacccccgcgaccggataacaaagccattgacctttgccgattgtgttggggacgaacttcctttaggatgggaaaccgtatatgataaacaaattggagtttattacatggaccacataaataaacttacccagattgaggatccaagagaacagtggaggcgagagcaagagcgcatgttgaaggaatatttaattgtagctcaggaggctctcaatgccaagaaagaaatctaccagattaagcagcagcggttcgagctggcccaggaggaataccagcagctgcacaaaatgtgtgaggatgacagccgctcgtacgccagctcattctctggatattcaacaaatacaaagtatgacccacaccaaattaaagcagaaatagcaagtcgtcgggataggctttccagattaaaacgagagctgacccagatgaagcaggaactgcagtacaaagaaaagggggtggagaccctgcaagagattgatcggaagatgtcaagtactcacaccagctacaaactggatgaggcgcaggctatcatgagtgagctccggaccatcaagaaggccatttgcacaggcgagaaggagaggcgggacctgatgcatagcctggccaagctgaccgatagcttcaagaacagctgctccgttaccgactctctagtggacttccctcaccatgtaggcgtgcctggcgatgctggtgtaccccagcagttctgcgatgccggctcccagactgatatcatcggggagtttgtctttgatgataaaacaagacttgtagaccgagtcagacttaattggcaatatgaagaagccagaaagagagtcgccaacatccagcagcagctggcccggcttgacaatgagtcctggccaagcacggccgaggctgacagggaccggctgcagctcatcaaggagaaggaggccctgctgcaggagcttcagctcatcattgcacagcgccgctctgcgggagatgtggcccggctggaggaggagcgggagcgcctagaggaggagctgcggcgtgcacgggccacctccgcacagggcgccacggagaggattctgcttcaggaaaaaaggaattgtctacttatgcagctggaagaagccacccgcttaacatcctacctccagtcccagttaaaaagcctgtgtgccagcaccctgacggtgtcctcggggagcagccgcgggtccctagcctccagccgtgggtctctggcctccagccggggctccctgagctcggtcagcttcacggacatctacggcctcccgcagtacgagaagcccgacgctgagggcagccagcttctacgcttcgacctcattcccttcgactctctggggcgagatgctcccttttcagagcccccaggcccctcgggcttccacaagcagaggcggtccctggacacgccccagtccctggcatcgctgtcctcccgctcctcgctgtcctcgctgtcgcccccaagctcgcccctggacacgcccttcctccctgcctcacgggactcgccgctggcgcagctggcggacagctgtgaggggccaggcctgggcgccctagacagactgcgggcacacgcctcggctatgggggacgaagacttaccaggcatggcggcccttcagccacacggggtccccggggacggggaagggccgcacgagcgaggacccccaccagccagcgctcccgtgggtggaacagtgactcttcgagaagacagtgccaagaggttggagaggagggcacgccgcatctccgcatgtctgtcggattattcgctagccagcgacagtggggtgtttgaacctctaaccaaaaggaacgaagatgccgaggagcctgcctacggagacacggccagtaacggagatccccagatccacgtgggactcctgcgcgacagtggcagcgagtgtctcctcgtgcacgtgctgcagctgaagaacccggcggggctggcggtgaaggaagactgcaaagtccacatccgagtctatttgcccccactggactcgggcacgcccaacacttactgctccaaggctctggagttccaagtgccgctggtgtttaacgaagtgttcagaatccccgtgcattccagcgcgttgacactgaagtcacttcagttatacgtgtgttcagtgactccgcagctgcaggaagaactgctgggcattgctcagattaacctggctgactatgacagtttgagtgagatgcagctgcgctggcattccgtgcaggtgttcaccagctctgaaccatcaaggacgcgggaggctgggtgtgcaggagagagctccgcccgggaccctgcacacaccatctccatctccggcaagacggatgcggtgacggtgctcctggccagaaccacggcacagctgcaggcggtggagagggaactggccgaggagcgggccaagctggagtacacggaggaggaggtcctggagatggagcgcaaggaggagcaggccgaggccatatccgagcggagttggcaagcggactcggtggatagcggctgtagcaactgcacccagaccagccctccgtacccagagccctgttgcatgggtatcgactccatcctgggccacccatttgctgctcaggcagggccttacagccccgagaaatttcagccctcgcctcttaaggttgataaggaaaccaacacggaagatctctttctggaagaagcagccagcctcgtgaaggagcggcccagccgccgggcccgagggtcgccttttgttcggagtggcacgattgtccgttcccagacattctcgcctggagcacgaagccagtatgtttgcagactttatcgtagtgacagcgacagttcaacgctgccccggaagtccccctttgtccgaaatactttggaaagacgaacccttcgctataagcagtcatgcaggtcttccctggctgagctcatggcccgcacctccctggacttggagctggatctccaggcgtcgagaacacggcagaggcagctgaatgaggagctctgcgccctccgtgagctgcggcagcggttggaggacgcccagctccgtggccagactgacctcccaccctgggtgcttcgggacgagcggctccgtggcctgctgcgggaggccgagcggcagacaagacagaccaaacttgactaccgtcatgagcaggcggctgagaagatgctgaagaaggcctccaaggagatctaccagctgcgtgggcagagccacaaagagcccatccaagtgcagacctttagggagaagatagcattcttcacaaggccaaggatcaacatacctcctctcccagccgacgacgtctgatggagtgcattgtgcacatgaagtatttatccacctgttttattttcatgaagttcttagactagctgaatttgtctttaaaatatttgtgcaaagctattaatatacacattttgtaaaaaaaaaaaaaaaacacgtatatctatacatatatattttataatagtgacggcaacagggcttggtttttccttgttgtgaaatcgacatctctgaagacaggttattttataaaagatcaactatcatgttaagaatgtacagtttttatgctgttttatttgacttaaaggctggaagacagaaacgaagtgagttcaggcaaattcactgtattgtaatttatttatagtacttttttttccttgaaggaaaatactgactttaagatgtattttaagactgaaattttgttctttagtacttttcatgcagtagaacggaacttggggctggtttggtttttgacacctgaaatgcgaacgctatgtgctaaatttgtcaccgtatcatatgtgcatttaccatgtatattgtacacattcactcccttgatgtcatgttaaaatgtcccctgcagtggttcaatcgtgactcggaagcatgtgtgtgttgcagaggtcagtctctggcgtgggccgcacgccaaccgctcatttctgtgttgcctttggaagcatctttctgtgctcagcgtgagtctgaagcaggcgccagggcctctggtgtacggggcttcagcctgcttgcttgtggtggctgtctgtggggcttcagcctgactgtccgtggtggctgtccatgctgcccgcctccccccaccccgccctgtccgactgtaacagaccaggagggtggcggaggaactcctgccacgccactgtgtcatgaaggaaagtgaaagggaacgaggaagtaggaatgcccacgctcgttgactccgtgggtgaatacagcagttaggacatacacaccatcacctttgaaagtgcttgtttgggggagggaaggacatacgggtaactagaactacccagcgagtcgtccagaggagaggatcaggtttgagtcaggaggctccctgtactggagtcgtcccactattcctcaagaaatcttagaaccagcttgtgaggaaaaacattttttaatgtaataaaaatatgccattattctttgaaatgccaaatgatataaatattttgcctaatacatatttattgtagatgaaatgcactcttctcgatgaggcctcgatttgaatcaatggggtgggccacaggaaatgtcagaggaaccagaactcagaactcttcctcctggacctttcttcccttcccttggaggtatccctttgaatcaggcctctctcttctcatcagtctgtagcttccccccttgtataacctgctttcctttttacatttattaaaagtggattttgtaaaagcatttcattgacacgcgacctatcacagacaatggaattcgtcagtggtggtaagactgaaatcctgatgcttttcacacttcttgtctcttgctatgtatttctgcctctagccttgccatgttttgccttttttttttctttttggccaattcctttttatatgtgcccacaacagaggtggggagacacggagcaccctgggtccttcccagcgctgctgggcaggccccgtctccaggccccagctgttgaaactttgaagggcaacaaacaaccatccacactgccggaccctaggctgttcagggaggcagctcatttccaccccggccccaggacacccagcctgtgccccacaaggatctctctaaatgggagggattgaggctacttttctgccaagccctattaagtagtaatgtggggaaacccactgtgtcagtgcaggaagccctagacaaatgttttcaaataaatttcactgcccagcctgcacagatttccatttgaagtacttcccatccaccctgacacccaaaggggtttttttgttttgttttgtttttgagacagggtcttgctttgttgcccaggctggagtgcagtgacgtggtcatagctcactgcagcctcaacctcctgggctcaagtgaccctcctgcctcagcctcccaaagttctgagatgataggcatgagccattgtgcctagcctattttgatttttttcttagagtcaaggtcttgctctgttgcccaggctgatcttggacttgcgagccaccatgcctggctgggttttttaaaaatagaatctcactgatagcctgcaagaaacagatgcagtgcctgcttccgtatcagtccaaggagccctcgtgtttgccacctttacctttgaacctccccctgcctccctgcctgtgtccgcttttgcagctcaatgcagccatgacaaggaaagaaaagacaaaggaaggccagagagccgcgcagttctctgcaggtgcagatgcaggcagtggaggtggcctgagcaggcagaaggacaccaagcgccctatgttgcttgtcattcatgacgtggtcttggagcttctgactagttcagactgccacgccaaccccagaaaataccccacatgccagaaaagtgaagtcctaggtgtttccatctatgtttcaatctgtccatctaccaggcctcgcgataaaaacaaaacaaaaaaacgctgccaggttttagaagcagttctggtctcaaaaccatcaggatcctgccaccagggttcttttgaaatagtaccacatgtaaaagggaatttggctttcacttcatctaatcactgaattgtcaggctttgattgataattgtagaaataagtagccttctgttgtgggaataagttataatcagtattcatctctttgttttttgtcactcttttctctctaattgtgtcatttgtactgtttgaaaaatatttcttctataaaattaaactaacctgccttaaaaaacaaagaaaagaaaaagaacaaaaaacacaaaatacaaaacaaaaagaaacaaaagagaacaaaaaaaaaacacaagaaacacagacacagcaaaagacaagaaagacaaacaaaaaagaagaaaagaaacaaaggacaaggggcaacgacagacaaaaaaacagaagaaacaacataccaaaagaaacacccccagaggaacggacagagaggcagaaccaagtagacccgacagatgccagggagaaggagacacatcaccacgcacacaaagagcacagtcaaagcaacaagacagagaagaccaaggcctcactcacaaaccaaacgaacagcggcccgccgggagcagagaggcaggaaggcgaagaacacaaaaaagaaacaacagagagaccagccgccaccacacgccccaccgcgcaggaaacaatagcaacgaaccgccagccccagtggacgaacggcaaaaaaaacctcccaacattgcgccaacgccgaccgcgaggaggataacaacacgaagatgacacaaagcaaccaaagaacaagtacacccacaccaccaacacaacactgcagccaccgacccgacgcgcgccgaagaaaa

SEQ ID NO: 335030 - DNA, 465 bp, Homo sapiens
gcggccgcctactactactaaattaaaagccgctcgacggagcttctgactagttcagactgccacgccaaccccagaaaataccccacatgccagaaaagtgaagtcctaggtgtttccatctatgtttcaatctgtccatctaccaggcctcgcgataaaaacaaaacaaaaaaacgctgccaggttttagaagcagttctggtctcaaaaccatcaggatcctgccaccagggttcttttgaaatagtaccacatgtaaaagggaatttggctttcacttcatctaatcactgaattgtcaggctttgattgataattgtagaaataagtagccttctgttgtgggaataagttataatcagtattcatctctttgttttttgtcactcttttctctctaattgtgtcatttgtactgtttgaaaaatatttcttctataaaattaaactaacctgccttaa

SEQ ID NO: 335031 - DNA, 437 bp, Homo sapiens
tgctgcgggaggccgagcggcaggtgggggtcccctgtggccagctcccgcctgcacctcactgctccctgctccaggctctgaagggagcctcccagacacggaggtggtccctgaaataccccaccactgggctcttggagtcccttctccctctgtgggctgcgagggtggcgtctgtgtggcttctgcgtgcatctggaggctgcgggtgctggaggaggggtcacgggccctccccaccttgttgggggaacattctgggtccccagtcgctaggcctgactgcagccaccccctggcctctgtctcctgggaggaattccttggggggagtgtgggtgaggtgggccttactccctcctgtcaccactcactgactgtggttggttcttctgggctccagggttggcagtgaacttactcattcttcctta

SEQ ID NO: 335032 - DNA, 569 bp, Homo sapiens
cggttccctcacgtcacccgctgtccggcgcctgggaactgggctcctggaatttcctctcctggggctgacagatggccctcttttcctttctctgcggcagcctcgcccatcccggtcccgggcgtctgcggcccactgccccggccctggttctgcaggtgtccccagccccgcggtggcgagatgagctgtcaccttggatcacaaacgtgcgccccagctttggggtgcgggttccctgtctggcgggttcaggctggtttccatccaaaacctgatgtcagacgggcccttgagggattcccaacccttttggagttggagaagtctgttcccaaactctagttgctctttagcgccttaaaactcgtgagttaaaactgtttgaaatagccttctgtactgcagccagaatgcaatatgattagtcccatatgcttttggaataaacgaaaaacaagaattgtattttaagtttcctttttgtgaaagatatgcatggggtacaaagctgtcttattcacgtataaaaacccaatcaagtaaaaactgattcttgtaaaagc

SEQ ID NO: 335033 - DNA, 6511 bp, Homo sapiens
gcggccgcccccgcgccccgggcgccgggccttagtgctggcgcgggcccgggagagcgccgagctgccgctgcccgccggctgggaggaggcgcgagactacgacggtcgcgtcttttacattgaccacaacacgcgccagacgtcgtggatcgacccccgcgaccggataacaaagccattgacctttgccgattgtgttggggacgaacttcctttaggatgggaaaccgtatatgataaacaaattggagtttattacatggaccacataaataaacttacccagattgaggatccaagagaacagtggaggcgagagcaagagcgcatgttgaaggaatatttaattgtagctcaggaggctctcaatgccaagaaagaaatctaccagattaagcagcagcggttcgagctggcccaggaggaataccagcagctgcacaaaatgtgtgaggatgacagccgctcgtacgccagctcattctctggatattcaacaaatacaaagtatgacccacaccaaattaaagcagaaatagcaagtcgtcgggataggctttccagattaaaacgagagctgacccagatgaagcaggaactgcagtacaaagaaaagggggtggagaccctgcaagagattgatcggaagatgtcaagtactcacaccagctacaaactggatgaggcgcaggctatcatgagtgagctccggaccatcaagaaggccatttgcacaggcgagaaggagaggcgggacctgatgcatagcctggccaagctgaccgatagcttcaagaacagctgctccgttaccgactctctagtggacttccctcaccatgtaggcgtgcctggcgatgctggtgtaccccagcagttctgcgatgccggctcccagactgatatcatcggggagtttgtctttgatgataaaacaagacttgtagaccgagtcagacttaattggcaatatgaagaagccagaaagagagtcgccaacatccagcagcagctggcccggcttgacaatgagtcctggccaagcacggccgaggctgacagggaccggctgcagctcatcaaggagaaggaggccctgctgcaggagcttcagctcatcattgcacagcgccgctctgcgggagatgtggcccggctggaggaggagcgggagcgcctagaggaggagctgcggcgtgcacgggccacctccgcacagggcgccacggagaggattctgcttcaggaaaaaaggaattgtctacttatgcagctggaagaagccacccgcttaacatcctacctccagtcccagttaaaaagcctgtgtgccagcaccctgacggtgtcctcggggagcagccgcgggtccctagcctccagccgtgggtctctggcctccagccggggctccctgagctcggtcagcttcacggacatctacggcctcccgcagtacgagaagcccgacgctgagggcagccagcttctacgcttcgacctcattcccttcgactctctggggcgagatgctcccttttcagagcccccaggcccctcgggcttccacaagcagaggcggtccctggacacgccccagtccctggcatcgctgtcctcccgctcctcgctgtcctcgctgtcgcccccaagctcgcccctggacacgcccttcctccctgcctcacgggactcgccgctggcgcagctggcggacagctgtgaggggccaggcctgggcgccctagacagactgcgggcacacgcctcggctatgggggacgaagacttaccaggcatggcggcccttcagccacacggggtccccggggacggggaagggccgcacgagcgaggacccccaccagccagcgctcccgtgggtggaacagtgactcttcgagaagacagtgccaagaggttggagaggagggcacgccgcatctccgcatgtctgtcggattattcgctagccagcgacagtggggtgtttgaacctctaaccaaaaggaacgaagatgccgaggagcctgcctacggagacacggccagtaacggagatccccagatccacgtgggactcctgcgcgacagtggcagcgagtgtctcctcgtgcacgtgctgcagctgaagaacccggcggggctggcggtgaaggaagactgcaaagtccacatccgagtctatttgcccccactggactcgggcacgcccaacacttactgctccaaggctctggagttccaagtgccgctggtgtttaacgaagtgttcagaatccccgtgcattccagcgcgttgacactgaagtcacttcagttatacgtgtgttcagtgactccgcagctgcaggaagaactgctgggcattgctcagattaacctggctgactatgacagtttgagtgagatgcagctgcgctggcattccgtgcaggtgttcaccagctctgaaccatcaaggacgcgggaggctgggtgtgcaggagagagctccgcccgggaccctgcacacaccatctccatctccggcaagacggatgcggtgacggtgctcctggccagaaccacggcacagctgcaggcggtggagagggaactggccgaggagcgggccaagctggagtacacggaggaggaggtcctggagatggagcgcaaggaggagcaggccgaggccatatccgagcggagttggcaagcggactcggtggatagcggctgtagcaactgcacccagaccagccctccgtacccagagccctgttgcatgggtatcgactccatcctgggccacccatttgctgctcaggcagggccttacagccccgagaaatttcagccctcgcctcttaaggttgataaggaaaccaacacggaagatctctttctggaagaagcagccagcctcgtgaaggagcggcccagccgccgggcccgagggtcgccttttgttcggagtggcacgattgtccgttcccagacattctcgcctggagcacgaagccagtatgtttgcagactttatcgtagtgacagcgacagttcaacgctgccccggaagtccccctttgtccgaaatactttggaaagacgaacccttcgctataagcagtcatgcaggtcttccctggctgagctcatggcccgcacctccctggacttggagctggatctccaggcgtcgagaacacggcagaggcagctgaatgaggagctctgcgccctccgtgagctgcggcagcggttggaggacgcccagctccgtggccagactgacctcccaccctgggtgcttcgggacgagcggctccgtggcctgctgcgggaggccgagcggcagacaagacagaccaaacttgactaccgtcatgagcaggcggctgagaagatgctgaagaaggcctccaaggagatctaccagctgcgtgggcagagccacaaagagcccatccaagtgcagacctttagggagaagatagcattcttcacaaggccaaggatcaacatacctcctctcccagccgacgacgtctgatggagtgcattgtgcacatgaagtatttatccacctgttttattttcatgaagttcttagactagctgaatttgtctttaaaatatttgtgcaaagctattaatatacacattttgtaaaaaaaaaaaaaaaacacgtatatctatacatatatattttataatagtgacggcaacagggcttggtttttccttgttgtgaaatcgacatctctgaagacaggttattttataaaagatcaactatcatgttaagaatgtacagtttttatgctgttttatttgacttaaaggctggaagacagaaacgaagtgagttcaggcaaattcactgtattgtaatttatttatagtacttttttttccttgaaggaaaatactgactttaagatgtattttaagactgaaattttgttctttagtacttttcatgcagtagaacggaacttggggctggtttggtttttgacacctgaaatgcgaacgctatgtgctaaatttgtcaccgtatcatatgtgcatttaccatgtatattgtacacattcactcccttgatgtcatgttaaaatgtcccctgcagtggttcaatcgtgactcggaagcatgtgtgtgttgcagaggtcagtctctggcgtgggccgcacgccaaccgctcatttctgtgttgcctttggaagcatctttctgtgctcagcgtgagtctgaagcaggcgccagggcctctggtgtacggggcttcagcctgcttgcttgtggtggctgtctgtggggcttcagcctgactgtccgtggtggctgtccatgctgcccgcctccccccaccccgccctgtccgactgtaacagaccaggagggtggcggaggaactcctgccacgccactgtgtcatgaaggaaagtgaaagggaacgaggaagtaggaatgcccacgctcgttgactccgtgggtgaatacagcagttaggacatacacaccatcacctttgaaagtgcttgtttgggggagggaaggacatacgggtaactagaactacccagcgagtcgtccagaggagaggatcaggtttgagtcaggaggctccctgtactggagtcgtcccactattcctcaagaaatcttagaaccagcttgtgaggaaaaacattttttaatgtaataaaaatatgccattattctttgaaatgccaaatgatataaatattttgcctaatacatatttattgtagatgaaatgcactcttctcgatgaggcctcgatttgaatcaatggggtgggccacaggaaatgtcagaggaaccagaactcagaactcttcctcctggacctttcttcccttcccttggaggtatccctttgaatcaggcctctctcttctcatcagtctgtagcttccccccttgtataacctgctttcctttttacatttattaaaagtggattttgtaaaagcatttcattgacacgcgacctatcacagacaatggaattcgtcagtggtggtaagactgaaatcctgatgcttttcacacttcttgtctcttgctatgtatttctgcctctagccttgccatgttttgccttttttttttctttttggccaattcctttttatatgtgcccacaacagaggtggggagacacggagcaccctgggtccttcccagcgctgctgggcaggccccgtctccaggccccagctgttgaaactttgaagggcaacaaacaaccatccacactgccggaccctaggctgttcagggaggcagctcatttccaccccggccccaggacacccagcctgtgccccacaaggatctctctaaatgggagggattgaggctacttttctgccaagccctattaagtagtaatgtggggaaacccactgtgtcagtgcaggaagccctagacaaatgttttcaaataaatttcactgcccagcctgcacagatttccatttgaagtacttcccatccaccctgacacccaaaggggtttttttgttttgttttgtttttgagacagggtcttgctttgttgcccaggctggagtgcagtgacgtggtcatagctcactgcagcctcaacctcctgggctcaagtgaccctcctgcctcagcctcccaaagttctgagatgataggcatgagccattgtgcctagcctattttgatttttttcttagagtcaaggtcttgctctgttgcccaggctgatcttggacttgcgagccaccatgcctggctgggttttttaaaaatagaatctcactgatagcctgcaagaaacagatgcagtgcctgcttccgtatcagtccaaggagccctcgtgtttgccacctttacctttgaacctccccctgcctccctgcctgtgtccgcttttgcagctcaatgcagccatgacaaggaaagaaaagacaaaggaaggccagagagccgcgcagttctctgcaggtgcagatgcaggcagtggaggtggcctgagcaggcagaaggacaccaagcgccctatgttgcttgtcattcatgacgtggtcttggagcttctgactagttcagactgccacgccaaccccagaaaataccccacatgccagaaaagtgaagtcctaggtgtttccatctatgtttcaatctgtccatctaccaggcctcgcgataaaaacaaaacaaaaaaacgctgccaggttttagaagcagttctggtctcaaaaccatcaggatcctgccaccagggttcttttgaaatagtaccacatgtaaaagggaatttggctttcacttcatctaatcactgaattgtcaggctttgattgataattgtagaaataagtagccttctgttgtgggaataagttataatcagtattcatctctttgttttttgtcactcttttctctctaattgtgtcatttgtactgtttgaaaaatatttcttctataaaattaaactaacctgccttaa

SEQ ID NO: 335034 - DNA, 3658 bp, Homo sapiens
gcggccgcccccgcgccccgggcgccgggccttagtgctggcgcgggcccgggagagcgccgagctgccgctgcccgccggctgggaggaggcgcgagactacgacggtcgcgtcttttacattgaccacaacacgcgccagacgtcgtggatcgacccccgcgaccggataacaaagccattgacctttgccgattgtgttggggacgaacttcctttaggatgggaaaccgtatatgataaacaaattggagtttattacatggaccacataaataaacttacccagattgaggatccaagagaacagtggaggcgagagcaagagcgcatgttgaaggaatatttaattgtagctcaggaggctctcaatgccaagaaagaaatctaccagattaagcagcagcggttcgagctggcccaggaggaataccagcagctgcacaaaatgtgtgaggatgacagccgctcgtacgccagctcattctctggatattcaacaaatacaaagtatgacccacaccaaattaaagcagaaatagcaagtcgtcgggataggctttccagattaaaacgagagctgacccagatgaagcaggaactgcagtacaaagaaaagggggtggagaccctgcaagagattgatcggaagatgtcaagtactcacaccagctacaaactggatgaggcgcaggctatcatgagtgagctccggaccatcaagaaggccatttgcacaggcgagaaggagaggcgggacctgatgcatagcctggccaagctgaccgatagcttcaagaacagctgctccgttaccgactctctagtggacttccctcaccatgtaggcgtgcctggcgatgctggtgtaccccagcagttctgcgatgccggctcccagactgatatcatcggggagtttgtctttgatgataaaacaagacttgtagaccgagtcagacttaattggcaatatgaagaagccagaaagagagtcgccaacatccagcagcagctggcccggcttgacaatgagtcctggccaagcacggccgaggctgacagggaccggctgcagctcatcaaggagaaggaggccctgctgcaggagcttcagctcatcattgcacagcgccgctctgcgggagatgtggcccggctggaggaggagcgggagcgcctagaggaggagctgcggcgtgcacgggccacctccgcacagggcgccacggagaggattctgcttcaggaaaaaaggaattgtctacttatgcagctggaagaagccacccgcttaacatcctacctccagtcccagttaaaaagcctgtgtgccagcaccctgacggtgtcctcggggagcagccgcgggtccctagcctccagccgtgggtctctggcctccagccggggctccctgagctcggtcagcttcacggacatctacggcctcccgcagtacgagaagcccgacgctgagggcagccagcttctacgcttcgacctcattcccttcgactctctggggcgagatgctcccttttcagagcccccaggcccctcgggcttccacaagcagaggcggtccctggacacgccccagtccctggcatcgctgtcctcccgctcctcgctgtcctcgctgtcgcccccaagctcgcccctggacacgcccttcctccctgcctcacgggactcgccgctggcgcagctggcggacagctgtgaggggccaggcctgggcgccctagacagactgcgggcacacgcctcggctatgggggacgaagacttaccaggcatggcggcccttcagccacacggggtccccggggacggggaagggccgcacgagcgaggacccccaccagccagcgctcccgtgggtggaacagtgactcttcgagaagacagtgccaagaggttggagaggagggcacgccgcatctccgcatgtctgtcggattattcgctagccagcgacagtggggtgtttgaacctctaaccaaaaggaacgaagatgccgaggagcctgcctacggagacacggccagtaacggagatccccagatccacgtgggactcctgcgcgacagtggcagcgagtgtctcctcgtgcacgtgctgcagctgaagaacccggcggggctggcggtgaaggaagactgcaaagtccacatccgagtctatttgcccccactggactcgggcacgcccaacacttactgctccaaggctctggagttccaagtgccgctggtgtttaacgaagtgttcagaatccccgtgcattccagcgcgttgacactgaagtcacttcagttatacgtgtgttcagtgactccgcagctgcaggaagaactgctgggcattgctcagattaacctggctgactatgacagtttgagtgagatgcagctgcgctggcattccgtgcaggtgttcaccagctctgaaccatcaaggacgcgggaggctgggtgtgcaggagagagctccgcccgggaccctgcacacaccatctccatctccggcaagacggatgcggtgacggtgctcctggccagaaccacggcacagctgcaggcggtggagagggaactggccgaggagcgggccaagctggagtacacggaggaggaggtcctggagatggagcgcaaggaggagcaggccgaggccatatccgagcggagttggcaagcggactcggtggatagcggctgtagcaactgcacccagaccagccctccgtacccagagccctgttgcatgggtatcgactccatcctgggccacccatttgctgctcaggcagggccttacagccccgagaaatttcagccctcgcctcttaaggttgataaggaaaccaacacggaagatctctttctggaagaagcagccagcctcgtgaaggagcggcccagccgccgggcccgagggtcgccttttgttcggagtggcacgattgtccgttcccagacattctcgcctggagcacgaagccagtatgtttgcagactttatcgtagtgacagcgacagttcaacgctgccccggaagtccccctttgtccgaaatactttggaaagacgaacccttcgctataagcagtcatgcaggtcttccctggctgagctcatggcccgcacctccctggacttggagctggatctccaggcgtcgagaacacggcagaggcagctgaatgaggagctctgcgccctccgtgagctgcggcagcggttggaggacgcccagctccgtggccagactgacctcccaccctgggtgcttcgggacgagcggctccgtggcctgctgcgggaggccgagcggcagacaagacagaccaaacttgactaccgtcatgagcaggcggctgagaagatgctgaagaaggcctccaaggagatctaccagctgcgtgggcagagccacaaagagcccatccaagtgcagacctttagggagaagatagcattcttcacaaggccaaggatcaacatacctcctctcccagccgacgacgtctgatggagtgcattgtgcacatgaagtatttatccacctgttttattttcatgaagttcttagactagctgaatttgtctttaaaatatttgtgcaaagctattaatatacacattttgt

SEQ ID NO: 335035 - DNA, 5609 bp, Homo sapiens
gcggccgcccccgcgccccgggcgccgggccttagtgctggcgcgggcccgggagagcgccgagctgccgctgcccgccggctgggaggaggcgcgagactacgacggtcgcgtcttttacattgaccacaacacgcgccagacgtcgtggatcgacccccgcgaccggataacaaagccattgacctttgccgattgtgttggggacgaacttcctttaggatgggaaaccgtatatgataaacaaattggagtttattacatggaccacataaataaacttacccagattgaggatccaagagaacagtggaggcgagagcaagagcgcatgttgaaggaatatttaattgtagctcaggaggctctcaatgccaagaaagaaatctaccagattaagcagcagcggttcgagctggcccaggaggaataccagcagctgcacaaaatgtgtgaggatgacagccgctcgtacgccagctcattctctggatattcaacaaatacaaagtatgacccacaccaaattaaagcagaaatagcaagtcgtcgggataggctttccagattaaaacgagagctgacccagatgaagcaggaactgcagtacaaagaaaagggggtggagaccctgcaagagattgatcggaagatgtcaagtactcacaccagctacaaactggatgaggcgcaggctatcatgagtgagctccggaccatcaagaaggccatttgcacaggcgagaaggagaggcgggacctgatgcatagcctggccaagctgaccgatagcttcaagaacagctgctccgttaccgactctctagtggacttccctcaccatgtaggcgtgcctggcgatgctggtgtaccccagcagttctgcgatgccggctcccagactgatatcatcggggagtttgtctttgatgataaaacaagacttgtagaccgagtcagacttaattggcaatatgaagaagccagaaagagagtcgccaacatccagcagcagctggcccggcttgacaatgagtcctggccaagcacggccgaggctgacagggaccggctgcagctcatcaaggagaaggaggccctgctgcaggagcttcagctcatcattgcacagcgccgctctgcgggagatgtggcccggctggaggaggagcgggagcgcctagaggaggagctgcggcgtgcacgggccacctccgcacagggcgccacggagaggattctgcttcaggaaaaaaggaattgtctacttatgcagctggaagaagccacccgcttaacatcctacctccagtcccagttaaaaagcctgtgtgccagcaccctgacggtgtcctcggggagcagccgcgggtccctagcctccagccgtgggtctctggcctccagccggggctccctgagctcggtcagcttcacggacatctacggcctcccgcagtacgagaagcccgacgctgagggcagccagcttctacgcttcgacctcattcccttcgactctctggggcgagatgctcccttttcagagcccccaggcccctcgggcttccacaagcagaggcggtccctggacacgccccagtccctggcatcgctgtcctcccgctcctcgctgtcctcgctgtcgcccccaagctcgcccctggacacgcccttcctccctgcctcacgggactcgccgctggcgcagctggcggacagctgtgaggggccaggcctgggcgccctagacagactgcgggcacacgcctcggctatgggggacgaagacttaccaggcatggcggcccttcagccacacggggtccccggggacggggaagggccgcacgagcgaggacccccaccagccagcgctcccgtgggtggaacagtgactcttcgagaagacagtgccaagaggttggagaggagggcacgccgcatctccgcatgtctgtcggattattcgctagccagcgacagtggggtgtttgaacctctaaccaaaaggaacgaagatgccgaggagcctgcctacggagacacggccagtaacggagatccccagatccacgtgggactcctgcgcgacagtggcagcgagtgtctcctcgtgcacgtgctgcagctgaagaacccggcggggctggcggtgaaggaagactgcaaagtccacatccgagtctatttgcccccactggactcgggcacgcccaacacttactgctccaaggctctggagttccaagtgccgctggtgtttaacgaagtgttcagaatccccgtgcattccagcgcgttgacactgaagtcacttcagttatacgtgtgttcagtgactccgcagctgcaggaagaactgctgggcattgctcagattaacctggctgactatgacagtttgagtgagatgcagctgcgctggcattccgtgcaggtgttcaccagctctgaaccatcaaggacgcgggaggctgggtgtgcaggagagagctccgcccgggaccctgcacacaccatctccatctccggcaagacggatgcggtgacggtgctcctggccagaaccacggcacagctgcaggcggtggagagggaactggccgaggagcgggccaagctggagtacacggaggaggaggtcctggagatggagcgcaaggaggagcaggccgaggccatatccgagcggagttggcaagcggactcggtggatagcggctgtagcaactgcacccagaccagccctccgtacccagagccctgttgcatgggtatcgactccatcctgggccacccatttgctgctcaggcagggccttacagccccgagaaatttcagccctcgcctcttaaggttgataaggaaaccaacacggaagatctctttctggaagaagcagccagcctcgtgaaggagcggcccagccgccgggcccgagggtcgccttttgttcggagtggcacgattgtccgttcccagacattctcgcctggagcacgaagccagtatgtttgcagactttatcgtagtgacagcgacagttcaacgctgccccggaagtccccctttgtccgaaatactttggaaagacgaacccttcgctataagcagtcatgcaggtcttccctggctgagctcatggcccgcacctccctggacttggagctggatctccaggcgtcgagaacacggcagaggcagctgaatgaggagctctgcgccctccgtgagctgcggcagcggttggaggacgcccagctccgtggccagactgacctcccaccctgggtgcttcgggacgagcggctccgtggcctgctgcgggaggccgagcggcagacaagacagaccaaacttgactaccgtcatgagcaggcggctgagaagatgctgaagaaggcctccaaggagatctaccagctgcgtgggcagagccacaaagagcccatccaagtgcagacctttagggagaagatagcattcttcacaaggccaaggatcaacatacctcctctcccagccgacgacgtctgatggagtgcattgtgcacatgaagtatttatccacctgttttattttcatgaagttcttagactagctgaatttgtctttaaaatatttgtgcaaagctattaatatacacattttgtaaaaaaaaaaaaaaaacacgtatatctatacatatatattttataatagtgacggcaacagggcttggtttttccttgttgtgaaatcgacatctctgaagacaggttattttataaaagatcaactatcatgttaagaatgtacagtttttatgctgttttatttgacttaaaggctggaagacagaaacgaagtgagttcaggcaaattcactgtattgtaatttatttatagtacttttttttccttgaaggaaaatactgactttaagatgtattttaagactgaaattttgttctttagtacttttcatgcagtagaacggaacttggggctggtttggtttttgacacctgaaatgcgaacgctatgtgctaaatttgtcaccgtatcatatgtgcatttaccatgtatattgtacacattcactcccttgatgtcatgttaaaatgtcccctgcagtggttcaatcgtgactcggaagcatgtgtgtgttgcagaggtcagtctctggcgtgggccgcacgccaaccgctcatttctgtgttgcctttggaagcatctttctgtgctcagcgtgagtctgaagcaggcgccagggcctctggtgtacggggcttcagcctgcttgcttgtggtggctgtctgtggggcttcagcctgactgtccgtggtggctgtccatgctgcccgcctccccccaccccgccctgtccgactgtaacagaccaggagggtggcggaggaactcctgccacgccactgtgtcatgaaggaaagtgaaagggaacgaggaagtaggaatgcccacgctcgttgactccgtgggtgaatacagcagttaggacatacacaccatcacctttgaaagtgcttgtttgggggagggaaggacatacgggtaactagaactacccagcgagtcgtccagaggagaggatcaggtttgagtcaggaggctccctgtactggagtcgtcccactattcctcaagaaatcttagaaccagcttgtgaggaaaaacattttttaatgtaataaaaatatgccattattctttgaaatgccaaatgatataaatattttgcctaatacatatttattgtagatgaaatgcactcttctcgatgaggcctcgatttgaatcaatggggtgggccacaggaaatgtcagaggaaccagaactcagaactcttcctcctggacctttcttcccttcccttggaggtatccctttgaatcaggcctctctcttctcatcagtctgtagcttccccccttgtataacctgctttcctttttacatttattaaaagtggattttgtaaaagcatttcattgacacgcgacctatcacagacaatggaattcgtcagtggtggtaagactgaaatcctgatgcttttcacacttcttgtctcttgctatgtatttctgcctctagccttgccatgttttgccttttttttttctttttggccaattcctttttatatgtgcccacaacagaggtggggagacacggagcaccctgggtccttcccagcgctgctgggcaggccccgtctccaggccccagctgttgaaactttgaagggcaacaaacaaccatccacactgccggaccctaggctgttcagggaggcagctcatttccaccccggccccaggttttagaagcagttctggtctcaaaaccatcaggatcctgccaccagggttcttttgaaatagtaccacatgtaaaagggaatttggctttcacttcatctaatcactgaattgtcaggctttgattgataattgtagaaataagtagccttctgttgtgggaataagttataatcagtattcatctctttgttttttgtcactcttttctctctaattgtgtcatttgtactgtttgaaaaatatttcttctataaaattaaactaacctgccttaa

SEQ ID NO: 335036 - DNA, 542 bp, Homo sapiens
  misc_feature (115)..(115): n is a, c, g, or t
  misc_feature (139)..(139): n is a, c, g, or t
  misc_feature (174)..(174): n is a, c, g, or t
  misc_feature (179)..(179): n is a, c, g, or t
  misc_feature (184)..(185): n is a, c, g, or t
  misc_feature (188)..(188): n is a, c, g, or t
atgtggggtaatttgttatgtagcaacagataaggaatgaaatgaccctgccatttatcattgagatgggaataaactttttttagaatagcaggaagtactttaaataattacnggcgtgagccaccactcccggccngaatctttcttgatcagatgtcttctgtctatccncctgnccgcnnacngtacggatgtgcgggccagtacggatgggtatggactctgggatctctcattctaagtcccacactgggacccaggggattacacaagcccagttgggcagcaaaaatttctgtgctcaccaagagacgaacagacagttcccagttaactgagaaaagggaatagaaatgacgaggcagacattcagcctcattcataacagaaatgcaaacagaactacagtgaggtacccctgtaagctactggactggcaaaaacaaagcagaggtacggagagggcaatcccagcatctgagataggagtctaaaccagcataacctccagatccgtactggcctggggtaccgagctc

SEQ ID NO: 335037 - DNA, 128 bp, Homo sapiens
tgtgctaaataaatgatcaacaagctaacatcttagtcatcacaggaaaaacatgttcaaacaataagaaactcctaacttctcagacaatcctcactcccccaacacatttcaactggtttcttcag

SEQ ID NO: 335038 - DNA, 634 bp, Homo sapiens
ggacgctggagcagagtgtcggggagtggctggagtcgattgggctgcagcagtatgagagcaagttgcttctgaatggctttgacgatgtccacttcctggggtctaatgtgatggaagagcaggacctgcgggacatcggcatcagcgacccacagcaccggcggaagctgctccaggcggcacgctccctacccaaggtgaaggctctgggttatgacgggaacagcccccctagcgtgccctcctggctggactccctggggctgcaggactacgtccattccttcttgtcaagtggttacagctccattgacaccgtgaagaacctctgggagctagagctcgtcaatgtcctgaaggtccagctgctcggccatcgcaagcgcatcatcgcctccctcgcagacagaccgtacgaggagccgccccagaagccccccagattctcccagctgaggtgccaagatttgctctcccagacgtcatccccactgagtcagaatgattcctgcactgggcggtcggcagatctgctgctgcctccaggggacacaggcaggaggcgccatgacagtctccatgaccctgcggcaccctcccgagcggagcgcttcaggatccaggtggggca

SEQ ID NO: 335039 - DNA, 114 bp, Homo sapiens
taagtgggactcaggaacaacaccctccgcctccacaaaaaaacaaaaataatccaatcaggaagagggccactcatgggtacagactggcggcagatgctccagcaagtttga

SEQ ID NO: 335040 - DNA, 2166 bp, Homo sapiens
cgattttccaagcagctttgccgcgcggtgttttctaaagcggggcgtgggctgggtgcccttttgggcctcacttgtccggcctgcggcaagtgctgggcgatgggatgcggttctggcggcaaaggaagggctgcctttgagagtcccgcaggaaggtttagaaagtgattgttcttaaaacaaacagagcgttttgctgtgtgttcctcaaagtggtcccggtgggagtggcgcctcattgtgagctgtgccttatctgatgaattaatggcaggtgaaagccttgcgcctccggagcgaatatttacgacttttgaaaatgtctttaatgtctaaaaaaagtcttttagaaaatcagacggcctcttgttcttatgttatcaagagtttagatttctgtggtaaatataagtgagtttcattttaagtaaactcattttacgagatttgagatttgaaagtgaaattaattaattttgcacaatctagccttgggctctgagaaaatgttgtaaagctgtaattaatcttgtgggacgaagtgaaaaggaactaaagtgtatggtgtaatgaatagtttaaatttctgtggtaaatacaagtgagtttcattttaagtaaactcatttttatgggatttgagatttaaaagtgaaattaattaatttcgcacaatctagtcatggttgggctcagaaaatgttgtaaagttgtgatttatcttatggaaagaagtgaaaaggaattaaggtatatggtgtaattaagagtttaaatttctgtggtaaatgcaagtgagtttcattttaagtaaactcatttttacgggatttgagatttaaaagtgaaattaattcattttgcacagtgtagtcatggttgggctctgagaaaatgttgtaaagctgaaattatttatcttgtgggaagaagtgagaagaaactaaaatgtgtggtattatcaagagtttagatttccggggtaaatataaatgagtttcctttaaactcatttttgtggaatttgaggtttaaaagtgaaattaattttgtagaatctagtcatggttgggctctgagaaaatgttgtaaagctgtaatttatcttgtgggaaaaagtgaaaaggaacttaaatttatggtgttatcaagaattggccaggcgcggtggctcacacctgtaatcccagcactttgggaggccgaggtgggcagatcacttgaggtcagaagttcgggaccagcctggccaacatggtgaaacccagtctttactaaaagtacaaaaattaactgggcatggtggtgcaagcctgttacgctaactactcgggaggctgagggaggagaattgctttaacccgggaggcagaggttgcagtaagccgagatcatgccactgcactccagcctgggtgacagagtaagactctgtctcaaaaaaaaaaaaaaaaaaaaaagaaatttagatttctgtggtaaatataaatgagtttcattttaagtaaactcattttgtgggatttgagatttaaaaatgaaattaattttgcacattctagtcatggttgggctctaaggcaatgttgtaaagctgtaattgtttgccttatgggaagaagtgaaaaggaattaaaatttatggtgtgtctactatgaaccaggcatgatgctgagagtttaactgtgtaatttttggcctaaatagccctgtgaagtagatattattccaactttacaggttagaaaatttgaggcacagagaggtgaaatatttgcctaaagtgaaacggcaaatttggcaatttggacttggattcaagtgtttataactaaagcccagctccttgcatcataccctggtacctaaaagacataaaaactcacttcaggtgcaatgtgaatgaaaatgacgttatgacccaggcttgttgtctatgtgctccttgagaaatagttctgttggatagatgcggtcaatactcaaaagcccttgctatctttgccatgcattactctaagcacttgacatgtattaatttaatcctcacgattccgtgaggtatgtgctattatcattcccatttcaaaaaaaaacacttcctatctctctacctcctctcttctccttctctaccctctccgactcttcctcgaccatta

SEQ ID NO: 335041 - DNA, 2112 bp, Homo sapiens
cgattttccaagcagctttgccgcgcggtgttttctaaagcggggcgtgggctgggtgcccttttgggcctcacttgtccggcctgcggcaagtgctgggcgatgggatgcggttctggcggcaaaggaagggctgcctttgagagtcccgcaggaaggtttagaaagtgattgttcttaaaacaaacagagcgttttgctgtgtgttcctcaaagtggtcccggtgggagtggcgcctcattgtgagctgtgccttatctgatgaattaatggcaggtgaaagccttgcgcctccggagcgaatatttacgacttttgaaaatgtctttaatgtctaaaaaaagtcttttagaaaatcagacggcctcttgttcttatgttatcaagagtttagatttctgtggtaaatataagtgagtttcattttaagtaaactcattttacgagatttgagatttgaaagtgaaattaattaattttgcacaatctagccttgggctctgagaaaatgttgtaaagctgtaattaatcttgtgggacgaagtgaaaaggaactaaagtgtatggtgtaatgaatagtttaaatttctgtggtaaatacaagtgagtttcattttaagtaaactcatttttatgggatttgagatttaaaagtgaaattaattaatttcgcacaatctagtcatggttgggctcagaaaatgttgtaaagttgtgatttatcttatggaaagaagtgaaaaggaattaaggtatatggtgtaattaagagtttaaatttctgtggtaaatgcaagtgagtttcattttaagtaaactcatttttacgggatttgagatttaaaagtgaaattaattcattttgcacagtgtagtcatggttgggctctgagaaaatgttgtaaagctgaaattatttatcttgtgggaagaagtgagaagaaactaaaatgtgtggtattatcaagagtttagatttccggggtaaatataaatgagtttcctttaaactcatttttgtggaatttgaggtttaaaagtgaaattaattttgtagaatctagtcatggttgggctctgagaaaatgttgtaaagctgtaatttatcttgtgggaaaaagtgaaaaggaacttaaatttatggtgttatcaagaattggccaggcgcggtggctcacacctgtaatcccagcactttgggaggccgaggtgggcagatcacttgaggtcagaagttcgggaccagcctggccaacatggtgaaacccagtctttactaaaagtacaaaaattaactgggcatggtggtgcaagcctgttacgctaactactcgggaggctgagggaggagaattgctttaacccgggaggcagaggttgcagtaagccgagatcatgccactgcactccagcctgggtgacagagtaagactctgtctcaaaaaaaaaaaaaaaaaaaaaagaaatttagatttctgtggtaaatataaatgagtttcattttaagtaaactcattttgtgggatttgagatttaaaaatgaaattaattttgcacattctagtcatggttgggctctaaggcaatgttgtaaagctgtaattgtttgccttatgggaagaagtgaaaaggaattaaaatttatggtgtgtctactatgaaccaggcatgatgctgagagtttaactgtgtaatttttggcctaaatagccctgtgaagtagatattattccaactttacaggttagggcaatttggacttggattcaagtgtttataactaaagcccagctccttgcatcataccctggtacctaaaagacataaaaactcacttcaggtgcaatgtgaatgaaaatgacgttatgacccaggcttgttgtctatgtgctccttgagaaatagttctgttggatagatgcggtcaatactcaaaagcccttgctatctttgccatgcattactctaagcacttgacatgtattaatttaatcctcacgattccgtgaggtatgtgctattatcattcccatttcaaaaaaaaacacttcctatctctctacctcctctcttctccttctctaccctctccgactcttcctcgaccatta

SEQ ID NO: 335042 - DNA, 2921 bp, Homo sapiens
gcagtcagcagaggagagcgccaggacgctacagcagctgaagaggcagtggcgcccgcggccgcggcgtcggggctggagcgatggcggcgaccgcggtggcggcggctgtggcgggaaccgagtcggcccagggtcccccgggcccggcagcgtcgctggagctgtggctgaacaaagccacagacccaagcatgtcggaacaggattggtcagctatccagaatttctgtgagcaggtgaacactgaccccaatggccccacacatgcgccctggctactggcccacaagatccagtctccgcaagagaaggaagctctttatgccttaacggtgctggagatgtgcatgaaccactgtgggagaagttccacagcgaggtggccaaatttcgtttcctgaacgaactgatcaaagtgttgtccccaaagtacctgtggtcctgggccacaggaaaagttaaaggaagagtcattgatatactcttcacttggacagtctggtttccggaagacatcaagattcgagacgcttatcacatgctgaacaaacaaggaattattaaacaagaccctaaactaccagtggataaaatcttacccccaccatctccctggcccaagagctccatctttgatgctgatgaagaaaagtccaagcttctgacaaggcttctaaagagcaaccaccccgaggaccttcaggctgcaaaccggttaatcaagaatttggtcaaggaggaacaagaaaaatcggagaaggtgtccaagagggtcagtgcggtggaggaagtgcgaagccatgtgaaggtgctgcaggagatgctgagcatgtaccgcaggccagggcaggccccgcccgaccaggaggccctgcaggtcgtgtatgagaggtgtgaaaagctgcggcccacgctgttccggttggcgagtgacaccactgatgacgatgatgcactcgcggaaattctccaggcaaatgacctcctcacccaaggagttctgctgtacaaacaggtgatggagggccgggtcacctttggaaacagagtgaccagctcattgggagacatccctgtctccagagtctttcagaatccagcaggctgcatgaagacctgccccctgattgacttggaggtggacaatggacctgcgcagatggggactgtggtgccatctttgcttcatcaggacctggcagccttgggaatcagtgatgctcctgttacaggcatggtttctggtcagaattgctgtgaggaaaagaggaatccctcctccagcacgctgccaggcggtggtgttcagaacccttctgcagacaggaatttgctggacctcctctcaccacagccagctccgtgccctctgaattatgtttcgcagaaaagtgtccccaaggaagtgccaccaggtactaagtcctctccaggttggtcctgggaggctggcccgttggctccttccccatcttcacagaatacacctctggctcaagtgtttgtccctttggagtctgttaagcccagcagcctgccgcctctcattgtgtatgaccggaatggattcagaattctgctccacttctcccagacgggagcccctgggcacccagaggtacaggtgctgctcttgaccatgatgagcacggctccccagcctgtctgggatatcatgtttcaagtggctgtgccaaagtcaatgagagtgaagctgcagccggcatccagctccaagcttcctgcattcagtcctttgatgcctccagctgtgatatctcagatgctgctgcttgacaatccacacaaagaacctatccgcttacggtacaagctgacattcaaccaaggtggacagcctttcagcgaagtaggagaagtgaaagacttcccagacctggctgtcttgggcgcagcctaacttttcacaagatggacccttcatttcaagcttaggctggcgttacttttgctgtctagtcaggactaatcacggtgtttcagtgcggagtgccaagagtcctatcctgacgtcaggctctgggtgtcaacctctgacttattctgcagatgctctgtgtgtgtgtgtgtgtgtgtgtgtgtgtgtgtgtgtgtgtgtgttcggggagagggtggtagcacagggcttgggatatcggcagtgtgggaaatgcgaagcatttctcatcatcatcatctctgctacagtcatgtttctgcatgtcagcgagcgacactgtccctgcctcaggttggaggttttatcagccaaagtgtttttttcatgtatcgttcgttccattcatccactctgtgccttgtcagcctttgaaaggcttggttgctcccaggctgctgttctcagggaccttaaaagggacctggttagtcttggggcagagagtatctacttgggcactctcttccaagaaagaccttgtctccattttcattagacaatgcttcttgtgtgtgttctggaagatcttctaaatggaatgcttgttgcactgttcccaggcgagtggctgccatgagacctgaggaccacacttgggggaccaatcatgtccttcaccactgtgccttagaatcgcccctggacagagttcctgggcagaggggaaagcagctcccaggccttactcaggcctcaggtccatgggttgggcagccagtctgggcccttctcaggatcctcatctccatcctcatcctcttccttcacagcatttacttggagctctttgtgacacaccatgtcagtcatgatgaatcggccaacagccagcccttgccagctgacgtcacagtctaagatgggaaactgtggtacagatagacatgaagagagcttagcagtgattgaggtggtgactaaatatacagtcattgaataaataccatgtagcaagtgt

SEQ ID NO: 335043 - DNA, 5192 bp, Homo sapiens
gcagtcagcagaggagagcgccaggacgctacagcagctgaagaggcagtggcgcccgcggccgcggcgtcggggctggagcgatggcggcgaccgcggtggcggcggctgtggcgggaaccgagtcggcccagggtcccccgggcccggcagcgtcgctggagctgtggctgaacaaagccacagacccaagcatgtcggaacaggattggtcagctatccagaatttctgtgagcaggtgaacactgaccccaatggccccacacatgcgccctggctactggcccacaagatccagtctccgcaagagaaggaagctctttatgccttaacggtgctggagatgtgcatgaaccactgtgggagaagttccacagcgaggtggccaaatttcgtttcctgaacgaactgatcaaagtgttgtccccaaagtacctgtggtcctgggccacaggaaaagttaaaggaagagtcattgatatactcttcacttggacagtctggtttccggaagacatcaagattcgagacgcttatcacatgctgaacaaacaaggaattattaaacaagaccctaaactaccagtggataaaatcttacccccaccatctccctggcccaagagctccatctttgatgctgatgaagaaaagtccaagcttctgacaaggcttctaaagagcaaccaccccgaggaccttcaggctgcaaaccggttaatcaagaatttggtcaaggaggaacaagaaaaatcggagaaggtgtccaagagggtcagtgcggtggaggaagtgcgaagccatgtgaaggtgctgcaggagatgctgagcatgtaccgcaggccagggcaggccccgcccgaccaggaggccctgcaggtcgtgtatgagaggtgtgaaaagctgcggcccacgctgttccggttggcgagtgacaccactgatgacgatgatgcactcgcggaaattctccaggcaaatgacctcctcacccaaggagttctgctgtacaaacaggtgatggagggccgggtcacctttggaaacagagtgaccagctcattgggagacatccctgtctccagagtctttcagaatccagcaggctgcatgaagacctgccccctgattgacttggaggtggacaatggacctgcgcagatggggactgtggtgccatctttgcttcatcaggacctggcagccttgggaatcagtgatgctcctgttacaggcatggtttctggtcagaattgctgtgaggaaaagaggaatccctcctccagcacgctgccaggcggtggtgttcagaacccttctgcagacaggaatttgctggacctcctctcaccacagccagctccgtgccctctgaattatgtttcgcagaaaagtgtccccaaggaagtgccaccaggtactaagtcctctccaggttggtcctgggaggctggcccgttggctccttccccatcttcacagaatacacctctggctcaagtgtttgtccctttggagtctgttaagcccagcagcctgccgcctctcattgtgtatgaccggaatggattcagaattctgctccacttctcccagacgggagcccctgggcacccagaggtacaggtgctgctcttgaccatgatgagcacggctccccagcctgtctgggatatcatgtttcaagtggctgtgccaaagtcaatgagagtgaagctgcagccggcatccagctccaagcttcctgcattcagtcctttgatgcctccagctgtgatatctcagatgctgctgcttgacaatccacacaaagaacctatccgcttacggtacaagctgacattcaaccaaggtggacagcctttcagcgaagtaggagaagtgaaagacttcccagacctggctgtcttgggcgcagcctaacttttcacaagatggacccttcatttcaagcttaggctggcgttacttttgctgtctagtcaggactaatcacggtgtttcagtgcggagtgccaagagtcctatcctgacgtcaggctctgggtgtcaacctctgacttattctgcagatgctctgtgtgtgtgtgtgtgtgtgtgtgtgtgtgtgtgtgtgtgtgtgttcggggagagggtggtagcacagggcttgggatatcggcagtgtgggaaatgcgaagcatttctcatcatcatcatctctgctacagtcatgtttctgcatgtcagcgagcgacactgtccctgcctcaggttggaggttttatcagccaaagtgtttttttcatgtatcgttcgttccattcatccactctgtgccttgtcagcctttgaaaggcttggttgctcccaggctgctgttctcagggaccttaaaagggacctggttagtcttggggcagagagtatctacttgggcactctcttccaagaaagaccttgtctccattttcattagacaatgcttcttgtgtgtgttctggaagatcttctaaatggaatgcttgttgcactgttcccaggcgagtggctgccatgagacctgaggaccacacttgggggaccaatcatgtccttcaccactgtgccttagaatcgcccctggacagagttcctgggcagaggggaaagcagctcccaggccttactcaggcctcaggtccatgggttgggcagccagtctgggcccttctcaggatcctcatctccatcctcatcctcttccttcacagcatttacttggagctctttgtgacacaccatgtcagtcatgatgaatcggccaacagccagcccttgccagctgacgtcacagtctaagatgggaaactgtggtacagatagacatgaagagagcttagcagtgattgaggtggtgactaaatatacagtcattgaataaataccatgtagcaagtgtactttgtggagtgttgagtaagtggaaaatggaaagccagttgcatttagagatgataggcctaaagggaactgtcttctgtcgagaagtaaaggaaacttcatgaaggatgtagaagcttagctgcctcagagaagagagaacctgaagatctgaggcaagctggacaggagaggtggatatttgttgatggaagaattcaagtttataatcaattcccacttagcacctactgtgtgctaggaacttgaatgtgtatgtttgacaagtcctgcttggcctgatgggtgggagaaggaacctgagcctggctgagatggctaggcggagggctttgaagtccaagcagctgaactggctgggtgggtttctacctttgaaactgcaagacttgtttggagctcttaattacaatatctgatatttttacagtctgatcttttgacttctacatatagtggaaatctgccaatactaattggtggagatgggaactgtaaaagatcaagtatgctaattttaagcaaatgtaaaaactcataaaacaggtaaacagtggggtgatttcatttgccataattcacataagacgaattttaatctaaaagtactttcttgcttgtattctgtgtggcttttttttgttttttgaggccatatctcactctgtcactcaggctggagtgcggtggtataatgtcagctcactgcaatctctgcctaccaggttcaagcgattctcgtgcctcagcctctcgagtagctggggactacaggcgtgacaggcacgcccagctaatttttgtatttttagtaggagacaggatttcaccatgttggccagggctggtctcgaactcctgacctcaggtgatccgcctgccttggcctcccagagtgctgggattacaggcgtgagccaccgcacccggcctctgtgtagcttttataggctctgttactgttgcgtagtcttgaagaggtacccatcataatgacagcatctccctctgaagggttttggtcaaaatgggtgaatgagacttatacataaagacaggctttctcccctatagttaggaggtgaactcacacatgtgtacctgaacattcttgcttttgaggagacagactcccagtggtactactatgcttaggtgttggacaggataggggtaggaggagaggaggcaggctgctgtcctgaaagtggctgtggtttatggcatcactcccttctaatcagcaagtccagtggccacttagagcccagctcctacctcttcattcacttaacaagtagttattggctgtgcacagtggctcacgcctataatcccagcattttgggaggctgagtgggatgaccgcttgagcccaggatttcaagtccagcctgggctacatagtgagaccgtgtctctgtttttttaaaagctagttgttgaccagctaccctgagccaggcaccaccctgaaggagcttcttttcctctggggagaagcaaattcatgatgtgtgtgctggagatctggcactcatggccagtgctttccagtatcttgaactcttcgggggtcctgttgacccatttcgtgacctacctccgtgactgctctttttcctctgtctcttaagtgtgatggttttccagagtccaatcctcaggactttcccgtccacacacaggcctggtagtcaggtggctctaaaccattaggtgggttgtagacctctctcaagctgccacctccttgctgtcgccagatcgtatttcagtctgtcaggggttatctgtatctggaggttccactgttgcttcagtctcagttacttagaatggaacccagagtcctgcccctttccacctacatgctcttacttgaaagcacctgagacttattgggtccctgattcctgcttcgtctgtatccgcagagtagttgcatgtcatttggcctgttttctaaataatcccacatcatgtcctccctgcacttacattgccactgctctgatttgggcttttttttttttgggacaatgcctctgtcccaattctgagtaacagctctggttcttgccactaccagagttctctagcaaatctgagcatctgacagggtgaaaaattctgaatggcttcctgatgcctgactttatgggatcaaattcaagttgcacgctggcactcagtgcccttctggtatcatctgccaagaccagggcctgcttcaccacagccacaataaagtcctttcaagccctga

SEQ ID NO: 335044 - DNA, 4607 bp, Homo sapiens
gcagtcagcagaggagagcgccaggacgctacagcagctgaagaggcagtggcgcccgcggccgcggcgtcggggctggagcgatggcggcgaccgcggtggcggcggctgtggcgggaaccgagtcggcccagggtcccccgggcccggcagcgtcgctggagctgtggctgaacaaagccacagacccaagcatgtcggaacaggattggtcagctatccagaatttctgtgagcaggtgaacactgaccccaatggccccacacatgcgccctggctactggcccacaagatccagtctccgcaagagaaggaagctctttatgccttaacggtgctggagatgtgcatgaaccactgtgggagaagttccacagcgaggtggccaaatttcgtttcctgaacgaactgatcaaagtgttgtccccaaagtacctgtggtcctgggccacaggaaaagttaaaggaagagtcattgatatactcttcacttggacagtctggtttccggaagacatcaagattcgagacgcttatcacatgctgaacaaacaaggaattattaaacaagaccctaaactaccagtggataaaatcttacccccaccatctccctggcccaagagctccatctttgatgctgatgaagaaaagtccaagcttctgacaaggcttctaaagagcaaccaccccgaggaccttcaggctgcaaaccggttaatcaagaatttggtcaaggaggaacaagaaaaatcggagaaggtgtccaagagggtcagtgcggtggaggaagtgcgaagccatgtgaaggtgctgcaggagatgctgagcatgtaccgcaggccagggcaggccccgcccgaccaggaggccctgcaggtcgtgtatgagaggtgtgaaaagctgcggcccacgctgttccggttggcgagtgacaccactgatgacgatgatgcactcgcggaaattctccaggcaaatgacctcctcacccaaggagttctgctgtacaaacaggtgatggagggccgggtcacctttggaaacagagtgaccagctcattgggagacatccctgtctccagagtctttcagaatccagcaggctgcatgaagacctgccccctgattgacttggaggtggacaatggacctgcgcagatggggactgtggtgccatctttgcttcatcaggacctggcagccttgggaatcagtgatgctcctgttacaggcatggtttctggtcagaattgctgtgaggaaaagaggaatccctcctccagcacgctgccaggcggtggtgttcagaacccttctgcagacaggaatttgctggacctcctctcaccacagccagctccgtgccctctgaattatgtttcgcagaaaagtgtccccaaggaagtgccaccaggtactaagtcctctccaggttggtcctgggaggctggcccgttggctccttccccatcttcacagaatacacctctggctcaagtgtttgtccctttggagtctgttaagcccagcagcctgccgcctctcattgtgtatgaccggaatggattcagaattctgctccacttctcccagacgggagcccctgggcacccagaggtacaggtgctgctcttgaccatgatgagcacggctccccagcctgtctgggatatcatgtttcaagtggctgtgccaaagtcaatgagagtgaagctgcagccggcatccagctccaagcttcctgcattcagtcctttgatgcctccagctgtgatatctcagatgctgctgcttgacaatccacacaaagaacctatccgcttacggtacaagctgacattcaaccaaggtggacagcctttcagcgaagtaggagaagtgaaagacttcccagacctggctgtcttgggcgcagcctaacttttcacaagatggacccttcatttcaagcttaggctggcgttacttttgctgtctagtcaggactaatcacggtgtttcagtgcggagtgccaagagtcctatcctgacgtcaggctctgggtgtcaacctctgacttattctgcagatgctctgtgtgtgtgtgtgtgtgtgtgtgtgtgtgtgtgtgtgtgtgtgttcggggagagggtggtagcacagggcttgggatatcggcagtgtgggaaatgcgaagcatttctcatcatcatcatctctgctacagtcatgtttctgcatgtcagcgagcgacactgtccctgcctcaggttggaggttttatcagccaaagtgtttttttcatgtatcgttcgttccattcatccactctgtgccttgtcagcctttgaaaggcttggttgctcccaggctgctgttctcagggaccttaaaagggacctggttagtcttggggcagagagtatctacttgggcactctcttccaagaaagaccttgtctccattttcattagacaatgcttcttgtgtgtgttctggaagatcttctaaatggaatgcttgttgcactgttcccaggcgagtggctgccatgagacctgaggaccacacttgggggaccaatcatgtccttcaccactgtgccttagaatcgcccctggacagagttcctgggcagaggggaaagcagctcccaggccttactcaggcctcaggtccatgggttgggcagccagtctgggcccttctcaggatcctcatctccatcctcatcctcttccttcacagcatttacttggagctctttgtgacacaccatgtcagtcatgatgaatcggccaacagccagcccttgccagctgacgtcacagtctaagatgggaaactgtggtacagatagacatgaagagagcttagcagtgattgaggtggtgactaaatatacagtcattgaataaataccatgtagcaagtgtactttgtggagtgttgagtaagtggaaaatggaaagccagttgcatttagagatgataggcctaaagggaactgtcttctgtcgagaagtaaaggaaacttcatgaaggatgtagaagcttagctgcctcagagaagagagaacctgaagatctgaggcaagctggacaggagaggtggatatttgttgatggaagaattcaagtttataatcaattcccacttagcacctactgtgtgctaggaacttgaatgtgtatgtttgacaagtcctgcttggcctgatgggtgggagaaggaacctgagcctggctgagatggctaggcggagggctttgaagtccaagcagctgaactggctgggtgggtttctacctttgaaactgcaagacttgtttggagctcttaattacaatatctgatatttttacagtctgatcttttgacttctacatatagtggaaatctgccaatactaattggtggagatgggaactgtaaaagatcaagtatgctaattttaagcaaatgtaaaaactcataaaacaggtaaacagtggggtgatttcatttgccataattcacataagacgaattttaatctaaaagtactttcttgcttgtattctgtgtggcttttttttgttttttgaggccatatctcactctgtcactcaggctggagtgcggtggtataatgtcagctcactgcaatctctgcctaccaggttcaagcgattctcgtgcctcagccccagcattttgggaggctgagtgggatgaccgcttgagcccaggatttcaagtccagcctgggctacatagtgagaccgtgtctctgtttttttaaaagctagttgttgaccagctaccctgagccaggcaccaccctgaaggagcttcttttcctctggggagaagcaaattcatgatgtgtgtgctggagatctggcactcatggccagtgctttccagtatcttgaactcttcgggggtcctgttgacccatttcgtgacctacctccgtgactgctctttttcctctgtctcttaagtgtgatggttttccagagtccaatcctcaggactttcccgtccacacacaggcctggtagtcaggtggctctaaaccattaggtgggttgtagacctctctcaagctgccacctccttgctgtcgccagatcgtatttcagtctgtcaggggttatctgtatctggaggttccactgttgcttcagtctcagttacttagaatggaacccagagtcctgcccctttccacctacatgctcttacttgaaagcacctgagacttattgggtccctgattcctgcttcgtctgtatccgcagagtagttgcatgtcatttggcctgttttctaaataatcccacatcatgtcctccctgcacttacattgccactgctctgatttgggcttttttttttttgggacaatgcctctgtcccaattctgagtaacagctctggttcttgccactaccagagttctctagcaaatctgagcatctgacagggtgaaaaattctgaatggcttcctgatgcctgactttatgggatcaaattcaagttgcacgctggcactcagtgcccttctggtatcatctgccaagaccagggcctgcttcaccacagccacaataaagtcctttcaagccctga

SEQ ID NO: 335045 - DNA, 4679 bp, Homo sapiens
gcagtcagcagaggagagcgccaggacgctacagcagctgaagaggcagtggcgcccgcggccgcggcgtcggggctggagcgatggcggcgaccgcggtggcggcggctgtggcgggaaccgagtcggcccagggtcccccgggcccggcagcgtcgctggagctgtggctgaacaaagccacagacccaagcatgtcggaacaggattggtcagctatccagaatttctgtgagcaggtgaacactgaccccaatggccccacacatgcgccctggctactggcccacaagatccagtctccgcaagagaaggaagctctttatgccttaacggtgctggagatgtgcatgaaccactgtgggagaagttccacagcgaggtggccaaatttcgtttcctgaacgaactgatcaaagtgttgtccccaaagtacctgtggtcctgggccacaggaaaagttaaaggaagagtcattgatatactcttcacttggacagtctggtttccggaagacatcaagattcgagacgcttatcacatgctgaacaaacaaggaattattaaacaagaccctaaactaccagtggataaaatcttacccccaccatctccctggcccaagagctccatctttgatgctgatgaagaaaagtccaagcttctgacaaggcttctaaagagcaaccaccccgaggaccttcaggctgcaaaccggttaatcaagaatttggtcaaggaggaacaagaaaaatcggagaaggtgtccaagagggtcagtgcggtggaggaagtgcgaagccatgtgaaggtgctgcaggagatgctgagcatgtaccgcaggccagggcaggccccgcccgaccaggaggccctgcaggtcgtgtatgagaggtgtgaaaagctgcggcccacgctgttccggttggcgagtgacaccactgatgacgatgatgcactcgcggaaattctccaggcaaatgacctcctcacccaaggagttctgctgtacaaacaggtgatggagggccgggtcacctttggaaacagagtgaccagctcattgggagacatccctgtctccagagtctttcagaatccagcaggctgcatgaagacctgccccctgattgacttggaggtggacaatggacctgcgcagatggggactgtggtgccatctttgcttcatcaggacctggcagccttgggaatcagtgatgctcctgttacaggcatggtttctggtcagaattgctgtgaggaaaagaggaatccctcctccagcacgctgccaggcggtggtgttcagaacccttctgcagacaggaatttgctggacctcctctcaccacagccagctccgtgccctctgaattatgtttcgcagaaaagtgtccccaaggaagtgccaccaggtactaagtcctctccaggttggtcctgggaggctggcccgttggctccttccccatcttcacagaatacacctctggctcaagtgtttgtccctttggagtctgttaagcccagcagcctgccgcctctcattgtgtatgaccggaatggattcagaattctgctccacttctcccagacgggagcccctgggcacccagaggtacaggtgctgctcttgaccatgatgagcacggctccccagcctgtctgggatatcatgtttcaagtggctgtgccaaagtcaatgagagtgaagctgcagccggcatccagctccaagcttcctgcattcagtcctttgatgcctccagctgtgatatctcagatgctgctgcttgacaatccacacaaagaacctatccgcttacggtacaagctgacattcaaccaaggtggacagcctttcagcgaagtaggagaagtgaaagacttcccagacctggctgtcttgggcgcagcctaacttttcacaagatggacccttcatttcaagcttaggctggcgttacttttgctgtctagtcaggactaatcacggtgtttcagtgcggagtgccaagagtcctatcctgacgtcaggctctgggtgtcaacctctgacttattctgcagatgctctgtgtgtgtgtgtgtgtgtgtgtgtgtgtgtgtgtgtgtgtgtgttcggggagagggtggtagcacagggcttgggatatcggcagtgtgggaaatgcgaagcatttctcatcatcatcatctctgctacagtcatgtttctgcatgtcagcgagcgacactgtccctgcctcaggttggaggttttatcagccaaagtgtttttttcatgtatcgttcgttccattcatccactctgtgccttgtcagcctttgaaaggcttggttgctcccaggctgctgttctcagggaccttaaaagggacctggttagtcttggggcagagagtatctacttgggcactctcttccaagaaagaccttgtctccattttcattagacaatgcttcttgtgtgtgttctggaagatcttctaaatggaatgcttgttgcactgttcccaggcgagtggctgccatgagacctgaggaccacacttgggggaccaatcatgtccttcaccactgtgccttagaatcgcccctggacagagttcctgggcagaggggaaagcagctcccaggccttactcaggcctcaggtccatgggttgggcagccagtctgggcccttctcaggatcctcatctccatcctcatcctcttccttcacagcatttacttggagctctttgtgacacaccatgtcagtcatgatgaatcggccaacagccagcccttgccagctgacgtcacagtctaagatgggaaactgtggtacagatagacatgaagagagcttagcagtgattgaggtggtgactaaatatacagtcattgaataaataccatgtagcaagtgtactttgtggagtgttgagtaagtggaaaatggaaagccagttgcatttagagatgataggcctaaagggaactgtcttctgtcgagaagtaaaggaaacttcatgaaggatgtagaagcttagctgcctcagagaagagagaacctgaagatctgaggcaagctggacaggagaggtggatatttgttgatggaagaattcaagtttataatcaattcccacttagcacctactgtgtgctaggaacttgaatgtgtatgtttgacaagtcctgcttggcctgatgggtgggagaaggaacctgagcctggctgagatggctaggcggagggctttgaagtccaagcagctgaactggctgggtgggtttctacctttgaaactgcaagacttgtttggagctcttaattacaatatctgatatttttacagtctgatcttttgacttctacatatagtggaaatctgccaatactaattggtggagatgggaactgtaaaagatcaagtatgctaattttaagcaaatgtaaaaactcataaaacaggtaaacagtggggtgatttcatttgccataattcacataagacgaattttaatctaaaagtactttcttgcttgtattctgtgtggcttttttttgttttttgaggccatatctcactctgtcactcaggctggagtgcggtggtataatgtcagctcactgcaatctctgcctaccaggttcaagcgattctcgtgcctcagcctctcgagtagctggggactacaggcgtgacaggcacgcccagctaatttttgtatttttagtaggagacagcccagcattttgggaggctgagtgggatgaccgcttgagcccaggatttcaagtccagcctgggctacatagtgagaccgtgtctctgtttttttaaaagctagttgttgaccagctaccctgagccaggcaccaccctgaaggagcttcttttcctctggggagaagcaaattcatgatgtgtgtgctggagatctggcactcatggccagtgctttccagtatcttgaactcttcgggggtcctgttgacccatttcgtgacctacctccgtgactgctctttttcctctgtctcttaagtgtgatggttttccagagtccaatcctcaggactttcccgtccacacacaggcctggtagtcaggtggctctaaaccattaggtgggttgtagacctctctcaagctgccacctccttgctgtcgccagatcgtatttcagtctgtcaggggttatctgtatctggaggttccactgttgcttcagtctcagttacttagaatggaacccagagtcctgcccctttccacctacatgctcttacttgaaagcacctgagacttattgggtccctgattcctgcttcgtctgtatccgcagagtagttgcatgtcatttggcctgttttctaaataatcccacatcatgtcctccctgcacttacattgccactgctctgatttgggcttttttttttttgggacaatgcctctgtcccaattctgagtaacagctctggttcttgccactaccagagttctctagcaaatctgagcatctgacagggtgaaaaattctgaatggcttcctgatgcctgactttatgggatcaaattcaagttgcacgctggcactcagtgcccttctggtatcatctgccaagaccagggcctgcttcaccacagccacaataaagtcctttcaagccctga

SEQ ID NO: 335046 - DNA, 5410 bp, Homo sapiens
gcagtcagcagaggagagcgccaggacgctacagcagctgaagaggcagtggcgcccgcggccgcggcgtcggggctggagcgatggcggcgaccgcggtggcggcggctgtggcgggaaccgagtcggcccagggtcccccgggcccggcagcgtcgctggagctgtggctgaacaaagccacagacccaagcatgtcggaacaggattggtcagctatccagaatttctgtgagcaggtgaacactgaccccaatggccccacacatgcgccctggctactggcccacaagatccagtctccgcaagagaaggaagctctttatgccttaacggtgctggagatgtgcatgaaccactgtgggagaagttccacagcgaggtggccaaatttcgtttcctgaacgaactgatcaaagtgttgtccccaaagtacctgtggtcctgggccacaggaaaagttaaaggaagagtcattgatatactcttcacttggacagtctggtttccggaagacatcaagattcgagacgcttatcacatgctgaacaaacaaggaattattaaacaagaccctaaactaccagtggataaaatcttacccccaccatctccctggcccaagagctccatctttgatgctgatgaagaaaagtccaagcttctgacaaggcttctaaagagcaaccaccccgaggaccttcaggctgcaaaccggttaatcaagaatttggtcaaggaggaacaagaaaaatcggagaaggtgtccaagagggtcagtgcggtggaggaagtgcgaagccatgtgaaggtgctgcaggagatgctgagcatgtaccgcaggccagggcaggccccgcccgaccaggaggccctgcaggtcgtgtatgagaggtgtgaaaagctgcggcccacgctgttccggttggcgagtgacaccactgatgacgatgatgcactcgcggaaattctccaggcaaatgacctcctcacccaaggagttctgctgtacaaacaggtgatggagggccgggtcacctttggaaacagagtgaccagctcattgggagacatccctgtctccagagtctttcagaatccagcaggctgcatgaagacctgccccctgattgacttggaggtggacaatggacctgcgcagatggggactgtggtgccatctttgcttcatcaggacctggcagccttgggaatcagtgatgctcctgttacaggcatggtttctggtcagaattgctgtgaggaaaagaggaatccctcctccagcacgctgccaggcggtggtgttcagaacccttctgcagacaggaatttgctggacctcctctcaccacagccagctccgtgccctctgaattatgtttcgcagaaaagtgtccccaaggaagtgccaccaggtactaagtcctctccaggttggtcctgggaggctggcccgttggctccttccccatcttcacagaatacacctctggctcaagtgtttgtccctttggagtctgttaagcccagcagcctgccgcctctcattgtgtatgaccggaatggattcagaattctgctccacttctcccagacgggagcccctgggcacccagaggtacaggtgctgctcttgaccatgatgagcacggctccccagcctgtctgggatatcatgtttcaagtggctgtgccaaagtcaatgagagtgaagctgcagccggcatccagctccaagcttcctgcattcagtcctttgatgcctccagctgtgatatctcagatgctgctgcttgacaatccacacaaagaacctatccgcttacggtacaagctgacattcaaccaaggtggacagcctttcagcgaagtaggagaagtgaaagacttcccagacctggctgtcttgggcgcagcctaacttttcacaagatggacccttcatttcaagcttaggctggcgttacttttgctgtctagtcaggactaatcacggtgtttcagtgcggagtgccaagagtcctatcctgacgtcaggctctgggtgtcaacctctgacttattctgcagatgctctgtgtgtgtgtgtgtgtgtgtgtgtgtgtgtgtgtgtgtgtgtgttcggggagagggtggtagcacagggcttgggatatcggcagtgtgggaaatgcgaagcatttctcatcatcatcatctctgctacagtcatgtttctgcatgtcagcgagcgacactgtccctgcctcaggttggaggttttatcagccaaagtgtttttttcatgtatcgttcgttccattcatccactctgtgccttgtcagcctttgaaaggcttggttgctcccaggctgctgttctcagggaccttaaaagggacctggttagtcttggggcagagagtatctacttgggcactctcttccaagaaagaccttgtctccattttcattagacaatgcttcttgtgtgtgttctggaagatcttctaaatggaatgcttgttgcactgttcccaggcgagtggctgccatgagacctgaggaccacacttgggggaccaatcatgtccttcaccactgtgccttagaatcgcccctggacagagttcctgggcagaggggaaagcagctcccaggccttactcaggcctcaggtccatgggttgggcagccagtctgggcccttctcaggatcctcatctccatcctcatcctcttccttcacagcatttacttggagctctttgtgacacaccatgtcagtcatgatgaatcggccaacagccagcccttgccagctgacgtcacagtctaagatgggaaactgtggtacagatagacatgaagagagcttagcagtgattgaggtggtgactaaatatacagtcattgaataaataccatgtagcaagtgtactttgtggagtgttgagtaagtggaaaatggaaagccagttgcatttagagatgataggcctaaagggaactgtcttctgtcgagaagtaaaggaaacttcatgaaggatgtagaagcttagctgcctcagagaagagagaacctgaagatctgaggcaagctggacaggagaggtggatatttgttgatggaagaattcaagtttataatcaattcccacttagcacctactgtgtgctaggaacttgaatgtgtatgtttgacaagtcctgcttggcctgatgggtgggagaaggaacctgagcctggctgagatggctaggcggagggctttgaagtccaagcagctgaactggctgggtgggtttctacctttgaaactgcaagacttgtttggagctcttaattacaatatctgatatttttacagtctgatcttttgacttctacatatagtggaaatctgccaatactaattggtggagatgggaactgtaaaagatcaagtatgctaattttaagcaaatgtaaaaactcataaaacaggtaaacagtggggtgatttcatttgccataattcacataagacgaattttaatctaaaagtactttcttgcttgtattctgtgtggcttttttttgttttttgaggccatatctcactctgtcactcaggctggagtgcggtggtataatgtcagctcactgcaatctctgcctaccaggttcaagcgattctcgtgcctcagcctctcgagtagctggggactacaggcgtgacaggcacgcccagctaatttttgtatttttagtaggagacaggatttcaccatgttggccagggctggtctcgaactcctgacctcaggtgatccgcctgccttggcctcccagagtgctgggattacaggcgtgagccaccgcacccggcctctgtgtagcttttataggctctgttactgttgcgtagtcttgaagaggtacccatcataatgacagcatctccctctgaagggttttggtcaaaatgggtgaatgagacttatacataaagacaggctttctcccctatagttaggaggtgaactcacacatgtgtacctgaacattcttgcttttgaggagacagactcccagtggtactactatgcttaggtgttggacaggataggggtaggaggagaggaggcaggctgctgtcctgaaagtggctgtggtttatggcatcactcccttctaatcagcaagtccagtggccacttagagcccagctcctacctcttcattcacttaacaagtagttattggctgtgcacagtggctcacgcctataatcccagcattttgggaggctgagtgggatgaccgcttgagcccaggatttcaagtccagcctgggctacatagtgagaccgtgtctctgtttttttaaaagctagttgttgaccagctaccctgagccaggcaccaccctgaaggagcttcttttcctctggggagaagcaaattcatgatgtgtgtgctggagatctggcactcatggccagtgctttccagtatcttgaactcttcgggggtcctgttgacccatttcgtgacctacctccgtgactgctctttttcctctgtctcttaagtgtgatggttttccagagtccaatcctcaggactttcccgtccacacacaggcctggtagtcaggtggctctaaaccattaggtgggttgtagacctctctcaagctgccacctccttgctgtcgccagatcgtatttcagtctgtcaggggttatctgtatctggaggttccactgttgcttcagtctcagttacttagaatggaacccagagtcctgcccctttccacctacatgctcttacttgaaagcacctgagacttattgggtccctgattcctgcttcgtctgtatccgcagagtagttgcatgtcatttggcctgttttctaaataatcccacatcatgtcctccctgcacttacattgccactgctctgatttgggcttttttttttttgggacaatgcctctgtcccaattctgagtaacagctctggttcttgccactaccagagttctctagcaaatctgagcatctgacaggttgcacgctggcactcagtgcccttctggtatcatctgccaagaccagggcctgcttcaccacagccacaataaagtcctttcaagccctgataatgccatgttttgtcctaaccttttgctgcagttaattactcttcctattatcttccatgaacttaagactgggcaaaaatgtttccttatctgtgagccactctgaacacaaacaggtcatgaagatagtgttgaaaacaataaatgacaaccaaaagaaaagtgaatattacctagtacaaatagtgtaaattgagacagaaaatgttaaagctagaaagcaagggcaatattctagaatacaaatagtgcttgcctactacaatatt

SEQ ID NO: 335047 - DNA, 2537 bp, Homo sapiens
tgaagtttcctggacttctcaaccgaagacagttccctttaggcctatcatctccatcctcatcctcttccttcacagcatttacttggagctctttgtgacacaccatgtcagtcatgatgaatcggccaacagccagcccttgccagctgacgtcacagtctaagatgggaaactgtggtacagatagacatgaagagagcttagcagtgattgaggtggtgactaaatatacagtcattgaataaataccatgtagcaagtgtactttgtggagtgttgagtaagtggaaaatggaaagccagttgcatttagagatgataggcctaaagggaactgtcttctgtcgagaagtaaaggaaacttcatgaaggatgtagaagcttagctgcctcagagaagagagaacctgaagatctgaggcaagctggacaggagaggtggatatttgttgatggaagaattcaagtttataatcaattcccacttagcacctactgtgtgctaggaacttgaatgtgtatgtttgacaagtcctgcttggcctgatgggtgggagaaggaacctgagcctggctgagatggctaggcggagggctttgaagtccaagcagctgaactggctgggtgggtttctacctttgaaactgcaagacttgtttggagctcttaattacaatatctgatatttttacagtctgatcttttgacttctacatatagtggaaatctgccaatactaattggtggagatgggaactgtaaaagatcaagtatgctaattttaagcaaatgtaaaaactcataaaacaggtaaacagtggggtgatttcatttgccataattcacataagacgaattttaatctaaaagtactttcttgcttgtattctgtgtggcttttttttgttttttgaggccatatctcactctgtcactcaggctggagtgcggtggtataatgtcagctcactgcaatctctgcctaccaggttcaagcgattctcgtgcctcagcctctcgagtagctggggactacaggcgtgacaggcacgcccagctaatttttgtatttttagtaggagacaggatttcaccatgttggccagggctggtctcgaactcctgacctcaggtgatccgcctgccttggcctcccagagtgctgggattacaggcgtgagccaccgcacccggcctctgtgtagcttttataggctctgttactgttgcgtagtcttgaagaggtacccatcataatgacagcatctccctctgaagggttttggtcaaaatgggtgaatgagacttatacataaagacaggctttctcccctatagttaggaggtgaactcacacatgtgtacctgaacattcttgcttttgaggagacagactcccagtggtactactatgcttaggtgttggacaggataggggtaggaggagaggaggcaggctgctgtcctgaaagtggctgtggtttatggcatcactcccttctaatcagcaagtccagtggccacttagagcccagctcctacctcttcattcacttaacaagtagttattggctgtgcacagtggctcacgcctataatcccagcattttgggaggctgagtgggatgaccgcttgagcccaggatttcaagtccagcctgggctacatagtgagaccgtgtctctgtttttttaaaagctagttgttgaccagctaccctgagccaggcaccaccctgaaggagcttcttttcctctggggagaagcaaattcatgatgtgtgtgctggagatctggcactcatggccagtgctttccagtatcttgaactcttcgggggtcctgttgacccatttcgtgacctacctccgtgactgctctttttcctctgtctcttaagtgtgatggttttccagagtccaatcctcaggactttcccgtccacacacaggcctggtagtcaggtggctctaaaccattaggtgggttgtagacctctctcaagctgccacctccttgctgtcgccagatcgtatttcagtctgtcaggggttatctgtatctggaggttccactgttgcttcagtctcagttacttagaatggaacccagagtcctgcccctttccacctacatgctcttacttgaaagcacctgagacttattgggtccctgattcctgcttcgtctgtatccgcagagtagttgcatgtcatttggcctgttttctaaataatcccacatcatgtcctccctgcacttacattgccactgctctgatttgggcttttttttttttgggacaatgcctctgtcccaattctgagtaacagctctggttcttgccactaccagagttctctagcaaatctgagcatctgacagggtgaaaaattctgaatggcttcctgatgcctgactttatgggatcaaattcaagttgcacgctggcactcagtgcccttctggtatcatctgccaagaccagggcctgcttcaccacagccacaataaagtcctttcaagccctga

SEQ ID NO: 335048 - DNA, 2448 bp, Homo sapiens
gctgttctagaggatcccttagtcacagctcacatcactgctaagctctcttcatgtctatctgtaccacagtttcccatcttagactgtggtacagatagacatgaagagagcttagcagtgattgaggtggtgactaaatatacagtcattgaataaataccatgtagcaagtgtactttgtggagtgttgagtaagtggaaaatggaaagccagttgcatttagagatgataggcctaaagggaactgtcttctgtcgagaagtaaaggaaacttcatgaaggatgtagaagcttagctgcctcagagaagagagaacctgaagatctgaggcaagctggacaggagaggtggatatttgttgatggaagaattcaagtttataatcaattcccacttagcacctactgtgtgctaggaacttgaatgtgtatgtttgacaagtcctgcttggcctgatgggtgggagaaggaacctgagcctggctgagatggctaggcggagggctttgaagtccaagcagctgaactggctgggtgggtttctacctttgaaactgcaagacttgtttggagctcttaattacaatatctgatatttttacagtctgatcttttgacttctacatatagtggaaatctgccaatactaattggtggagatgggaactgtaaaagatcaagtatgctaattttaagcaaatgtaaaaactcataaaacaggtaaacagtggggtgatttcatttgccataattcacataagacgaattttaatctaaaagtactttcttgcttgtattctgtgtggcttttttttgttttttgaggccatatctcactctgtcactcaggctggagtgcggtggtataatgtcagctcactgcaatctctgcctaccaggttcaagcgattctcgtgcctcagcctctcgagtagctggggactacaggcgtgacaggcacgcccagctaatttttgtatttttagtaggagacaggatttcaccatgttggccagggctggtctcgaactcctgacctcaggtgatccgcctgccttggcctcccagagtgctgggattacaggcgtgagccaccgcacccggcctctgtgtagcttttataggctctgttactgttgcgtagtcttgaagaggtacccatcataatgacagcatctccctctgaagggttttggtcaaaatgggtgaatgagacttatacataaagacaggctttctcccctatagttaggaggtgaactcacacatgtgtacctgaacattcttgcttttgaggagacagactcccagtggtactactatgcttaggtgttggacaggataggggtaggaggagaggaggcaggctgctgtcctgaaagtggctgtggtttatggcatcactcccttctaatcagcaagtccagtggccacttagagcccagctcctacctcttcattcacttaacaagtagttattggctgtgcacagtggctcacgcctataatcccagcattttgggaggctgagtgggatgaccgcttgagcccaggatttcaagtccagcctgggctacatagtgagaccgtgtctctgtttttttaaaagctagttgttgaccagctaccctgagccaggcaccaccctgaaggagcttcttttcctctggggagaagcaaattcatgatgtgtgtgctggagatctggcactcatggccagtgctttccagtatcttgaactcttcgggggtcctgttgacccatttcgtgacctacctccgtgactgctctttttcctctgtctcttaagtgtgatggttttccagagtccaatcctcaggactttcccgtccacacacaggcctggtagtcaggtggctctaaaccattaggtgggttgtagacctctctcaagctgccacctccttgctgtcgccagatcgtatttcagtctgtcaggggttatctgtatctggaggttccactgttgcttcagtctcagttacttagaatggaacccagagtcctgcccctttccacctacatgctcttacttgaaagcacctgagacttattgggtccctgattcctgcttcgtctgtatccgcagagtagttgcatgtcatttggcctgttttctaaataatcccacatcatgtcctccctgcacttacattgccactgctctgatttgggcttttttttttttgggacaatgcctctgtcccaattctgagtaacagctctggttcttgccactaccagagttctctagcaaatctgagcatctgacagggtgaaaaattctgaatggcttcctgatgcctgactttatgggatcaaattcaagttgcacgctggcactcagtgcccttctggtatcatctgccaagaccagggcctgcttcaccacagccacaataaagtcctttcaagccctga

SEQ ID NO: 335049 - DNA, 4756 bp, Homo sapiens
gcagtcagcagaggagagcgccaggacgctacagcagctgaagaggcagtggcgcccgcggccgcggcgtcggggctggagcgatggcggcgaccgcggtggcggcggctgtggcgggaaccgagtcggcccagggtcccccgggcccggcagcgtcgctggagctgtggctgaacaaagccacagacccaagcatgtcggaacaggattggtcagctatccagaatttctgtgagcaggtgaacactgaccccaatggccccacacatgcgccctggctactggcccacaagatccagtctccgcaagagaaggaagctctttatgccttaacggtgctggagatgtgcatgaaccactgtgggagaagttccacagcgaggtggccaaatttcgtttcctgaacgaactgatcaaagtgttgtccccaaagtacctgtggtcctgggccacaggaaaagttaaaggaagagtcattgatatactcttcacttggacagtctggtttccggaagacatcaagattcgagacgcttatcacatgctgaacaaacaaggaattattaaacaagaccctaaactaccagtggataaaatcttacccccaccatctccctggcccaagagctccatctttgatgctgatgaagaaaagtccaagcttctgacaaggcttctaaagagcaaccaccccgaggaccttcaggctgcaaaccggttaatcaagaatttggtcaaggaggaacaagaaaaatcggagaaggtgtccaagagggtcagtgcggtggaggaagtgcgaagccatgtgaaggtgctgcaggagatgctgagcatgtaccgcaggccagggcaggccccgcccgaccaggaggccctgcaggtcgtgtatgagaggtgtgaaaagctgcggcccacgctgttccggttggcgagtgacaccactgatgacgatgatgcactcgcggaaattctccaggcaaatgacctcctcacccaaggagttctgctgtacaaacaggtgatggagggccgggtcacctttggaaacagagtgaccagctcattgggagacatccctgtctccagagtctttcagaatccagcaggctgcatgaagacctgccccctgattgacttggaggtggacaatggacctgcgcagatggggactgtggtgccatctttgcttcatcaggacctggcagccttgggaatcagtgatgctcctgttacaggcatggtttctggtcagaattgctgtgaggaaaagaggaatccctcctccagcacgctgccaggcggtggtgttcagaacccttctgcagacaggaatttgctggacctcctctcaccacagccagctccgtgccctctgaattatgtttcgcagaaaagtgtccccaaggaagtgccaccaggtactaagtcctctccaggttggtcctgggaggctggcccgttggctccttccccatcttcacagaatacacctctggctcaagtgtttgtccctttggagtctgttaagcccagcagcctgccgcctctcattgtgtatgaccggaatggattcagaattctgctccacttctcccagacgggagcccctgggcacccagaggtacaggtgctgctcttgaccatgatgagcacggctccccagcctgtctgggatatcatgtttcaagtggctgtgccaaagtcaatgagagtgaagctgcagccggcatccagctccaagcttcctgcattcagtcctttgatgcctccagctgtgatatctcagatgctgctgcttgacaatccacacaaagaacctatccgcttacggtacaagctgacattcaaccaaggtggacagcctttcagcgaagtaggagaagtgaaagacttcccagacctggctgtcttgggcgcagcctaacttttcacaagatggacccttcatttcaagcttaggctggcgttacttttgctgtctagtcaggactaatcacggtgtttcagtgcggagtgccaagagtcctatcctgacgtcaggctctgggtgtcaacctctgacttattctgcagatgctctgtgtgtgtgtgtgtgtgtgtgtgtgtgtgtgtgtgtgtgtgtgttcggggagagggtggtagcacagggcttgggatatcggcagtgtgggaaatgcgaagcatttctcatcatcatcatctctgctacagtcatgtttctgcatgtcagcgagcgacactgtccctgcctcaggttggaggttttatcagccaaagtgtttttttcatgtatcgttcgttccattcatccactctgtgccttgtcagcctttgaaaggcttggttgctcccaggctgctgttctcagggaccttaaaagggacctggttagtcttggggcagagagtatctacttgggcactctcttccaagaaagaccttgtctccattttcattagacaatgcttcttgtgtgtgttctggaagatcttctaaatggaatgcttgttgcactgttcccaggcgagtggctgccatgagacctgaggaccacacttgggggaccaatcatgtccttcaccactgtgccttagaatcgcccctggacagagttcctgggcagaggggaaagcagctcccaggccttactcaggcctcaggtccatgggttgggcagccagtctgggcccttctcaggatcctcatctccatcctcatcctcttccttcacagcatttacttggagctctttgtgacacaccatgtcagtcatgatgaatcggccaacagccagcccttgccagctgacgtcacagtctaagatgggaaactgtggtacagatagacatgaagagagcttagcagtgattgaggtggtgactaaatatacagtcattgaataaataccatgtagcaagtgtactttgtggagtgttgagtaagtggaaaatggaaagccagttgcatttagagatgataggcctaaagggaactgtcttctgtcgagaagtaaaggaaacttcatgaaggatgtagaagcttagctgcctcagagaagagagaacctgaagatctgaggcaagctggacaggagaggtggatatttgttgatggaagaattcaagtttataatcaattcccacttagcacctactgtgtgctaggaacttgaatgtgtatgtttgacaagtcctgcttggcctgatgggtgggagaaggaacctgagcctggctgagatggctaggcggagggctttgaagtccaagcagctgaactggctgggtgggtttctacctttgaaactgcaagacttgtttggagctcttaattacaatatctgatatttttacagtctgatcttttgacttctacatatagtggaaatctgccaatactaattggtggagatgggaactgtaaaagatcaagtatgctaattttaagcaaatgtaaaaactcataaaacaggtaaacagtggggtgatttcatttgccataattcacataagacgaattttaatctaaaagtactttcttgcttgtattctgtgtggcttttttttgttttttgaggccatatctcactctgtcactcaggctggagtgcggtggtataatgtcagctcactgcaatctctgcctaccaggttcaagcgattctcgtgcctcagcctctcgagtagctggggactacaggcgtgacaggcacgcccagctaatttttgtatttttagtaggagacaggatttcaccatgttggccagggctggtctcgaactcctgacctcaggtgatccgcctgccttggcctcccagagtgctgggattacaggcgtgagccaccgcacccggcctctgtgtagcttttataggctctgttactgttgcgtagtcttgaagaggtacccatcataatgacagcatctccctctgaagggttttggtcaaaatgggtgaatgagacttatacataaagacaggctttctcccctatagttaggaggtgaactcacacatgtgtacctgaacattcttgcttttgaggagacagactcccagtggtactactatgcttaggtgttggacaggataggggtaggaggagaggaggcaggctgctgtcctgaaagtggctgtggtttatggcatcactcccttctaatcagcaagtccagtggccacttagagcccagctcctacctcttcattcacttaacaagtagttattggctgtgcacagtggctcacgcctataatgcaggagaatggcgtgagcccgggaggcggagcttgcagtgagccgagatagcgccactgcactccagcctgggcgacagagcgagactccgtctcaaaaaaaaaaaaaaaaaaaaaaaaaaaaaaggggggccgttcggggcccccccattctttgcttttttttttgttaaacacccaagcccgtgtgaccccttaaggggggccctatctaagcccttctttaagtgaccttcggggggcctattgcccagtggtgtatttgtccgctttctccagtctccattaaggccttccttcaattaatgagggccttatataaccaaacgactcttaaccattattcccacgtggagtgagcgaggttaacagcgagaaaaggcccattacaagggccacccagatcacacgcgtgtccaaaagggctcggagagggaaaaacccgatttttttctctcacaggtttttcttgccaggattttctgacctttaccatcg

SEQ ID NO: 335050 - DNA, 2045 bp, Homo sapiens
ggaattcaagttaacaattccacttaggccacttggcaggacttgattggatgttgaagcctctggcctatggtggaaggacctacctgctaatgctagcggagggctttgaagtccaagcagctgaactggctgggtgggtttctacctttgaaactgcaagacttgtttggagctcttaattacaatatctgatatttttacagtctgatcttttgacttctacatatagtggaaatctgccaatactaattggtggagatgggaactgtaaaagatcaagtatgctaattttaagcaaatgtaaaaactcataaaacaggtaaacagtggggtgatttcatttgccataattcacataagacgaattttaatctaaaagtactttcttgcttgtattctgtgtggcttttttttgttttttgaggccatatctcactctgtcactcaggctggagtgcggtggtataatgtcagctcactgcaatctctgcctaccaggttcaagcgattctcgtgcctcagcctctcgagtagctggggactacaggcgtgacaggcacgcccagctaatttttgtatttttagtaggagacaggatttcaccatgttggccagggctggtctcgaactcctgacctcaggtgatccgcctgccttggcctcccagagtgctgggattacaggcgtgagccaccgcacccggcctctgtgtagcttttataggctctgttactgttgcgtagtcttgaagaggtacccatcataatgacagcatctccctctgaagggttttggtcaaaatgggtgaatgagacttatacataaagacaggctttctcccctatagttaggaggtgaactcacacatgtgtacctgaacattcttgcttttgaggagacagactcccagtggtactactatgcttaggtgttggacaggataggggtaggaggagaggaggcaggctgctgtcctgaaagtggctgtggtttatggcatcactcccttctaatcagcaagtccagtggccacttagagcccagctcctacctcttcattcacttaacaagtagttattggctgtgcacagtggctcacgcctataatcccagcattttgggaggctgagtgggatgaccgcttgagcccaggatttcaagtccagcctgggctacatagtgagaccgtgtctctgtttttttaaaagctagttgttgaccagctaccctgagccaggcaccaccctgaaggagcttcttttcctctggggagaagcaaattcatgatgtgtgtgctggagatctggcactcatggccagtgctttccagtatcttgaactcttcgggggtcctgttgacccatttcgtgacctacctccgtgactgctctttttcctctgtctcttaagtgtgatggttttccagagtccaatcctcaggactttcccgtccacacacaggcctggtagtcaggtggctctaaaccattaggtgggttgtagacctctctcaagctgccacctccttgctgtcgccagatcgtatttcagtctgtcaggggttatctgtatctggaggttccactgttgcttcagtctcagttacttagaatggaacccagagtcctgcccctttccacctacatgctcttacttgaaagcacctgagacttattgggtccctgattcctgcttcgtctgtatccgcagagtagttgcatgtcatttggcctgttttctaaataatcccacatcatgtcctccctgcacttacattgccactgctctgatttgggcttttttttttttgggacaatgcctctgtcccaattctgagtaacagctctggttcttgccactaccagagttctctagcaaatctgagcatctgacagggtgaaaaattctgaatggcttcctgatgcctgactttatgggatcaaattcaagttgcacgctggcactcagtgcccttctggtatcatctgccaagaccagggcctgcttcaccacagccacaataaagtcctttcaagccctga

SEQ ID NO: 335051 - DNA, 1124 bp, Homo sapiens
cctgggctacatagtgagaccgtgtctctgtttttttaaaagctagttgttgaccagctaccctgagccaggcaccaccctgaaggagcttcttttcctctggggagaagcaaattcatgatgtgtgtgctggagatctggcactcatggccagtgctttccagtatcttgaactcttcggggtggtgcccccagcattttgggaggctgagtgggatgaccgcttgagcccaggatttcaagtccagcctgggctacatagtgagaccgtgtctctgtttttttaaaagctagttgttgaccagctaccctgagccaggcaccaccctgaaggagcttcttttcctctggggagaagcaaattcatgatgtgtgtgctggagatctggcactcatggccagtgctttccagtatcttgaactcttcgggggtcctgttgacccatttcgtgacctacctccgtgactgctctttttcctctgtctcttaagtgtgatggttttccagagtccaatcctcaggactttcccgtccacacacaggcctggtagtcaggtggctctaaaccattaggtgggttgtagacctctctcaagctgccacctccttgctgtcgccagatcgtatttcagtctgtcaggggttatctgtatctggaggttccactgttgcttcagtctcagttacttagaatggaacccagagtcctgcccctttccacctacatgctcttacttgaaagcacctgagacttattgggtccctgattcctgcttcgtctgtatccgcagagtagttgcatgtcatttggcctgttttctaaataatcccacatcatgtcctccctgcacttacattgccactgctctgatttgggcttttttttttttgggacaatgcctctgtcccaattctgagtaacagctctggttcttgccactaccagagttctctagcaaatctgagcatctgacagggtgaaaaattctgaatggcttcctgatgcctgactttatgggatcaaattcaagttgcacgctggcactcagtgcccttctggtatcatctgccaagaccagggcctgcttcaccacagccacaataaagtcctttcaagccctga

SEQ ID NO: 335052 - DNA, 506 bp, Homo sapiens
atcccgagggtggaggtgaagcagggttatctgtatctggaggttccactgttgcttcagtctcagttacttagaatggaacccagagtcctgcccctttccacctacatgctcttacttgaaagcacctgagacttattgggtccctgattcctgcttcgtctgtatccgcagagtagttgcatgtcatttggcctgttttctaaataatcccacatcatgtcctccctgcacttacattgccactgctctgatttgggcttttttttttttgggacaatgcctctgtcccaattctgagtaacagctctggttcttgccactaccagagttctctagcaaatctgagcatctgacagggtgaaaaattctgaatggcttcctgatgcctgactttatgggatcaaattcaagttgcacgctggcactcagtgcccttctggtatcatctgccaagaccagggcctgcttcaccacagccacaataaagtcctttcaagccctga

SEQ ID NO: 335053 - DNA, 5464 bp, Homo sapiens
gcagtcagcagaggagagcgccaggacgctacagcagctgaagaggcagtggcgcccgcggccgcggcgtcggggctggagcgatggcggcgaccgcggtggcggcggctgtggcgggaaccgagtcggcccagggtcccccgggcccggcagcgtcgctggagctgtggctgaacaaagccacagacccaagcatgtcggaacaggattggtcagctatccagaatttctgtgagcaggtgaacactgaccccaatggccccacacatgcgccctggctactggcccacaagatccagtctccgcaagagaaggaagctctttatgccttaacggtgctggagatgtgcatgaaccactgtgggagaagttccacagcgaggtggccaaatttcgtttcctgaacgaactgatcaaagtgttgtccccaaagtacctgtggtcctgggccacaggaaaagttaaaggaagagtcattgatatactcttcacttggacagtctggtttccggaagacatcaagattcgagacgcttatcacatgctgaacaaacaaggaattattaaacaagaccctaaactaccagtggataaaatcttacccccaccatctccctggcccaagagctccatctttgatgctgatgaagaaaagtccaagcttctgacaaggcttctaaagagcaaccaccccgaggaccttcaggctgcaaaccggttaatcaagaatttggtcaaggaggaacaagaaaaatcggagaaggtgtccaagagggtcagtgcggtggaggaagtgcgaagccatgtgaaggtgctgcaggagatgctgagcatgtaccgcaggccagggcaggccccgcccgaccaggaggccctgcaggtcgtgtatgagaggtgtgaaaagctgcggcccacgctgttccggttggcgagtgacaccactgatgacgatgatgcactcgcggaaattctccaggcaaatgacctcctcacccaaggagttctgctgtacaaacaggtgatggagggccgggtcacctttggaaacagagtgaccagctcattgggagacatccctgtctccagagtctttcagaatccagcaggctgcatgaagacctgccccctgattgacttggaggtggacaatggacctgcgcagatggggactgtggtgccatctttgcttcatcaggacctggcagccttgggaatcagtgatgctcctgttacaggcatggtttctggtcagaattgctgtgaggaaaagaggaatccctcctccagcacgctgccaggcggtggtgttcagaacccttctgcagacaggaatttgctggacctcctctcaccacagccagctccgtgccctctgaattatgtttcgcagaaaagtgtccccaaggaagtgccaccaggtactaagtcctctccaggttggtcctgggaggctggcccgttggctccttccccatcttcacagaatacacctctggctcaagtgtttgtccctttggagtctgttaagcccagcagcctgccgcctctcattgtgtatgaccggaatggattcagaattctgctccacttctcccagacgggagcccctgggcacccagaggtacaggtgctgctcttgaccatgatgagcacggctccccagcctgtctgggatatcatgtttcaagtggctgtgccaaagtcaatgagagtgaagctgcagccggcatccagctccaagcttcctgcattcagtcctttgatgcctccagctgtgatatctcagatgctgctgcttgacaatccacacaaagaacctatccgcttacggtacaagctgacattcaaccaaggtggacagcctttcagcgaagtaggagaagtgaaagacttcccagacctggctgtcttgggcgcagcctaacttttcacaagatggacccttcatttcaagcttaggctggcgttacttttgctgtctagtcaggactaatcacggtgtttcagtgcggagtgccaagagtcctatcctgacgtcaggctctgggtgtcaacctctgacttattctgcagatgctctgtgtgtgtgtgtgtgtgtgtgtgtgtgtgtgtgtgtgtgtgtgttcggggagagggtggtagcacagggcttgggatatcggcagtgtgggaaatgcgaagcatttctcatcatcatcatctctgctacagtcatgtttctgcatgtcagcgagcgacactgtccctgcctcaggttggaggttttatcagccaaagtgtttttttcatgtatcgttcgttccattcatccactctgtgccttgtcagcctttgaaaggcttggttgctcccaggctgctgttctcagggaccttaaaagggacctggttagtcttggggcagagagtatctacttgggcactctcttccaagaaagaccttgtctccattttcattagacaatgcttcttgtgtgtgttctggaagatcttctaaatggaatgcttgttgcactgttcccaggcgagtggctgccatgagacctgaggaccacacttgggggaccaatcatgtccttcaccactgtgccttagaatcgcccctggacagagttcctgggcagaggggaaagcagctcccaggccttactcaggcctcaggtccatgggttgggcagccagtctgggcccttctcaggatcctcatctccatcctcatcctcttccttcacagcatttacttggagctctttgtgacacaccatgtcagtcatgatgaatcggccaacagccagcccttgccagctgacgtcacagtctaagatgggaaactgtggtacagatagacatgaagagagcttagcagtgattgaggtggtgactaaatatacagtcattgaataaataccatgtagcaagtgtactttgtggagtgttgagtaagtggaaaatggaaagccagttgcatttagagatgataggcctaaagggaactgtcttctgtcgagaagtaaaggaaacttcatgaaggatgtagaagcttagctgcctcagagaagagagaacctgaagatctgaggcaagctggacaggagaggtggatatttgttgatggaagaattcaagtttataatcaattcccacttagcacctactgtgtgctaggaacttgaatgtgtatgtttgacaagtcctgcttggcctgatgggtgggagaaggaacctgagcctggctgagatggctaggcggagggctttgaagtccaagcagctgaactggctgggtgggtttctacctttgaaactgcaagacttgtttggagctcttaattacaatatctgatatttttacagtctgatcttttgacttctacatatagtggaaatctgccaatactaattggtggagatgggaactgtaaaagatcaagtatgctaattttaagcaaatgtaaaaactcataaaacaggtaaacagtggggtgatttcatttgccataattcacataagacgaattttaatctaaaagtactttcttgcttgtattctgtgtggcttttttttgttttttgaggccatatctcactctgtcactcaggctggagtgcggtggtataatgtcagctcactgcaatctctgcctaccaggttcaagcgattctcgtgcctcagcctctcgagtagctggggactacaggcgtgacaggcacgcccagctaatttttgtatttttagtaggagacaggatttcaccatgttggccagggctggtctcgaactcctgacctcaggtgatccgcctgccttggcctcccagagtgctgggattacaggcgtgagccaccgcacccggcctctgtgtagcttttataggctctgttactgttgcgtagtcttgaagaggtacccatcataatgacagcatctccctctgaagggttttggtcaaaatgggtgaatgagacttatacataaagacaggctttctcccctatagttaggaggtgaactcacacatgtgtacctgaacattcttgcttttgaggagacagactcccagtggtactactatgcttaggtgttggacaggataggggtaggaggagaggaggcaggctgctgtcctgaaagtggctgtggtttatggcatcactcccttctaatcagcaagtccagtggccacttagagcccagctcctacctcttcattcacttaacaagtagttattggctgtgcacagtggctcacgcctataatcccagcattttgggaggctgagtgggatgaccgcttgagcccaggatttcaagtccagcctgggctacatagtgagaccgtgtctctgtttttttaaaagctagttgttgaccagctaccctgagccaggcaccaccctgaaggagcttcttttcctctggggagaagcaaattcatgatgtgtgtgctggagatctggcactcatggccagtgctttccagtatcttgaactcttcgggggtcctgttgacccatttcgtgacctacctccgtgactgctctttttcctctgtctcttaagtgtgatggttttccagagtccaatcctcaggactttcccgtccacacacaggcctggtagtcaggtggctctaaaccattaggtgggttgtagacctctctcaagctgccacctccttgctgtcgccagatcgtatttcagtctgtcaggggttatctgtatctggaggttccactgttgcttcagtctcagttacttagaatggaacccagagtcctgcccctttccacctacatgctcttacttgaaagcacctgagacttattgggtccctgattcctgcttcgtctgtatccgcagagtagttgcatgtcatttggcctgttttctaaataatcccacatcatgtcctccctgcacttacattgccactgctctgatttgggcttttttttttttgggacaatgcctctgtcccaattctgagtaacagctctggttcttgccactaccagagttctctagcaaatctgagcatctgacagggtgaaaaattctgaatggcttcctgatgcctgactttatgggatcaaattcaagttgcacgctggcactcagtgcccttctggtatcatctgccaagaccagggcctgcttcaccacagccacaataaagtcctttcaagccctgataatgccatgttttgtcctaaccttttgctgcagttaattactcttcctattatcttccatgaacttaagactgggcaaaaatgtttccttatctgtgagccactctgaacacaaacaggtcatgaagatagtgttgaaaacaataaatgacaaccaaaagaaaagtgaatattacctagtacaaatagtgtaaattgagacagaaaatgttaaagctagaaagcaagggcaatattctagaatacaaatagtgcttgcctactacaatatt

SEQ ID NO: 335054 - DNA, 117 bp, Homo sapiens
cctctatgcgctatttttcctttctaccgtctcccgccagtaaacctgccttgtccatttcaggacaattccagctgcaactggacacatcacggaaatgacatcagtgccttactg

SEQ ID NO: 335055 - DNA, 134 bp, Homo sapiens
tgtccagaaataagaataacacaatagctaatcacaaaatttaataatattatgtttttagagacagggtctcgttgtgtcacccaggctggagagcaaaggcgcaatcacaactcactgcagcctccaactct

SEQ ID NO: 335056 - DNA, 353 bp, Homo sapiens
atggccagagtaggagaaagagagagaggggaggtgccacacacttttaaacaaccagatcgcatgagaactcactcactatacagtaccaaggggggaccgtgctaaaccattcataagaactctgcccccatgacccaatcacctcccaccaggccccacctccaacactggggattacgattcgacatgagatttgggcagggacgacatccaaactatatcatcagctctgtttggaagactgtggtagtgtcaatgtggatgttaaaggtcgcagatgctgacctcctgttgtcaggacttgcagttgtccactatgccccatcttccggcagcatagcagtcttaca

SEQ ID NO: 335057 - DNA, 577 bp, Homo sapiens
atccttgaaactaagtttgcttttctgaaaagataaatcacaaacctttagccaaacaaaccaagaaaaaagaagagtcaatcagacatggaagatgagacattacacttaataccacagaaatacaaaaggtcataagacaacattatccacaactatatgcccacaagttagacaatctaaaagaagtagagaaattcctagaaagataaaacctgctaagactgaatcatgaggaaatagaaagtatctttcattaatgcagaattgaggaaaacaaattaggccaggtgccagtggctcacccctgtaatcccaccaccttgggaggctgaggcaggcagatcacttgaggtgaggagttttgagaccaacctggccaacatggcgaaaccgtgtctttactaaaaatacaaaaattagctgggtgtggtggtgcatgcttgtaatcccagctacttgagaggctgaggcacaagaatcactttaaccggggaggtggaggttgcagtgagcctagatcgcaccactgtacttcagcttgggcaacagagggagacttttatctcaaataaat

SEQ ID NO: 335058 - DNA, 508 bp, Homo sapiens
tgcaacctccgcctcctgggttcaggtgattctccttcttcagcctcacgagtagctgggattacaggcgtgcaccgccatacccagctaatttttacatctttaatagagacgggttttcaccatgttggtcaggctggtcttgaactcctgatctcaggtgatccacctgccccagcctcccaaagtgctgggattacaggcatgagccgctgcacccggctccattccttttctctgcgacaaacctgcgtggtgataagtccactcccttgactagtttaattctgaagcttattgatggattcctcaaacagatcttgtggaccaaattattctatttttctgtagagcctggcgatttgagataatctatctgcacagttttgtagtgtttgcttccatcactcaagagtaagacaatatgtcagagttatcttgatggagggataagagagagatagtttggagacagagcagaaaacctttctagtgtacttggtaatga

SEQ ID NO: 335059 - DNA, 712 bp, Homo sapiens
tccagcccgggagacagagtgagactccatctcaaaaaaataaaatgaaattaaataaaataaacggtttaagtttcgacatgggtaaatacccatgaaccatcaccacaattaaggtaatgagcatacccatctctccaagacttctgatgctcttttgtaattttgccctcctacatctttcttcccttccctgagccacatcccctgataatcactgatctactttctctcactgtctagagttttaaataccacagtttgtttattcatgtacctttgtggatggacctttgaatcatttccactttgcggctactacaaataaagttaatgtcaacatttatgtacaagtttttgtggctactacaaatgaagctaatatcaacatttatatacaagtctttgtgtgaacataggggttttttttgtttgtttaacatcatatcactgaaagaggcattgaagaaggttatgctttcatttttcttgggtgacatcttgaagtagaatggctggactatatagttggtttatgcttaactttttaagaaactgccaaattgttttccatacggttttacctttttacagtcctaccaacatgtatgagttctgcttcctcaccaatacttgatatggtcagtccttctaatttagccattccaatacatgtagagatatatcattgttgtttgattttgcatatccc

SEQ ID NO: 335060 - DNA, 270 bp, Homo sapiens
tcagccatgaggctctgaaccctgctgccaactcccagcccagcccctgctcctccaccctcagggggctgtccacttccccacacaggctttccgcatggatttactgagaatccacgttgttctgggtgtgtgaggctgctggggatacatcagacaccgtctccctgctctcctggagccgacagccaataaacaggaactcaagtaaagaaaacagaaaggccaggtgcggtggctcacacctgtaatcccagcactttgggaggc

SEQ ID NO: 335061 - DNA, 300 bp, Homo sapiens
taaaatgtgggcccttctagatgacaattgggctgactgcttcaaaaagtcagtatcacaagtgaaggagaggtgggtaggctgttcttgttaaaagagacaaaggggctgggcatggtggctcacgcctataatcctagaactttgggaggccgaggcgggcagatcacttgaggtcaggagttcaaaaccagcctggccaacatggtttagtagaaaccctgtctctactaaaaatacaaaaaagttagctgggcgtggtggtgcgtacctgtaatcccagctatttgggaggctgag

SEQ ID NO: 335062 - DNA, 607 bp, Homo sapiens
aatgatcctttaattgaaatggagttgtcatttccttgccatgctgataaaatgttgttgctgttgttgtttgttgttgttcttaaatgactctttcagaatttttaactcagtattttgattacataccattttaagaaaataattgtccataaattaaaaatgctagcaaattgatgaattgattttctcatgccaatttggaaatctgaaatatatctaagactggtgaataatatgtaggtctaattgccatttgaataaaagaatctgaggaagagctttgcctttatttttgtttattattcattttagtttagttatttattttagtagaaaaatgtggttgtgtcaacgaagaggaggtacattaaaatgcattattaaagccaatgcttatccatgtaatgaaatgagaatgtagatggcttaatgggttttggagaggattaagataattttaaagaaacttcaaaaaatcagatgctcgaatcatgatgttttttgtttatatttaataaatatgaaaaccatacatgggcatatcaacaatgaggaattcacatatatatcacgaagtctcttgctaatttgtcaacttttaaat

SEQ ID NO: 335063 - DNA, 174 bp, Homo sapiens
gggctcgtgggcagacagcaccctttggaaggaactgagcctgggaagtgggaaccctattccccggctcacaacacctcccacccggggccctcccagggctgcatgaagtttagtcacctggtgacaggctgagttactgtgcggagtcactgtgtgcctccttgctgctgt

SEQ ID NO: 335064 - DNA, 645 bp, Homo sapiens
ccaggtggggagtataggttgttggattcatccatcttgactcaaggaagaagaagccacaggttttacatcttccacggagaagtaattttcctatggatttgtggtcgggacccaagagcctggttgaaaaatgatgtagggagatggccaagcaagagagcacccaaagctggaatttcatccacgaagcctgcaacactagtggggttctgcttgagactccaccagcatggatcctggccaccgccagtgtggcctcctgtgggcactaaggtgcctatgcctttctcactgaagcaaacaggcggtagtgggcagagctctggttccccttgaaattcgctctgtcagccgggtacagtggcttatgcctgtaatcctagcactttgggaggtggaggtgggtggatcaggaggtcaggagatcaagaccattctgactaacatggtgaaaccccgtctatactaaaaatacaaaaaaattgccgggtgtggcggcacgcacctgtaatcccagctatttgggaggctgaggcaggagaatcacttgaacccgggaggtggaggttgcagtcagccgagattgcgccactgcactccagcctgggtgacagagtgaaactccggctcaaaaaaaaagaa

SEQ ID NO: 335065 - DNA, 340 bp, Homo sapiens
cactctccccttcttttcttttagtttccacaacagactcttctgtccccctacccccctcccccaaccaagtgaaatctttatgccactaccaaaaacctataaaagcggccaagcctcttccagctcctttctagtccttaatactgacagtaatgagaggctgccctggggaacccagattctaggaacataatctgaagaaagacagtccggatgctagttctacaaaatcctttggatttatgcttctcatcctcatattttaaaagctcaactaaagcagcttaatttcatttagcagagaattgctgaactaaactggataagagttctactt

SEQ ID NO: 335066 - DNA, 538 bp, Homo sapiens
ttaatacctgtgttcaaacctctcaagagcaggtggcaacagcctagtttccttcctgagatgtggctagaaggtagtattgctgtgctggaactctggaaccaagagatgttgctgccaactcaccctgtagtacaagaatagttgattctggatccaacatggatgtctgtgatcacatgcaccatgccattcactggaactggaggagtttcacatgatttacctgtgggaaagaaaatgttttggagccaggtagagtaatctgaactctcttcagtacgtaaggtctcaacctgcatgtagcttcctgaagaaaacacgcagttctgatagttccacagattttggcaccttgagaaaactcatcagagagcctcaggatcagccacctactaagccccactttcaaaaagaccttccctccagatctatctagatctagatttagatctgtgtagagaccttgcatcccttatcaaaatgtaaaggtcatttatggcattatttactaccaataaagttttcaaaggatttc

SEQ ID NO: 335067 - DNA, 509 bp, Homo sapiens
taacttctttttgtctctgaaattcacttaaatacctttttgaccataattagcaatgctgagtagtgttatatattatagcatatttaagtccaagggaatggtttgcttcttggactcaaatctcttatttatatccttggataaaataggaagtcaagaaaggcaactatcttttctccttttcccggccttctggtgtaaacaaaacccataaacccattcttcccctatctgattatttcatggtaggctttgagtataaaacacgatgaatgaggtatgagtcacccttggccattcagtttggcagacattagggagtacctaaattgtatcaggtactgttctaggatttacagatcaaaacataattaatcttggttcctgcctttgaggagcttatcgtctggtttgattaggctgaaatgtaatttgaatttcaatacaatgtatttcttagggtttttagatcttttgtagtctaacgtgatgagccttaaaattac

SEQ ID NO: 335068 - DNA, 477 bp, Homo sapiens
ggattgctaaataatttttaaaagaagattaaagtttcatgccttgtcaagaggccaattaatgtagcacagctaggcaggtaggaaagaaaaacttcacctgtcacaagataggaatgtgttggttgatactccctgtcttcctttgaaatcataccatcgaaatgaaagttgtccctagttttaataacctcctgacaagaggattccactgtttctctgctatcccatttcaatatttaacaactttctaaaagtctgagcatctcttgcttcagattgtcaatttttctgttattgttaggaaacagagggtcattctcttacgtaatactctccttatgattgtggtcggggaagagaatggtgccccacaggaatcttagacctcctgttccatctccatccttttgatatacaaagggcagcagttctcaaagtgtggtccatggaccagcagcatcagcatctcctggg

SEQ ID NO: 335069 - DNA, 169 bp, Homo sapiens
atttaagttttcttagaaatgctttggctataccacattttgatattagtgcttttgttaccatcaatggttagtagttcttcctttttatgtattttttaaaacccagttatttagtaaaatttaatgtagtttccaagcatatgggatacttttgttacatattgct

SEQ ID NO: 335070 - DNA, 435 bp, Homo sapiens
acggctggcttttaacattaggcacaaataaggggatatcttttactatgatgacaaaactgatttactataaacaagtaatatgaaaagtatttgtttaattaaatagcaaagtcattgatgatcctgttccaaggtgtttctggacagaatttacacaatagaaaacaatatctatctaggaagacaaaatatgtggctacggactcacctcaaatgaaaatagagaaaccagctttatagatctaaaaattttagatctcagggttaatgttttaaaagaatataaagaaactcataattgattaaataataataattcaaagagaataaatgaaacacaagtatctctaggctagaaaatttcatctttgtcgtataaatttatatagctaacagaatgttgtgtgaggagaaaggggaaagtggaatagg

SEQ ID NO: 335071 - DNA, 292 bp, Homo sapiens
ctcttctactgactttccttccagctctgagattcagttttgaagacaaggttgttggggacctcggatagatctgttggccgtggctttcagtaaacactactagagactgaggacatgttctagacttggaatggtatgaagcagtcgaactttttaggatgggccctacccttagggactgcctacgaaactagatctagaagaggaggctgtggacattaggaggtggctgcaattggaaagttccagagagcttactgagggataacggatgtaggacaggaggctg

SEQ ID NO: 335072 - DNA, 488 bp, Homo sapiens
tttttgtattttttagtagagacagggtttcaccatgttggccaggctgttgtcgaactcctgacctcaggtgatccgcctgcctcggcctcccaaagtgctggaattataggcgtgtttgataaggaagtttaagagaggatagattccaagtataaaaataactttcatttctgaataagcgttttgctttttaatggtgtttacttttttttccactgcatctcttttcctaagggatcttttcataactctgagtgtgtgggtttaaatttaaaagggttctaattggcaagatgctttttggtttacagctagaaaatggttctacttattaaagctctaatagttgtcttaggctcatgttcttcagttctttatttctcacacagaagagtttacttgtttgacttgtaatatgaccaggagaaagaagaaacaaaacatagcaataatttatcagaaggcatttatgccctgtatccttg

SEQ ID NO: 335073 - DNA, 164 bp, Homo sapiens
aatacagtctcactgcaaaaaatacagaatcaagggatgaggaaattgagtcctaggaactaaattggcttgttgatatcatgtgactgatcagtagttgtacaactaaagaaagagctcatgtctcctgatatgtcttttcttcatacaatgtcactacatgc

SEQ ID NO: 335074 - DNA, 209 bp, Homo sapiens
aggctgggaggcagttgaggccatcccaaacagccccaacccgctccagagggagggcaggaacgtgggtggggacagtagatggggctcaagaatgcagccagcacatcacagtcaggaggagaggcgaggccatagggtgaaaggtctttttctcagatccaaggggtccagcccctcctcccaggcagatgcacactcagctgctg

SEQ ID NO: 335075 - DNA, 558 bp, Homo sapiens
ggagtctcgctctgtcacccaggctggagtgcagtggcgtgatctcagctcaccgcaacctctgcctcccgggttcaagaaattctctgcctcagcctcccgagtagctatgattacaggcatcccccaccatgcccagctaatttttgtatttttagtagagatggggtttcaccatcttggccaggctggtcttgaactgctggccttgtgaaccacctgccttggtctcccaaagtgctgggattacaggcatgagccaccgcacctggcctcagaaagtttttagaacatttggttggtacaggccagagcacatatggtctgtgtaattagccaactccttagagctgcttggggtttctggactggctgagttactgcttcatatcttttagctctttagccttattaatggttgaattacatattaacttttctcatacagaaaatgttcattctccctgaacatgaagagctaggataatgattttcttaaaatgagcagatagcagatgttgatcttaaagtgttcaaggattgaggccttgtttaaga

SEQ ID NO: 335076 - DNA, 119 bp, Homo sapiens
acgggaaaacagaaaactgggttgcaaatactttatagagtctcactcagtcatcctgccgaaatgcagtggtgtgatcatagctagccttgaactcttgggctcaaggaatcttcctg

SEQ ID NO: 335077 - DNA, 140 bp, Homo sapiens
tgcaattggaaaagcaagctgtctaccatgtaggtgaggagttggtattgctgttcttaaatccacagactgactttcatttcttgttctaacaaagcaagacagattgactttctgtccccagcaagctgcagtcctac

SEQ ID NO: 335078 - DNA, 810 bp, Homo sapiens
cgcgaacttcctcccggcgcggcccgtgccccgccggccgcctgcgaacacctcggcctccgcctcccctcaggttgatgccggcccaggatggatcagacctgtgaactacccagaagaaattgtctgctgcccttttccaatccagtgaatttagatgcccctgaagacaaggacagccctttcggatgatccagattccagtaccagtacattaggaaacatgctagaattacctggaacttcatcatcatctacttcacaggaattgccatttagactggccttgtcatgttgcccaggctggcgtcgggactcctgggctcattcgatcctcctgcatcagctagaactacagtagtttcagattttgaagtgtgtatgtgtatgtgtgatatgtatatattccgtgtgtatagaaatggagagtatcttatttgagttgttgttttcagtaatgctgtcaagtattgttagagggtgataaatgataacatttgtttttatttgagcttatgaagaatttcttgactttctagctaaatgatcagttcacttctcttagcctcaattttattgcgtctaaattccagaagttcttgattgctataagattccttcagctttaaatattaatatttgatattgattttgtttctgcccaaacacattgtttggtcaccgccggtaatgttagcaaagagaattttttttggccaacaaatgtctcataccacattcagtttttataagaaaaacttttatggtatgttgttattctgagttcattaaacattcgctttaccttat

SEQ ID NO: 335079 - DNA, 8260 bp, Homo sapiens
  misc_feature (4287)..(4287): n is a, c, g, or t
  misc_feature (4303)..(4303): n is a, c, g, or t
ctcgctgccttctcccctgaagagagacgcggggggaggggggtgcggcgagcggccccgctctctccccaccgctccgctcgcaccccagtgtaatgagggtcaccccctccccccagctggcccgggagggggcgcggggcacggttgatgccggcccaggatggatcagacctgtgaactacccagaagaaattgtctgctgcccttttccaatccagtgaatttagatgcccctgaagacaaggacagccctttcggtaatggtcaatccaatttttctgagccacttaatgggtgtactatgcagttatcgactgtcagtggaacatcccaaaatgcttatggacaagattctccatcttgttacattccactgcggagactacaggatttggcctccatgatcaatgtagagtatttaaatgggtctgctgatggatcagaatcctttcaagaccctgaaaaaagtgattcaagagctcagacgccaattgtttgcacttccttgagtcctggtggtcctacagcacttgctatgaaacaggaaccctcttgtaataactcccctgaactccaggtaaaagtaacaaagactatcaagaatggctttctgcactttgagaattttacttgtgtggacgatgcagatgtagattctgaaatggacccagaacagccagtcacagaggatgagagtatagaggagatctttgaggaaactcagaccaatgccacctgcaattatgagactaaatcagagaatggtgtaaaagtggccatgggaagtgaacaagacagcacaccagagagtagacacggtgcagtcaaatcgccattcttgccattagctcctcagactgaaacacagaaaaataagcaaagaaatgaagtggacggcagcaatgaaaaagcagcccttctcccagcccccttttcactaggagacacaaacattacaatagaagagcaattaaactcaataaatttatcttttcaggatgatccagattccagtaccagtacattaggaaacatgctagaattacctggaacttcatcatcatctacttcacaggaattgccatttgttcctcagaaaattttgagtaaatgggaagccagtgttggacttgcagaacagtatgatgttcccaaggggtcaaagaaccgaaaatgtattcctggttcaatcaagttggacagtgaagaagatatgccatttgaagactgcacaaatgatcctgagtcagaacatgacctgttgcttaatggctgtttgaaatcactggcttttgattctgaacattctgcagatgagaaggaaaagccttgcgctaaatctcgagccagaaagagctctgataatccaaaaaggactagtgtgaaaaagggccacatacaatttgaagcacataaagatgaacggaggggaaagattccagagaaccttggcctaaactttatctctggggatatatctgatacgcaggcctctaatgaactttccaggatagcaaatagcctcacagggtccaacactgccccaggaagttttctgttttcttcctgtggaaaaaacactgcaaagaaagaatttgagacttcaaatggtgactctttattgggcttgcctgagggtgctttgatctcaaagtgttctcgagagaagaataaaccccaacgaagcctggtgtgtggttcaaaagtgaagctctgctatattggagcaggtgatgaggaaaagcgaagtgattccattagtatctgtaccacttctgatgatggaagcagtgacctggatcccatagaacacagctcagagtctgataacagtgtccttgaaattccagatgctttcgatagaacagagaacatgttatctatgcagaaaaatgaaaagataaagtattctaggtttgctgccacaaacactagggtaaaagcaaaacagaagcctctcattagtaactcacatacagaccacttaatgggttgtactaagagtgcagagcctggaaccgagacgtctcaggttaatctctctgatctgaaggcatctactcttgttcacaaaccccagtcagattttacaaatgatgctctctctccaaaattcaacctgtcatcaagcatatccagtgagaactcgttaataaagggtggggcagcaaatcaagctctattacattcgaaaagcaaacagcccaagttccgaagtataaagtgcaaacacaaagaaaatccagttatggcagaacccccagttataaatgaggagtgcagtttgaaatgctgctcttctgataccaaaggctctcctttggccagcatttctaaaagtgggaaagtggatggtctaaaactactgaacaatatgcatgagaaaaccagggattcaagtgacatagaaacagcagtggtgaaacatgttttatccgagttgaaggaactctcttacagatccttaggtgaggatgtcagtgactctggaacatcaaagccatcaaaaccattacttttctcttctgcttctagtcagaatcacatacctattgaaccagactacaaattcagtacattgctaatgatgttgaaagatatgcatgatagtaagacgaaggagcagcggttgatgactgctcaaaacctggtctcttaccggagtcctggtcgtggggactgttctactaatagtcctgtaggagtctctaaggttttggtttcaggaggctccacacacaattcagagaaaaagggagatggcactcagaactccgccaatcctagccctagtgggggtgactctgcattatctggcgagttgtctgcttccctacctggcttactgtccgacaagagagacctccctgcttctggtaaaagtcgttcagactgtgttactaggcgcaactgtggacgatcaaagccttcatccaaattgcgagatgctttttcagcccaaatggtaaagaacacagtgaaccgtaaagccttaaagaccgagcgcaaaagaaaactgaatcagcttccaagtgtgactcttgatgctgtactgcagggagaccgagaacgtggaggttcattgagaggtggggcagaagatcctagtaaagaggatccccttcagataatgggccacttaacaagtgaagatggtgaccatttttctgatgtgcatttcgatagcaaggttaagcaatctgatcctggtaaaatttctgaaaaaggactctcttttgaaaacggaaaaggcccagagctggactctgtaatgaacagtgagaatgatgaactcaatggtgtaaatcaagtggtgcctaaaaagcggtggcagcgtttaaaccaaaggcgcactaaacctcgtaagcgcatgaacagatttaaagagaaagaaaactctgagtgtgcctttagggtcttacttcctagtgaccctgtgcaggaggggcgggatgagtttccagagcatagaactccttcagcaagcatacttgaggaaccactgacagagcaaaatcatgctgactgcttagattcagctgggccacggttaaatgtttgtgataaatccagtgccagcattggtgacatggaaaaggagccaggaattcccagtttgacaccacaggctgagctccctgaaccagctgtgcggtcagagaagaaacgccttaggaagccaagcaagtggcttttggaatatacagaagaatatgatcagatatttgctcctaagaaaaaacaaaagaaggtacaggagcaggtgcacaaggtaagttcccgctgtgaagaggaaagccttctagcccgaggtcgatctagtgctcagaacaagcaggtggacgagaattctttgatttcaaccaaagaagagcctccagttcttgaaagggaggctccgtttttggagggccccttggctcagtcagaacttggaggtggacatgctgagttgccgcagctgaccttgtctgtgcctgtggctccggaagtctctccacggcctgcccttgagtctgaggaattgctagttaaaacgccaggaaattatgaaagtaaacgtcaaagaaaaccaactaagaaacttcttgaatccaatgatttagaccctggatttatgcccaagaagggggaccttggcctttctaaaaagtgctatgaagctggtcacctggagaatggcataactgaatcttgtgccacatcttattcaaaagattttggtggaggcactaccaagatatttgacaagccaaggaagcgaaaacgacagaggcatgctgnagccaagatgcagtgnaaaaaagtgaaaaatgatgactcgtcaaaagagattccaggctcagagggagaactaatgcctcacaggacggccacaagccccaaggagactgttgaggaaggtgtagaacacgatcccgggatgcctgcctctaaaaaaatgcagggtgaacgcggtggaggagctgcactcaaggagaatgtctgtcagaattgtgaaaaattgggtgagctgctgttatgtgaggctcagtgctgtggggctttccacctggagtgccttggattgactgagatgccaagaggaaaatttatctgcaatgaatgtcgcacaggaatccatacctgttttgtatgtaagcagagtggggaagatgttaaaaggtgccttctacccttgtgtggaaagttttaccatgaagagtgtgtccagaagtacccacccactgttatgcagaacaagggcttccggtgctccctccacatctgtataacctgtcatgctgctaatccagccaatgtttctgcatctaaaggtcggttgatgcgctgtgtccgctgtcctgtggcataccacgccaatgacttttgcctggctgctgggtcaaagatccttgcatctaatagtatcatctgccctaatcactttacccctaggcggggctgccgaaatcatgagcatgttaatgttagctggtgctttgtgtgctcagaaggaggcagccttctgtgctgtgattcttgccctgctgcttttcatcgtgaatgcctgaacattgatatccctgaaggaaactggtattgcaatgactgtaaagcaggcaaaaagccacactacagggagattgtctgggtaaaagttggacgatacaggtggtggccagctgagatctgccatcctcgagctgttccttccaacattgataagatgagacatgatgtgggagagttcccagtcctcttttttggatctaatgactatttgtggactcaccaggcccgagtcttcccttacatggagggtgacgtgagcagcaaggataagatgggcaaaggagtggatgggacatataaaaaagctcttcaggaagctgcagcaaggtttgaggaattaaaggcccaaaaagagctaagacagctgcaggaagaccgaaagaatgacaagaagccacccccttataaacatataaaggtaaaccgtcctattggcagggtacagatcttcactgcagacttatctgaaataccccgttgcaactgtaaagctactgatgagaacccctgtgggatagactctgaatgcatcaaccgcatgctgctctatgagtgccaccccacagtgtgtcctgccggagggcgctgtcaaaaccagtgcttttccaagcgccaatatccagaggttgaaattttccgcacattacagcggggttggggtctacggacccaagaggacatcagaaagggagaatttgttaacgagtacgttggggagctgatcgacgaggaggagtgcatggcgagaatcaagcacgcacacgagaacgacatcacccacttctacatgctcactatagacaaggaccgtataatagacgctggccccaaaggaaactactctcgatttatgaatcacagctgccagcccaactgtgagaccctcaagtggacagtgaatggggacactcgtgtgggcctgtttgccgtctgtgacattcctgcagggacggagctgacttttaactacaacctcgattgtctgggcaatgaaaaaacggtctgccggtgtggagcctccaattgcagtggcttcttgggtgtaaggccaaagaatcaacccattgccacggaagaaaagtcaaagaaattcaagaagaagcaacagggaaagcgcaggacccagggtgaaatcacaaaggagcgagaagatgagtgttttagttgtggggatgctggccagctcgtctcctgcaagaaaccaggctgcccaaaagtttaccacgcagactgtctcaatctgaccaagcgaccagcagggaaatgggaatgtccgtggcatcagtgtgacatctgcgggaaggaagcagcctccttctgtgagatgtgccccagctccttttgtaagcagcatcgagaagggatgcttttcatttccaaactggatgggcgtctgtcttgtactgagcatgacccctgtgggcccaatcctctggaacctggggagatccgtgagtatgtgcctcccccagtaccgctgcctccagggccaagcactcacctggcagagcaatcaacaggaatggctgctcaggcacccaaaatgtcagataaacctcctgctgacaccaaccagatgctgtcgctctccaaaaaagctctggcagggacttgtcagaggccactgctacctgaaagacctcttgagagaactgactccaggccccagcctttagataaggtcagagacctcgctgggtcaggggcccaatcccaatccttggtttccagccagaggccactggacaggccaccagcagtggcaggaccaagaccccagctaagcgacaaaccctctccagtgaccagcccaagctcctcaccctcagtcaggtcccaaccactggaatcacctctggggacggctgacccaaggctggataaatccataggtgctgccagcccaaggccccagtcactggagaaaacctcagttcccactggcctgagacttccgccgccagacagactgctcattactagcagtcccaaaccccagacttcagacaggcctactgacaaaccccatgcctctttgtcccagagactcccacctcctgagaaagtactatcagctgtggtccagacccttgtagctaaagaaaaagcactgaggcctgtggaccagaatactcagtcaaaaaatagagctgctttggtgatggatctcatagacctaactcctcgccagaaggagcgggcagcttcacctcatcaggtcacaccacaggctgatgagaagatgccagtgttggagtcaagttcatggcctgccagcaaaggtctggggcatatgccgagagctgttgagaaaggctgtgtgtcagatcctcttcagacatctgggaaagcagcagccccttcagaggacccctggcaagctgttaaatcactcacccaagccagactttcttctcagccttctgccaaagcctttttatatgagccaaccactcaggcctcaggaagagcttctgcaggggctgaacagacccaggggttttttaccaaatccccggccttggtggaaaacaagggcaaaaccaaatgggtagggaggccaacaaattacttgcatttggccgccaagagttggcaatcttttaggtctctcgggaaggccccaccctcctcccccaatgaagaaaagaagttggtaaccacagagcaaagtccctgggccctgggaaaagcctcatcacgggcagggctctggcccatagtggctggacagacactggcacagtcttgctggtctgctgggagcacacagacattggcacagacttgctggtctcttggaagagggcaagaccccaaaccagagcaaaatacacttccagctcttaaccaggctccttccagtcacaagtgtgcagaatcagaacagaagtagtaccaatcaatgtcacatgaacaaacaagctgcccccagggtaccatttggggaggggaaatcttttctttctttcccccttaaaaaaaaacacatctgccccgaacactttcccactgttattctttcctcatatcccaacactcagaactcttgtgacattagccagtgggggcttatggttgtgtgaaccatgtatgaaaatccagtgggccccaaccaaggagacagacagacttgggtctctttcccccaacttttccacatggtcatcgtgaaataaaaagtccactctggaaaaaaaaa

SEQ ID NO: 335080 - DNA, 4684 bp, Homo sapiens
ctcgctgccttctcccctgaagagagacgcggggggaggggggtgcggcgagcggccccgctctctccccaccgctccgctcgcaccccagtgtaatgagggtcaccccctccccccagctggcccgggagggggcgcggggcacggttgatgccggcccaggatggatcagacctgtgaactacccagaagaaattgtctgctgcccttttccaatccagtgaatttagatgcccctgaagacaaggacagccctttcggtaatggtcaatccaatttttctgagccacttaatgggtgtactatgcagttatcgactgtcagtggaacatcccaaaatgcttatggacaagattctccatcttgttacattccactgcggagactacaggatttggcctccatgatcaatgtagagtatttaaatgggtctgctgatggatcagaatcctttcaagaccctgaaaaaagtgattcaagagctcagacgccaattgtttgcacttccttgagtcctggtggtcctacagcacttgctatgaaacaggaaccctcttgtaataactcccctgaactccaggtaaaagtaacaaagactatcaagaatggctttctgcactttgagaattttacttgtgtggacgatgcagatgtagattctgaaatggacccagaacagccagtcacagaggatgagagtatagaggagatctttgaggaaactcagaccaatgccacctgcaattatgagactaaatcagagaatggtgtaaaagtggccatgggaagtgaacaagacagcacaccagagagtagacacggtgcagtcaaatcgccattcttgccattagctcctcagactgaaacacagaaaaataagcaaagaaatgaagtggacggcagcaatgaaaaagcagcccttctcccagcccccttttcactaggagacacaaacattacaatagaagagcaattaaactcaataaatttatcttttcaggatgatccagattccagtaccagtacattaggaaacatgctagaattacctggaacttcatcatcatctacttcacaggaattgccattttgtcaacctaagaaaaagtctacgccactgaagtatgaagttggagatctcatctgggcaaaattcaagagacgcccatggtggccctgcaggatttgttctgatccgttgattaacacacattcaaaaatgaaagtttccaaccggaggccctatcggcagtactacgtggaggcttttggagatccttctgagagagcctgggtggctggaaaagcaatcgtcatgtttgaaggcagacatcaattcgaagagctacctgtccttaggagaagagggaaacagaaagaaaaaggatataggcataaggttcctcagaaaattttgagtaaatgggaagccagtgttggacttgcagaacagtatgatgttcccaaggggtcaaagaaccgaaaatgtattcctggttcaatcaagttggacagtgaagaagatatgccatttgaagactgcacaaatgatcctgagtcagaacatgacctgttgcttaatggctgtttgaaatcactggcttttgattctgaacattctgcagatgagaaggaaaagccttgcgctaaatctcgagccagaaagagctctgataatccaaaaaggactagtgtgaaaaagggccacatacaatttgaagcacataaagatgaacggaggggaaagattccagagaaccttggcctaaactttatctctggggatatatctgatacgcaggcctctaatgaactttccaggatagcaaatagcctcacagggtccaacactgccccaggaagttttctgttttcttcctgtggaaaaaacactgcaaagaaagaatttgagacttcaaatggtgactctttattgggcttgcctgagggtgctttgatctcaaagtgttctcgagagaagaataaaccccaacgaagcctggtgtgtggttcaaaagtgaagctctgctatattggagcaggtgatgaggaaaagcgaagtgattccattagtatctgtaccacttctgatgatggaagcagtgacctggatcccatagaacacagctcagagtctgataacagtgtccttgaaattccagatgctttcgatagaacagagaacatgttatctatgcagaaaaatgaaaagataaagtattctaggtttgctgccacaaacactagggtaaaagcaaaacagaagcctctcattagtaactcacatacagaccacttaatgggttgtactaagagtgcagagcctggaaccgagacgtctcaggttaatctctctgatctgaaggcatctactcttgttcacaaaccccagtcagattttacaaatgatgctctctctccaaaattcaacctgtcatcaagcatatccagtgagaactcgttaataaagggtggggcagcaaatcaagctctattacattcgaaaagcaaacagcccaagttccgaagtataaagtgcaaacacaaagaaaatccagttatggcagaacccccagttataaatgaggagtgcagtttgaaatgctgctcttctgataccaaaggctctcctttggccagcatttctaaaagtgggaaagtggatggtctaaaactactgaacaatatgcatgagaaaaccagggattcaagtgacatagaaacagcagtggtgaaacatgttttatccgagttgaaggaactctcttacagatccttaggtgaggatgtcagtgactctggaacatcaaagccatcaaaaccattacttttctcttctgcttctagtcagaatcacatacctattgaaccagactacaaattcagtacattgctaatgatgttgaaagatatgcatgatagtaagacgaaggagcagcggttgatgactgctcaaaacctggtctcttaccggagtcctggtcgtggggactgttctactaatagtcctgtaggagtctctaaggttttggtttcaggaggctccacacacaattcagagaaaaagggagatggcactcagaactccgccaatcctagccctagtgggggtgactctgcattatctggcgagttgtctgcttccctacctggcttactgtccgacaagagagacctccctgcttctggtaaaagtcgttcagactgtgttactaggcgcaactgtggacgatcaaagccttcatccaaattgcgagatgctttttcagcccaaatggtaaagaacacagtgaaccgtaaagccttaaagaccgagcgcaaaagaaaactgaatcagcttccaagtgtgactcttgatgctgtactgcagggagaccgagaacgtggaggttcattgagaggtggggcagaagatcctagtaaagaggatccccttcagataatgggccacttaacaagtgaagatggtgaccatttttctgatgtgcatttcgatagcaaggttaagcaatctgatcctggtaaaatttctgaaaaaggactctcttttgaaaacggaaaaggcccagagctggactctgtaatgaacagtgagaatgatgaactcaatggtgtaaatcaagtggtgcctaaaaagcggtggcagcgtttaaaccaaaggcgcactaaacctcgtaagcgcatgaacagatttaaagagaaagaaaactctgagtgtgcctttagggtcttacttcctagtgaccctgtgcaggaggggcgggatgagtttccagagcatagaactccttcagcaagcatacttgaggaaccactgacagagcaaaatcatgctgactgcttagattcagctgggccacggttaaatgtttgtgataaatccagtgccagcattggtgacatggaaaaggagccaggaattcccagtttgacaccacaggctgagctccctgaaccaggtggagtcttgctctgtcacccaggctggagtgcagtggcacgatctaggctcactgcaacctccgcctcccaggttcaagtgattctcctgtctcaccctcctgagtagctgcaactacagctgtgcggtcagagaagaaacgccttaggaagccaagcaagtggcttttggaatatacagaagaatatgatcagatatttgctcctaagaaaaaacaaaagaaggtacaggagcaggtgcacaaggaaattatgaaagtaaacgtcaaagaaaaccaactaagaaacttcttgaatccaatgatttagaccctggatttatgcccaagaagggggaccttggcctttctaaaaaggtatgttatttttgtaagttctaaaagaaataaactcaggaaatgagaaattttaaaaatgacattttgagtagcagttataacattgatgtacatacatatagaaattagtgtgtgtgtcagcagtcatacatgatctgagatttcctacatgaaaggctgttttgcagttgtgtgaccatgtatgtgtataaactggtttcaggtttcctttccaagtgaaaaaaatttttaaatgctttgaagattaagtttgtgtttgttataatttcttttctgggttcaaatcctcttacctgttttctactaaactactatctcaaatatcactagtctactctcctattgccgtgtcgtcgtagcccttt

SEQ ID NO: 335081 - DNA, 4093 bp, Homo sapiens
ctcgctgccttctcccctgaagagagacgcggggggaggggggtgcggcgagcggccccgctctctccccaccgctccgctcgcaccccagtgtaatgagggtcaccccctccccccagctggcccgggagggggcgcggggcacggttgatgccggcccaggatggatcagacctgtgaactacccagaagaaattgtctgctgcccttttccaatccagtgaatttagatgcccctgaagacaaggacagccctttcggatgatccagattccagtaccagtacattaggaaacatgctagaattacctggaacttcatcatcatctacttcacaggaattgccattttgtcaacctaagaaaaagtctacgccactgaagtatgaagttggagatctcatctgggcaaaattcaagagacgcccatggtggccctgcaggatttgttctgatccgttgattaacacacattcaaaaatgaaagtttccaaccggaggccctatcggcagtactacgtggaggcttttggagatccttctgagagagcctgggtggctggaaaagcaatcgtcatgtttgaaggcagacatcaattcgaagagctacctgtccttaggagaagagggaaacagaaagaaaaaggatataggcataaggttcctcagaaaattttgagtaaatgggaagccagtgttggacttgcagaacagtatgatgttcccaaggggtcaaagaaccgaaaatgtattcctggttcaatcaagttggacagtgaagaagatatgccatttgaagactgcacaaatgatcctgagtcagaacatgacctgttgcttaatggctgtttgaaatcactggcttttgattctgaacattctgcagatgagaaggaaaagccttgcgctaaatctcgagccagaaagagctctgataatccaaaaaggactagtgtgaaaaagggccacatacaatttgaagcacataaagatgaacggaggggaaagattccagagaaccttggcctaaactttatctctggggatatatctgatacgcaggcctctaatgaactttccaggatagcaaatagcctcacagggtccaacactgccccaggaagttttctgttttcttcctgtggaaaaaacactgcaaagaaagaatttgagacttcaaatggtgactctttattgggcttgcctgagggtgctttgatctcaaagtgttctcgagagaagaataaaccccaacgaagcctggtgtgtggttcaaaagtgaagctctgctatattggagcaggtgatgaggaaaagcgaagtgattccattagtatctgtaccacttctgatgatggaagcagtgacctggatcccatagaacacagctcagagtctgataacagtgtccttgaaattccagatgctttcgatagaacagagaacatgttatctatgcagaaaaatgaaaagataaagtattctaggtttgctgccacaaacactagggtaaaagcaaaacagaagcctctcattagtaactcacatacagaccacttaatgggttgtactaagagtgcagagcctggaaccgagacgtctcaggttaatctctctgatctgaaggcatctactcttgttcacaaaccccagtcagattttacaaatgatgctctctctccaaaattcaacctgtcatcaagcatatccagtgagaactcgttaataaagggtggggcagcaaatcaagctctattacattcgaaaagcaaacagcccaagttccgaagtataaagtgcaaacacaaagaaaatccagttatggcagaacccccagttataaatgaggagtgcagtttgaaatgctgctcttctgataccaaaggctctcctttggccagcatttctaaaagtgggaaagtggatggtctaaaactactgaacaatatgcatgagaaaaccagggattcaagtgacatagaaacagcagtggtgaaacatgttttatccgagttgaaggaactctcttacagatccttaggtgaggatgtcagtgactctggaacatcaaagccatcaaaaccattacttttctcttctgcttctagtcagaatcacatacctattgaaccagactacaaattcagtacattgctaatgatgttgaaagatatgcatgatagtaagacgaaggagcagcggttgatgactgctcaaaacctggtctcttaccggagtcctggtcgtggggactgttctactaatagtcctgtaggagtctctaaggttttggtttcaggaggctccacacacaattcagagaaaaagggagatggcactcagaactccgccaatcctagccctagtgggggtgactctgcattatctggcgagttgtctgcttccctacctggcttactgtccgacaagagagacctccctgcttctggtaaaagtcgttcagactgtgttactaggcgcaactgtggacgatcaaagccttcatccaaattgcgagatgctttttcagcccaaatggtaaagaacacagtgaaccgtaaagccttaaagaccgagcgcaaaagaaaactgaatcagcttccaagtgtgactcttgatgctgtactgcagggagaccgagaacgtggaggttcattgagaggtggggcagaagatcctagtaaagaggatccccttcagataatgggccacttaacaagtgaagatggtgaccatttttctgatgtgcatttcgatagcaaggttaagcaatctgatcctggtaaaatttctgaaaaaggactctcttttgaaaacggaaaaggcccagagctggactctgtaatgaacagtgagaatgatgaactcaatggtgtaaatcaagtggtgcctaaaaagcggtggcagcgtttaaaccaaaggcgcactaaacctcgtaagcgcatgaacagatttaaagagaaagaaaactctgagtgtgcctttagggtcttacttcctagtgaccctgtgcaggaggggcgggatgagtttccagagcatagaactccttcagcaagcatacttgaggaaccactgacagagcaaaatcatgctgactgcttagattcagctgggccacggttaaatgtttgtgataaatccagtgccagcattggtgacatggaaaaggagccaggaattcccagtttgacaccacaggctgagctccctgaaccagctgtgcggtcagagaagaaacgccttaggaagccaagcaagtggcttttggaatatacagaagaatatgatcagatatttgctcctaagaaaaaacaaaagaaggtacaggagcaggtgcacaaggtaagttcccgctgtgaagaggaaagccttctagcccgaggtcgatctagtgctcagaacaagcaggtggacgagaattctttgatttcaaccaaagaagagcctccagttcttgaaagggaggctccgtttttggagggccccttggctcagtcagaacttggaggtggacatgctgagttgccgcagctgaccttgtctgtgcctgtggctccggaagtctctccacggcctgcccttgagtctgaggaattgctagttaaaacgccaggaaattatgaaagtaaacgtcaaagaaaaccaactaagaaacttcttgaatccaatgatttagaccctggatttatgcccaagaagggggaccttggcctttctaaaaaggtatgttatttttgtaagttctaaaagaaataaactcaggaaatgagaaattttaaaaatgacattttgagtagcagttataacattgatgtacatacatatagaaattagtgtgtgtgtcagcagtcatacatgatctgagatttcctacatgaaaggctgttttgcagttgtgtgaccatgtatgtgtataaactggtttcaggtttcctttccaagtgaaaaaaatttttaaatgctttgaagattaagtttgtgtttgttataatttcttttctgggttcaaatcctcttacctgttttctactaaactactatctcaaatatcactagtctactctcctattgccgtgtcgtcgtagcccttt

SEQ ID NO: 335082 - DNA, 4970 bp, Homo sapiens
  misc_feature (4596)..(4596): n is a, c, g, or t
  misc_feature (4612)..(4612): n is a, c, g, or t
ctcgctgccttctcccctgaagagagacgcggggggaggggggtgcggcgagcggccccgctctctccccaccgctccgctcgcaccccagtgtaatgagggtcaccccctccccccagctggcccgggagggggcgcggggcacggttgatgccggcccaggatggatcagacctgtgaactacccagaagaaattgtctgctgcccttttccaatccagtgaatttagatgcccctgaagacaaggacagccctttcggtaatggtcaatccaatttttctgagccacttaatgggtgtactatgcagttatcgactgtcagtggaacatcccaaaatgcttatggacaagattctccatcttgttacattccactgcggagactacaggatttggcctccatgatcaatgtagagtatttaaatgggtctgctgatggatcagaatcctttcaagaccctgaaaaaagtgattcaagagctcagacgccaattgtttgcacttccttgagtcctggtggtcctacagcacttgctatgaaacaggaaccctcttgtaataactcccctgaactccaggtaaaagtaacaaagactatcaagaatggctttctgcactttgagaattttacttgtgtggacgatgcagatgtagattctgaaatggacccagaacagccagtcacagaggatgagagtatagaggagatctttgaggaaactcagaccaatgccacctgcaattatgagactaaatcagagaatggtgtaaaagtggccatgggaagtgaacaagacagcacaccagagagtagacacggtgcagtcaaatcgccattcttgccattagctcctcagactgaaacacagaaaaataagcaaagaaatgaagtggacggcagcaatgaaaaagcagcccttctcccagcccccttttcactaggagacacaaacattacaatagaagagcaattaaactcaataaatttatcttttcaggatgatccagattccagtaccagtacattaggaaacatgctagaattacctggaacttcatcatcatctacttcacaggaattgccattttgtcaacctaagaaaaagtctacgccactgaagtatgaagttggagatctcatctgggcaaaattcaagagacgcccatggtggccctgcaggatttgttctgatccgttgattaacacacattcaaaaatgaaagtttccaaccggaggccctatcggcagtactacgtggaggcttttggagatccttctgagagagcctgggtggctggaaaagcaatcgtcatgtttgaaggcagacatcaattcgaagagctacctgtccttaggagaagagggaaacagaaagaaaaaggatataggcataaggttcctcagaaaattttgagtaaatgggaagccagtgttggacttgcagaacagtatgatgttcccaaggggtcaaagaaccgaaaatgtattcctggttcaatcaagttggacagtgaagaagatatgccatttgaagactgcacaaatgatcctgagtcagaacatgacctgttgcttaatggctgtttgaaatcactggcttttgattctgaacattctgcagatgagaaggaaaagccttgcgctaaatctcgagccagaaagagctctgataatccaaaaaggactagtgtgaaaaagggccacatacaatttgaagcacataaagatgaacggaggggaaagattccagagaaccttggcctaaactttatctctggggatatatctgatacgcaggcctctaatgaactttccaggatagcaaatagcctcacagggtccaacactgccccaggaagttttctgttttcttcctgtggaaaaaacactgcaaagaaagaatttgagacttcaaatggtgactctttattgggcttgcctgagggtgctttgatctcaaagtgttctcgagagaagaataaaccccaacgaagcctggtgtgtggttcaaaagtgaagctctgctatattggagcaggtgatgaggaaaagcgaagtgattccattagtatctgtaccacttctgatgatggaagcagtgacctggatcccatagaacacagctcagagtctgataacagtgtccttgaaattccagatgctttcgatagaacagagaacatgttatctatgcagaaaaatgaaaagataaagtattctaggtttgctgccacaaacactagggtaaaagcaaaacagaagcctctcattagtaactcacatacagaccacttaatgggttgtactaagagtgcagagcctggaaccgagacgtctcaggttaatctctctgatctgaaggcatctactcttgttcacaaaccccagtcagattttacaaatgatgctctctctccaaaattcaacctgtcatcaagcatatccagtgagaactcgttaataaagggtggggcagcaaatcaagctctattacattcgaaaagcaaacagcccaagttccgaagtataaagtgcaaacacaaagaaaatccagttatggcagaacccccagttataaatgaggagtgcagtttgaaatgctgctcttctgataccaaaggctctcctttggccagcatttctaaaagtgggaaagtggatggtctaaaactactgaacaatatgcatgagaaaaccagggattcaagtgacatagaaacagcagtggtgaaacatgttttatccgagttgaaggaactctcttacagatccttaggtgaggatgtcagtgactctggaacatcaaagccatcaaaaccattacttttctcttctgcttctagtcagaatcacatacctattgaaccagactacaaattcagtacattgctaatgatgttgaaagatatgcatgatagtaagacgaaggagcagcggttgatgactgctcaaaacctggtctcttaccggagtcctggtcgtggggactgttctactaatagtcctgtaggagtctctaaggttttggtttcaggaggctccacacacaattcagagaaaaagggagatggcactcagaactccgccaatcctagccctagtgggggtgactctgcattatctggcgagttgtctgcttccctacctggcttactgtccgacaagagagacctccctgcttctggtaaaagtcgttcagactgtgttactaggcgcaactgtggacgatcaaagccttcatccaaattgcgagatgctttttcagcccaaatggtaaagaacacagtgaaccgtaaagccttaaagaccgagcgcaaaagaaaactgaatcagcttccaagtgtgactcttgatgctgtactgcagggagaccgagaacgtggaggttcattgagaggtggggcagaagatcctagtaaagaggatccccttcagataatgggccacttaacaagtgaagatggtgaccatttttctgatgtgcatttcgatagcaaggttaagcaatctgatcctggtaaaatttctgaaaaaggactctcttttgaaaacggaaaaggcccagagctggactctgtaatgaacagtgagaatgatgaactcaatggtgtaaatcaagtggtgcctaaaaagcggtggcagcgtttaaaccaaaggcgcactaaacctcgtaagcgcatgaacagatttaaagagaaagaaaactctgagtgtgcctttagggtcttacttcctagtgaccctgtgcaggaggggcgggatgagtttccagagcatagaactccttcagcaagcatacttgaggaaccactgacagagcaaaatcatgctgactgcttagattcagctgggccacggttaaatgtttgtgataaatccagtgccagcattggtgacatggaaaaggagccaggaattcccagtttgacaccacaggctgagctccctgaaccagctgtgcggtcagagaagaaacgccttaggaagccaagcaagtggcttttggaatatacagaagaatatgatcagatatttgctcctaagaaaaaacaaaagaaggtacaggagcaggtgcacaaggtaagttcccgctgtgaagaggaaagccttctagcccgaggtcgatctagtgctcagaacaagcaggtggacgagaattctttgatttcaaccaaagaagagcctccagttcttgaaagggaggctccgtttttggagggccccttggctcagtcagaacttggaggtggacatgctgagttgccgcagctgaccttgtctgtgcctgtggctccggaagtctctccacggcctgcccttgagtctgaggaattgctagttaaaacgccaggaaattatgaaagtaaacgtcaaagaaaaccaactaagaaacttcttgaatccaatgatttagaccctggatttatgcccaagaagggggaccttggcctttctaaaaagtgctatgaagctggtcacctggagaatggcataactgaatcttgtgccacatcttattcaaaagattttggtggaggcactaccaagatatttgacaagccaaggaagcgaaaacgacagaggcatgctgnagccaagatgcagtgnaaaaaagtgaaaaatgatgactcgtcaaaagagattccaggctcagagggagaactaatgcctcacaggacggccacaagccccaaggagactgttgaggaaggtgtagaacacgatcccgggatgcctgcctctaaaaaaatgcagggtgaacgcggtggaggagctgcactcaaggagaatgtctgtcagaattgtgaaaaattgggtgagctgctgttatgtgaggctcagtgctgtggggctttcctattgctgctggtgcagctgtaaaaaagaaaaaaccaaaaattttgggatgacatgaaaggccataatgtcaggaaagagtagagaggactgaataatccagatggca

SEQ ID NO: 335083 - DNA, 3683 bp, Homo sapiens
tcagctcactgcaacccccgcctcctgagttcaagcgattctcatgcctcagcctctcaagtagcttggattacagtttccaaccggaggccctatcggcagtactacgtggaggcttttggagatccttctgagagagcctgggtggctggaaaagcaatcgtcatgtttgaaggcagacatcaattcgaagagctacctgtccttaggagaagagggaaacagaaagaaaaaggatataggcataaggttcctcagaaaattttgagtaaatgggaagccagtgttggacttgcagaacagtatgatgttcccaaggggtcaaagaaccgaaaatgtattcctggttcaatcaagttggacagtgaagaagatatgccatttgaagactgcacaaatgatcctgagtcagaacatgacctgttgcttaatggctgtttgaaatcactggcttttgattctgaacattctgcagatgagaaggaaaagccttgcgctaaatctcgagccagaaagagctctgataatccaaaaaggactagtgtgaaaaagggccacatacaatttgaagcacataaagatgaacggaggggaaagattccagagaaccttggcctaaactttatctctggggatatatctgatacgcaggcctctaatgaactttccaggatagcaaatagcctcacagggtccaacactgccccaggaagttttctgttttcttcctgtggaaaaaacactgcaaagaaagaatttgagacttcaaatggtgactctttattgggcttgcctgagggtgctttgatctcaaagtgttctcgagagaagaataaaccccaacgaagcctggtgtgtggttcaaaagtgaagctctgctatattggagcaggtgatgaggaaaagcgaagtgattccattagtatctgtaccacttctgatgatggaagcagtgacctggatcccatagaacacagctcagagtctgataacagtgtccttgaaattccagatgctttcgatagaacagagaacatgttatctatgcagaaaaatgaaaagataaagtattctaggtttgctgccacaaacactagggtaaaagcaaaacagaagcctctcattagtaactcacatacagaccacttaatgggttgtactaagagtgcagagcctggaaccgagacgtctcaggttaatctctctgatctgaaggcatctactcttgttcacaaaccccagtcagattttacaaatgatgctctctctccaaaattcaacctgtcatcaagcatatccagtgagaactcgttaataaagggtggggcagcaaatcaagctctattacattcgaaaagcaaacagcccaagttccgaagtataaagtgcaaacacaaagaaaatccagttatggcagaacccccagttataaatgaggagtgcagtttgaaatgctgctcttctgataccaaaggctctcctttggccagcatttctaaaagtgggaaagtggatggtctaaaactactgaacaatatgcatgagaaaaccagggattcaagtgacatagaaacagcagtggtgaaacatgttttatccgagttgaaggaactctcttacagatccttaggtgaggatgtcagtgactctggaacatcaaagccatcaaaaccattacttttctcttctgcttctagtcagaatcacatacctattgaaccagactacaaattcagtacattgctaatgatgttgaaagatatgcatgatagtaagacgaaggagcagcggttgatgactgctcaaaacctggtctcttaccggagtcctggtcgtggggactgttctactaatagtcctgtaggagtctctaaggttttggtttcaggaggctccacacacaattcagagaaaaagggagatggcactcagaactccgccaatcctagccctagtgggggtgactctgcattatctggcgagttgtctgcttccctacctggcttactgtccgacaagagagacctccctgcttctggtaaaagtcgttcagactgtgttactaggcgcaactgtggacgatcaaagccttcatccaaattgcgagatgctttttcagcccaaatggtaaagaacacagtgaaccgtaaagccttaaagaccgagcgcaaaagaaaactgaatcagcttccaagtgtgactcttgatgctgtactgcagggagaccgagaacgtggaggttcattgagaggtggggcagaagatcctagtaaagaggatccccttcagataatgggccacttaacaagtgaagatggtgaccatttttctgatgtgcatttcgatagcaaggttaagcaatctgatcctggtaaaatttctgaaaaaggactctcttttgaaaacggaaaaggcccagagctggactctgtaatgaacagtgagaatgatgaactcaatggtgtaaatcaagtggtgcctaaaaagcggtggcagcgtttaaaccaaaggcgcactaaacctcgtaagcgcatgaacagatttaaagagaaagaaaactctgagtgtgcctttagggtcttacttcctagtgaccctgtgcaggaggggcgggatgagtttccagagcatagaactccttcagcaagcatacttgaggaaccactgacagagcaaaatcatgctgactgcttagattcagctgggccacggttaaatgtttgtgataaatccagtgccagcattggtgacatggaaaaggagccaggaattcccagtttgacaccacaggctgagctccctgaaccagctgtgcggtcagagaagaaacgccttaggaagccaagcaagtggcttttggaatatacagaagaatatgatcagatatttgctcctaagaaaaaacaaaagaaggtacaggagcaggtgcacaaggtaagttcccgctgtgaagaggaaagccttctagcccgaggtcgatctagtgctcagaacaagcaggtggacgagaattctttgatttcaaccaaagaagagcctccagttcttgaaagggaggctccgtttttggagggccccttggctcagtcagaacttggaggtggacatgctgagttgccgcagctgaccttgtctgtgcctgtggctccggaagtctctccacggcctgcccttgagtctgaggaattgctagttaaaacgccaggaaattatgaaagtaaacgtcaaagaaaaccaactaagaaacttcttgaatccaatgatttagaccctggatttatgcccaagaagggggaccttggcctttctaaaaaggtatgttatttttgtaagttctaaaagaaataaactcaggaaatgagaaattttaaaaatgacattttgagtagcagttataacattgatgtacatacatatagaaattagtgtgtgtgtcagcagtcatacatgatctgagatttcctacatgaaaggctgttttgcagttgtgtgaccatgtatgtgtataaactggtttcaggtttcctttccaagtgaaaaaaatttttaaatgctttgaagattaagtttgtgtttgttataatttcttttctgggttcaaatcctcttacctgttttctactaaactactatctcaaatatcactagtctactctcctattgccgtgtcgtcgtagcccttt

SEQ ID NO: 335084 - DNA, 1623 bp, Homo sapiens
ctcgctgccttctcccctgaagagagacgcggggggaggggggtgcggcgagcggccccgctctctccccaccgctccgctcgcaccccagtgtaatgagggtcaccccctccccccagctggcccgggagggggcgcggggcacggttgatgccggcccaggatggatcagacctgtgaactacccagaagaaattgtctgctgcccttttccaatccagtgaatttagatgcccctgaagacaaggacagccctttcggtaatggtcaatccaatttttctgagccacttaatgggtgtactatgcagttatcgactgtcagtggaacatcccaaaatgcttatggacaagattctccatcttgttacattccactgcggagactacaggatttggcctccatgatcaatgtagagtatttaaatgggtctgctgatggatcagaatcctttcaagaccctgaaaaaagtgattcaagagctcagacgccaattgtttgcacttccttgagtcctggtggtcctacagcacttgctatgaaacaggaaccctcttgtaataactcccctgaactccaggtaaaagtaacaaagactatcaagaatggctttctgcactttgagaattttacttgtgtggacgatgcagatgtagattctgaaatggacccagaacagccagtcacagaggatgagagtatagaggagatctttgaggaaactcagaccaatgccacctgcaattatgagactaaatcagagaatggtgtaaaagtggccatgggaagtgaacaagacagcacaccagagagtagacacggtgcagtcaaatcgccattcttgccattagctcctcagactgaaacacagaaaaataagcaaagaaatgaagtggacggcagcaatgaaaaagcagcccttctcccagcccccttttcactaggagacacaaacattacaatagaagagcaattaaactcaataaatttatcttttcaggatgatccagattccagtaccagtacattaggaaacatgctagaattacctggaacttcatcatcatctacttcacaggaattgccatttagactggccttgtcatgttgcccaggctggcgtcgggactcctgggctcattcgatcctcctgcatcagctagaactacagtagtttcagattttgaagtgtgtatgtgtatgtgtgatatgtatatattccgtgtgtatagaaatggagagtatcttatttgagttgttgttttcagtaatgctgtcaagtattgttagagggtgataaatgataacatttgtttttatttgagcttatgaagaatttcttgactttctagctaaatgatcagttcacttctcttagcctcaattttattgcgtctaaattccagaagttcttgattgctataagattccttcagctttaaatattaatatttgatattgattttgtttctgcccaaacacattgtttggtcaccgccggtaatgttagcaaagagaattttttttggccaacaaatgtctcataccacattcagtttttataagaaaaacttttatggtatgttgttattctgagttcattaaacattcgctttaccttat

SEQ ID NO: 335085 - DNA, 931 bp, Homo sapiens
ctcgctgccttctcccctgaagagagacgcggggggaggggggtgcggcgagcggccccgctctctccccaccgctccgctcgcaccccagtgtaatgagggtcaccccctccccccagctggcccgggagggggcgcggggcacggttgatgccggcccaggatggatcagacctgtgaactacccagaagaaattgtctgctgcccttttccaatccagtgaatttagatgcccctgaagacaaggacagccctttcggtaatggtcaatccaatttttctgagccacttaatgggtgtactatgcagttatcgactgtcagtggaacatcccaaaatgcttatggacaagattctccatcttgttacattccactgcggagactacaggatttggcctccatgatcaatgtagagtatttaaatgggtctgctgatggatcagaatcctttcaagaccctgaaaaaagtgattcaagagctcagacgccaattgtttgcacttccttgagtcctggtggtcctacagcacttgctatgaaacaggaaccctcttgtaataactcccctgaactccaggtaaaagtaacaaagactatcaagaatggctttctgcactttgagaattttacttgtgtggacgatgcagatgtagattctgaaatggacccagaacagccagtcacagaggatgagagtatagaggagatctttgaggaaactcagaccaatgccacctgcaattatgagactaaatcagagaatggtgtaaaagtggccatgggaagtgaacaagacagcacaccagagagtagacacggtgcagtcaaatcgccattcttgccattagctcctcagactgaaacacagtcatagtagcagatgtttaatgtctgtcggcagccgggcagtgaaagcgtattcatcgct

SEQ ID NO: 335086 - DNA, 730 bp, Homo sapiens
  misc_feature (356)..(356): n is a, c, g, or t
  misc_feature (372)..(372): n is a, c, g, or t
ggtgtgagccatcatgccctgtctgttggagcattttaaaatctgattcctttccccctgaagtttccgttcaaccctttactgtggtcaggttgatttctttaattgctaaaacaagtcaaaattcaatatccatggcagctgacaattcagactttggcatataaagtaaagggtttattttttcattcctctgtaaatggtgttgttttcacttatttatagtgctatgaagctggtcacctggagaatggcataactgaatcttgtgccacatcttattcaaaagattttggtggaggcactaccaagatatttgacaagccaaggaagcgaaaacgacagaggcatgctgnagccaagatgcagtgnaaaaaagtgaaaaatgatgactcgtcaaaagagattccaggctcagagggagaactaatgcctcacaggacggccacaagccccaaggagactgttgaggaaggtgtagaacacgatcccgggatgcctgcctctaaaaaaatgcagggtgaacgcggtggaggagctgcactcaaggagaatgtctgtcagaattgtgaaaaattgggtgagctgctgttatgtgaggctcagtgctgtggggctttcctattgctgctggtgcagctgtaaaaaagaaaaaaccaaaaattttgggatgacatgaaaggccataatgtcaggaaagagtagagaggactgaataatccagatggca

SEQ ID NO: 335087 - DNA, 4833 bp, Homo sapiens
ctcgctgccttctcccctgaagagagacgcggggggaggggggtgcggcgagcggccccgctctctccccaccgctccgctcgcaccccagtgtaatgagggtcaccccctccccccagctggcccgggagggggcgcggggcacggttgatgccggcccaggatggatcagacctgtgaactacccagaagaaattgtctgctgcccttttccaatccagtgaatttagatgcccctgaagacaaggacagccctttcggtaatggtcaatccaatttttctgagccacttaatgggtgtactatgcagttatcgactgtcagtggaacatcccaaaatgcttatggacaagattctccatcttgttacattccactgcggagactacaggatttggcctccatgatcaatgtagagtatttaaatgggtctgctgatggatcagaatcctttcaagaccctgaaaaaagtgattcaagagctcagacgccaattgtttgcacttccttgagtcctggtggtcctacagcacttgctatgaaacaggaaccctcttgtaataactcccctgaactccaggtaaaagtaacaaagactatcaagaatggctttctgcactttgagaattttacttgtgtggacgatgcagatgtagattctgaaatggacccagaacagccagtcacagaggatgagagtatagaggagatctttgaggaaactcagaccaatgccacctgcaattatgagactaaatcagagaatggtgtaaaagtggccatgggaagtgaacaagacagcacaccagagagtagacacggtgcagtcaaatcgccattcttgccattagctcctcagactgaaacacagaaaaataagcaaagaaatgaagtggacggcagcaatgaaaaagcagcccttctcccagcccccttttcactaggagacacaaacattacaatagaagagcaattaaactcaataaatttatcttttcaggatgatccagattccagtaccagtacattaggaaacatgctagaattacctggaacttcatcatcatctacttcacaggaattgccattttgtcaacctaagaaaaagtctacgccactgaagtatgaagttggagatctcatctgggcaaaattcaagagacgcccatggtggccctgcaggatttgttctgatccgttgattaacacacattcaaaaatgaaagtttccaaccggaggccctatcggcagtactacgtggaggcttttggagatccttctgagagagcctgggtggctggaaaagcaatcgtcatgtttgaaggcagacatcaattcgaagagctacctgtccttaggagaagagggaaacagaaagaaaaaggatataggcataaggttcctcagaaaattttgagtaaatgggaagccagtgttggacttgcagaacagtatgatgttcccaaggggtcaaagaaccgaaaatgtattcctggttcaatcaagttggacagtgaagaagatatgccatttgaagactgcacaaatgatcctgagtcagaacatgacctgttgcttaatggctgtttgaaatcactggcttttgattctgaacattctgcagatgagaaggaaaagccttgcgctaaatctcgagccagaaagagctctgataatccaaaaaggactagtgtgaaaaagggccacatacaatttgaagcacataaagatgaacggaggggaaagattccagagaaccttggcctaaactttatctctggggatatatctgatacgcaggcctctaatgaactttccaggatagcaaatagcctcacagggtccaacactgccccaggaagttttctgttttcttcctgtggaaaaaacactgcaaagaaagaatttgagacttcaaatggtgactctttattgggcttgcctgagggtgctttgatctcaaagtgttctcgagagaagaataaaccccaacgaagcctggtgtgtggttcaaaagtgaagctctgctatattggagcaggtgatgaggaaaagcgaagtgattccattagtatctgtaccacttctgatgatggaagcagtgacctggatcccatagaacacagctcagagtctgataacagtgtccttgaaattccagatgctttcgatagaacagagaacatgttatctatgcagaaaaatgaaaagataaagtattctaggtttgctgccacaaacactagggtaaaagcaaaacagaagcctctcattagtaactcacatacagaccacttaatgggttgtactaagagtgcagagcctggaaccgagacgtctcaggttaatctctctgatctgaaggcatctactcttgttcacaaaccccagtcagattttacaaatgatgctctctctccaaaattcaacctgtcatcaagcatatccagtgagaactcgttaataaagggtggggcagcaaatcaagctctattacattcgaaaagcaaacagcccaagttccgaagtataaagtgcaaacacaaagaaaatccagttatggcagaacccccagttataaatgaggagtgcagtttgaaatgctgctcttctgataccaaaggctctcctttggccagcatttctaaaagtgggaaagtggatggtctaaaactactgaacaatatgcatgagaaaaccagggattcaagtgacatagaaacagcagtggtgaaacatgttttatccgagttgaaggaactctcttacagatccttaggtgaggatgtcagtgactctggaacatcaaagccatcaaaaccattacttttctcttctgcttctagtcagaatcacatacctattgaaccagactacaaattcagtacattgctaatgatgttgaaagatatgcatgatagtaagacgaaggagcagcggttgatgactgctcaaaacctggtctcttaccggagtcctggtcgtggggactgttctactaatagtcctgtaggagtctctaaggttttggtttcaggaggctccacacacaattcagagaaaaagggagatggcactcagaactccgccaatcctagccctagtgggggtgactctgcattatctggcgagttgtctgcttccctacctggcttactgtccgacaagagagacctccctgcttctggtaaaagtcgttcagactgtgttactaggcgcaactgtggacgatcaaagccttcatccaaattgcgagatgctttttcagcccaaatggtaaagaacacagtgaaccgtaaagccttaaagaccgagcgcaaaagaaaactgaatcagcttccaagtgtgactcttgatgctgtactgcagggagaccgagaacgtggaggttcattgagaggtggggcagaagatcctagtaaagaggatccccttcagataatgggccacttaacaagtgaagatggtgaccatttttctgatgtgcatttcgatagcaaggttaagcaatctgatcctggtaaaatttctgaaaaaggactctcttttgaaaacggaaaaggcccagagctggactctgtaatgaacagtgagaatgatgaactcaatggtgtaaatcaagtggtgcctaaaaagcggtggcagcgtttaaaccaaaggcgcactaaacctcgtaagcgcatgaacagatttaaagagaaagaaaactctgagtgtgcctttagggtcttacttcctagtgaccctgtgcaggaggggcgggatgagtttccagagcatagaactccttcagcaagcatacttgaggaaccactgacagagcaaaatcatgctgactgcttagattcagctgggccacggttaaatgtttgtgataaatccagtgccagcattggtgacatggaaaaggagccaggaattcccagtttgacaccacaggctgagctccctgaaccagctgtgcggtcagagaagaaacgccttaggaagccaagcaagtggcttttggaatatacagaagaatatgatcagatatttgctcctaagaaaaaacaaaagaaggtacaggagcaggtgcacaaggtaagttcccgctgtgaagaggaaagccttctagcccgaggtcgatctagtgctcagaacaagcaggtggacgagaattctttgatttcaaccaaagaagagcctccagttcttgaaagggaggctccgtttttggagggccccttggctcagtcagaacttggaggtggacatgctgagttgccgcagctgaccttgtctgtgcctgtggctccggaagtctctccacggcctgcccttgagtctgaggaattgctagttaaaacgccaggaaattatgaaagtaaacgtcaaagaaaaccaactaagaaacttcttgaatccaatgatttagaccctggatttatgcccaagaagggggaccttggcctttctaaaaaggtatgttatttttgtaagttctaaaagaaataaactcaggaaatgagaaattttaaaaatgacattttgagtagcagttataacattgatgtacatacatatagaaattagtgtgtgtgtcagcagtcatacatgatctgagatttcctacatgaaaggctgttttgcagttgtgtgaccatgtatgtgtataaactggtttcaggtttcctttccaagtgaaaaaaatttttaaatgctttgaagattaagtttgtgtttgttataatttcttttctgggttcaaatcctcttacctgttttctactaaactactatctcaaatatcactagtctactctcctattgccgtgtcgtcgtagcccttt

SEQ ID NO: 335088 - DNA, 4575 bp, Homo sapiens
ctcgctgccttctcccctgaagagagacgcggggggaggggggtgcggcgagcggccccgctctctccccaccgctccgctcgcaccccagtgtaatgagggtcaccccctccccccagctggcccgggagggggcgcggggcacggttgatgccggcccaggatggatcagacctgtgaactacccagaagaaattgtctgctgcccttttccaatccagtgaatttagatgcccctgaagacaaggacagccctttcggtaatggtcaatccaatttttctgagccacttaatgggtgtactatgcagttatcgactgtcagtggaacatcccaaaatgcttatggacaagattctccatcttgttacattccactgcggagactacaggatttggcctccatgatcaatgtagagtatttaaatgggtctgctgatggatcagaatcctttcaagaccctgaaaaaagtgattcaagagctcagacgccaattgtttgcacttccttgagtcctggtggtcctacagcacttgctatgaaacaggaaccctcttgtaataactcccctgaactccaggtaaaagtaacaaagactatcaagaatggctttctgcactttgagaattttacttgtgtggacgatgcagatgtagattctgaaatggacccagaacagccagtcacagaggatgagagtatagaggagatctttgaggaaactcagaccaatgccacctgcaattatgagactaaatcagagaatggtgtaaaagtggccatgggaagtgaacaagacagcacaccagagagtagacacggtgcagtcaaatcgccattcttgccattagctcctcagactgaaacacagaaaaataagcaaagaaatgaagtggacggcagcaatgaaaaagcagcccttctcccagcccccttttcactaggagacacaaacattacaatagaagagcaattaaactcaataaatttatcttttcaggatgatccagattccagtaccagtacattaggaaacatgctagaattacctggaacttcatcatcatctacttcacaggaattgccattttgtcaacctaagaaaaagtctacgccactgaagtatgaagttggagatctcatctgggcaaaattcaagagacgcccatggtggccctgcaggatttgttctgatccgttgattaacacacattcaaaaatgaaagtttccaaccggaggccctatcggcagtactacgtggaggcttttggagatccttctgagagagcctgggtggctggaaaagcaatcgtcatgtttgaaggcagacatcaattcgaagagctacctgtccttaggagaagagggaaacagaaagaaaaaggatataggcataaggttcctcagaaaattttgagtaaatgggaagccagtgttggacttgcagaacagtatgatgttcccaaggggtcaaagaaccgaaaatgtattcctggttcaatcaagttggacagtgaagaagatatgccatttgaagactgcacaaatgatcctgagtcagaacatgacctgttgcttaatggctgtttgaaatcactggcttttgattctgaacattctgcagatgagaaggaaaagccttgcgctaaatctcgagccagaaagagctctgataatccaaaaaggactagtgtgaaaaagggccacatacaatttgaagcacataaagatgaacggaggggaaagattccagagaaccttggcctaaactttatctctggggatatatctgatacgcaggcctctaatgaactttccaggatagcaaatagcctcacagggtccaacactgccccaggaagttttctgttttcttcctgtggaaaaaacactgcaaagaaagaatttgagacttcaaatggtgactctttattgggcttgcctgagggtgctttgatctcaaagtgttctcgagagaagaataaaccccaacgaagcctggtgtgtggttcaaaagtgaagctctgctatattggagcaggtgatgaggaaaagcgaagtgattccattagtatctgtaccacttctgatgatggaagcagtgacctggatcccatagaacacagctcagagtctgataacagtgtccttgaaattccagatgctttcgatagaacagagaacatgttatctatgcagaaaaatgaaaagataaagtattctaggtttgctgccacaaacactagggtaaaagcaaaacagaagcctctcattagtaactcacatacagaccacttaatgggttgtactaagagtgcagagcctggaaccgagacgtctcaggttaatctctctgatctgaaggcatctactcttgttcacaaaccccagtcagattttacaaatgatgctctctctccaaaattcaacctgtcatcaagcatatccagtgagaactcgttaataaagggtggggcagcaaatcaagctctattacattcgaaaagcaaacagcccaagttccgaagtataaagtgcaaacacaaagaaaatccagttatggcagaacccccagttataaatgaggagtgcagtttgaaatgctgctcttctgataccaaaggctctcctttggccagcatttctaaaagtgggaaagtggatggtctaaaactactgaacaatatgcatgagaaaaccagggattcaagtgacatagaaacagcagtggtgaaacatgttttatccgagttgaaggaactctcttacagatccttaggtgaggatgtcagtgactctggaacatcaaagccatcaaaaccattacttttctcttctgcttctagtcagaatcacatacctattgaaccagactacaaattcagtacattgctaatgatgttgaaagatatgcatgatagtaagacgaaggagcagcggttgatgactgctcaaaacctggtctcttaccggagtcctggtcgtggggactgttctactaatagtcctgtaggagtctctaaggttttggtttcaggaggctccacacacaattcagagaaaaagggagatggcactcagaactccgccaatcctagccctagtgggggtgactctgcattatctggcgagttgtctgcttccctacctggcttactgtccgacaagagagacctccctgcttctggtaaaagtcgttcagactgtgttactaggcgcaactgtggacgatcaaagccttcatccaaattgcgagatgctttttcagcccaaatggtaaagaacacagtgaaccgtaaagccttaaagaccgagcgcaaaagaaaactgaatcagcttccaagtgtgactcttgatgctgtactgcagggagaccgagaacgtggaggttcattgagaggtggggcagaagatcctagtaaagaggatccccttcagataatgggccacttaacaagtgaagatggtgaccatttttctgatgtgcatttcgatagcaaggttaagcaatctgatcctggtaaaatttctgaaaaaggactctcttttgaaaacggaaaaggcccagagctggactctgtaatgaacagtgagaatgatgaactcaatggtgtaaatcaagtggtgcctaaaaagcggtggcagcgtttaaaccaaaggcgcactaaacctcgtaagcgcatgaacagatttaaagagaaagaaaactctgagtgtgcctttagggtcttacttcctagtgaccctgtgcaggaggggcgggatgagtttccagagcatagaactccttcagcaagcatacttgaggaaccactgacagagcaaaatcatgctgactgcttagattcagctgggccacggttaaatgtttgtgataaatccagtgccagcattggtgacatggaaaaggagccaggaattcccagtttgacaccacaggctgagctccctgaaccagctgtgcggtcagagaagaaacgccttaggaagccaagcaagtggcttttggaatatacagaagaatatgatcagatatttgctcctaagaaaaaacaaaagaaggtacaggagcaggtgcacaaggtaagttcccgctgtgaagaggaaagccttctagcccgaggtcgatctagtgctcagaacaagcaggtggacgagaattctttgatttcaaccaaagaagagcctccagttcttgaaagggaggctccgtttttggagggccccttggctcagtcagaacttggaggtggacatgctgagttgccgcagctgaccttgtctgtgcctgtggctccggaagtctctccacggcctgcccttgagtctgaggaattgctagttaaaacgccaggaaattatgaaagtaaacgtcaaagaaaaccaactaagaaacttcttgaatccaatgatttagaccctggatttatgcccaagaagggggaccttggcctttctaaaaagtgctatgaagctggtcacctggagaatggcataactgaatcttgtgccacatcttattcaaaagattttggtggaggtgagtatttttgagatttaaaaaacgtaatgca

SEQ ID NO: 335089 - DNA, 3557 bp, Homo sapiens
agcaagactctgtctcaaaaaaaaaaaaaaaaggaataaaaaaaaaagcttctgatttcatctcccttttcccccacccatttctttgataagtgataattctttttctcctttaaatttaaggttcctcagaaaattttgagtaaatgggaagccagtgttggacttgcagaacagtatgatgttcccaaggggtcaaagaaccgaaaatgtattcctggttcaatcaagttggacagtgaagaagatatgccatttgaagactgcacaaatgatcctgagtcagaacatgacctgttgcttaatggctgtttgaaatcactggcttttgattctgaacattctgcagatgagaaggaaaagccttgcgctaaatctcgagccagaaagagctctgataatccaaaaaggactagtgtgaaaaagggccacatacaatttgaagcacataaagatgaacggaggggaaagattccagagaaccttggcctaaactttatctctggggatatatctgatacgcaggcctctaatgaactttccaggatagcaaatagcctcacagggtccaacactgccccaggaagttttctgttttcttcctgtggaaaaaacactgcaaagaaagaatttgagacttcaaatggtgactctttattgggcttgcctgagggtgctttgatctcaaagtgttctcgagagaagaataaaccccaacgaagcctggtgtgtggttcaaaagtgaagctctgctatattggagcaggtgatgaggaaaagcgaagtgattccattagtatctgtaccacttctgatgatggaagcagtgacctggatcccatagaacacagctcagagtctgataacagtgtccttgaaattccagatgctttcgatagaacagagaacatgttatctatgcagaaaaatgaaaagataaagtattctaggtttgctgccacaaacactagggtaaaagcaaaacagaagcctctcattagtaactcacatacagaccacttaatgggttgtactaagagtgcagagcctggaaccgagacgtctcaggttaatctctctgatctgaaggcatctactcttgttcacaaaccccagtcagattttacaaatgatgctctctctccaaaattcaacctgtcatcaagcatatccagtgagaactcgttaataaagggtggggcagcaaatcaagctctattacattcgaaaagcaaacagcccaagttccgaagtataaagtgcaaacacaaagaaaatccagttatggcagaacccccagttataaatgaggagtgcagtttgaaatgctgctcttctgataccaaaggctctcctttggccagcatttctaaaagtgggaaagtggatggtctaaaactactgaacaatatgcatgagaaaaccagggattcaagtgacatagaaacagcagtggtgaaacatgttttatccgagttgaaggaactctcttacagatccttaggtgaggatgtcagtgactctggaacatcaaagccatcaaaaccattacttttctcttctgcttctagtcagaatcacatacctattgaaccagactacaaattcagtacattgctaatgatgttgaaagatatgcatgatagtaagacgaaggagcagcggttgatgactgctcaaaacctggtctcttaccggagtcctggtcgtggggactgttctactaatagtcctgtaggagtctctaaggttttggtttcaggaggctccacacacaattcagagaaaaagggagatggcactcagaactccgccaatcctagccctagtgggggtgactctgcattatctggcgagttgtctgcttccctacctggcttactgtccgacaagagagacctccctgcttctggtaaaagtcgttcagactgtgttactaggcgcaactgtggacgatcaaagccttcatccaaattgcgagatgctttttcagcccaaatggtaaagaacacagtgaaccgtaaagccttaaagaccgagcgcaaaagaaaactgaatcagcttccaagtgtgactcttgatgctgtactgcagggagaccgagaacgtggaggttcattgagaggtggggcagaagatcctagtaaagaggatccccttcagataatgggccacttaacaagtgaagatggtgaccatttttctgatgtgcatttcgatagcaaggttaagcaatctgatcctggtaaaatttctgaaaaaggactctcttttgaaaacggaaaaggcccagagctggactctgtaatgaacagtgagaatgatgaactcaatggtgtaaatcaagtggtgcctaaaaagcggtggcagcgtttaaaccaaaggcgcactaaacctcgtaagcgcatgaacagatttaaagagaaagaaaactctgagtgtgcctttagggtcttacttcctagtgaccctgtgcaggaggggcgggatgagtttccagagcatagaactccttcagcaagcatacttgaggaaccactgacagagcaaaatcatgctgactgcttagattcagctgggccacggttaaatgtttgtgataaatccagtgccagcattggtgacatggaaaaggagccaggaattcccagtttgacaccacaggctgagctccctgaaccagctgtgcggtcagagaagaaacgccttaggaagccaagcaagtggcttttggaatatacagaagaatatgatcagatatttgctcctaagaaaaaacaaaagaaggtacaggagcaggtgcacaaggtaagttcccgctgtgaagaggaaagccttctagcccgaggtcgatctagtgctcagaacaagcaggtggacgagaattctttgatttcaaccaaagaagagcctccagttcttgaaagggaggctccgtttttggagggccccttggctcagtcagaacttggaggtggacatgctgagttgccgcagctgaccttgtctgtgcctgtggctccggaagtctctccacggcctgcccttgagtctgaggaattgctagttaaaacgccaggaaattatgaaagtaaacgtcaaagaaaaccaactaagaaacttcttgaatccaatgatttagaccctggatttatgcccaagaagggggaccttggcctttctaaaaaggtatgttatttttgtaagttctaaaagaaataaactcaggaaatgagaaattttaaaaatgacattttgagtagcagttataacattgatgtacatacatatagaaattagtgtgtgtgtcagcagtcatacatgatctgagatttcctacatgaaaggctgttttgcagttgtgtgaccatgtatgtgtataaactggtttcaggtttcctttccaagtgaaaaaaatttttaaatgctttgaagattaagtttgtgtttgttataatttcttttctgggttcaaatcctcttacctgttttctactaaactactatctcaaatatcactagtctactctcctattgccgtgtcgtcgtagcccttt

SEQ ID NO: 335090 - DNA, 1678 bp, Homo sapiens
ctcgctgccttctcccctgaagagagacgcggggggaggggggtgcggcgagcggccccgctctctccccaccgctccgctcgcaccccagtgtaatgagggtcaccccctccccccagctggcccgggagggggcgcggggcacggttgatgccggcccaggatggatcagacctgtgaactacccagaagaaattgtctgctgcccttttccaatccagtgaatttagatgcccctgaagacaaggacagccctttcggtaatggtcaatccaatttttctgagccacttaatgggtgtactatgcagttatcgactgtcagtggaacatcccaaaatgcttatggacaagattctccatcttgttacattccactgcggagactacaggatttggcctccatgatcaatgtagagtatttaaatgggtctgctgatggatcagaatcctttcaagaccctgaaaaaagtgattcaagagctcagacgccaattgtttgcacttccttgagtcctggtggtcctacagcacttgctatgaaacaggaaccctcttgtaataactcccctgaactccaggtaaaagtaacaaagactatcaagaatggctttctgcactttgagaattttacttgtgtggacgatgcagatgtagattctgaaatggacccagaacagccagtcacagaggatgagagtatagaggagatctttgaggaaactcagaccaatgccacctgcaattatgagactaaatcagagaatggtgtaaaagtggccatgggaagtgaacaagacagcacaccagagagtagacacggtgcagtcaaatcgccattcttgccattagctcctcagactgaaacacagaaaaataagcaaagaaatgaagtggacggcagcaatgaaaaagcagcccttctcccagcccccttttcactaggagacacaaacattacaatagaagagcaattaaactcaataaatttatcttttcaggatgatccagattccagtaccagtacattaggaaacatgctagaattacctggaacttcatcatcatctacttcacaggaattgccatttgtaagcagtttttggtacaacttaaatatatacatatatgtatatatacaggccacttaaagggaaacttgtaacaaatttgtttttggttgcttatcagttcacagctgaaatcctattgctaatcataagctttgggcaaaattttactttgatttttaaatttatctctgttgtatgaatttggttgttttaagctttttccaaataactcttcattgagagtaggctaatgcttttaaaggcatttgattgagttcaggtttaatttctcaagttggaggtatacatatatgattaaaaaaaaaaaaaaaagatgggttttggcctgccagcaccatgagtgcaggtgaaccaatttagtacttggagtcctgttgctatatgtggcagattatttttttacttgatgacttgactcttacttcaggttgaagggcattttgaacacagattaaagtggctaagatgaagttttcttggacattgtcaaaatctaaattaggctagtttttctgaactacctgttttgaaggtatagcatcctgtgcttttgataactgccaccattagctctttttttttttt

SEQ ID NO: 335091 - DNA, 3792 bp, Homo sapiens
gcaggatagaaaatgggcaaaagcctcggaaaccacttggaaaaggtctggacaatgaggtgaaaatattttcttcagggttcccaaggcacaatttgttccaagtggctaatgagaaatatggaagctgaattttttccagagcagagtgcagaggcataacagaagggtgggccctggcagccatctgggtctcttccttcctaaccatggtggcaggtgcatccttctttgacactgactttcagcagagcttacttggttcatgaggtcttcacatggagactaccagcaagaggtgactctctgctgcataactgtaaaggatggccctttgctaggtgttacagttaaaagctaagaaaaggggcagtgcatttaggacccaaacatatgcctatgaatatcaaaagctcctcctgaaattgctgtgagttttccataaaagaatatcctgtcttcacccaaggcttgacagcccacagagtggtctcatttgaaattacaggaaattagagcttttgcttgcagttctgccttcctggcctgtgtttaaatgctgtcacttgtttatgccaagttcaaggctgattcaatggttggtcccctcacccagaaaaccctgaaggggaggatacagctctgaaggggggcagcagtactaaaaacccaagatgccagtggtatagtgggcacaagggatggcgaccatgaggatgccaggcatcatcaccaatatctatcctagagccagtataaggccagatgcctacttcccacagcctccccgggttccaaagtcatgtcattgttttcagtggaaacatatcgttgttgcatatcttcttaaatccatcttccttgtaagggctttagaactaaaacttacttatattgtttttccttaacagagggagaaaaatagtggattattatttctaaaataaaaggatgttctgctttctaaatatcccatcaaaatcttcagttttgcacttttttgatggaaaattcatcttatcttcctatgactttggttttagcctttctgaatttgttaccccttctggatggcttatttgatatactggaatagttaacaagctatacttcagcatatgcactatattctaacaaattttttttaataaaatcaagacatcagcaagaatgacatttacgtgacctcataatgtgggattatggccttctgttgctattccagtttgatatggaagcatctatatcctctattgccgttagatgttgttgcttttcagaaaagtaacgaaaaggctcattttaaagaatccaagaaacgatgtcatccaaatattgacagtttctacatttcatgccatctttataactcaattgaaagttgccgtcattcttgtgaagtatttgacaagtgcaatctgctagaagctcgtttttcttgtgactcccaaatgttagtgctacttagcctcagtaatgagttacagttgaaaaaaacatgagggaaacagagggacagagattttctaatgaacaatgatggaagagacctaatgtccttgctagaaacagccaggatggaaattatccagccctggcattctccttatcatcaatgacagtcattttattcatttatttcaaatgtgggtgggctagaagtggaaggagggaattctctctgcctaaaaattctagaagaatgaaagtaatctttgtatccaggaaactaagagaatgaggaataaatatcttcagcccgactcctgaatttgtttattcttccatctataattagattgtgttttcatttttgctttgtcatgctttttggttgttatttggctatacagttttatgctttaaaacaaatgataaagttaatttccaattcaatagtgaaatattaacaatctaactatagccagatcaaagacacctgaacacagaaaacctttatttgctggtgctgccattgcacaggctgtacaatgaaatagatttgaaaagctgattgattttcccgcacataaattctggatgtcaatttccaaccaaactccaatccagctatgtggcatgaagagttacaggagggagggaggaaaatagccctatgttagtcatgtttgcatacagaggatcaaagtaggccttcaccataatagttctaattaaaatggtcctcgctgtaggagagacaaaggggcttttcctctagctggtaactattcagatgatggacaagtcttctttcataaaagattacaaagaaggcatccgaatcactgtctgtgatactgggtcacatattaatcactgcagctaattgtaaatctttctatgaaacactgaaaagcctctttgtgaattaatacagttctgcttgatgcacttgatttgaaaagacatttctctgtatgtggcgcatgtcggctttgctttgaaaaataacaaagttagcagaatatgttcaatatattttcttggggaatagggtttttattacatgattcattaaggatttgccttaccctgacatttgtgatataaaggaaaatcagaaaaaaagtaattttcttgatcaagatatgtttttacttaatgcaaataaatgtagtctgttgcttgcaaggaaaaaaaaatggcttctgatatctggtataaactgctaaataggataatacgtgcctcttttgttaaaccggcatttaaatgctggactgcttctaaatctgtttgtttcttttcatctgtgccatacactaaaaaacaactgttgccttcatactatatttgttagagcagaatacaaataaaatttgagaggataatgtgaaaaaaaaaaaaaaaaaaaaaaaaaaaaaaaaaaaaaaaaaaaaaaaaaaaaaaaaaaaaaaaaaaaagagaggggggcgcgcgcgcacaaaaactatctccccgggggggcgccaaaatacacgcgccccccgattttttttgcaaacaaggggggccccaataagaggggagagcgatatatatatataaaaaaagagagagagggggcgggggatcaaaaaagagagcaagggggaaaaacgtcgtaacaggggacattgggggaaaagagaaaccacaacggaggggggggcgcggacaatactgcggcgacacaacacacaaacagaaaatactaaaaagccccacaagggagaaaaaaaaaaagctaaaagacgagaacaacacggtgaacacacaaacgcaacaaatcaactcgcaaggaaacaaactttgcagacaacggggaataaacaagcacagacaggcaaatctttcacacaggggggcgtccgcacgtgcaaccaacacaacgacaccaggacacactcagatgaaacaaacaaagacagaaagaaagacaagaaaaaaacaaaagaacaaaaaaaaaccacacaacaaagagcacaaaagaccaaaacacacaaacaagaagacaacaatcaaaaaacagaaagaaaaaggagacaaacaaaaagagtaaaaaagaaaaaaaaacacaaaaagaacaaagaaaaaaaaaaagaagaaacaaaaaaaagaaaaaagacaaaaaaaaaaacacacagacacataaaataaaaaaaaacgaaaaacaaaaaacgcagaagagaaagcgcaagaaagaacaaaaatgagcaagcgacaacaaacaatatcaaagcacaagacacacaaaacaggaagaaacaacaaacagcaagtaaccacgaatgcagcaaacagaaaaaacagcaaaaaaacaacaaagaa

SEQ ID NO: 335092 - DNA, 714 bp, Homo sapiens
agcctctggagagcgctgaaaacagacgtgtcacccccatggtggaatactacacagcagggggaatgaacgttacagcttctgtccttgtctgcaagactgtagtggaaaaaaacaaagttcagaacaacacgtttaagaggctacctgtctagctttggttagagaccttacaaagaggtgaaaaaaaaggggggactacctcatacgaggagcaaacgaaatctgtatttgggtttgcaaaacaaacacctgggcaagtacattcaaaactaattagatgaggccatctccaggggtgaagggagcggtgggacagaagacagtggaatttctcagtacaggggctcttcattttgttctgatttgtgagctaggttaatgtattcattgttttttccattaaatttaagaaattcggccaggtgcggtggctcacacctgtaatcccagcacttcgggaggccaaggtgggtggatcatgaggtcaagggatcaagaccttcctggtcaacatggtgaaaccccgtctctactaaatatacaaaaattagtggggcgtggtggtgcgcacctgtaatcccagctactcaggaggctgaggcaggaagatcgcttgaacccgggaggaggaggttgtagtgagccgagatcgtgccactgtactccagacagagcgagactctgtctcaaaaaagaaaaaaaaaaaaaaat

SEQ ID NO: 335093 - DNA, 505 bp, Homo sapiens
gcagacagagaagagggtgagggacaggccagcggggaatgcatctgtgcaaggagtgagaggaagcagaagggctgagatggagccatccagaggaggagctaacaggggagctggaagccaccctgtgggaacagggaagagggaactccaggagaagtcttggtgaggggagcaatcgctgccaggtgaggtgtaaaatcatccatctcttttgaaaagctacaggtgccatgccttagaaatgttcagagcagcagttcccctatttgaaatctctcttaagaagagccggtctggcattctctgctctaccacctctagaggctcccattgctttcagactcactgaccagccacgaggtcctgcctctctccctgccttcctgctcttacctggctcatgctctgccagactccttgccattccctcaatgccttgcttgcacgttgccactgcgtgccttggcacacgaactccacctgtctgagcctctgtctgtca

SEQ ID NO: 335094 - DNA, 581 bp, Homo sapiens
ttcctatgttgagacccctgtctactagaagcaacagtgaatatagggagagaggatttgaaagctgatcatggctgatcccagggaaagaaaggtctccccttgcccctccccatacacacactgaggactcagaaacgttgtcccaccttctgcagccaggagtccccaccacctcccacactccagcctgggcaacacatcttctgttagcccgcttcatcatgaagcataaattaaacagaacaccagagggaaacttgccaccataggactgacgctcaaagccctttctgagttggatggcagcttagttggattccttatcagcctctggctctgaggacccagtgttccaggttaatgtgaatgtttggcggcaacagctcacaccaaccctgcccttttggttcagcgagagtcagagacaacagaaactgtctcagaccccaggacacaacttctagaattggattggactatctttgctgtccttttaaacttatacttgaagactatttaaactgctttttaaaatgaaatgaggctgggcgcagtggctcatgcctgtaatcccagca

SEQ ID NO: 335095 - DNA, 431 bp, Homo sapiens
taaaatagggaacacttaaagcttatagatgacatgttttttaaaaggtatatttatgaaagcacaggcatccttggtatacgcaggagattgataccaggacccttgtgtatacccaaatctgtgcatacttaagtcctacagtcatccctgtggaacctgcctgtataaaaagtcagccctccccgtgtatgtaggtgtcgcatcccgggaatactgtattttcaatccatgtttggtttaaaaaaatctgcgtataagcagacccacacagttcaaactcatgctgttcaagggtcaacagtatttactttgcatacttatccaaagatacctttaagactttttgagtctgaaaatgaaatttactttattttttcccttaaagtcaactgtcctatcctaccctagccatactttggagtccagta

SEQ ID NO: 335096 - DNA, 254 bp, Homo sapiens
ggcactttgattttaggtctctcttcattctttcccaactcacctccttctgtgttactgttcctcctctgccccaatctcaatttctgtagcccataccacggtacctcatcccccacaaaaatgaaagtaatacttttatcatgttcgtaggttgatatttgggaagatatatacaattttaaattcactttaaatcttcaagttcttttcctatttatcccccacccaagcattgtgttaaaccctgtgaa

SEQ ID NO: 335097 - DNA, 526 bp, Homo sapiens
tggtctcttgcaactgagcctcatttaaatgtgcattgtgttgaatggagcctcatttaaatggtccatcttagccaggttacggaactgaagtggagaaccacacagttaccccgagcattcaggacaatccacagagctaatttggacaattggacaaatgattattttcttttgcctcaactgaccagataattgtacacaagtctctgccatttgactccatggaatgtctctttgtgtagtaagaaagcctggccatagactggtaccatgacgtctgcccgagggtggcatggagttggggacaagacacacgcagctgacacccaccatctaactccgagtcctaaatcagaagcactttcatacgtgctaaaagtctctgcttgcacccagggttctcattagttccttctaatacccatcacttgggaggaggttgttttcaaaacagaattaaaaccatcaggcagcaaggttagaagtggcatctgggtggtcaagaaaattagtgttttttttt

SEQ ID NO: 335098 - DNA, 330 bp, Homo sapiens
agccccacaattccactcctacatacacattcaaaagaatcaaaactaagttctcaaacaagtacatgtacatgcatgttcacagtagcactattcaaaatagccaaaaattggaaacagtctaaatgtccatcaatggataaattgtgttacatacacacaatggaattttattcacccattaaaaaaagaagtactgatttatgctatgtagaggcaccccgaaaacatgctaaacgaaagaagctagacacaaaagtcttattattgcatgattccatttagatgaaatattcagaatatataaatccatagagacagaagggagat

SEQ ID NO: 335099 - DNA, 400 bp, Homo sapiens
cctctgcctcccaggttcaagcgattctcccacctcagcctccccagtagctgggattacaggggtgcagcaccacacctggctaattttttgcagagctgaggtttcactatgttggctaggctggtctcgaactcctgacctcaggtgatctacctaccttggcctcccaaagtgctgggattacaggcatgagccactgtgcctggccctaatgcaaactctatagttcatgcaagatttacctgctggctgtgtagcataaataaaccaaaggaaaacctgggcggggaccaggagctgcatcctgcatggcccctaagaagattggcttagatgaaattggaactctcctttatcatcttgctggatcatggggctggggttggggtcactggac

SEQ ID NO: 335100 - DNA, 460 bp, Homo sapiens
gctctcttgatgccacaaaaaatacagttgccccagccaattgatttgtgcagccacagcgtgaggcatcactattcacctggtaatggcacatgaaccacagtatactgaaggaaacagaactgccttagaaatagatatctataaatttagaaacttcagagatgtttcatgtaaattacttttcaaaacagctgatacttatatcctttaaatcaccataacttatcttaaaaaaatcttaattatttgtaaagagatctctaggtctttcttccgtgccttaatgtgcacatgatataatcttttcttgatgactcaagctcatcaatgtaaatatcaattattagactgttccataacagagtgattctttctggagtactgcagaatgtccaactgcttgtccctttattaactcatcctagactacttctaaaaacaaagatccctactgcct

SEQ ID NO: 335101 - DNA, 98 bp, Homo sapiens
tatttacagtaaataggtaataacttgatagtatatatcagtaaggctatttccatttttaaagatgataggaaatagtaccgttcctcagtgggtct

SEQ ID NO: 335102 - DNA, 177 bp, Homo sapiens
aaaaataattgtgagtctatttatagaccctatattcccttctattaatctttttaccaataccatagtgtcttgattactataactttataacagatcttgaaatcagatagaagtagtcctccaactccatccttctttttcaaagttgttttgattatttggctattgtagtgt

SEQ ID NO: 335103 - DNA, 176 bp, Homo sapiens
agacggggtttcatcatgtttgtcaggctggtctcgaactcctgacctcagcctcggcctcccaaagtgctgggattacaggtgtgagccactgcacctggccaacagagtcaggatttgaatccctggattcggtatcagcaggatttccgtgtcttacctgtcagcgccaacat

SEQ ID NO: 335104 - DNA, 405 bp, Homo sapiens
gagttggagaccagcatgggcaacgaaacacaaaatacaaaaaaattagtcaggcgtggtggtgcatgcctgtagtcccagctcctcaggaggctgagatgagagaattgcagcgagccatgatcataccactgcactccagcctgggcgacagagcgatactctgtctcaaaataagtaaattaattaattaattacaaaaattgacaaccagttggtctctatcttcaaaaaattctgctgggattctaattggaattgtgttacagttgtaggttaatctggggataactgacatatttgagtatttcaatccatgaaaacaatatgtctatccatctatttaggtcttctttattaatttatttcaccaagattttatagttttttttttttttttttttt

SEQ ID NO: 335105 - DNA, 356 bp, Homo sapiens
cactcctgcattgtttaccacatgttaatcttatgacgtcatttatacgtcattatctgtgtacttaactgttcttcctaccaacgtttattaagtacctatgatatatcaagggtatgtactaggcacttcacatgttattttatttaatttaattcctacaacagccctgtgagataggtattaccatccccatttcacagatcaggaatttgatgctgacagaagttaattaacttctcaaagtagcatccttactaaatggcatcactcattcaacaaattttattccaatccatgtctgctagattcctaacccatgggcttttcaatatagactggggaacccctttgag

SEQ ID NO: 335106 - DNA, 152 bp, Homo sapiens
tgaaacaagctaatatttttttaagatcttaccattttatgtattagctcatttaatcctcagtcaccgtatgtggtactactactgttcccattttacaaacgaggaaatgaaggcacacagaagctaataaagtactagtaaagcgcctg

SEQ ID NO: 335107 - DNA, 459 bp, Homo sapiens
gatttttataagcaaggccctgagagtcactttgacattcatccctggggaaagaggtctgtggcctaacattgccaggcaaggcctctactcaggagctcagtccaggactgtgggtgagaaaagctctggattcgagagtattcaaatatttgaccatttaagagttaggacaaaggatgatcctgtccccttgccatgtggccatgcatgtgtgcagtgttcccaggtgcttctgacttacagccaagtttgggctgtggttattgattgacagatactgatgcctttgtccaggaatggtggttgctgactgtgtgctctgccaccctgccttggaaccagcagggcatatgtgagtcctgtccagtctatactcaccagtgactttgccccttagcccgagtggttcaccctcacagtctctctgttagagaagtgagttgtgactatggggtt

SEQ ID NO: 335108 - DNA, 290 bp, Homo sapiens
gacccactgaaattaatggatactctcacatgactgactttattattaaatacttgctgtaatcacaactaggcataggaaaatcaagtagagaaatactgaatgcctagcatacaacgatctaagtgaaagttaataaaagtagctcttcagaaagacatctcatgtaaaattaaatttaaaactaaaaatttcatgaagtgacctgttaagagtttcaatttagaagctttacttttctaattttaaaatatcatgaatgaaatggtgtcttcatctaggtgcttctc

SEQ ID NO: 335109 - DNA, 426 bp, Homo sapiens
tgggtgggggagtgggggagatgtgggcctgctaagaaaaaaagcaaggcaggttgctgacaatgttgcccattattgtaatctgatcttggtgggcctcagtttcccatctgcaaaagtggaataagaaaatgtcacgaggtgcctgtgaagtttagacaaaataatcatcataatggtattattagtaatgctaataattaaagtctgactgagcactttgttgggcgatgcttaaacacaaggccctggggatgacagtgtgacagctctggctcgtttagactctaacacttactgcgtgtgatgaccctggacaaatgacttagcccttccaagattcaatttcctcatgtgaaaacaggacaagacctgatctagtaaggctgtcatgaagatttaatatgatcacaatgcatgtaaagt

SEQ ID NO: 335110 - DNA, 496 bp, Homo sapiens
gtctcacaaagaaatccaaaaagttaaaaaaaaagaaagctaggacaatttttcccaccttaaaatgattctgccacattatattcaacacagaaaatatcaaagatgaaaaagtaaagtgaattatttataactcaaaagagagagaaaatttctctttttagagactcttctgagaaagaatatctaacattcggggtgagaggtgcttgtggcccttggagaatcttatgacccatagctatgttcacattcagatttttttattggcttaaaaaaaagtatttagaaaaactaacttatggagactgcttgctttgccaagagaaatgagagaaccctattttattacccttgtgagtcatctattttcttggttctgcaaaaaaaattgttatgaaactcatcaaatattacttaggaataaaaccagtgtttgtgattcatctataaaacaaattaattcacacaattcagtataatcttgacatcacgg

SEQ ID NO: 335111 - DNA, 646 bp, Homo sapiens
gtcaaaaagcaaccacagggcttccacagccagagctgccatggtttttgttctgttttgttttggtaggaatttttaagataacattaaaaagaataagtggagctataggagctaggctcatctgcatctgttactgcaatcagggcccctactgtggcaatcagcagtctttccgtggctccaagtggtgtgtgagttcttgtcagcagtctcgtagaacttttcacatcagtgttccaagtttagaaaccagttaacccagcaatgccctttgctacttgtagatgtagagaatcaatgggctgtattcaccatgaggctgtgatacctccttttactctgacattccgaatgttgtcagtattacaaggcgatggttttggttttttatataaactggggtgtatatgtctggatgtatatccgtttaagattttatagtactgcagggtccaattgtgaagggttagatttaccaggaaaaaaaagattagtccacatgtaaagtagaaaatatttataagagctatcacaaatgtttactgtcctattacagcatcagacactagttctgtcatttattgtctctctgagaagactagctacaatgaatgttttgctttcttaattatgcctttgttac

SEQ ID NO: 335112 - DNA, 423 bp, Homo sapiens
ctgcctcagcctcctgagtagctgggattataggtgcctgccaccatgcccagctaatttttgtatttttagtaaagatgaggtttcatcatgttggccaggttagtctcgaaatcctgacctcgggatcctcccaccttagcctcccaaagtcctgagattataggcatgagccaccgcacctggccagaatagtgttttgtaaataaagttgacttcagtatcttaagaagtggtcattgtggggctgagcatgtgtttcagagtctgaagctctggtctggggctgaggctgggagctcagagtggagatccatcaggtggtgtgaagcagggtgggggatggaaggttccaggtctgaggaccagaagaggtagaggtagacgctcagagacgtggagggtggtgagtggcaggggaga

SEQ ID NO: 335113 - DNA, 297 bp, Homo sapiens
gtactctgctacctagaataagcgagtatgggcatattcccatcactgaagtcagatgagcaaagacctgtctcagggaaaggacagcttgatcccatcaagttttcaagttttgaggtcatttgagttccccaggaaagaggaaggctgtggtccccaactctgttggggtgtagatgcaggccgcccttcctccattccttcctgccagagactcaatgtgaatagtgtctgggccttggagtggggagaatctgctggcccttcacaccttcgctgtgggcccagcttccctcc

SEQ ID NO: 335114 - DNA, 452 bp, Homo sapiens
cctttgaataattgaagttgtaaagaaagcaaattaatgggtaaggaaactaggaagatgcatattggtgttcctgaaattttacaatgtactttaactctagtgcttagtataatttctttcatgttgaggcactggtaagtcctattctcctagataaaaatcttcagtgggattacgcctctgcgtttcatggcccaatgagagcttttgattttattacagattacaataagtcatagactgttctctcccttctggtttgagtgatactacacccttgccagcaccacagatggaaaaattgtaattaaagtgtctctgagaaatccttttctttgcaatcttcccaaatcgtccatatttttttgtgtatgttgaatgtatatctgaccatcaaataaaatactttcagaattgttctagaaaatatccttgcaataagattgaat

SEQ ID NO: 335115 - DNA, 2306 bp, Homo sapiens
tctctgaagccacagatctcttaagaactttctgtctccaaaccgtggctgctcgataaatcagacagaacagttaatcctcaatttaagcctgatctaacccctagaaacaggaattaaggataacctagacgacataaagaggataattaaagccagagagcacagaaataggcttctagcagacatcagagactataggccctatgcagacttggtttcagaaattcgtattcttttggtgggtccagttgggtctggaaagtccagttttttcaattcagtcaagtctatttttcatggccatgtgactggccaagccgtagtggggtctgatatcaccagcataaccgagcggtataggatatattctgttaaagatggaaaaaatggaaaatctctgccatttatgttgtgtgacactatggggctagatggggcagaaggagcaggactgtgcatggatgacattccccacatcttaaaaggttgtatgccagacagatatcagtttaattcccgtaaaccaattacacctgagcattctacttttatcacctctccatctctgaaggacaggattcactgtgtggcttatgtcttagacatcaactctattgacaatctctactctaaaatgttggcaaaagtgaagcaagttcacaaagaagtattaaactgtggtatagcatatgtggccttgcttactaaagtggatgattgcagtgaggttcttcaagacaactttttaaacatgagtagatctatgacttctcaaagccgggtcatgaatgtccataaaatgctaggcattcctatttccaatattttgatggttggaaattatgcttcagatttggaactggaccccatgaaggatattctcatcctctctgcactgaggcagatgctgcgggctgcagatgattttttagaagatttgcctcttgaggaaactggtgcaattgagagagcgttacagccctgcatttgagataagttgccttgattctgacatttggcccagcctgtactggtgtgccgcaatgagagtcaatctctattgacagcctgcttcagattttgcttttgttcgttttgccttctgtccttggaacagtcatatctcaagttcaaaggccaaaacctgagaagcggtgggctaagataggtcctactgcaaaccacccctccatatttccgtaccatttacaattcagtttctgtgacatctttttaaaccactggaggaaaaatgagatattctctaatttattcttctataacactctatatagagctatgtgagtactaatcacattgaataatagttataaaattattgtatagacatctgcttcttaaacagattgtgagttctttgagaaacagcgtggattttacttatctgtgtattcacagagcttagcacagtgcctggtaatgagcaagcatacttgccattacttttccttcccactctctccaacatcacattcactttaaatttttctgtatatagaaaggaaaactagcctgggcaacatgatgaaaccccatctccactgcaaaaaaaaaaaaaaaaaataagaaagaacaaaacaaaccccacaaaaattagctgggtatgatggcacgtgcctgtagtcccagttactcaggatgattgattgagccttggaggtggaggctacagtgagctgagattgtgccactgtactctagccagggagaaagagtgagatcctggctcaaaaaaaccaaataaaacaaaacaaacaaacgaaaaacagaaaggaagactgaaagagaatgaaaagctggggagaggaaataaaaataaagaaggaagagtgtttcatttatatctgaatgaaaatatgaatgactctaagtaattgaattaattaaaatgagccaacttttttttaacaatttacattttatttctatgggaaaaaataaatattcctcttctaacaaacccatgcttgattttcattaattgaattccaaatcatcctagccatgtgtccttccatttaggttactggggcaaatcagtaagaaagttcttatatttatgctccaaataattctgaagtcctcttactagctgtgaaagctagtactattaagaaagaaaacaaaattcccaaaagatagctttcacttttttttttccttaaagacttcctaattctcttctccaaattcttagtcttcttcaaaataatatgctttggttcaatagttatccacattctgacagtctaatttagttttaatcagaattatactcatct

SEQ ID NO: 335116 - DNA, 2724 bp, Homo sapiens
tctctgaagccacagatctcttaagaactttctgtctccaaaccgtggctgctcgataaatcagacagaacagttaatcctcaatttaagcctgatctaacccctagaaacagatatagaacaatggaagtgacaacaagattgacatggaatgatgaaaatcatctgcgcaagctgcttggaaatgtttctttgagtcttctctataagtctagtgttcatggaggtagcattgaagatatggttgaaagatgcagccgtcagggatgtactataacaatggcttacattgattacaatatgattgtagcctttatgcttggaaattatattaatttacgtgaaagttctacagagccaaatgattccctatggttttcacttcaaaagaaaaatgacaccactgaaatagaaactttactcttaaatacagcaccaaaaattattgatgagcaactggtgtgtcgtttatcgaaaacggatattttcattatatgtcgagataataaaatttatctagataaaatgataacaagaaacttgaaactaaggttttatggccaccgtcagtatttggaatgtgaagtttttcgagttgaaggaattaaggataacctagacgacataaagaggataattaaagccagagagcacagaaataggcttctagcagacatcagagactataggccctatgcagacttggtttcagaaattcgtattcttttggtgggtccagttgggtctggaaagtccagttttttcaattcagtcaagtctatttttcatggccatgtgactggccaagccgtagtggggtctgatatcaccagcataaccgagcggtataggatatattctgttaaagatggaaaaaatggaaaatctctgccatttatgttgtgtgacactatggggctagatggggcagaaggagcaggactgtgcatggatgacattccccacatcttaaaaggttgtatgccagacagatatcagtttaattcccgtaaaccaattacacctgagcattctacttttatcacctctccatctctgaaggacaggattcactgtgtggcttatgtcttagacatcaactctattgacaatctctactctaaaatgttggcaaaagtgaagcaagttcacaaagaagtattaaactgtggtatagcatatgtggccttgcttactaaagtggatgattgcagtgaggttcttcaagacaactttttaaacatgagtagatctatgacttctcaaagccggatttggaactggaccccatgaaggatattctcatcctctctgcactgaggcagatgctgcgggctgcagatgattttttagaagatttgcctcttgaggaaactggtgcaattgagagagcgttacagccctgcatttgagataagttgccttgattctgacatttggcccagcctgtactggtgtgccgcaatgagagtcaatctctattgacagcctgcttcagattttgcttttgttcgttttgccttctgtccttggaacagtcatatctcaagttcaaaggccaaaacctgagaagcggtgggctaagataggtcctactgcaaaccacccctccatatttccgtaccatttacaattcagtttctgtgacatctttttaaaccactggaggaaaaatgagatattctctaatttattcttctataacactctatatagagctatgtgagtactaatcacattgaataatagttataaaattattgtatagacatctgcttcttaaacagattgtgagttctttgagaaacagcgtggattttacttatctgtgtattcacagagcttagcacagtgcctggtaatgagcaagcatacttgccattacttttccttcccactctctccaacatcacattcactttaaatttttctgtatatagaaaggaaaactagcctgggcaacatgatgaaaccccatctccactgcaaaaaaaaaaaaaaaaaataagaaagaacaaaacaaaccccacaaaaattagctgggtatgatggcacgtgcctgtagtcccagttactcaggatgattgattgagccttggaggtggaggctacagtgagctgagattgtgccactgtactctagccagggagaaagagtgagatcctggctcaaaaaaaccaaataaaacaaaacaaacaaacgaaaaacagaaaggaagactgaaagagaatgaaaagctggggagaggaaataaaaataaagaaggaagagtgtttcatttatatctgaatgaaaatatgaatgactctaagtaattgaattaattaaaatgagccaacttttttttaacaatttacattttatttctatgggaaaaaataaatattcctcttctaacaaacccatgcttgattttcattaattgaattccaaatcatcctagccatgtgtccttccatttaggttactggggcaaatcagtaagaaagttcttatatttatgctccaaataattctgaagtcctcttactagctgtgaaagctagtactattaagaaagaaaacaaaattcccaaaagatagctttcacttttttttttccttaaagacttcctaattctcttctccaaattcttagtcttcttcaaaataatatgctttggttcaatagttatccacattctgacagtctaatttagttttaatcagaattatactcatct

SEQ ID NO: 335117 - DNA, 2061 bp, Homo sapiens
tctctgaagccacagatctcttaagaactttctgtctccaaaccgtggctgctcgataaatcagacagaacagttaatcctcaatttaagcctgatctaacccctagaaacagtataggatatattctgttaaagatggaaaaaatggaaaatctctgccatttatgttgtgtgacactatggggctagatggggcagaaggagcaggactgtgcatggatgacattccccacatcttaaaaggttgtatgccagacagatatcagtttaattcccgtaaaccaattacacctgagcattctacttttatcacctctccatctctgaaggacaggattcactgtgtggcttatgtcttagacatcaactctattgacaatctctactctaaaatgttggcaaaagtgaagcaagttcacaaagaagtattaaactgtggtatagcatatgtggccttgcttactaaagtggatgattgcagtgaggttcttcaagacaactttttaaacatgagtagatctatgacttctcaaagccgggtcatgaatgtccataaaatgctaggcattcctatttccaatattttgatggttggaaattatgcttcagatttggaactggaccccatgaaggatattctcatcctctctgcactgaggcagatgctgcgggctgcagatgattttttagaagatttgcctcttgaggaaactggtgcaattgagagagcgttacagccctgcatttgagataagttgccttgattctgacatttggcccagcctgtactggtgtgccgcaatgagagtcaatctctattgacagcctgcttcagattttgcttttgttcgttttgccttctgtccttggaacagtcatatctcaagttcaaaggccaaaacctgagaagcggtgggctaagataggtcctactgcaaaccacccctccatatttccgtaccatttacaattcagtttctgtgacatctttttaaaccactggaggaaaaatgagatattctctaatttattcttctataacactctatatagagctatgtgagtactaatcacattgaataatagttataaaattattgtatagacatctgcttcttaaacagattgtgagttctttgagaaacagcgtggattttacttatctgtgtattcacagagcttagcacagtgcctggtaatgagcaagcatacttgccattacttttccttcccactctctccaacatcacattcactttaaatttttctgtatatagaaaggaaaactagcctgggcaacatgatgaaaccccatctccactgcaaaaaaaaaaaaaaaaaataagaaagaacaaaacaaaccccacaaaaattagctgggtatgatggcacgtgcctgtagtcccagttactcaggatgattgattgagccttggaggtggaggctacagtgagctgagattgtgccactgtactctagccagggagaaagagtgagatcctggctcaaaaaaaccaaataaaacaaaacaaacaaacgaaaaacagaaaggaagactgaaagagaatgaaaagctggggagaggaaataaaaataaagaaggaagagtgtttcatttatatctgaatgaaaatatgaatgactctaagtaattgaattaattaaaatgagccaacttttttttaacaatttacattttatttctatgggaaaaaataaatattcctcttctaacaaacccatgcttgattttcattaattgaattccaaatcatcctagccatgtgtccttccatttaggttactggggcaaatcagtaagaaagttcttatatttatgctccaaataattctgaagtcctcttactagctgtgaaagctagtactattaagaaagaaaacaaaattcccaaaagatagctttcacttttttttttccttaaagacttcctaattctcttctccaaattcttagtcttcttcaaaataatatgctttggttcaatagttatccacattctgacagtctaatttagttttaatcagaattatactcatct

SEQ ID NO: 335118 - DNA, 2569 bp, Homo sapiens
tctctgaagccacagatctcttaagaactttctgtctccaaaccgtggctgctcgataaatcagacagaacagttaatcctcaatttaagcctgatctaacccctagaaacagatatagaacaatggaagtgacaacaagattgacatggaatgatgaaaatcatctgcgcaagctgcttggaaatgtttctttgagtcttctctataagtctagtgttcatggaggtagcattgaagatatggttgaaagatgcagccgtcagggatgtactataacaatggcttacattgattacaatatgattgtagcctttatgcttggaaattatattaatttacgtgaaagttctacagagccaaatgattccctatggttttcacttcaaaagaaaaatgacaccactgaaatagaaactttactcttaaatacagcaccaaaaattattgatgagcaactggtgtgtcgtttatcgaaaacggatattttcattatatgtcgagataataaaatttatctagataaaatgataacaagaaacttgaaactaaggttttatggccaccgtcagtatttggaatgtgaagtttttcgagttgaaggaattaaggataacctagacgacataaagaggataattaaagccagagagcacagaaataggcttctagcagacatcagagactataggccctatgcagacttggtttcagaaattcgtattcttttggtgggtccagttgggtctggaaagtccagttttttcaattcagtcaagtctatttttcatggccatgtgactggccaagccgtagtggggtctgatatcaccagcataaccgagcggtataggatatattctgttaaagatggaaaaaatggaaaatctctgccatttatgttgtgtgacactatggggctagatggggcagaaggagcaggactgtgcatggatgacattccccacatcttaaaaggttgtatgccagacagatatcagtttaattcccgtaaaccaattacacctgagcattctacttttatcacctctccatctctgaaggacaggattcactgtgtggcttatgtcttagacatcaactctattgacaatctctactctaaaatgttggcaaaagtgaagcaagttcacaaagaagtattaaactgtggtatagcatatgtggccttgcttactaaagtggatgattgcagtgaggttcttcaagacaactttttaaacatgagtagatctatgacttctcaaagccgggtcatgaatgtccataaaatgctaggcattcctatttccaatattttgatggttggaaattatgcttcaggattttgcttttgttcgttttgccttctgtccttggaacagtcatatctcaagttcaaaggccaaaacctgagaagcggtgggctaagataggtcctactgcaaaccacccctccatatttccgtaccatttacaattcagtttctgtgacatctttttaaaccactggaggaaaaatgagatattctctaatttattcttctataacactctatatagagctatgtgagtactaatcacattgaataatagttataaaattattgtatagacatctgcttcttaaacagattgtgagttctttgagaaacagcgtggattttacttatctgtgtattcacagagcttagcacagtgcctggtaatgagcaagcatacttgccattacttttccttcccactctctccaacatcacattcactttaaatttttctgtatatagaaaggaaaactagcctgggcaacatgatgaaaccccatctccactgcaaaaaaaaaaaaaaaaaataagaaagaacaaaacaaaccccacaaaaattagctgggtatgatggcacgtgcctgtagtcccagttactcaggatgattgattgagccttggaggtggaggctacagtgagctgagattgtgccactgtactctagccagggagaaagagtgagatcctggctcaaaaaaaccaaataaaacaaaacaaacaaacgaaaaacagaaaggaagactgaaagagaatgaaaagctggggagaggaaataaaaataaagaaggaagagtgtttcatttatatctgaatgaaaatatgaatgactctaagtaattgaattaattaaaatgagccaacttttttttaacaatttacattttatttctatgggaaaaaataaatattcctcttctaacaaacccatgcttgattttcattaattgaattccaaatcatcctagccatgtgtccttccatttaggttactggggcaaatcagtaagaaagttcttatatttatgctccaaataattctgaagtcctcttactagctgtgaaagctagtactattaagaaagaaaacaaaattcccaaaagatagctttcacttttttttttccttaaagacttcctaattctcttctccaaattcttagtcttcttcaaaataatatgctttggttcaatagttatccacattctgacagtctaatttagttttaatcagaattatactcatct

SEQ ID NO: 335119 - DNA, 1586 bp, Homo sapiens
ttggcaggacactagtgcaggctgggccaaagggcaaaatcaaggcaacttatctcaaagccgggtcatgaatgtccataaaatgctaggcattcctatttccaatattttgatggttggaaattatgcttcagatttggaactggaccccatgaaggatattctcatcctctctgcactgaggcagatgctgcgggctgcagatgattttttagaagatttgcctcttgaggaaactggtgcaattgagagagcgttacagccctgcatttgagataagttgccttgattctgacatttggcccagcctgtactggtgtgccgcaatgagagtcaatctctattgacagcctgcttcagattttgcttttgttcgttttgccttctgtccttggaacagtcatatctcaagttcaaaggccaaaacctgagaagcggtgggctaagataggtcctactgcaaaccacccctccatatttccgtaccatttacaattcagtttctgtgacatctttttaaaccactggaggaaaaatgagatattctctaatttattcttctataacactctatatagagctatgtgagtactaatcacattgaataatagttataaaattattgtatagacatctgcttcttaaacagattgtgagttctttgagaaacagcgtggattttacttatctgtgtattcacagagcttagcacagtgcctggtaatgagcaagcatacttgccattacttttccttcccactctctccaacatcacattcactttaaatttttctgtatatagaaaggaaaactagcctgggcaacatgatgaaaccccatctccactgcaaaaaaaaaaaaaaaaaataagaaagaacaaaacaaaccccacaaaaattagctgggtatgatggcacgtgcctgtagtcccagttactcaggatgattgattgagccttggaggtggaggctacagtgagctgagattgtgccactgtactctagccagggagaaagagtgagatcctggctcaaaaaaaccaaataaaacaaaacaaacaaacgaaaaacagaaaggaagactgaaagagaatgaaaagctggggagaggaaataaaaataaagaaggaagagtgtttcatttatatctgaatgaaaatatgaatgactctaagtaattgaattaattaaaatgagccaacttttttttaacaatttacattttatttctatgggaaaaaataaatattcctcttctaacaaacccatgcttgattttcattaattgaattccaaatcatcctagccatgtgtccttccatttaggttactggggcaaatcagtaagaaagttcttatatttatgctccaaataattctgaagtcctcttactagctgtgaaagctagtactattaagaaagaaaacaaaattcccaaaagatagctttcacttttttttttccttaaagacttcctaattctcttctccaaattcttagtcttcttcaaaataatatgctttggttcaatagttatccacattctgacagtctaatttagttttaatcagaattatactcatct

SEQ ID NO: 335120 - DNA, 1476 bp, Homo sapiens
  misc_feature (1389)..(1389): n is a, c, g, or t
  misc_feature (1398)..(1398): n is a, c, g, or t
tctctgaagccacagatctcttaagaactttctgtctccaaaccgtggctgctcgataaatcagacagaacagttaatcctcaatttaagcctgatctaacccctagaaacagatatagaacaatggaagtgacaacaagattgacatggaatgatgaaaatcatctgcgcaagctgcttggaaatgtttctttgagtcttctctataagtctagtgttcatggaggtagcattgaagatatggttgaaagatgcagccgtcagggatgtactataacaatggcttacattgattacaatatgattgtagcctttatgcttggaaattatattaatttacgtgaaagttctacagagccaaatgattccctatggttttcacttcaaaagaaaaatgacaccactgaaatagaaactttactcttaaatacagcaccaaaaattattgatgagcaactggtgtgtcgtttatcgaaaacggatattttcattatatgtcgagataataaaatttatctagataaaatgataacaagaaacttgaaactaaggttttatggccaccgtcagtatttggaatgtgaagtttttcgagttgaaggaattaaggataacctagacgacataaagaggataattaaagccagagagcacagaaataggcttctagcagacatcagagactataggccctatgcagacttggtttcagaaattcgtattcttttggtgggtccagttgggtctggaaagtccagttttttcaattcagtcaagtctatttttcatggccatgtgactggccaagccgtagtggggtctgatatcaccagcataaccgagcggtataggatatattctgttaaagatggaaaaaatggaaaatctctgccatttatgttgtgtgacactatggggctagatggggcagaaggagcaggactgtgcatggatgacattccccacatcttaaaaggttgtatgccagacagatatcaggacaggattcactgtgtggcttatgtcttagacatcaactctattgacaatctctactctaaaatgttggcaaaagtgaagcaagttcacaaagaagtattaaactgtggtatagcatatgtggccttgcttactaaagtggatgattgcagtgaggttcttcaagacaactttttaaacatgagtagatctatgacttctcaaagccgggtcatgaatgtccataaaatgctaggcattcctatttccaatattttgatggttggaaattatgcttcagatttggaactggaccccatgaaggatattctcatcctctctgcactgaggcagatgctgcgggctgcagatgattttttagaagatttgcctcttgaggaaactggtgcnattgagagngcgttacagcctagcattttatggacattcatgacccggctttgagaagtcatagatctactcatgtgtaaaaagttg

SEQ ID NO: 335121 - DNA, 1042 bp, Homo sapiens
tctctgaagccacagatctcttaagaactttctgtctccaaaccgtggctgctcgataaatcagacagaacagttaatcctcaatttaagcctgatctaacccctagaaacagatatagaacaatggaagtgacaacaagattgacatggaatgatgaaaatcatctgcgcaagctgcttggaaatgtttctttgagtcttctctataagtctagtgttcatggaggtagcattgaagatatggttgaaagatgcagccgtcagggatgtactataacaatggcttacattgattacaatatgattgtagcctttatgcttggaaattatattaatttacgtgaaagttctacagagccaaatgattccctatggttttcacttcaaaagaaaaatgacaccactgaaatagaaactttactcttaaatacagcaccaaaaattattgatgagcaactggtgtgtcgtttatcgaaaacggatattttcattatatgtcgagataataaaatttatctagataaaatgataacaagaaacttgaaactaaggttttatggccaccgtcagtatttggaatgtgaagtttttcgagttgaaggaattaaggataacctagacgacataaagaggataattaaagccagagagcacagaaataggcttctagcagacatcagagactataggccctatgcagacttggtttcagaaattcgtattcttttggtgggtccagttgggtctggaaagtccagttttttcaattcagtcaagtctatttttcatggccatgtgactggccaagccgtagtggggtctgatatcaccagcataaccgagcggggcaatcctaatatacaattaaatgctaaatcaaatggaaaataggagtaaaattttgatcagaaccacctccattgtgctatattatacagagaagctttcaaattttatggatggaagaagcagttatataaagaatactttttagtatttgtataaaaaacaacaaaaaattaaaaaccctatgaaaatcttt

SEQ ID NO: 335122 - DNA, 424 bp, Homo sapiens
tctctgaagccacagatctcttaagaactttctgtctccaaaccgtggctgctcgataaatcagacagaacagttaatcctcaatttaagcctgatctaacccctagaaacaggtaagcgactttttaatgaaacatagtatttgtacgtatttatggggttatgtgtgatattttgatacaagcatacaatgtaatgaccaaatcaggatcattgggaaatccatcacctcaaccatttatcatttctttgtatttggaacattccaaattttctcttctagctatttcaaaatagacaataaattattgttaactatagttaaactgttgtgctatgaacacaagaacttattccttctatgtagctgtatttttgtaaccattaaccaacctcttttcatcatctccttcctctgactttc

SEQ ID NO: 335123 - DNA, 2794 bp, Homo sapiens
tctctgaagccacagatctcttaagaactttctgtctccaaaccgtggctgctcgataaatcagacagaacagttaatcctcaatttaagcctgatctaacccctagaaacagatatagaacaatggaagtgacaacaagattgacatggaatgatgaaaatcatctgcgcaagctgcttggaaatgtttctttgagtcttctctataagtctagtgttcatggaggtagcattgaagatatggttgaaagatgcagccgtcagggatgtactataacaatggcttacattgattacaatatgattgtagcctttatgcttggaaattatattaatttacgtgaaagttctacagagccaaatgattccctatggttttcacttcaaaagaaaaatgacaccactgaaatagaaactttactcttaaatacagcaccaaaaattattgatgagcaactggtgtgtcgtttatcgaaaacggatattttcattatatgtcgagataataaaatttatctagataaaatgataacaagaaacttgaaactaaggttttatggccaccgtcagtatttggaatgtgaagtttttcgagttgaaggaattaaggataacctagacgacataaagaggataattaaagccagagagcacagaaataggcttctagcagacatcagagactataggccctatgcagacttggtttcagaaattcgtattcttttggtgggtccagttgggtctggaaagtccagttttttcaattcagtcaagtctatttttcatggccatgtgactggccaagccgtagtggggtctgatatcaccagcataaccgagcggtataggatatattctgttaaagatggaaaaaatggaaaatctctgccatttatgttgtgtgacactatggggctagatggggcagaaggagcaggactgtgcatggatgacattccccacatcttaaaaggttgtatgccagacagatatcagtttaattcccgtaaaccaattacacctgagcattctacttttatcacctctccatctctgaaggacaggattcactgtgtggcttatgtcttagacatcaactctattgacaatctctactctaaaatgttggcaaaagtgaagcaagttcacaaagaagtattaaactgtggtatagcatatgtggccttgcttactaaagtggatgattgcagtgaggttcttcaagacaactttttaaacatgagtagatctatgacttctcaaagccgggtcatgaatgtccataaaatgctaggcattcctatttccaatattttgatggttggaaattatgcttcagatttggaactggaccccatgaaggatattctcatcctctctgcactgaggcagatgctgcgggctgcagatgattttttagaagatttgcctcttgaggaaactggtgcaattgagagagcgttacagccctgcatttgagataagttgccttgattctgacatttggcccagcctgtactggtgtgccgcaatgagagtcaatctctattgacagcctgcttcagattttgcttttgttcgttttgccttctgtccttggaacagtcatatctcaagttcaaaggccaaaacctgagaagcggtgggctaagataggtcctactgcaaaccacccctccatatttccgtaccatttacaattcagtttctgtgacatctttttaaaccactggaggaaaaatgagatattctctaatttattcttctataacactctatatagagctatgtgagtactaatcacattgaataatagttataaaattattgtatagacatctgcttcttaaacagattgtgagttctttgagaaacagcgtggattttacttatctgtgtattcacagagcttagcacagtgcctggtaatgagcaagcatacttgccattacttttccttcccactctctccaacatcacattcactttaaatttttctgtatatagaaaggaaaactagcctgggcaacatgatgaaaccccatctccactgcaaaaaaaaaaaaaaaaaataagaaagaacaaaacaaaccccacaaaaattagctgggtatgatggcacgtgcctgtagtcccagttactcaggatgattgattgagccttggaggtggaggctacagtgagctgagattgtgccactgtactctagccagggagaaagagtgagatcctggctcaaaaaaaccaaataaaacaaaacaaacaaacgaaaaacagaaaggaagactgaaagagaatgaaaagctggggagaggaaataaaaataaagaaggaagagtgtttcatttatatctgaatgaaaatatgaatgactctaagtaattgaattaattaaaatgagccaacttttttttaacaatttacattttatttctatgggaaaaaataaatattcctcttctaacaaacccatgcttgattttcattaattgaattccaaatcatcctagccatgtgtccttccatttaggttactggggcaaatcagtaagaaagttcttatatttatgctccaaataattctgaagtcctcttactagctgtgaaagctagtactattaagaaagaaaacaaaattcccaaaagatagctttcacttttttttttccttaaagacttcctaattctcttctccaaattcttagtcttcttcaaaataatatgctttggttcaatagttatccacattctgacagtctaatttagttttaatcagaattatactcatct

SEQ ID NO: 335124 - DNA, 2737 bp, Homo sapiens
  misc_feature (16)..(18): n is a, c, g, or t
  misc_feature (42)..(42): n is a, c, g, or t
  misc_feature (46)..(47): n is a, c, g, or t
  misc_feature (56)..(56): n is a, c, g, or t
ccttgaagagcatagnnnagtgaccctctctttatattaacncacnncgctacagnatatagaacaatggaagtgacaacaagattgacatggaatgatgaaaatcatctgcgcaagctgcttggaaatgtttctttgagtcttctctataagtctagtgttcatggaggtagcattgaagatatggttgaaagatgcagccgtcagggatgtactataacaatggcttacattgattacaatatgattgtagcctttatgcttggaaattatattaatttacgtgaaagttctacagagccaaatgattccctatggttttcacttcaaaagaaaaatgacaccactgaaatagaaactttactcttaaatacagcaccaaaaattattgatgagcaactggtgtgtcgtttatcgaaaacggatattttcattatatgtcgagataataaaatttatctagataaaatgataacaagaaacttgaaactaaggttttatggccaccgtcagtatttggaatgtgaagtttttcgagttgaaggaattaaggataacctagacgacataaagaggataattaaagccagagagcacagaaataggcttctagcagacatcagagactataggccctatgcagacttggtttcagaaattcgtattcttttggtgggtccagttgggtctggaaagtccagttttttcaattcagtcaagtctatttttcatggccatgtgactggccaagccgtagtggggtctgatatcaccagcataaccgagcggtataggatatattctgttaaagatggaaaaaatggaaaatctctgccatttatgttgtgtgacactatggggctagatggggcagaaggagcaggactgtgcatggatgacattccccacatcttaaaaggttgtatgccagacagatatcagtttaattcccgtaaaccaattacacctgagcattctacttttatcacctctccatctctgaaggacaggattcactgtgtggcttatgtcttagacatcaactctattgacaatctctactctaaaatgttggcaaaagtgaagcaagttcacaaagaagtattaaactgtggtatagcatatgtggccttgcttactaaagtggatgattgcagtgaggttcttcaagacaactttttaaacatgagtagatctatgacttctcaaagccgggtcatgaatgtccataaaatgctaggcattcctatttccaatattttgatggttggaaattatgcttcagatttggaactggaccccatgaaggatattctcatcctctctgcactgaggcagatgctgcgggctgcagatgattttttagaagatttgcctcttgaggaaactggtgcaattgagagagcgttacagccctgcatttgagataagttgccttgattctgacatttggcccagcctgtactggtgtgccgcaatgagagtcaatctctattgacagcctgcttcagattttgcttttgttcgttttgccttctgtccttggaacagtcatatctcaagttcaaaggccaaaacctgagaagcggtgggctaagataggtcctactgcaaaccacccctccatatttccgtaccatttacaattcagtttctgtgacatctttttaaaccactggaggaaaaatgagatattctctaatttattcttctataacactctatatagagctatgtgagtactaatcacattgaataatagttataaaattattgtatagacatctgcttcttaaacagattgtgagttctttgagaaacagcgtggattttacttatctgtgtattcacagagcttagcacagtgcctggtaatgagcaagcatacttgccattacttttccttcccactctctccaacatcacattcactttaaatttttctgtatatagaaaggaaaactagcctgggcaacatgatgaaaccccatctccactgcaaaaaaaaaaaaaaaaaataagaaagaacaaaacaaaccccacaaaaattagctgggtatgatggcacgtgcctgtagtcccagttactcaggatgattgattgagccttggaggtggaggctacagtgagctgagattgtgccactgtactctagccagggagaaagagtgagatcctggctcaaaaaaaccaaataaaacaaaacaaacaaacgaaaaacagaaaggaagactgaaagagaatgaaaagctggggagaggaaataaaaataaagaaggaagagtgtttcatttatatctgaatgaaaatatgaatgactctaagtaattgaattaattaaaatgagccaacttttttttaacaatttacattttatttctatgggaaaaaataaatattcctcttctaacaaacccatgcttgattttcattaattgaattccaaatcatcctagccatgtgtccttccatttaggttactggggcaaatcagtaagaaagttcttatatttatgctccaaataattctgaagtcctcttactagctgtgaaagctagtactattaagaaagaaaacaaaattcccaaaagatagctttcacttttttttttccttaaagacttcctaattctcttctccaaattcttagtcttcttcaaaataatatgctttggttcaatagttatccacattctgacagtctaatttagttttaatcagaattatactcatct

SEQ ID NO: 335125 - DNA, 1539 bp, Homo sapiens
  misc_feature (1452)..(1452): n is a, c, g, or t
  misc_feature (1461)..(1461): n is a, c, g, or t
tctctgaagccacagatctcttaagaactttctgtctccaaaccgtggctgctcgataaatcagacagaacagttaatcctcaatttaagcctgatctaacccctagaaacagatatagaacaatggaagtgacaacaagattgacatggaatgatgaaaatcatctgcgcaagctgcttggaaatgtttctttgagtcttctctataagtctagtgttcatggaggtagcattgaagatatggttgaaagatgcagccgtcagggatgtactataacaatggcttacattgattacaatatgattgtagcctttatgcttggaaattatattaatttacgtgaaagttctacagagccaaatgattccctatggttttcacttcaaaagaaaaatgacaccactgaaatagaaactttactcttaaatacagcaccaaaaattattgatgagcaactggtgtgtcgtttatcgaaaacggatattttcattatatgtcgagataataaaatttatctagataaaatgataacaagaaacttgaaactaaggttttatggccaccgtcagtatttggaatgtgaagtttttcgagttgaaggaattaaggataacctagacgacataaagaggataattaaagccagagagcacagaaataggcttctagcagacatcagagactataggccctatgcagacttggtttcagaaattcgtattcttttggtgggtccagttgggtctggaaagtccagttttttcaattcagtcaagtctatttttcatggccatgtgactggccaagccgtagtggggtctgatatcaccagcataaccgagcggtataggatatattctgttaaagatggaaaaaatggaaaatctctgccatttatgttgtgtgacactatggggctagatggggcagaaggagcaggactgtgcatggatgacattccccacatcttaaaaggttgtatgccagacagatatcagtttaattcccgtaaaccaattacacctgagcattctacttttatcacctctccatctctgaaggacaggattcactgtgtggcttatgtcttagacatcaactctattgacaatctctactctaaaatgttggcaaaagtgaagcaagttcacaaagaagtattaaactgtggtatagcatatgtggccttgcttactaaagtggatgattgcagtgaggttcttcaagacaactttttaaacatgagtagatctatgacttctcaaagccgggtcatgaatgtccataaaatgctaggcattcctatttccaatattttgatggttggaaattatgcttcagatttggaactggaccccatgaaggatattctcatcctctctgcactgaggcagatgctgcgggctgcagatgattttttagaagatttgcctcttgaggaaactggtgcnattgagagngcgttacagcctagcattttatggacattcatgacccggctttgagaagtcatagatctactcatgtgtaaaaagttg

SEQ ID NO: 335126 - DNA, 1073 bp, Homo sapiens
tctctgaagccacagatctcttaagaactttctgtctccaaaccgtggctgctcgataaatcagacagaacagttaatcctcaatttaagcctgatctaacccctagaaacagatatagaacaatggaagtgacaacaagattgacatggaatgatgaaaatcatctgcgcaagctgcttggaaatgtttctttgagtcttctctataagtctagtgttcatggaggtagcattgaagatatggttgaaagatgcagccgtcagggatgtactataacaatggcttacattgattacaatatgattgtagcctttatgcttggaaattatattaatttacgtgaaagttctacagagccaaatgattccctatggttttcacttcaaaagaaaaatgacaccactgaaatagaaactttactcttaaatacagcaccaaaaattattgatgagcaactggtgtgtcgtttatcgaaaacggatattttcattatatgtcgagataataaaatttatctagataaaatgataacaagaaacttgaaactaaggttttatggccaccgtcagtatttggaatgtgaagtttttcgagttgaaggaattaaggataacctagacgacataaagaggataattaaagccagagagcacagaaataggcttctagcagacatcagagactataggccctatgcagacttggtttcagaaattcgtattcttttggtgggtccagttgggtctggaaagtccagttttttcaattcagtcaagtctatttttcatggccatgtgactggccaagccgtagtggggtctgatatcaccagcataaccgagcggattacaataagtcatagactgttctctcccttctggtttgagtgatactacacccttgccagcaccacagatggaaaaattgtaattaaagtgtctctgagaaatccttttctttgcaatcttcccaaatcgtccatatttttttgtgtatgttgaatgtatatctgaccatcaaataaaatactttcagaattgttctagaaaatatccttgcaataagattgaat

SEQ ID NO: 335127 - DNA, 1433 bp, Homo sapiens
cgaaccttcccagttccaaagcccaagaagctgggactgtgagatccacgttcccaaggctccccggtgctttccagcagcactcagggttggcaagagctggcttcagtatactgttatttcaggaatgaggcccgcacaaaataaaagcatttgagaaacggaaaggaaaaaaaaggagtgaaaataggaaggcttaaaaaaaaaaccggaaagaaatagacgcccacccttattttccctccaatgtcaacaagcaaaacgaaaatatttccagggtgatcgctcgcagctacccgcttccaattcggattagaagctgaggctggagcggcgaggagaaaacgacatcgagtcaccccgcgcgtgagcgacgctctggagcaggagagaaggaaaaggaagagacacacgtatatagcatgtgttacctgatttatttcgagattgtttggtactgttttctctctgggcacctctcatttcggaaggccatcagaggcgcccactactgagcggccccggccgccgcagcagcacccggagccccagtcccggtttccccgcggtgccggagcccggagctcgccgccgcccaggcctcaggaatcgagtaagtaacccctgtttggccccgcgctcctctgcccacttcctcctcctcatctcatcgctcccaaagctctcacaacacctcctcccccgaagtaaaggacacccccgcacacacgccagcggtgggccttatctccccccttatccaaagctgcgctagactattacctacaaagggcacaattttcctgctggctcagaaatgccagacactggcctgcaaggccgactcggaaaagtagtgcctcgcctctacctcctccatttcctgccctctcgcatcctctccctgcactcccactcttcccactaccaccaccacccccgctttcaaaaataaaattggatacaaactttaatcactaaggacaaatattgacgcttaaacgaaaatgacccagtacaatgaggaggaagccggaaatgtgagctattggccctaggaggggaatttcggtggagcggagccggcggggtggagggggtggcgggggcgcagggaagggctgcggcaccgcgtgctcccgccggcgtatccctacgcggctccgcgcggcctcggggtccgaggcccgcggagagggggaggcgagcgcccgagggggcggcagccggcgggcggggcgggggtgggtgggcccggcccctccgattggtcgacggcgagagagacgctcccgcacgccgccagctctgattggcccagcggtaggaaaggttaaaccaaaaatttttttacagccctagtgtgcgcctgtagctcggaaaattaattgtggctatagccgcctcgatcgctgtctccccagcctcgccgc

SEQ ID NO: 335128 - DNA, 246 bp, Homo sapiens
gaggagagagagagagagagagagagagagagagagagagagagagagagagagagagagagagagagagagagagagagagagagagagagagagcctgtgttgcgcaaatgccgcataaatttgagtgattgttaatgttgtcttaaaatttcttgattgtgatactgtggtcatatgcccgtgtttgtcacttacaaaaatgtttactatgaacacacagaaataaaaaataggctaaattca

SEQ ID NO: 335129 - DNA, 3167 bp, Homo sapiens
  misc_feature (1087)..(1087): n is a, c, g, or t
  misc_feature (1091)..(1091): n is a, c, g, or t
  misc_feature (1098)..(1098): n is a, c, g, or t
  misc_feature (1135)..(1135): n is a, c, g, or t
  misc_feature (1152)..(1152): n is a, c, g, or t
cgaaccttcccagttccaaagcccaagaagctgggactgtgagatccacgttcccaaggctccccggtgctttccagcagcactcagggttggcaagagctggcttcagtatactgttatttcaggaatgaggcccgcacaaaataaaagcatttgagaaacggaaaggaaaaaaaaggagtgaaaataggaaggcttaaaaaaaaaaccggaaagaaatagacgcccacccttattttccctccaatgtcaacaagcaaaacgaaaatatttccagggtgatcgctcgcagctacccgcttccaattcggattagaagctgaggctggagcggcgaggagaaaacgacatcgagtcaccccgcgcgtgagcgacgctctggagcaggagagaaggaaaaggaagagacacacgtatatagcatgtgttacctgatttatttcgagattgtttggtactgttttctctctgggcacctctcatttcggaaggccatcagaggcgcccactactgagcggccccggccgccgcagcagcacccggagccccagtcccggtttccccgcggtgccggagcccggagctcgccgccgcccaggcctcaggaatcgaaggggtggttgctgcttttgctacatgacttgccagcgcccgagcctgcggtccaactgcgctgctgccggagcgctcagtgccgccgctgccgcccgcgccccccgcgccccgttcggcacccaccggtcgccgcgccgcccgcgcgccgctgtcccgctcccgcgccgccgccgccgtttccccccgacgactgggtgatgctggacatgggagataggaaagaggtgaaaatgatccccaagtcctcgttcagcatcaacagcctggtgcccgagggcctccagaacgacaaccaccacgcgagccacggccaccacaacagccaccacccccagcaccaccaccaccaccaccaccatcaccaccacccgccgccgcccgccccgcaaccgccgccgccgccgcagcagcagcagccgccgccgccgccgccgccgccgctcgccccgcagacgcggggcgccgcgccgncgancgacganaagggcccccagctgcttctgctgcccgccgcaccgnccaccaccggccgccgnccggagctaaagcggaggcggctgccggccgggggagctggcgcccgtcgggccggacgagaaggagaagggcgccggcgccgggggggaggagaagaagggggcgggcgagggcggcaaggacggggaggggggcaaggagggcgagaagaagaacggcaagtacgagaagccgccgttcagctacaacgcgctcatcatgatggccatccggcagagccccgagaagcggctcacgctcaacggcatctacgagttcatcatgaagaacttcccttactaccgcgagaacaagcagggctggcagaactccatccgccacaatctgtccctcaacaagtgcttcgtgaaggtgccgcgccactacgacgacccgggcaagggcaactactggatgctggacccgtcgagcgacgacgtgttcatcggcggcaccacgggcaagctgcggcgccgctccaccacctcgcgggccaagctggccttcaagcgcggtgcgcgcctcacctccaccggcctcaccttcatggaccgcgccggctccctctactggcccatgtcgcccttcctgtccctgcaccacccccgcgccagcagcactttgagttacaacggcaccacgtcggcctaccccagccaccccatgccctacagctccgtgttgactcagaactcgctgggcaacaaccactccttctccaccgccaacgggctgagcgtggaccggctggtcaacggggagatcccgtacgccacgcaccacctcacggccgccgcgctagccgcctcggtgccctgcggcctgtcggtgccctgctctgggacctactccctcaacccctgctccgtcaacctgctcgcgggccagaccagttactttttcccccacgtcccgcacccgtcaatgacttcgcagagcagcacgtccatgagcgccagggccgcgtcctcctccacgtcgccgcaggccccctcgaccctgccctgtgagtctttaagaccctctttgccaagttttacgacgggactgtctgggggactgtctgattatttcacacatcaaaatcaggggtcttcttccaaccctttaatacattaacatccctgggaccagactgtaagtgaacgttttacacacatttgcattgtaaatgataattaaaaaaataagtccaggtattttttattaagcccccccctcccatttctgtacgtttgttcagtctctagggttgtttattattctaacaaggtgtggagtgtcagcgaggtgcaatgtggggagaatacattgtagaatataaggtttggaagtcaaattatagtagaatgtgtatctaaatagtgactgctttgccatttcattcaaacctgacaagtctatctctaagagccgccagatttccatgtgtgcagtattataagttatcatggaactatatggtggacgcagaccttgagaacaacctaaattatggggagaattttaaaatgttaaactgtaatttgtatttaaaaagcattcgtagtaaaggtgcccaagaaattattttggccatttattgttttgtccttttctttaaagaactgtttttttttcttttgtttacttttagaccaaagattgggttctagaaaatgcacttggtatactaagtattaaaacaaacaaaaaggaaagttgtttcagttggcaacactgcccattcaattgaatcagaaggggacaaaattaacgattgccttcagtttgtgttgtgtatattttgatgtatgtggtcactaacaggtcacttttattttttctaaatgtagtgaaatgttaatacctattgtacttataggtaaaccttgcaaatatgtaacctgtgttgcgcaaatgccgcataaatttgagtgattgttaatgttgtcttaaaatttcttgattgtgatactgtggtcatatgcccgtgtttgtcacttacaaaaatgtttactatgaacacacagaaataaaaaataggctaaattca

SEQ ID NO: 335130 - DNA, 3168 bp, Homo sapiens
  misc_feature (1068)..(1068): n is a, c, g, or t
  misc_feature (1072)..(1072): n is a, c, g, or t
  misc_feature (1079)..(1079): n is a, c, g, or t
  misc_feature (1116)..(1116): n is a, c, g, or t
  misc_feature (1133)..(1133): n is a, c, g, or t
cgaaccttcccagttccaaagcccaagaagctgggactgtgagatccacgttcccaaggctccccggtgctttccagcagcactcagggttggcaagagctggcttcagtatactgttatttcaggaatgaggcccgcacaaaataaaagcatttgagaaacggaaaggaaaaaaaaggagtgaaaataggaaggcttaaaaaaaaaaccggaaagaaatagacgcccacccttattttccctccaatgtcaacaagcaaaacgaaaatatttccagggtgatcgctcgcagctacccgcttccaattcggattagaagctgaggctggagcggcgaggagaaaacgacatcgagtcaccccgcgcgtgagcgacgctctggagcaggagagaaggaaaaggaagagacacacgtatatagcatgtgttacctgatttatttcgagattgtttggtactgttttctctctgggcacctctcatttcggaaggccatcagaggcgcccactactgagcggccccggccgccgcagcagcacccggagccccagtcccggtttccccgcggtgccggagcccggagctcgccgccgcccaggcctcaggaatcgaaggggtggttgctgcttttgctacatgacttgccagcgcccgagcctgcggtccaactgcgctgctgccggagcgctcagtgccgccgctgccgcccgcgccccccgcgccccgttcggcacccaccggtcgccgcgccgcccgcgcgccgctgtcccgctcccgcgccgccgccgccgtttccccccgacgactgggtgatgctggacatgggagataggaaagaggtgaaaatgatccccaagtcctcgttcagcatcaacagcctggtgcccgagggcctccagaacgacaaccaccacgcgagccacggccaccacaacagccaccacccccagcaccaccaccaccaccaccaccatcaccaccacccgccgccgcccgccccgcaaccgccgccgccgccgcagcagcagcagccgccgccgccgccgagacgcggggcgccgcgccgncgancgacganaagggcccccagctgcttctgctgcccgccgcaccgnccaccaccggccgccgnccggagctaaagcggagggctgggcggcaagggcgagccggctgccggccgggggagctggcgcccgtcgggccggacgagaaggagaagggcgccggcgccgggggggaggagaagaagggggcgggcgagggcggcaaggacggggaggggggcaaggagggcgagaagaagaacggcaagtacgagaagccgccgttcagctacaacgcgctcatcatgatggccatccggcagagccccgagaagcggctcacgctcaacggcatctacgagttcatcatgaagaacttcccttactaccgcgagaacaagcagggctggcagaactccatccgccacaatctgtccctcaacaagtgcttcgtgaaggtgccgcgccactacgacgacccgggcaagggcaactactggatgctggacccgtcgagcgacgacgtgttcatcggcggcaccacgggcaagctgcggcgccgctccaccacctcgcgggccaagctggccttcaagcgcggtgcgcgcctcacctccaccggcctcaccttcatggaccgcgccggctccctctactggcccatgtcgcccttcctgtccctgcaccacccccgcgccagcagcactttgagttacaacggcaccacgtcggcctaccccagccaccccatgccctacagctccgtgttgactcagaactcgctgggcaacaaccactccttctccaccgccaacgggctgagcgtggaccggctggtcaacggggagatcccgtacgccacgcaccacctcacggccgccgcgctagccgcctcggtgccctgcggcctgtcggtgccctgctctgggacctactccctcaacccctgctccgtcaacctgctcgcgggccagaccagttactttttcccccacgtcccgcacccgtcaatgacttcgcagagcagcacgtccatgagcgccagggccgcgtcctcctccacgtcgccgcaggccccctcgaccctgccctgtgagtctttaagaccctctttgccaagttttacgacgggactgtctgggggactgtctgattatttcacacatcaaaatcaggggtcttcttccaaccctttaatacattaacatccctgggaccagactgtaagtgaacgttttacacacatttgcattgtaaatgataattaaaaaaataagtccaggtattttttattaagcccccccctcccatttctgtacgtttgttcagtctctagggttgtttattattctaacaaggtgtggagtgtcagcgaggtgcaatgtggggagaatacattgtagaatataaggtttggaagtcaaattatagtagaatgtgtatctaaatagtgactgctttgccatttcattcaaacctgacaagtctatctctaagagccgccagatttccatgtgtgcagtattataagttatcatggaactatatggtggacgcagaccttgagaacaacctaaattatggggagaattttaaaatgttaaactgtaatttgtatttaaaaagcattcgtagtaaaggtgcccaagaaattattttggccatttattgttttgtccttttctttaaagaactgtttttttttcttttgtttacttttagaccaaagattgggttctagaaaatgcacttggtatactaagtattaaaacaaacaaaaaggaaagttgtttcagttggcaacactgcccattcaattgaatcagaaggggacaaaattaacgattgccttcagtttgtgttgtgtatattttgatgtatgtggtcactaacaggtcacttttattttttctaaatgtagtgaaatgttaatacctattgtacttataggtaaaccttgcaaatatgtaacctgtgttgcgcaaatgccgcataaatttgagtgattgttaatgttgtcttaaaatttcttgattgtgatactgtggtcatatgcccgtgtttgtcacttacaaaaatgtttactatgaacacacagaaataaaaaataggctaaattca

SEQ ID NO: 335131 - DNA, 421 bp, Homo sapiens
tgcacttggtatactaagtattaaaacaaacaaaaaggaaagttgtttcagttggcaacactgcccattcaattgaatcagaaggggacaaaattaacgattgccttcagtttgtgttgtgtatattttgatgtatgtggtcactaacaggtcacttttattttttctaaatgtagtgaaatgttaatacctattgtacttataggtaaaccttgcaaatatgtaacctgtgttgcgcaaatgccgcataaatttgagtgattgttaatgttgtcttaaaatttcttgattgtgatactgtggtcatatgcccgtgtttgtcacttacaaaaatgtttactatgaacacacagaaataaaaaataggctaaattcatatatatcttgatacttttgtctcttttattaagtagagctaatt

SEQ ID NO: 335132 - DNA, 3419 bp, Homo sapiens
  misc_feature (1068)..(1068): n is a, c, g, or t
  misc_feature (1072)..(1072): n is a, c, g, or t
  misc_feature (1079)..(1079): n is a, c, g, or t
  misc_feature (1116)..(1116): n is a, c, g, or t
  misc_feature (1133)..(1133): n is a, c, g, or t
  misc_feature (3210)..(3210): n is a, c, g, or t
  misc_feature (3224)..(3224): n is a, c, g, or t
  misc_feature (3237)..(3237): n is a, c, g, or t
  misc_feature (3239)..(3239): n is a, c, g, or t
  misc_feature (3244)..(3244): n is a, c, g, or t
  misc_feature (3254)..(3254): n is a, c, g, or t
  misc_feature (3257)..(3257): n is a, c, g, or t
  misc_feature (3261)..(3261): n is a, c, g, or t
  misc_feature (3267)..(3267): n is a, c, g, or t
  misc_feature (3271)..(3271): n is a, c, g, or t
  misc_feature (3276)..(3276): n is a, c, g, or t
  misc_feature (3278)..(3278): n is a, c, g, or t
  misc_feature (3289)..(3289): n is a, c, g, or t
  misc_feature (3291)..(3291): n is a, c, g, or t
  misc_feature (3305)..(3306): n is a, c, g, or t
cgaaccttcccagttccaaagcccaagaagctgggactgtgagatccacgttcccaaggctccccggtgctttccagcagcactcagggttggcaagagctggcttcagtatactgttatttcaggaatgaggcccgcacaaaataaaagcatttgagaaacggaaaggaaaaaaaaggagtgaaaataggaaggcttaaaaaaaaaaccggaaagaaatagacgcccacccttattttccctccaatgtcaacaagcaaaacgaaaatatttccagggtgatcgctcgcagctacccgcttccaattcggattagaagctgaggctggagcggcgaggagaaaacgacatcgagtcaccccgcgcgtgagcgacgctctggagcaggagagaaggaaaaggaagagacacacgtatatagcatgtgttacctgatttatttcgagattgtttggtactgttttctctctgggcacctctcatttcggaaggccatcagaggcgcccactactgagcggccccggccgccgcagcagcacccggagccccagtcccggtttccccgcggtgccggagcccggagctcgccgccgcccaggcctcaggaatcgaaggggtggttgctgcttttgctacatgacttgccagcgcccgagcctgcggtccaactgcgctgctgccggagcgctcagtgccgccgctgccgcccgcgccccccgcgccccgttcggcacccaccggtcgccgcgccgcccgcgcgccgctgtcccgctcccgcgccgccgccgccgtttccccccgacgactgggtgatgctggacatgggagataggaaagaggtgaaaatgatccccaagtcctcgttcagcatcaacagcctggtgcccgagggcctccagaacgacaaccaccacgcgagccacggccaccacaacagccaccacccccagcaccaccaccaccaccaccaccatcaccaccacccgccgccgcccgccccgcaaccgccgccgccgccgcagcagcagcagccgccgccgccgccgagacgcggggcgccgcgccgncgancgacganaagggcccccagctgcttctgctgcccgccgcaccgnccaccaccggccgccgnccggagctaaagcggagggctgggcggcaagggcgagccggctgccggccgggggagctggcgcccgtcgggccggacgagaaggagaagggcgccggcgccgggggggaggagaagaagggggcgggcgagggcggcaaggacggggaggggggcaaggagggcgagaagaagaacggcaagtacgagaagccgccgttcagctacaacgcgctcatcatgatggccatccggcagagccccgagaagcggctcacgctcaacggcatctacgagttcatcatgaagaacttcccttactaccgcgagaacaagcagggctggcagaactccatccgccacaatctgtccctcaacaagtgcttcgtgaaggtgccgcgccactacgacgacccgggcaagggcaactactggatgctggacccgtcgagcgacgacgtgttcatcggcggcaccacgggcaagctgcggcgccgctccaccacctcgcgggccaagctggccttcaagcgcggtgcgcgcctcacctccaccggcctcaccttcatggaccgcgccggctccctctactggcccatgtcgcccttcctgtccctgcaccacccccgcgccagcagcactttgagttacaacggcaccacgtcggcctaccccagccaccccatgccctacagctccgtgttgactcagaactcgctgggcaacaaccactccttctccaccgccaacgggctgagcgtggaccggctggtcaacggggagatcccgtacgccacgcaccacctcacggccgccgcgctagccgcctcggtgccctgcggcctgtcggtgccctgctctgggacctactccctcaacccctgctccgtcaacctgctcgcgggccagaccagttactttttcccccacgtcccgcacccgtcaatgacttcgcagagcagcacgtccatgagcgccagggccgcgtcctcctccacgtcgccgcaggccccctcgaccctgccctgtgagtctttaagaccctctttgccaagttttacgacgggactgtctgggggactgtctgattatttcacacatcaaaatcaggggtcttcttccaaccctttaatacattaacatccctgggaccagactgtaagtgaacgttttacacacatttgcattgtaaatgataattaaaaaaataagtccaggtattttttattaagcccccccctcccatttctgtacgtttgttcagtctctagggttgtttattattctaacaaggtgtggagtgtcagcgaggtgcaatgtggggagaatacattgtagaatataaggtttggaagtcaaattatagtagaatgtgtatctaaatagtgactgctttgccatttcattcaaacctgacaagtctatctctaagagccgccagatttccatgtgtgcagtattataagttatcatggaactatatggtggacgcagaccttgagaacaacctaaattatggggagaattttaaaatgttaaactgtaatttgtatttaaaaagcattcgtagtaaaggtgcccaagaaattattttggccatttattgttttgtccttttctttaaagaactgtttttttttcttttgtttacttttagaccaaagattgggttctagaaaatgcacttggtatactaagtattaaaacaaacaaaaaggaaagttgtttcagttggcaacactgcccattcaattgaatcagaaggggacaaaattaacgattgccttcagtttgtgttgtgtatattttgatgtatgtggtcactaacaggtcacttttattttttctaaatgtagtgaaatgttaatacctattgtacttataggtaaaccttgcaaatatgtaacctgtgttgcgcaaatgccgcataaatttgagtgattgttaatgttgtcttaaaatttcttgattgtgatactgtggtcatatgcccgtgtttgtcacttacaaaaatgtttactatgaacacacagaaataaaaaataggctaaattcaaaaaaaaaaaaaaaaaactcgagttttttttttttttttttnaatctgaatcgctntcactttaatcancntctgnatgaaggcancanacancgtttncctnagagnanccccattcttnancggcagggacacanngacccacaggcccagttttcgtccgagcacagtttgccataaggaccagcgggggcttcctaacagaatcttagatttaaaagtggctcaatcaggaaccttacaaggtggtt

SEQ ID NO: 335133 - DNA, 1886 bp, Homo sapiens
  misc_feature (11)..(11): n is a, c, g, or t
  misc_feature (130)..(131): n is a, c, g, or t
ctacacacgtncgcgtcatcatgactggcccatccgagcagcagcgcgccgagtaatgccggctccacgcctcaagcggacattcttacgacgttcactcagtgaacgacacgttcgccgttaccgtacnncgcagagacacccaaagacaacggaggctggggcaacaaacacctccccagtcgcagaccacaatctgtccctcaacaagtgcttcgtgaaggtgccgcgccactacgacgacccgggcaagggcaactactggatgctggacccgtcgagcgacgacgtgttcatcggcggcaccacgggcaagctgcggcgccgctccaccacctcgcgggccaagctggccttcaagcgcggtgcgcgcctcacctccaccggcctcaccttcatggaccgcgccggctccctctactggcccatgtcgcccttcctgtccctgcaccacccccgcgccagcagcactttgagttacaacggcaccacgtcggcctaccccagccaccccatgccctacagctccgtgttgactcagaactcgctgggcaacaaccactccttctccaccgccaacgggctgagcgtggaccggctggtcaacggggagatcccgtacgccacgcaccacctcacggccgccgcgctagccgcctcggtgccctgcggcctgtcggtgccctgctctgggacctactccctcaacccctgctccgtcaacctgctcgcgggccagaccagttactttttcccccacgtcccgcacccgtcaatgacttcgcagagcagcacgtccatgagcgccagggccgcgtcctcctccacgtcgccgcaggccccctcgaccctgccctgtgagtctttaagaccctctttgccaagttttacgacgggactgtctgggggactgtctgattatttcacacatcaaaatcaggggtcttcttccaaccctttaatacattaacatccctgggaccagactgtaagtgaacgttttacacacatttgcattgtaaatgataattaaaaaaataagtccaggtattttttattaagcccccccctcccatttctgtacgtttgttcagtctctagggttgtttattattctaacaaggtgtggagtgtcagcgaggtgcaatgtggggagaatacattgtagaatataaggtttggaagtcaaattatagtagaatgtgtatctaaatagtgactgctttgccatttcattcaaacctgacaagtctatctctaagagccgccagatttccatgtgtgcagtattataagttatcatggaactatatggtggacgcagaccttgagaacaacctaaattatggggagaattttaaaatgttaaactgtaatttgtatttaaaaagcattcgtagtaaaggtgcccaagaaattattttggccatttattgttttgtccttttctttaaagaactgtttttttttcttttgtttacttttagaccaaagattgggttctagaaaatgcacttggtatactaagtattaaaacaaacaaaaaggaaagttgtttcagttggcaacactgcccattcaattgaatcagaaggggacaaaattaacgattgccttcagtttgtgttgtgtatattttgatgtatgtggtcactaacaggtcacttttattttttctaaatgtagtgaaatgttaatacctattgtacttataggtaaaccttgcaaatatgtaacctgtgttgcgcaaatgccgcataaatttgagtgattgttaatgttgtcttaaaatttcttgattgtgatactgtggtcatatgcccgtgtttgtcacttacaaaaatgtttactatgaacacacagaaataaaaaataggctaaattca

SEQ ID NO: 335134 - DNA, 257 bp, Homo sapiens
tttaaaaaaaatttttttgtagagatgtgatctcaccatcttgcccaggctgatcttaaacccctggacagcaacacgttctttagtgactgatatttcctccctcctctctttctccttttcttccttcactttattctatccttccattcttttattcagttgatatttattagtcttgaggatgggtcaagattatgcggattgttttgtttgctgcaaaggtgtatcagaaaccatttcttcaagaaacctgc

SEQ ID NO: 335135 - DNA, 153 bp, Homo sapiens
gcagtaaaacatttcagaaatatttaaatcaaagaacagagaagcatttatgtaaggctatttttatacaaccaattcttagttattgatgctaatagagctatccagtggtgtgtgtctactccaaattatttacacttatatttgtagtgc

SEQ ID NO: 335136 - DNA, 369 bp, Homo sapiens
ttgggaagaagtgcatctaaatggaatttagagaaattaggggaagcatcgtggagaaagcattccaaacccagtgttaaaagacaaatgagagtcagcctggccaaagggcaaaggatggggaggaaagaatgccaggggtgggggacaactcatatgaagactcatagaacatggtacatttggggaccaacagagatttcaatgagacggaagcatggagtgccagggctgggcaaaggaaggacacatgttcagaatatattagagaagtaaacttgaggttcatgaggaaggtctttgtgcatgataggaagaggatgcatcaaagattttaaggaaagaagctacgattataatttaagcaca

SEQ ID NO: 335137 - DNA, 577 bp, Homo sapiens
  misc_feature (114)..(114): n is a, c, g, or t
taagggcgctgcaagatgcgctttgttaaacagacccttgaaggcagcatgctcgttaagagtcatcaccactccctaatctcaagtacccagggacaccaacacttcggaagnccctggggtcctctgcctaggataaccagagacctttgttcacttgtttatctgctgaccttccctccactattgtcctgtgagccctgccaaatccccctctgcgaggaacacccaagaatgatcaattaaaaaatgataattaaaaaaaagaagaaaaagaaaaaaaagaaattgaaagatgttttgaatgaaaacttacagagaaagcgtgaaggtcttcattctcttgcattcaagtcttacaaacctgagatccagaataagttattgatcatcaaaaaaaaagcaaaacacaagaagcacaaatctggcacttgagagaaaagacaacgatagcagttacatctagaggctattatggattggaggatgagaagggaactgcatgtacctcaaacaaggcgtcggtcaaacgcgaagtatggcagtacatcaagcagggatcctctagaacgccgca

SEQ ID NO: 335138 - DNA, 591 bp, Homo sapiens
ggcccgtctcagtctactgaatccgtaattgatcatcacaagatatcgcatacaagatagcacaactctggaaaaaaatccgtctctaaaaaagcaatcacaaagaagaggaaaactgtcataaagtcacctactgtaccagagtttcagcttatttgcactaatcttgatgaactcagggaattaatcacaaaaatcgagaatgaactcaaagatctggaaaacagtagaaaaaaatcggtatccaatgtccccagcatcagtagattgccaactccctctccttgccacactccagccagtgttatgctggtgctgtcatacccatcccagattactgtagcagaatgcagttgttctttagttgtgagggaaaatggtatcatcggaggcaagctgtaaaagaattacatagtacattgatacgtcttttaaatgaattgctgccatgggaaccaaagttaatgaaggctttccaaagaaacaggagccgcctgaagaaagactatgatgatttcagaagacaacctgatcatgatacatttaatagagaactatggaccactgatgaaggtgaaggagatcttggaa

SEQ ID NO: 335139 - DNA, 829 bp, Homo sapiens
tcttatggaaagggagctggcaatctgcagctgccgtggacattggatgagaaagcatgaaagaatgatttaataagcattttcaaattatgaatgaagtactataccaccactaccccagactgaaaatacataaagaaagagaagaaggtcttcattctcttgcattcaagtcttacaaacctgagatccagaataagttattgatcatcaaaaaaaaagcaaaacacaagaagcacaaatctggaaaaaaatccgtctctaaaaaagcaatcacagaagaaaaagaaaaaaaagaaattgaaagatgttttgaatgaaaacttacagagaaagcgtgaaggtcttcattctcttgcattcaagtcttacaaacctgagatccagaataagttattgatcatcaaaaaaaaagcaaaacacaagaagcacaaatctggaaaaaaatccgtctctaaaaaagcaatcacaaagaagaggaaaactgtcataaagtcacctactgtaccagagtttcagcttatttgcactaatcttgatgaactcagggaattaatcacaaaaatcgagaatgaactcaaagatctggaaaacagtagaaaaaaatcgggaaaatggtatcatcggaggcaagctgtaaaagaattacatagtacattgatacgtcttttaaatgaattgctgccatgggaaccaaagttaatgaaggctttccaaagaaacaggagccgcctgaagaaagactatgatgatttcagaagacaacctgatcatgatacatttaatagagaactatggaccactgatgaaggtgaaggagatcttggaa

SEQ ID NO: 335140 - DNA, 399 bp, Homo sapiens
agattgcatcactgcactacagcctgggggacagagcgagactctgtctcaaataaataaataaataaaactaggacagttgattgcctttttggctaaagataaatatacttaaaatttatcattttatggtaccctctgaataataatagtataatttgttaaatttctttaggcttcgggagcaggaaagaaaagaagcagaagaagctagtcaaaaggaaatagaagaatgggaaagaaaacttctagctcaagcagctccaacttgtatggagaccatgtgggaaattccagctattgggcatttcctttgtttagctcagcaaattctaaatttgccagaaatagtcttttacgaattggaacgttgtcttctgatgcctcagtgtaatgctt

SEQ ID NO: 335141 - DNA, 611 bp, Homo sapiens
taaggggattttcacattaggctggctagagaccatagtcttcagctgtagttcttatgcaagttcctgactgcgaagtcaatgttaaaggtaaggtttttttccctatgtagtctcatcttaagttgcaaatgtagattttaattaagcagtagtaatgtgacttttttgcctaatcttgcagtagattctaccgtataacacattggagatggtaatcgttcagttcatataaacataaaacagcatttgttaatatgtctgttaacaggtagttaatagtttaatgtttgcttttactggggcttgttttgattcatcatttttatttgactcactagcagccatctgttagttacaatttaactttcaaggatctgcgtaatttgttttttgttaatgaagtgctataaacagcattatgaaggttttctcttttaatcttgaaaggaaaaaaatccgtctctaaaaaagcaatcacaaagaagaggaaaactgtcataaagtcacctactgtaccagagtttcaggtaaatgtttcaactttgtctcgaaatttttcaattttttgtttcagtgttcatatcattcctcgagagtttggctgaatt

SEQ ID NO: 335142 - DNA, 2553 bp, Homo sapiens
gcggccgccaccggcggccgaaggagaggacgacgaggaggaggtggcagcggcggcccagacctcagggccggcccacggaaggagtgcctcctcgctggaggacgcggacgatcaggaggaagagatggaggcgatggtgatcggaggcggttgctgcaaggagcaggagctgacctacgagctacagcagggctaccgcatcctgggcgagttcctgcaggagaagcaccggggcctcaccgccccctttctgcagcccttggggggcgttgccaccgcggaggaggaggtggcggaagggccgcgcagcgggggccggggcggtcgcgccttcccgcagcagcccggacagggcatgtgtctgctgcagatggaagagaagttcgccagcggccagtacgggggcatcaccgagttcgtggcggacttcaggttgatgctggagacgtgctaccgcctgcacggagtggaccactggatctccaaacagggccagaagctggagatgatgctggagcagaagttagcgcttctctctcggcacttgagagaaaagacaacgatagcagttacatctagaggctattatggattggaggatgagaagggaactgcatgtacctcaacaaggcgtcggtcaacaccgcgaagtttggcaggcttgacaagtggagtttttgaatctataatggttcaagttttgagacaggaagaacagctgagagcaaaagaagaaaaaaggcttcgggagcaggaaagaaaagaagcagaagaagctagtcaaaaggaaatagaagaatgggaaagaaaacttctagctcaagcagctccaacttgtatggagaccatgtgggaaattccagctattgggcatttcctttgtttagctcagcaaattctaaatttgccagaaatagtcttttacgaattggaacgttgtcttctgatgcctcagtgtaatgcttttctatcgaaaataatgacttctctattaagtcctccccatcgcagacctaccttacatcgaagacctactttgccttataggacctgggaagcagcgctgaggcagaaagtacaacagtggtacactgctgtagggcaaactgaaaatcctgataactgtgctgaaaaactggggttgtgtcctcagttttttaaagttcttggagaagttaatccattggaagaaaaaccttttcacgaactacctttttaccaaaaagtgtggctacttaagggtctttgtgactttgtgtatgaaacacaaaaggaagttcaagatgctgtacttggacagcctatccatgaatgcagggaagttattcttgggttatgattatttggagaatgcttatgtacattttccacagttctgtggtgcagatgtacggatttataaacagagaccctttcaggccccagaatttccaattccacccattaaaatacaaagagtacctcggattaaattggagaaattgaagtgtgactatgttagtacaagtaatggagaacatagatgtagcagagatagcctgccctcttccttcaagaaagagcaggaaaataattttgatccagcttgctgtcctgctaaaatgatcttggataatcatgacatctctgttgaaatgggagtaaaatccaactatgaaattagaattcgcaggccttgtgaaattaaaaaaactgattgttgtaaagaaaatttagagaaaccaaggagtccaggggaagttactggctttggagagcctctcagtccaggtgaaataaggtttatagaaaatcaggaaaaatacggtgaagcttccagaataaagattgaacccagtccattaaaagaaaatactctaaaatcttgccaaatacatgtaaatggaagtcacagtgatcatccagaaattaactgccacaaagttgtaagggatattctattagagcagtcactacagagccacaagaaactcaaactaactaaaatgagggcaaaaaagaagaaaaagaaaaaaaagaaattgaaagatgttttgaatgaaaacttacagagaaagcgtgaaggtcttcattctcttgcattcaagtcttacaaacctgagatccagaataagttattgatcatcaaaaaaaaagcaaaacacaagaagcacaaatctggaaaaaaatccgtctctaaaaaagcaatcacaaagaagaggaaaactgtcataaagtcacctactgtaccagagtttcagcttatttgcactaatcttgatgaactcagggaattaatcacaaaaatcgagaatgaactcaaagatctggaaaacagtagaaaaaaatcgggaaaatggtatcatcggaggcaagctgtaaaagaattacatagtacattgatacgtcttttaaatgaattgctgccatgggaaccaaagttaatgaaggctttccaaagaaacaggagccgcctgaagaaagactatgatgatttcagaagacaacctgatcatgatacatttaatagagaactatggaccactgatgaaggtgaaggagatcttggaa

SEQ ID NO: 335143 - DNA, 298 bp, Homo sapiens
aacccagtccattaaaagaaaatactctaaaatcttgccaaatacatgtaaatggaagtcacagtgatcatccagaaattaactgccacaaagttgtaagggatattctattagagcagtcactacagagccacaagaaactcaaactaactaaaatgagggcaaaaaagaagaaaaagaaaaaaaagaaattgaaagatgttttgaatgaaaacttacagagaaagcgtgaaggtcttcattctcttgcattcaagtcttacaaacctgagatccagaataagttattgatcatcaa

SEQ ID NO: 335144 - DNA, 1529 bp, Homo sapiens
agcggaggtgagctgccacgtccggaggagggcagcaagaatgaaagacctctagttttccagactcccggagccctggtctctacaccacatggacgttatccacctcctctgtgtcctcccaaggcagcatttcagaaggtgatccacggcaaagccgtcccttcaaatccgtctttgtgcccactgccatagtcaaccccgtgagaagcacagccggccctgggactttaggacaagggtctcttcggaaagggcggagcagcatgagaaagagtaagtggtggcagagagatggatccctgcagagacccctccagtccgggatccccactctcgtggtaggctccctcagacgcagccccaccatggtccttcggcctcagcagttccaattctaccagccacaggggatcccctcctccccctcagccgtggtggtggagatggggtccaagcctgccctcacgggggagcccgccctcacgtgcatcagcaggggcagtgaggcccggatccactccgcggccagctccctcattatggaagacaaagaaatccccatcaagagtgagcctctgccaaaaccgcccgcatctgccccaccatccatcctggtgaaaccagaaaactcaagaaatggcatcgaaaagcaagtcaaaaccgtgagatttcagaattacagccctcctcccaccaaacattacacctcccatcccacctccggaaagcctgaacagccagccaccctcaaggcgtcccagcctgaagcagcgtccttgggcccagagatgaccgtcctatttgcccaccgaagtggctgccactccggacagcagacagacctccggagaaagtcagctcttgccaaggccacaaccctggtgtccactgcctcaggcacgcagaccgtgtttcccagcaaatgaacctacgggtggcttttcctagaccccaaagaggtgaattgcatttaaatacagtctgcctccactgagggcatcctgccattctttggggacttgagcatgggtccttgttcttcctatttcacctccaggaaagcaaaagtgggagcagaaattcctgccctgggtgggaggatagatggcgtggccttccaaacatacaaacataatgatttgatgccacaaagctcgcttactcagaccaaggagtgaaaaattgtcgtgcccactttatgccccagcatggagtatgtggcctcttgtcatccccgtgttactgtgtagaatttctatggtgtcctaaagggggctgcagcaggggtgtgacaacggtgggattgttggcgttgcttctttgaccttacaatatcctcaacaagcattagaacaacttctgccatcttctggggcctgtacactggccactagtagctgccatatctttttccctctgtaaagtcataatcctggctgcaaagggaggatttctgcgcggggtgtgaggtggatactttgaacattctgagaacccaataaaactagaaggagccagcttcctga

SEQ ID NO: 335145 - DNA, 2991 bp, Homo sapiens
ttggagggcgcagcgcacccctgctgcgcggaggagggggctgagctgaactcagcagaagttacatgcacaagcaggcaaaaattctgacgttctcaagagaccagctctgcccccgtggctcaactgaccctaccatgtggacgctgctcctccaggtgggaactggagttttgaaataaaatggatgatttgacgttacttgatcttctggagtgccctgtgtgctttgagaagctcgatgtcacagccaaagtcctcccttgccagcacaccttctgcaaaccatgtctacagagggttttcaaggcccacaaagagctgcggtgccccgaatgcaggacgcctgtgttttccaacattgaggcgctgccggccaacctgctgctcgtgcgccttctggatggagtgcgctcagggcagagctccgggagagggggctccttccgcaggcctggcacgatgaccttgcaggatggcaggaaaagcaggaccaaccccagacgtctgcaggccagtcctttccggctagtgcctaatgtcagaatccacatggatggggtgcctcgagcaaaggccttatgcaactacagagggcagaatcccggtgacctaaggtttaataagggagatatcatccttctccggagacagcttgatgagaattggtaccagggggaaatcaatggcatcagcgggaacttcccagccagctccgtggaagtcatcaagcagctgccccagccgcccccgctctgcagggccctctacaacttcgacctacgaggcaaggacaagagtgagaaccaggattgcctgaccttcctcaaggacgatatcatcactgtgatcagccgagtggatgagaactgggcagaaggcaagttaggagataaagtaggcatcttccctatcttgtttgtagagccaaacctcaccgcaagacaccttttagagaagaacaaaggtcgccagtcatcctgcacaaaaaacctgtccctggtgtcctcgtcctccagaggcaacacgtctaccctccgtaggggcccagggtccaggaggaaggtgcctgggcagttttccatcacaacagccttgaacactctcaaccggatggtccattctccttcagggcgccatatggtagagatcagcaccccagtgctcatcagctccagcaacccctctgtgatcacccagcccatggagaaagcagacgttccttccagctgtgtgggacaggtcagcacttatcaccccgcacctgtctctccaggacattccacagccgtggtcagtctgcctggctcccagcaacacctctcagcgaacatgtttgtagccctgcactcctactcagcccatggacccgatgagctggacctgcaaaagggagaaggcgtcagggtcctggggaagtgccaggacggctggctcaggggcgtctccttggtcaccgggcgagtcggcatcttcccaaacaattacgtcatccccattttcagaaagacctctagttttccagactcccggagccctggtctctacaccacatggacgttatccacctcctctgtgtcctcccaaggcagcatttcagaaggtgatccacggcaaagccgtcccttcaaatccgtctttgtgcccactgccatagtcaaccccgtgagaagcacagccggccctgggactttaggacaagggtctcttcggaaagggcggagcagcatgagaaagagtaagtggtggcagagagatggatccctgcagagacccctccagtccgggatccccactctcgtggtaggctccctcagacgcagccccaccatggtccttcggcctcagcagttccaattctaccagccacaggggatcccctcctccccctcagccgtggtggtggagatggggtccaagcctgccctcacgggggagcccgccctcacgtgcatcagcaggggcagtgaggcccggatccactccgcggccagctccctcattatggaagacaaagaaatccccatcaagagtgagcctctgccaaaaccgcccgcatctgccccaccatccatcctggtgaaaccagaaaactcaagaaatggcatcgaaaagcaagtcaaaaccgtgagatttcagaattacagccctcctcccaccaaacattacacctcccatcccacctccggaaagcctgaacagccagccaccctcaaggcgtcccagcctgaagcagcgtccttgggcccagagatgaccgtcctatttgcccaccgaagtggctgccactccggacagcagacagacctccggagaaagtcagctcttgccaaggccacaaccctggtgtccactgcctcaggcacgcagaccgtgtttcccagcaaatgaacctacgggtggcttttcctagaccccaaagaggtgaattgcatttaaatacagtctgcctccactgagggcatcctgccattctttggggacttgagcatgggtccttgttcttcctatttcacctccaggaaagcaaaagtgggagcagaaattcctgccctgggtgggaggatagatggcgtggccttccaaacatacaaacataatgatttgatgccacaaagctcgcttactcagaccaaggagtgaaaaattgtcgtgcccactttatgccccagcatggagtatgtggcctcttgtcatccccgtgttactgtgtagaatttctatggtgtcctaaagggggctgcagcaggggtgtgacaacggtgggattgttggcgttgcttctttgaccttacaatatcctcaacaagcattagaacaacttctgccatcttctggggcctgtacactggccactagtagctgccatatctttttccctctgtaaagtcataatcctggctgcaaagggaggatttctgcgcggggtgtgaggtggatactttgaacattctgagaacccaataaaactagaaggagccagcttcctga

SEQ ID NO: 335146 - DNA, 1708 bp, Homo sapiens
ttggagggcgcagcgcacccctgctgcgcggaggagggggctgagctgaactcagcagaagttacatgcacaagcaggcaaaaattctgacgttctcaagagaccagctctgcccccgtggctcaactgaccctaccatgtggacgctgctcctccaggtgggaactggagttttgaaataaaatggatgatttgacgttacttgatcttctggagtgccctgtgtgctttgagaagctcgatgtcacagccaaagtcctcccttgccagcacaccttctgcaaaccatgtctacagagggttttcaaggcccacaaagagctgcggtgccccgaatgcaggacgcctgtgttttccaacattgaggcgctgccggccaacctgctgctcgtgcgccttctggatggagtgcgctcagggcagagctccgggagagggggctccttccgcaggcctggcacgatgaccttgcaggatggcaggaaaagcaggaccaaccccagacgtctgcaggccagtcctttccggctagtgcctaatgtcagaatccacatggatggggtgcctcgagcaaaggccttatgcaactacagagggcagaatcccggtgacctaaggtttaataagggagatatcatccttctccggagacagcttgatgagaattggtaccagggggaaatcaatggcatcagcgggaacttcccagccagctccgtggaagtcatcaagcagctgccccagccgcccccgctctgcagggccctctacaacttcgacctacgaggcaaggacaagagtgagaaccaggattgcctgaccttcctcaaggacgatatcatcactgtgatcagccgagtggatgagaactgggcagaaggcaagttaggagataaagtaggcatcttccctatcttgtttgtagagccaaacctcaccgcaagacaccttttagagaagaacaaaggtcgccagtcatcctgcacaaaaaacctgtccctggtgtcctcgtcctccagaggcaacacgtctaccctccgtaggggcccagggtccaggaggaaggtgcctgggcagttttccatcacaacagccttgaacactctcaaccggatggtccattctccttcagggcgccatatggtagagatcagcaccccagtgctcatcagctccagcaacccctctgtgatcacccagcccatggagaaagcagacgttccttccagctgtgtgggacaggtcagcacttatcaccccgcacctgtctctccaggacattccacagccgtggtcagtctgcctggctcccagcaacacctctcagcgaacatgtttgtagccctgcactcctactcagcccatggacccgatgagctggacctgcaaaagggagaaggcgtcagggtcctggggaagtgccaggacggctggctcaggggcgtctccttggtcaccgggcgagtcggcatcttcccaaacaattacgtcatccccattttcagaaagacctctagttttccagactcccggagccctggtctctacaccacatggacgttatccacctcctctgtgtctgccatatctttttccctctgtaaagtcataatcctggctgcaaagggaggatttctgcgcggggtgtgaggtggatactttgaacattctgagaacccaataaaactagaaggagccagcttcctga

SEQ ID NO: 335147 - DNA, 1891 bp, Homo sapiens
ttggagggcgcagcgcacccctgctgcgcggaggagggggctgagctgaactcagcagaagttacatgcacaagcaggcaaaaattctgacgttctcaagagaccagctctgcccccgtggctcaactgaccctaccatgtggacgctgctcctccaggtgggaactggagttttgaaataaaatggatgatttgacgttacttgatcttctggagtgccctgtgtgctttgagaagctcgatgtcacagccaaagtcctcccttgccagcacaccttctgcaaaccatgtctacagagggttttcaaggcccacaaagagctgcggtgccccgaatgcaggacgcctgtgttttccaacattgaggcgctgccggccaacctgctgctcgtgcgccttctggatggagtgcgctcagggcagagctccgggagagggggctccttccgcaggcctggcacgatgaccttgcaggatggcaggaaaagcaggaccaaccccagacgtctgcaggccagtcctttccggctagtgcctaatgtcagaatccacatggatggggtgcctcgagcaaaggccttatgcaactacagagggcagaatcccggtgacctaaggtttaataagggagatatcatccttctccggagacagcttgatgagaattggtaccagggggaaatcaatggcatcagcgggaacttcccagccagctccgtggaagtcatcaagcagctgccccagccgcccccgctctgcagggccctctacaacttcgacctacgaggcaaggacaagagtgagaaccaggattgcctgaccttcctcaaggacgatatcatcactgtgatcagccgagtggatgagaactgggcagaaggcaagttaggagataaagtaggcatcttccctatcttgtttgtagagccaaacctcaccgcaagacaccttttagagaagaacaaaggtcgccagtcatcctgcacaaaaaacctgtccctggtgtcctcgtcctccagaggcaacacgtctaccctccgtaggggcccagggtccaggaggaaggtgcctgggcagttttccatcacaacagccttgaacactctcaaccggatggtccattctccttcagggcgccatatggtagagatcagcaccccagtgctcatcagctccagcaacccctctgtgatcacccagcccatggagaaagcagacgttccttccagctgtgtgggacaggtcagcacttatcaccccgcacctgtctctccaggacattccacagccgtggtcagtctgcctggctcccagcaacacctctcagcgaacatgtttgtagccctgcactcctactcagcccatggacccgatgagctggacctgcaaaagggagaaggcgtcagggtcctggggaagtgccaggacggctggctcaggggcgtctccttggtcaccgggcgagtcggcatcttcccaaacaattacgtcatccccattttcagaaagacctctagttttccagactcccggagccctggtctctacaccacatggacgttatccacctcctctgtgtcctcccaaggcagcatttcagaaggtgatccacggcaaagccgtcccttcaaatccgtctttgtgcccactgccatagtcaaccccgtgagaagcacagccggccctgggactttaggacaagggtctcttcggaaagggcggagcagcatgagaaagagtaagtggtggcagagaggtacgtgcctagagctaagtgatggggggaatctgacccaggggtacacaggatgctttttgcaaaaacaggatcttggctttaaactaagcccctgcaaagggtattatacaattcccaaatgatgagttttat

SEQ ID NO: 335148 - DNA, 1104 bp, Homo sapiens
ttggagggcgcagcgcacccctgctgcgcggaggagggggctgagctgaactcagcagaagttacatgcacaagcaggcaaaaattctgacgttctcaagagaccagctctgcccccgtggctcaactgaccctaccatgtggacgctgctcctccaggtgggaactggagttttgaaataaaatggatgatttgacgttacttgatcttctggagtgccctgtgtgctttgagaagctcgatgtcacagccaaagtcctcccttgccagcacaccttctgcaaaccatgtctacagagggttttcaaggcccacaaagagctgcggtgccccgaatgcaggacgcctgtgttttccaacattgaggcgctgccggccaacctgctgctcgtgcgccttctggatggagtgcgctcagggcagagctccgggagagggggctccttccgcaggcctggcacgatgaccttgcaggatggcaggaaaagcaggaccaaccccagacgtctgcaggccagtcctttccggctagtgcctaatgtcagaatccacatggatggggtgcctcgagcaaaggccttatgcaactacagagggcagaatcccggtgacctaaggtttaataagggagatatcatccttctccggagacagcttgatgagaattggtaccagggggaaatcaatggcatcagcgggaacttcccagccagctccgtggaagtcatcaagcagctgccccagccgcccccgctctgcagggccctctacaacttcgacctacgaggcaaggacaagagtgagaaccaggattgcctgaccttcctcaaggacgatatcatcactgtgatcagccgagtggatgagaactgggcagaaggcaagttaggagataaagtaggcatcttccctatcttgtttgtagagccaaacctcaccgcaagacaccttttagagaagaacaaaggtcgccagtcatcctgcacaaaaaacctgtccctggtgtcctcgtcctccagaggcaacacgtctaccctctataacttcgacctacgacgcaagaacaagagtgaacaggattgctctgacctttcctcaaggagc

SEQ ID NO: 335149 - DNA, 1348 bp, Homo sapiens
agcggaggtgagctgccacgtccggaggagggcagcaagaatgaaagacctctagttttccagactcccggagccctggtctctacaccacatggacgttatccacctcctctgtgtcctcccaaggcagcatttcagaaggtgatccacggcaaagccgtcccttcaaatccgtctttgtgcccactgccatagtcaaccccgtgagaagcacagccggccctgggactttaggacaagggtctcttcggaaagggcggagcagcatgagaaagagtaagtggtggcagagagatggatccctgcagagacccctccagtccgggatccccactctcgtggtaggctccctcagacgcagccccaccatggtccttcggcctcagcagttccaattctaccagccacaggggatcccctcctccccctcagccgtggtggtggagatggggtccaagcctgccctcacgggggagcccgccctcacgtgcatcagcaggggcagtgaggcccggatccactccgcggccagctccctcattatggaagacaaagaaatccccatcaagagtgagcctctgccaaaaccgcccgcatctgccccaccatccatcctggtgaaaccagaaaactcaagaaatggcatcgaaaagcaagtcaaaaccgtgagatttcagaattacagccctcctcccaccaaacattacacctcccatcccacctccggaaagcctgaacagccagccaccctcaaggcgtcccagcctgaagcagcgtccttgggcccagagatgaccgtcctatttgcccaccgaagtggctgccactccggacagcagacagacctccggagaaagtcagctcttgccaaggccacaaccctggtgtccactgcctcaggcacgcagaccgtgtttcccagcaaatgaacctacgggtggcttttcctagaccccaaagaggtgaattgcatttaaatacagtctgcctccactgagggcatcctgccattctttggggacttgaaaaaaaaaaaaaaaaaaaaaacaaaaaaaaaaaaaaaaaaaaaaaaaaaaaaaaaaaaaaaaaaaaaaaaaaaaaaaaaagggggggggcaccaacaaaaacctcccaggaggggacacaacacaaaccgagacgaccacttatcgaggaaaaaggggggcccaaaaaagggggggcacaatatacacggggcgcgggcgcgccgggcaaaaaccacagacacggagagggggagcaaacgcggcccacgcgagcgacccagggcgacagaggaaccaccaccctcaggggggcgaccacacagggggcccacacccccgca

SEQ ID NO: 335150 - DNA, 1370 bp, Homo sapiens
gagagaatgtgagtgcagtcagattaggaaagcgcttgtctattctgggatatcaggaagcactgcttacccagccccacccaacctactgccagccgcccctgctgctgatctctctgtcctataattccccagatggatccctgcagagacccctccagtccgggatccccactctcgtggtaggctccctcagacgcagccccaccatggtccttcggcctcagcagttccaattctaccagccacaggggatcccctcctccccctcagccgtggtggtggagatggggtccaagcctgccctcacgggggagcccgccctcacgtgcatcagcaggggcagtgaggcccggatccactccgcggccagctccctcattatggaagacaaagaaatccccatcaagagtgagcctctgccaaaaccgcccgcatctgccccaccatccatcctggtgaaaccagaaaactcaagaaatggcatcgaaaagcaagtcaaaaccgtgagatttcagaattacagccctcctcccaccaaacattacacctcccatcccacctccggaaagcctgaacagccagccaccctcaaggcgtcccagcctgaagcagcgtccttgggcccagagatgaccgtcctatttgcccaccgaagtggctgccactccggacagcagacagacctccggagaaagtcagctcttgccaaggccacaaccctggtgtccactgcctcaggcacgcagaccgtgtttcccagcaaatgaacctacgggtggcttttcctagaccccaaagaggtgaattgcatttaaatacagtctgcctccactgagggcatcctgccattctttggggacttgagcatgggtccttgttcttcctatttcacctccaggaaagcaaaagtgggagcagaaattcctgccctgggtgggaggatagatggcgtggccttccaaacatacaaacataatgatttgatgccacaaagctcgcttactcagaccaaggagtgaaaaattgtcgtgcccactttatgccccagcatggagtatgtggcctcttgtcatccccgtgttactgtgtagaatttctatggtgtcctaaagggggctgcagcaggggtgtgacaacggtgggattgttggcgttgcttctttgaccttacaatatcctcaacaagcattagaacaacttctgccatcttctggggcctgtacactggccactagtagctgccatatctttttccctctgtaaagtcataatcctggctgcaaagggaggatttctgcgcggggtgtgaggtggatactttgaacattctgagaacccaataaaactagaaggagccagcttcctga

SEQ ID NO: 335151 - DNA, 1461 bp, Homo sapiens
  misc_feature (1343)..(1343): n is a, c, g, or t
  misc_feature (1358)..(1358): n is a, c, g, or t
  misc_feature (1394)..(1394): n is a, c, g, or t
  misc_feature (1403)..(1403): n is a, c, g, or t
  misc_feature (1418)..(1418): n is a, c, g, or t
  misc_feature (1426)..(1426): n is a, c, g, or t
  misc_feature (1442)..(1442): n is a, c, g, or t
ttggagggcgcagcgcacccctgctgcgcggaggagggggctgagctgaactcagcagaagttacatgcacaagcaggcaaaaattctgacgttctcaagagaccagctctgcccccgtggctcaactgaccctaccatgtggacgctgctcctccaggtgggaactggagttttgaaataaaatggatgatttgacgttacttgatcttctggagtgccctgtgtgctttgagaagctcgatgtcacagccaaagtcctcccttgccagcacaccttctgcaaaccatgtctacagagggttttcaaggcccacaaagagctgcggtgccccgaatgcaggacgcctgtgttttccaacattgaggcgctgccggccaacctgctgctcgtgcgccttctggatggagtgcgctcagggcagagctccgggagagggggctccttccgcaggcctggcacgatgaccttgcaggatggcaggaaaagcaggaccaaccccagacgtctgcaggccagtcctttccggctagtgcctaatgtcagaatccacatggatggggtgcctcgagcaaaggccttatgcaactacagagggcagaatcccggtgacctaaggtttaataagggagatatcatccttctccggagacagcttgatgagaattggtaccagggggaaatcaatggcatcagcgggaacttcccagccagctccgtggaagtcatcaagcagctgccccagccgcccccgctctgcagggccctctacaacttcgacctacgaggcaaggacaagagtgagaaccaggattgcctgaccttcctcaaggacgatatcatcactgtgatcagccgagtggatgagaactgggcagaaggcaagttaggagataaagtaggcatcttccctatcttgtttgtagagccaaacctcaccgcaagacaccttttagagaagaacaaaggtcgccagtcatcctgcacaaaaaacctgtccctggtgtcctcgtcctccagaggcaacacgtctaccctccgtaggggcccagggtccaggaggaaggtgcctgggcagttttccatcacaacagccttgaacactctcaaccggatggtccattctccttcagggcgccatatggtagagatcagcaccccagtgctcatcagctccagcaacccctctgtgatcacccagcccatggagaaagcagacgttccttccagctgtgtgggacaggtcagcacttatcaccccgcacctgtctctccaggacattccacagccgtggtcagtctgcctggctcccagcaacacctctcagcgaacatgtttgtccntgcctctactcaggnccacacatcacttgctcactagacaccatccactcntcctggacntattccacagctctnccctctgntctctctctcatctcnaaccgttaattgtaccacc

SEQ ID NO: 335152 - DNA, 167 bp, Homo sapiens
agcaaagctgtttcctccctggggaggggacagtactgatttccgcctttggagggaggggtttgctggtttacctgcagctgaactttggaaggctttgagcacaaagaatccagatcctggaaaatccccagacccagagcaggcctgctcgtgcccagccccag

SEQ ID NO: 335153 - DNA, 432 bp, Homo sapiens
aaacccaaatgtgacagtatttggaggtgaggcctttggaggtgaatagatgaatgagatgagtgtcctcataaagaaacccccaagagctgccttgcccctcccgctgtgtgaggttagagtgaaaagatggccacctatgaggaatgggccttcaccagacactgaatctgctggcaccttgatcttggacttccccacctccagaactgtgagaaagaaattctgtttataagccacacagactgtgttatttcattacagcagcctgaaggactaaaacactgtaaaagtgaggttccagaaggagagaataaaaagtatagaggagaggcaatattcgaaaagatgatttcacatgatttttaagaattagtgaaagacgtaaatccaaagatacaggaagcataacaagcatggggtaaaaaaaaa

SEQ ID NO: 335154 - DNA, 6909 bp, Homo sapiens
gcccgggcaggtggttgcagcattgcagaagagaaaagtagtttgttggcagagaatcaggtattaatggaaagactcaatcaatctgattctatagaagaccctaacagtccagcaggaagaaggcatttgcagctccagactcaattagaacagctccaagaagaaacattcagactagaagcagccaaagatgattatcgaatacgttgtgaagagttagaaaaggagatctctgaacttcggcaacagaatgatgaactgaccactttggcagatgaagctcagtctctgaaagatgagatcgacgtgctgagacattcttctgataaagtatctaaactagaaggtcaagtatcactagaattcagcggccgctgaattctagggaggcgcgccccccggctgggcgccgcgcgcaccatggggctcccagcgctcgagttcagcgactgctgcctcgatagtccgcacttccgagagacgctcaagtcgcacgaagcagagctggacaagaccaacaaattcatcaaggagctcatcaaggacgggaagtcactcataagcgcgctcaagaatttgtcttcagcgaagcggaagtttgcagattccttaaatgaatttaaatttcagtgcataggagatgcagaaacagatgatgagatgtgtatagcaaggtctttgcaggagtttgccactgtcctcaggaatcttgaagatgaacggatacggatgattgagaatgccagcgaggtgctcatcactcccttggagaagtttcgaaaggaacagatcggggctgccaaggaagccaaaaagaaatatgacaaagagacagaaaagtattgtggcatcttagaaaaacacttgaatttgtcttccaaaaagaaagaatctcagcttcaggaggcagacagccaagtggacctggtccggcagcatttctatgaagtatccctggaatatgtcttcaaggtgcaggaagtccaagagagaaagatgtttgagtttgtggagcctctgctggccttcctgcaaggactcttcactttctatcaccatggttacgaactggccaaggatttcggggacttcaagacacagttaaccattagcatacagaacacaagaaatcgctttgaaggcactagatcagaagtggaatcactgatgaaaaagatgaaggagaatccccttgagcacaagaccatcagtccctacaccatggagggatacctctacgtgcaggagaaacgtcactttggaacttcttgggtgaagcactactgtacatatcaacgggattccaaacaaatcaccatggtaccatttgaccaaaagtcaggaggaaaagggggagaagatgaatcagttatcctcaaatcctgcacacggcggaaaacagactccattgagaagaggttttgctttgatgtggaagcagtagacaggccaggggttatcaccatgcaagctttgtcggaagaggaccggaggctctggatggaagccatggatggccgggaacctgtctacaactcgaacaaagacagccagagtgaagggactgcgcagttggacagcattggcttcagcataatcaggaaatgcatccatgctgtggaaaccagagggatcaacgagcaagggctgtatcgaattgtgggggtcaactccagagtgcagaagttgctgagtgtcctgatggaccccaagactgcttctgagacagaaacagatatctgtgctgaatgggagataaagaccatcactagtgctctgaagacctacctaagaatgcttccaggaccactcatgatgtaccagtttcaaagaagtttcatcaaagcagcaaaactggagaaccaggagtctcgggtctctgaaatccacagccttgttcatcggctcccagagaaaaatcggcagatgttacagctgctcatgaaccacttggcaaatgttgctaacaaccacaagcagaatttgatgacggtggcaaaccttggtgtggtgtttggacccactctgctgaggcctcaggaagaaacagtagcagccatcatggacatcaaatttcagaacattgtcattgagatcctaatagaaaaccacgaaaagatatttaacaccgtgcccgatatgcctctcaccaatgcccagctgcacctgtctcggaagaagagcagtgactccaagcccccgtcctgcagcgagaggcccctgacgctcttccacaccgttcagtcaacagagaaacaggaacaaaggaacagcatcatcaactccagtttggaatctgtctcatcaaatccaaacagcatccttaattccagcagcagcttacagcccaacatgaactccagtgacccagacctggctgtggtcaaacccacccggcccaactcactccccccgaatccaagcccaacttcacccctctcgccatcttggcccatgttctcggcgccatccagccctatgcccacctcatccacgtccagcgactcatcccccgtcaggtctgttgcagggtttgtttggttttctgttgctgccgttgttctctcattggctcggtcctctcttcatgcagtgttcagcctcctcgtcaactttgttccctgccatccaaacctgcacttgctttttgacaggccagaagaagcggtacatgaagactccagcacaccgttccggaaggcaaaagccttgtatgcctgcaaagctgaacatgactcagaactttcgttcacagcaggcacggtcttcgataatgttcacccatctcaggagcctggctggttggaggggactctgaacggaaagactggcctcatccctgagaattacgtggagttcctctaaccgtgggccccagcagaactgctgagctttacatggtatccatgacaactgctgattccagtgtcgaggccatttctctttgccactgagaaatgcagcgtgactgactctgttgctacctgtcaacatgaatgtttctgtgagctctggtgtcactcatctccatgatcatctcagccaacatgcatcagtactgcaagaaaagaagtcaatcagcagaggagagcatttgataactaagaggaagacttgcaaagccgttttctcatgagtaccctgaatagggggcactcattttgtttcaacggtccaaacgcccaaccttcagaaagaggaagtcagatagaaatagtccctgagagcacactgtgtagctaagcctgctggggctgggtgaagaaattggcgctgagatccaggctggatccattgcttttgtttacaataggcactctctctaccccacctctcagtacttgagacttaaagtgctacaggcagctggatctgtttgcatgcaggatgaagagggttaaaacactgtttatataagatccaatctctcaccatctctaaagcagccgttggcctgtcatcagtgagatacaatccagtcttctcatgcacgggaacacacacaccctgcgtttctccctcccaggctaggaacctctctgccaccaagggctgccatccatcgcctagtaaccacggcaacccaacctactctaaaaccaaaccaaaaaaataaaataacacatcctctttgcatgacacattttttttctcccctttttggtacactttttttgaatggttttctaacaacttgaagcacaggatcaaggaattagggtggtctacttgaggcagatgggatagtagctgggaactgttccctttctgattaatttcagcagcatcggaatatatttggagcacaccctagtaacctcttgagattaaattacatagtcttaatatttctgttcctccatgcaactgatgtttgttttttaaagggtaagatgctgcctcccaatgggtgatgccatctgactggtttccccatgtcctcccattcacccatctctgctcccacccttgcctgcctctaacccaccactggccagcccccttgccctactctgggctgctgaacactggtgctgtggtggttttcaaggttaattcctaggctaaccgtatggcctatagtttaaaagcacatctatgttcactgccactctgaaaaagggaattatttctcagtctttcaaggcttgagactaatataggccattgtgattcaggaagaaacccaaggttggagggtgggatgagtaccctctgaaaaagggaatttgctggtgaaaagaggctggatcttgtggaagactgtcttggatggggaagtactacctggagatttcaaattcacttggcctgcaaacaacagagttatccgtatcttccacatgtgaatgtcattgcaagggtgactctagacaaactacaaaccgatggaccgtcaagctccccaggagccccttggatggcagcgttgcttcagagtgtttcctgtttctggaattccttgttagggaactttaaagaagaaaagaaaaacttgaattgtgttgaattactgtatcttttactttttttttttgaaaagataaacttgtaaatagagtgatttgaaatactatatggcaaagttttatatttgatattctttaagttagttgctcacacacttaggctttgattgctgaagaagtatgtttaagagggagagaggggaggcaaagctgaagagagtcaaggtcactgtccccgcttcggcctgaaggaaagagaagacatttctatggccttgctctctgctgtcctgttggtgggcacgacacatcagtggtgttcagtctttatgtgtttttaagcatcccttgggctttggatttggagatgggaagagcatctccaggcaatgagtttttcaaagaatgcctacttagtagtaagatgaagctcaggatttaaataagtggggtcaggcattcgagtttttgtctttcttctcaggtgtatttcttggtacccccaagatatcaggccagaaagagatgagtcagttgctgtgctctttacttctttttctccacatcttctgaggctttagaaatgtggacaagctagttttcaaattttgtgtgcgtctgtaagttcttaaagaaccagcttcttagaatgttcagttctcaatgtgctgctgctttcccttctcctaaacattttaaaactcttccctttcacctccaattcccgtgatcccaaaagaagaggaagactccaggaggggtatagattgtgccgtcatagctttacaggtggttttaaagttagcaggggtttgtcatggtgattcactactcagtttatcagctcaaggattatacagctcttttccgggaactcacccaggagcaagcgagacactaccattgaatcagggaatgagaattaagaatggacaggaccaagacagaactcaagaaagccactggggaaaactcgagaagaaagggagtatactagtaggttagatctgtgaacctgaggacaagaagaccttgggaaatggaggcctcaggggatgtgcattcacatactattacgcttctcaaagagagaccaacatcatgcttttaacacatttgatgaggttttttatttgtgtttttgtttgttttttgagatggagtctcactctgtggcccaggctggagtgcagtggcgcggtcttggctcactgcaacctccgcctcccgggttcaagtgattctcctgtctcagcctcccaagtagctgggactgcaggcatgagccatcacacccggctggttttttgtgtttttagtagagatggggttttgccatgtttgccgggctgatctcgaactcctgacctcaagtgatctgcccacttcggacccccaaagtgctgggattccaggtgtgagccgctgcggccgaccacatttgatgtttgaagttgtaatctgtcccatcataaacttacctggagctcatgtggaggaacagaaggccaagatccttgctttgggggtgcctcacgaagcatccctgtagacacttggccccagcttcactgcttggaagcatgtccctccctcttgagttggctctgatttgaaatcgggagaaacagagctgctgccaatgggatcttttaggtaactccctccctagcttccgtgtgtctgtgcagtgcccatgagctgctgccaatgggatctttcaggtaccccctccccagcttccctgtggctgtgcggtgcccttgacagatggcttctctgtttccctttgcccagccaggctcccctccttcctattagctacaaaactggataaacttcagaatatgagccaatgagtaggaaggaacttgaagactaaagattttactctctcccctatccatgccccctacctctgactctctctgtgtgaacaggaaactttagggtagatgaggagaatgaattggttatcagagtggaagaccatggcccaggatccctgagctttcccagtagcctccagtttcctttgtaagacccagggatcacttagccatagcctgaatcttttaggggtattaaggtcagcctctcactcttccttcaggttactaacaaaatttcgtagctaaagaatgccatggccgggtgcagtggctcacgcctataatcccagcactttgggaggccgaggcgggcggatcacgaggtcaggagattgagaccatcctggctacgacggtgaagccccgtctctgctaagagtgcaaaaaattagccgggtgtggtggcgggcgcctgtagtcccagctactctggaggctgaggcaggagaatggcatgagcccgggaggcggagattgcggtgagccaagatcgcgcccctgcactccagcctgggtgacagagccagactccgtctcaaaggaaa

SEQ ID NO: 335155 - DNA, 3772 bp, Homo sapiens
  misc_feature (9)..(9): n is a, c, g, or t
gcaactatnagaggtagcgaggcctgggtggtggagaagttgctgagtgtcctgatggaccccaagactgcttctgagacagaaacagatatctgtgctgaatgggagataaagaccatcactagtgctctgaagacctacctaagaatgcttccaggaccactcatgatgtaccagtttcaaagaagtttcatcaaagcagcaaaactggagaaccaggagtctcgggtctctgaaatccacagccttgttcatcggctcccagagaaaaatcggcagatgttacagctgctcatgaaccacttggcaaatgttgctaacaaccacaagcagaatttgatgacggtggcaaaccttggtgtggtgtttggacccactctgctgaggcctcaggaagaaacagtagcagccatcatggacatcaaatttcagaacattgtcattgagatcctaatagaaaaccacgaaaagatatttaacaccgtgcccgatatgcctctcaccaatgcccagctgcacctgtctcggaagaagagcagtgactccaagcccccgtcctgcagcgagaggcccctgacgctcttccacaccgttcagtcaacagagaaacaggaacaaaggaacagcatcatcaactccagtttggaatctgtctcatcaaatccaaacagcatccttaattccagcagcagcttacagcccaacatgaactccagtgacccagacctggctgtggtcaaacccacccggcccaactcactcacaccgttccggaaggcaaaagccttgtatgcctgcaaagctgaacatgactcagaactttcgttcacagcaggcacggtcttcgataatgttcacccatctcaggagcctggctggttggaggggactctgaacggaaagactggcctcatccctgagaattacgtggagttcctctaaccgtgggccccagcagaactgctgagctttacatggtatccatgacaactgctgattccagtgtcgaggccatttctctttgccactgagaaatgcagcgtgactgactctgttgctacctgtcaacatgaatgtttctgtgagctctggtgtcactcatctccatgatcatctcagccaacatgcatcagtactgcaagaaaagaagtcaatcagcagaggagagcatttgataactaagaggaagacttgcaaagccgttttctcatgagtaccctgaatagggggcactcattttgtttcaacggtccaaacgcccaaccttcagaaagaggaagtcagatagaaatagtccctgagagcacactgtgtagctaagcctgctggggctgggtgaagaaattggcgctgagatccaggctggatccattgcttttgtttacaataggcactctctctaccccacctctcagtacttgagacttaaagtgctacaggcagctggatctgtttgcatgcaggatgaagagggttaaaacactgtttatataagatccaatctctcaccatctctaaagcagccgttggcctgtcatcagtgagatacaatccagtcttctcatgcacgggaacacacacaccctgcgtttctccctcccaggctaggaacctctctgccaccaagggctgccatccatcgcctagtaaccacggcaacccaacctactctaaaaccaaaccaaaaaaataaaataacacatcctctttgcatgacacattttttttctcccctttttggtacactttttttgaatggttttctaacaacttgaagcacaggatcaaggaattagggtggtctacttgaggcagatgggatagtagctgggaactgttccctttctgattaatttcagcagcatcggaatatatttggagcacaccctagtaacctcttgagattaaattacatagtcttaatatttctgttcctccatgcaactgatgtttgttttttaaagggtaagatgctgcctcccaatgggtgatgccatctgactggtttccccatgtcctcccattcacccatctctgctcccacccttgcctgcctctaacccaccactggccagcccccttgccctactctgggctgctgaacactggtgctgtggtggttttcaaggttaattcctaggctaaccgtatggcctatagtttaaaagcacatctatgttcactgccactctgaaaaagggaattatttctcagtctttcaaggcttgagactaatataggccattgtgattcaggaagaaacccaaggttggagggtgggatgagtaccctctgaaaaagggaatttgctggtgaaaagaggctggatcttgtggaagactgtcttggatggggaagtactacctggagatttcaaattcacttggcctgcaaacaacagagttatccgtatcttccacatgtgaatgtcattgcaagggtgactctagacaaactacaaaccgatggaccgtcaagctccccaggagccccttggatggcagcgttgcttcagagtgtttcctgtttctggaattccttgttagggaactttaaagaagaaaagaaaaacttgaattgtgttgaattactgtatcttttactttttttttttgaaaagataaacttgtaaatagagtgatttgaaatactatatggcaaagttttatatttgatattctttaagttagttgctcacacacttaggctttgattgctgaagaagtatgtttaagagggagagaggggaggcaaagctgaagagagtcaaggtcactgtccccgcttcggcctgaaggaaagagaagacatttctatggccttgctctctgctgtcctgttggtgggcacgacacatcagtggtgttcagtctttatgtgtttttaagcatcccttgggctttggatttggagatgggaagagcatctccaggcaatgagtttttcaaagaatgcctacttagtagtaagatgaagctcaggatttaaataagtggggtcaggcattcgagtttttgtctttcttctcaggtgtatttcttggtacccccaagatatcaggccagaaagagatgagtcagttgctgtgctctttacttctttttctccacatcttctgaggctttagaaatgtggacaagctagttttcaaattttgtgtgcgtctgtaagttcttaaagaaccagcttcttagaatgttcagttctcaatgtgctgctgctttcccttctcctaaacattttaaaactcttccctttcacctccaattcccgtgatcccaaaagaagaggaagactccaggaggggtatagattgtgccgtcatagctttacaggtggttttaaagttagcaggggtttgtcatggtgattcactactcagtttatcagctcaaggattatacagctcttttccgggaactcacccaggagcaagcgagacactaccattgaatcagggaatgagaattaagaatggacaggaccaagacagaactcaagaaagccactggggaaaactcgagaagaaagggagtatactagtaggttagatctgtgaacctgaggacaagaagaccttgggaaatggaggcctcaggggatgtgcattcacatactattacgcttctcaaagagagaccaacatcatgcttttaacacatttgatgaggttttttatttgtgtttttgtttgttttttgagatggagtctcactctgtggcccctgcactccagcctgggtgacagagccagactccgtctcaaaggaaa

SEQ ID NO: 335156 - DNA, 3842 bp, Homo sapiens
gaattagcctatcgaatggatatgtgatatccgtgcatctctcatacaatagagcatgcacgcatgcaggctttgtcctgttctgcgttttacaacctcattgctgaaattgctctgtgtgctgatggaccccaagactgcttctgagacagaaacagatatctgtgctgaatgggagataaagaccatcactagtgctctgaagacctacctaagaatgcttccaggaccactcatgatgtaccagtttcaaagaagtttcatcaaagcagcaaaactggagaaccaggagtctcgggtctctgaaatccacagccttgttcatcggctcccagagaaaaatcggcagatgttacagctgctcatgaaccacttggcaaatgttgctaacaaccacaagcagaatttgatgacggtggcaaaccttggtgtggtgtttggacccactctgctgaggcctcaggaagaaacagtagcagccatcatggacatcaaatttcagaacattgtcattgagatcctaatagaaaaccacgaaaagatatttaacaccgtgcccgatatgcctctcaccaatgcccagctgcacctgtctcggaagaagagcagtgactccaagcccccgtcctgcagcgagaggcccctgacgctcttccacaccgttcagtcaacagagaaacaggaacaaaggaacagcatcatcaactccagtttggaatctgtctcatcaaatccaaacagcatccttaattccagcagcagcttacagcccaacatgaactccagtgacccagacctggctgtggtcaaacccacccggcccaactcactcacaccgttccggaaggcaaaagccttgtatgcctgcaaagctgaacatgactcagaactttcgttcacagcaggcacggtcttcgataatgttcacccatctcaggagcctggctggttggaggggactctgaacggaaagactggcctcatccctgagaattacgtggagttcctctaaccgtgggccccagcagaactgctgagctttacatggtatccatgacaactgctgattccagtgtcgaggccatttctctttgccactgagaaatgcagcgtgactgactctgttgctacctgtcaacatgaatgtttctgtgagctctggtgtcactcatctccatgatcatctcagccaacatgcatcagtactgcaagaaaagaagtcaatcagcagaggagagcatttgataactaagaggaagacttgcaaagccgttttctcatgagtaccctgaatagggggcactcattttgtttcaacggtccaaacgcccaaccttcagaaagaggaagtcagatagaaatagtccctgagagcacactgtgtagctaagcctgctggggctgggtgaagaaattggcgctgagatccaggctggatccattgcttttgtttacaataggcactctctctaccccacctctcagtacttgagacttaaagtgctacaggcagctggatctgtttgcatgcaggatgaagagggttaaaacactgtttatataagatccaatctctcaccatctctaaagcagccgttggcctgtcatcagtgagatacaatccagtcttctcatgcacgggaacacacacaccctgcgtttctccctcccaggctaggaacctctctgccaccaagggctgccatccatcgcctagtaaccacggcaacccaacctactctaaaaccaaaccaaaaaaataaaataacacatcctctttgcatgacacattttttttctcccctttttggtacactttttttgaatggttttctaacaacttgaagcacaggatcaaggaattagggtggtctacttgaggcagatgggatagtagctgggaactgttccctttctgattaatttcagcagcatcggaatatatttggagcacaccctagtaacctcttgagattaaattacatagtcttaatatttctgttcctccatgcaactgatgtttgttttttaaagggtaagatgctgcctcccaatgggtgatgccatctgactggtttccccatgtcctcccattcacccatctctgctcccacccttgcctgcctctaacccaccactggccagcccccttgccctactctgggctgctgaacactggtgctgtggtggttttcaaggttaattcctaggctaaccgtatggcctatagtttaaaagcacatctatgttcactgccactctgaaaaagggaattatttctcagtctttcaaggcttgagactaatataggccattgtgattcaggaagaaacccaaggttggagggtgggatgagtaccctctgaaaaagggaatttgctggtgaaaagaggctggatcttgtggaagactgtcttggatggggaagtactacctggagatttcaaattcacttggcctgcaaacaacagagttatccgtatcttccacatgtgaatgtcattgcaagggtgactctagacaaactacaaaccgatggaccgtcaagctccccaggagccccttggatggcagcgttgcttcagagtgtttcctgtttctggaattccttgttagggaactttaaagaagaaaagaaaaacttgaattgtgttgaattactgtatcttttactttttttttttgaaaagataaacttgtaaatagagtgatttgaaatactatatggcaaagttttatatttgatattctttaagttagttgctcacacacttaggctttgattgctgaagaagtatgtttaagagggagagaggggaggcaaagctgaagagagtcaaggtcactgtccccgcttcggcctgaaggaaagagaagacatttctatggccttgctctctgctgtcctgttggtgggcacgacacatcagtggtgttcagtctttatgtgtttttaagcatcccttgggctttggatttggagatgggaagagcatctccaggcaatgagtttttcaaagaatgcctacttagtagtaagatgaagctcaggatttaaataagtggggtcaggcattcgagtttttgtctttcttctcaggtgtatttcttggtacccccaagatatcaggccagaaagagatgagtcagttgctgtgctctttacttctttttctccacatcttctgaggctttagaaatgtggacaagctagttttcaaattttgtgtgcgtctgtaagttcttaaagaaccagcttcttagaatgttcagttctcaatgtgctgctgctttcccttctcctaaacattttaaaactcttccctttcacctccaattcccgtgatcccaaaagaagaggaagactccaggaggggtatagattgtgccgtcatagctttacaggtggttttaaagttagcaggggtttgtcatggtgattcactactcagtttatcagctcaaggattatacagctcttttccgggaactcacccaggagcaagcgagacactaccattgaatcagggaatgagaattaagaatggacaggaccaagacagaactcaagaaagccactggggaaaactcgagaagaaagggagtatactagtaggttagatctgtgaacctgaggacaagaagaccttgggaaatggaggcctcaggggatgtgcattcacatactattacgcttctcaaagagagaccaacatcatgcttttaacacatttgatgaggttttttatttgtgtttttgtttgttttttgagatggagtctcactctgtggcccctgcactccagcctgggtgacagagccagactccgtctcaaaggaaa

SEQ ID NO: 335157 - DNA, 3714 bp, Homo sapiens
  misc_feature (11)..(11): n is a, c, g, or t
  misc_feature (17)..(17): n is a, c, g, or t
  misc_feature (19)..(19): n is a, c, g, or t
ctattaggatncccacncnattggcctcgacctgctgagcccaagcgatcctcccgcttcggcactccccctcctccaagtagctgggactacagacacgctccatcaaacctaggtagtttttgtatattttgtagagacaaggttttgccatgttgcccaggctgttcttaaactcctgggctaaagcaattcacctgcctcagcctcccaaggtactggcattacaggcgtgaaccaccaggcccagcctctagaagctggatatctttaaagagtagttcttagcagtcttccatgggcactgcactgagtacatagttgatactgggcaggtgggtgggtggatggatggaaggaaggaaggaaggaaggaaggaaggaaggatggaaggatggatacatgtatggatggaccaggacaactgttgccctctaacaagagtaggaatctgtcacttctttgtagtttaaaccaggagcttcagaaaatccgtgaaacccctaaaattgtacacaaaattttgtatgtctgtgtctgtttcctttttcattgtaaagaaagttcaggacagctttcatcagaaggcttatattccacaaaaggttcagaacctttggtttaaacttctagaatgatgtaacttaataagtgattgtactcattgtccaagcttccttcatacacacacacacacacacacacacacacacacacacaccccacacacacatctgccgcctgctctatctgtaatgccatctcttctcgctttctctccccttcctgtacagttcacccatctcaggagcctggctggttggaggggactctgaacggaaagactggcctcatccctgagaattacgtggagttcctctaaccgtgggccccagcagaactgctgagctttacatggtatccatgacaactgctgattccagtgtcgaggccatttctctttgccactgagaaatgcagcgtgactgactctgttgctacctgtcaacatgaatgtttctgtgagctctggtgtcactcatctccatgatcatctcagccaacatgcatcagtactgcaagaaaagaagtcaatcagcagaggagagcatttgataactaagaggaagacttgcaaagccgttttctcatgagtaccctgaatagggggcactcattttgtttcaacggtccaaacgcccaaccttcagaaagaggaagtcagatagaaatagtccctgagagcacactgtgtagctaagcctgctggggctgggtgaagaaattggcgctgagatccaggctggatccattgcttttgtttacaataggcactctctctaccccacctctcagtacttgagacttaaagtgctacaggcagctggatctgtttgcatgcaggatgaagagggttaaaacactgtttatataagatccaatctctcaccatctctaaagcagccgttggcctgtcatcagtgagatacaatccagtcttctcatgcacgggaacacacacaccctgcgtttctccctcccaggctaggaacctctctgccaccaagggctgccatccatcgcctagtaaccacggcaacccaacctactctaaaaccaaaccaaaaaaataaaataacacatcctctttgcatgacacattttttttctcccctttttggtacactttttttgaatggttttctaacaacttgaagcacaggatcaaggaattagggtggtctacttgaggcagatgggatagtagctgggaactgttccctttctgattaatttcagcagcatcggaatatatttggagcacaccctagtaacctcttgagattaaattacatagtcttaatatttctgttcctccatgcaactgatgtttgttttttaaagggtaagatgctgcctcccaatgggtgatgccatctgactggtttccccatgtcctcccattcacccatctctgctcccacccttgcctgcctctaacccaccactggccagcccccttgccctactctgggctgctgaacactggtgctgtggtggttttcaaggttaattcctaggctaaccgtatggcctatagtttaaaagcacatctatgttcactgccactctgaaaaagggaattatttctcagtctttcaaggcttgagactaatataggccattgtgattcaggaagaaacccaaggttggagggtgggatgagtaccctctgaaaaagggaatttgctggtgaaaagaggctggatcttgtggaagactgtcttggatggggaagtactacctggagatttcaaattcacttggcctgcaaacaacagagttatccgtatcttccacatgtgaatgtcattgcaagggtgactctagacaaactacaaaccgatggaccgtcaagctccccaggagccccttggatggcagcgttgcttcagagtgtttcctgtttctggaattccttgttagggaactttaaagaagaaaagaaaaacttgaattgtgttgaattactgtatcttttactttttttttttgaaaagataaacttgtaaatagagtgatttgaaatactatatggcaaagttttatatttgatattctttaagttagttgctcacacacttaggctttgattgctgaagaagtatgtttaagagggagagaggggaggcaaagctgaagagagtcaaggtcactgtccccgcttcggcctgaaggaaagagaagacatttctatggccttgctctctgctgtcctgttggtgggcacgacacatcagtggtgttcagtctttatgtgtttttaagcatcccttgggctttggatttggagatgggaagagcatctccaggcaatgagtttttcaaagaatgcctacttagtagtaagatgaagctcaggatttaaataagtggggtcaggcattcgagtttttgtctttcttctcaggtgtatttcttggtacccccaagatatcaggccagaaagagatgagtcagttgctgtgctctttacttctttttctccacatcttctgaggctttagaaatgtggacaagctagttttcaaattttgtgtgcgtctgtaagttcttaaagaaccagcttcttagaatgttcagttctcaatgtgctgctgctttcccttctcctaaacattttaaaactcttccctttcacctccaattcccgtgatcccaaaagaagaggaagactccaggaggggtatagattgtgccgtcatagctttacaggtggttttaaagttagcaggggtttgtcatggtgattcactactcagtttatcagctcaaggattatacagctcttttccgggaactcacccaggagcaagcgagacactaccattgaatcagggaatgagaattaagaatggacaggaccaagacagaactcaagaaagccactggggaaaactcgagaagaaagggagtatactagtaggttagatctgtgaacctgaggacaagaagaccttgggaaatggaggcctcaggggatgtgcattcacatactattacgcttctcaaagagagaccaacatcatgcttttaacacatttgatgaggttttttatttgtgtttttgtttgttttttgagatggagtctcactctgtggcccctgcactccagcctgggtgacagagccagactccgtctcaaaggaaa

SEQ ID NO: 335158 - DNA, 3157 bp, Homo sapiens
cttgccatctggctgccttgccaggcacttcccacgagaggggactaggtagcttacagggaaagggaagaagagagatgaaatgtctggggctttctaagggttttttcaaaaatgttaaataaactcctgttttcacacagcaccacaccgttccggaaggcaaaagccttgtatgcctgcaaagctgaacatgactcagaactttcgttcacagcaggcacggtcttcgataatgttcacccatctcaggagcctggctggttggaggggactctgaacggaaagactggcctcatccctgagaattacgtggagttcctctaaccgtgggccccagcagaactgctgagctttacatggtatccatgacaactgctgattccagtgtcgaggccatttctctttgccactgagaaatgcagcgtgactgactctgttgctacctgtcaacatgaatgtttctgtgagctctggtgtcactcatctccatgatcatctcagccaacatgcatcagtactgcaagaaaagaagtcaatcagcagaggagagcatttgataactaagaggaagacttgcaaagccgttttctcatgagtaccctgaatagggggcactcattttgtttcaacggtccaaacgcccaaccttcagaaagaggaagtcagatagaaatagtccctgagagcacactgtgtagctaagcctgctggggctgggtgaagaaattggcgctgagatccaggctggatccattgcttttgtttacaataggcactctctctaccccacctctcagtacttgagacttaaagtgctacaggcagctggatctgtttgcatgcaggatgaagagggttaaaacactgtttatataagatccaatctctcaccatctctaaagcagccgttggcctgtcatcagtgagatacaatccagtcttctcatgcacgggaacacacacaccctgcgtttctccctcccaggctaggaacctctctgccaccaagggctgccatccatcgcctagtaaccacggcaacccaacctactctaaaaccaaaccaaaaaaataaaataacacatcctctttgcatgacacattttttttctcccctttttggtacactttttttgaatggttttctaacaacttgaagcacaggatcaaggaattagggtggtctacttgaggcagatgggatagtagctgggaactgttccctttctgattaatttcagcagcatcggaatatatttggagcacaccctagtaacctcttgagattaaattacatagtcttaatatttctgttcctccatgcaactgatgtttgttttttaaagggtaagatgctgcctcccaatgggtgatgccatctgactggtttccccatgtcctcccattcacccatctctgctcccacccttgcctgcctctaacccaccactggccagcccccttgccctactctgggctgctgaacactggtgctgtggtggttttcaaggttaattcctaggctaaccgtatggcctatagtttaaaagcacatctatgttcactgccactctgaaaaagggaattatttctcagtctttcaaggcttgagactaatataggccattgtgattcaggaagaaacccaaggttggagggtgggatgagtaccctctgaaaaagggaatttgctggtgaaaagaggctggatcttgtggaagactgtcttggatggggaagtactacctggagatttcaaattcacttggcctgcaaacaacagagttatccgtatcttccacatgtgaatgtcattgcaagggtgactctagacaaactacaaaccgatggaccgtcaagctccccaggagccccttggatggcagcgttgcttcagagtgtttcctgtttctggaattccttgttagggaactttaaagaagaaaagaaaaacttgaattgtgttgaattactgtatcttttactttttttttttgaaaagataaacttgtaaatagagtgatttgaaatactatatggcaaagttttatatttgatattctttaagttagttgctcacacacttaggctttgattgctgaagaagtatgtttaagagggagagaggggaggcaaagctgaagagagtcaaggtcactgtccccgcttcggcctgaaggaaagagaagacatttctatggccttgctctctgctgtcctgttggtgggcacgacacatcagtggtgttcagtctttatgtgtttttaagcatcccttgggctttggatttggagatgggaagagcatctccaggcaatgagtttttcaaagaatgcctacttagtagtaagatgaagctcaggatttaaataagtggggtcaggcattcgagtttttgtctttcttctcaggtgtatttcttggtacccccaagatatcaggccagaaagagatgagtcagttgctgtgctctttacttctttttctccacatcttctgaggctttagaaatgtggacaagctagttttcaaattttgtgtgcgtctgtaagttcttaaagaaccagcttcttagaatgttcagttctcaatgtgctgctgctttcccttctcctaaacattttaaaactcttccctttcacctccaattcccgtgatcccaaaagaagaggaagactccaggaggggtatagattgtgccgtcatagctttacaggtggttttaaagttagcaggggtttgtcatggtgattcactactcagtttatcagctcaaggattatacagctcttttccgggaactcacccaggagcaagcgagacactaccattgaatcagggaatgagaattaagaatggacaggaccaagacagaactcaagaaagccactggggaaaactcgagaagaaagggagtatactagtaggttagatctgtgaacctgaggacaagaagaccttgggaaatggaggcctcaggggatgtgcattcacatactattacgcttctcaaagagagaccaacatcatgcttttaacacatttgatgaggttttttatttgtgtttttgtttgttttttgagatggagtctcactctgtggcccctgcactccagcctgggtgacagagccagactccgtctcaaaggaaa

SEQ ID NO: 335159 - DNA, 3408 bp, Homo sapiens
gcccgggcaggtggttgcagcattgcagaagagaaaagtagtttgttggcagagaatcaggtattaatggaaagactcaatcaatctgattctatagaagaccctaacagtccagcaggaagaaggcatttgcagctccagactcaattagaacagctccaagaagaaacattcagactagaagcagccaaagatgattatcgaatacgttgtgaagagttagaaaaggagatctctgaacttcggcaacagaatgatgaactgaccactttggcagatgaagctcagtctctgaaagatgagatcgacgtgctgagacattcttctgataaagtatctaaactagaaggtcaagtatcactagaattcagcggccgctgaattctagggaggcgcgccccccggctgggcgccgcgcgcaccatggggctcccagcgctcgagttcagcgactgctgcctcgatagtccgcacttccgagagacgctcaagtcgcacgaagcagagctggacaagaccaacaaattcatcaaggagctcatcaaggacgggaagtcactcataagcgcgctcaagaatttgtcttcagcgaagcggaagtttgcagattccttaaatgaatttaaatttcagtgcataggagatgcagaaacagatgatgagatgtgtatagcaaggtctttgcaggagtttgccactgtcctcaggaatcttgaagatgaacggatacggatgattgagaatgccagcgaggtgctcatcactcccttggagaagtttcgaaaggaacagatcggggctgccaaggaagccaaaaagaaatatgacaaagagacagaaaagtattgtggcatcttagaaaaacacttgaatttgtcttccaaaaagaaagaatctcagcttcaggaggcagacagccaagtggacctggtccggcagcatttctatgaagtatccctggaatatgtcttcaaggtgcaggaagtccaagagagaaagatgtttgagtttgtggagcctctgctggccttcctgcaaggactcttcactttctatcaccatggttacgaactggccaaggatttcggggacttcaagacacagttaaccattagcatacagaacacaagaaatcgctttgaaggcactagatcagaagtggaatcactgatgaaaaagatgaaggagaatccccttgagcacaagaccatcagtccctacaccatggagggatacctctacgtgcaggagaaacgtcactttggaacttcttgggtgaagcactactgtacatatcaacgggattccaaacaaatcaccatggtaccatttgaccaaaagtcaggaggaaaagggggagaagatgaatcagttatcctcaaatcctgcacacggcggaaaacagactccattgagaagaggttttgctttgatgtggaagcagtagacaggccaggggttatcaccatgcaagctttgtcggaagaggaccggaggctctggatggaagccatggatggccgggaacctgtctacaactcgaacaaagacagccagagtgaagggactgcgcagttggacagcattggcttcagcataatcaggaaatgcatccatgctgtggaaaccagagggatcaacgagcaagggctgtatcgaattgtgggggtcaactccagagtgcagaagttgctgagtgtcctgatggaccccaagactgcttctgagacagaaacagatatctgtgctgaatgggagataaagaccatcactagtgctctgaagacctacctaagaatgcttccaggaccactcatgatgtaccagtttcaaagaagtttcatcaaagcagcaaaactggagaaccaggagtctcgggtctctgaaatccacagccttgttcatcggctcccagagaaaaatcggcagatgttacagctgctcatgaaccacttggcaaatgttgctaacaaccacaagcagaatttgatgacggtggcaaaccttggtgtggtgtttggacccactctgctgaggcctcaggaagaaacagtagcagccatcatggacatcaaatttcagaacattgtcattgagatcctaatagaaaaccacgaaaagatatttaacaccgtgcccgatatgcctctcaccaatgcccagctgcacctgtctcggaagaagagcagtgactccaagcccccgtcctgcagcgagaggcccctgacgctcttccacaccgttcagtcaacagagaaacaggaacaaaggaacagcatcatcaactccagtttggaatctgtctcatcaaatccaaacagcatccttaattccagcagcagcttacagcccaacatgaactccagtgacccagacctggctgtggtcaaacccacccggcccaactcactccccccgaatccaagcccaacttcacccctctcgccatcttggcccatgttctcggcgccatccagccctatgcccacctcatccacgtccagcgactcatcccccgtcagcacaccgttccggaaggcaaaagccttgtatgcctgcaaagctgaacatgactcagaactttcgttcacagcaggcacggtcttcgataatgagagtgtccttcagcttccacagccatcttcactgccacaccgaagctccgggcacctccacctctcacctgggcacttccactggccgcctgacacatcttctcacatctgctcttgctgccataaccccctctttacagagcagcgagagtgatctttgaaaaacggaaatggcattaaagcccttcagtggcctcccattgctctgagaattacttacaaggccctccagggcccagttcctgcccctctgacctcacgccctcacttgacatactacagcctcatgccttcttcatgttctcaagcaaggtcggcaaactatgacctgcccgtcaaatccaacctgccacctgtcacctaacaattctgtaactgctcccacatacaacatggtcgtcatcataaatcctataggtattgttgagagcaggaggaaagtttggttgagtgagtgagagaccttacccaagccttcctgtggtctctaggagtcatggcagagttcgctgacactggtctgcttttaaccagccttgccagtgacctttcaaattccctgaggagcaaaaggccaaattgaacctgaaagaaaacacctctcagtgttgactgagttgcagtagaaaatggacctgacaaaacgttagtacactttctcaattgggttagctcaaaatatgttattaggtctttttccttgttccatttcttgttagtttactgctggggatatgaggtaaaggctgtttaatttgtatgctgtgtagttgtcagattaaatcatcaaacc

SEQ ID NO: 335160 - DNA, 1180 bp, Homo sapiens
  misc_feature (9)..(9): n is a, c, g, or t
  misc_feature (1154)..(1154): n is a, c, g, or t
gcaactatnagaggtagcgaggcctgggtggtggagaagttgctgagtgtcctgatggaccccaagactgcttctgagacagaaacagatatctgtgctgaatgggagataaagaccatcactagtgctctgaagacctacctaagaatgcttccaggaccactcatgatgtaccagtttcaaagaagtttcatcaaagcagcaaaactggagaaccaggagtctcgggtctctgaaatccacagccttgttcatcggctcccagagaaaaatcggcagatgttacagctgctcatgaaccacttggcaaatgttgctaacaaccacaagcagaatttgatgacggtggcaaaccttggtgtggtgtttggacccactctgctgaggcctcaggaagaaacagtagcagccatcatggacatcaaatttcagaacattgtcattgagatcctaatagaaaaccacgaaaagatatttaacaccgtgcccgatatgcctctcaccaatgcccagctgcacctgtctcggaagaagagcagtgactccaagcccccgtcctgcagcgagaggcccctgacgctcttccacaccgttcagtcaacagagaaacaggaacaaaggaacagcatcatcaactccagtttggaatctgtctcatcaaatccaaacagcatccttaattccagcagcagcttacagcccaacatgaactccagtgacccagacctggctgtggtcaaacccacccggcccaactcactcacaccgttccggaaggcaaaagccttgtatgcctgcaaagctgaacatgactcagaactttcgttcacagcaggcacggtcttcgataatgttcacccatctcaggagcctggctggttggaggggactctgaacggaaagactggcctcatccctgagaattacgtggagttcctctaaccgtgggccccagcagaactgctgagctttacatggtatccatgacaactgctgattccagtgtcgaggccatttctctttgccactgagaaatgcagcgtgactgactctgttgctacctgtcaacatgaatgtttctgtgagctctggtgtcactcatctcactgatgacaggccaacggctgctttagagatggtgtcgacgggccgcnaatttagtagtagtagtagcggccgc

SEQ ID NO: 335161 - DNA, 1213 bp, Homo sapiens
gcgtcttctatcaccctggcgtcctagcgtgttgttgatgataagttgacgccccccgaatccaagcccaacttcacccctctcgccatcttggcccatgttctcggcgccatccagccctatgcccacctcatccacgtccagcgactcatcccccgtcaggtctgttgcagggtttgtttggttttctgttgctgccgttgttctctcattggctcggtcctctcttcatgcagtgttcagcctcctcgtcaactttgttccctgccatccaaacctgcacttgctttttgacaggccagaagaagcggtacatgaagactccagcacaccgttccggaaggcaaaagccttgtatgcctgcaaagctgaacatgactcagaactttcgttcacagcaggcacggtcttcgataatgagagtgtccttcagcttccacagccatcttcactgccacaccgaagctccgggcacctccacctctcacctgggcacttccactggccgcctgacacatcttctcacatctgctcttgctgccataaccccctctttacagagcagcgagagtgatctttgaaaaacggaaatggcattaaagcccttcagtggcctcccattgctctgagaattacttacaaggccctccagggcccagttcctgcccctctgacctcacgccctcacttgacatactacagcctcatgccttcttcatgttctcaagcaaggtcggcaaactatgacctgcccgtcaaatccaacctgccacctgtcacctaacaattctgtaactgctcccacatacaacatggtcgtcatcataaatcctataggtattgttgagagcaggaggaaagtttggttgagtgagtgagagaccttacccaagccttcctgtggtctctaggagtcatggcagagttcgctgacactggtctgcttttaaccagccttgccagtgacctttcaaattccctgaggagcaaaaggccaaattgaacctgaaagaaaacacctctcagtgttgactgagttgcagtagaaaatggacctgacaaaacgttagtacactttctcaattgggttagctcaaaatatgttattaggtctttttccttgttccatttcttgttagtttactgctggggatatgaggtaaaggctgtttaatttgtatgctgtgtagttgtcagattaaatcatcaaacc

SEQ ID NO: 335162 - DNA, 2549 bp, Homo sapiens
gcccgggcaggtggttgcagcattgcagaagagaaaagtagtttgttggcagagaatcaggtattaatggaaagactcaatcaatctgattctatagaagaccctaacagtccagcaggaagaaggcatttgcagctccagactcaattagaacagctccaagaagaaacattcagactagaagcagccaaagatgattatcgaatacgttgtgaagagttagaaaaggagatctctgaacttcggcaacagaatgatgaactgaccactttggcagatgaagctcagtctctgaaagatgagatcgacgtgctgagacattcttctgataaagtatctaaactagaaggtcaagtatcactagaattcagcggccgctgaattctagggaggcgcgccccccggctgggcgccgcgcgcaccatggggctcccagcgctcgagttcagcgactgctgcctcgatagtccgcacttccgagagacgctcaagtcgcacgaagcagagctggacaagaccaacaaattcatcaaggagctcatcaaggacgggaagtcactcataagcgcgctcaagaatttgtcttcagcgaagcggaagtttgcagattccttaaatgaatttaaatttcagtgcataggagatgcagaaacagatgatgagatgtgtatagcaaggtctttgcaggagtttgccactgtcctcaggaatcttgaagatgaacggatacggatgattgagaatgccagcgaggtgctcatcactcccttggagaagtttcgaaaggaacagatcggggctgccaaggaagccaaaaagaaatatgacaaagagacagaaaagtattgtggcatcttagaaaaacacttgaatttgtcttccaaaaagaaagaatctcagcttcaggaggcagacagccaagtggacctggtccggcagcatttctatgaagtatccctggaatatgtcttcaaggtgcaggaagtccaagagagaaagatgtttgagtttgtggagcctctgctggccttcctgcaaggactcttcactttctatcaccatggttacgaactggccaaggatttcggggacttcaagacacagttaaccattagcatacagaacacaagaaatcgctttgaaggcactagatcagaagtggaatcactgatgaaaaagatgaaggagaatccccttgagcacaagaccatcagtccctacaccatggagggatacctctacgtgcaggagaaacgtcactttggaacttcttgggtgaagcactactgtacatatcaacgggattccaaacaaatcaccatggtaccatttgaccaaaagtcaggaggaaaagggggagaagatgaatcagttatcctcaaatcctgcacacggcggaaaacagactccattgagaagaggttttgctttgatgtggaagcagtagacaggccaggggttatcaccatgcaagctttgtcggaagaggaccggaggctctggatggaagccatggatggccgggaacctgtctacaactcgaacaaagacagccagagtgaagggactgcgcagttggacagcattggcttcagcataatcaggaaatgcatccatgctgtggaaaccagagggatcaacgagcaagggctgtatcgaattgtgggggtcaactccagagtgcagaagttgctgagtgtcctgatggaccccaagactgcttctgagacagaaacagatatctgtgctgaatgggagataaagaccatcactagtgctctgaagacctacctaagaatgcttccaggaccactcatgatgtaccagtttcaaagaagtttcatcaaagcagcaaaactggagaaccaggagtctcgggtctctgaaatccacagccttgttcatcggctcccagagaaaaatcggcagatgttacagctgctcatgaaccacttggcaaatgttgctaacaaccacaagcagaatttgatgacggtggcaaaccttggtgtggtgtttggacccactctgctgaggcctcaggaagaaacagtagcagccatcatggacatcaaatttcagaacattgtcattgagatcctaatagaaaaccacgaaaagatatttaacaccgtgcccgatatgcctctcaccaatgcccagctgcacctgtctcggaagaagagcagtgactccaagcccccgtcctgcagcgagaggcccctgacgctcttccacaccgttcagtcaacagagaaacaggaacaaaggaacagcatcatcaactccagtttggaatctgtctcatcaaatccaaacagcatccttaattccagcagcagcttacagcccaacatgaactccagtgacccagacctggctgtggtcaaacccacccggcccaactcactactgtaagtatgatgtccagctgcctaccccacaagggctttggtcagccattccacctagaatttgctgtctggctccatctgactttggaccattatcccctgaacattatttaaacctcctccctaaactgggag

SEQ ID NO: 335163 - DNA, 1243 bp, Homo sapiens
actggattctttagtttgcataatgttttcaaggttcatccacattgtagcatgtcagaaccttcttcctttttatgtgcgatggtatggatatagcacattttatgtaagcttattcatcagtagatgggcacgttgtttcctctttttggctgcttgaataatgctgctgtgaacatgtgtgtaggtttttgtgagggcgtaggtttccagttctcttggggatatacctaggagtgggattgcagggtcatattaattccgtgtttaagtgtttgaggaaatgccgaactgtttcacaaagaagttgcaccattttaccattttatgttcctaccttctttcatttttaagtctttctgcagtagcttaaatagttaagcataaagggggaaaaaggaagagaagcctggatgattgttaactgccaagtcctttttttccccagcagagtgtccttcagcttccacagccatcttcactgccacaccgaagctccgggcacctccacctctcacctgggcacttccactggccgcctgacacatcttctcacatctgctcttgctgccataaccccctctttacagagcagcgagagtgatctttgaaaaacggaaatggcattaaagcccttcagtggcctcccattgctctgagaattacttacaaggccctccagggcccagttcctgcccctctgacctcacgccctcacttgacatactacagcctcatgccttcttcatgttctcaagcaaggtcggcaaactatgacctgcccgtcaaatccaacctgccacctgtcacctaacaattctgtaactgctcccacatacaacatggtcgtcatcataaatcctataggtattgttgagagcaggaggaaagtttggttgagtgagtgagagaccttacccaagccttcctgtggtctctaggagtcatggcagagttcgctgacactggtctgcttttaaccagccttgccagtgacctttcaaattccctgaggagcaaaaggccaaattgaacctgaaagaaaacacctctcagtgttgactgagttgcagtagaaaatggacctgacaaaacgttagtacactttctcaattgggttagctcaaaatatgttattaggtctttttccttgttccatttcttgttagtttactgctggggatatgaggtaaaggctgtttaatttgtatgctgtgtagttgtcagattaaatcatcaaacc

SEQ ID NO: 335164 - DNA, 892 bp, Homo sapiens
gaattagcctatcgaatggatatgtgatatccgtgcatctctcatacaatagagcatgcacgcatgcaggctttgtcctgttctgcgttttacaacctcattgctgaaattgctctgtgtgctgatggaccccaagactgcttctgagacagaaacagatatctgtgctgaatgggagataaagaccatcactagtgctctgaagacctacctaagaatgcttccaggaccactcatgatgtaccagtttcaaagaagtttcatcaaagcagcaaaactggagaaccaggagtctcgggtctctgaaatccacagccttgttcatcggctcccagagaaaaatcggcagatgttacagctgctcatgaaccacttggcaaaagaaaatagatacaatcagaagagaacttctgcaagctaccaccacaatatccacacctgtgcctatgtttctgccatctctcctgtgcgacaggggaacccagtgctcctacctaaaggcattccctttcctgggacactagagccgattgactccccgttggatctgtaaggacttgggtgcttgagtagtttctccctctttcttctacgccattaacttttctgtctctactaaatctttcccatcagcacataagcatgttgtaatttatgcaatcctttgaaacatgagaaaggaaaaagcaacaactacaaagaatctttctcaatcccatatccccttttaggtactatcccatttttctgtgcttttcccagaagaactcaaatagttgtctgtgcttgctgttcccaaatcctctcttcccactcattctttcttgaacctcaggctttttatgcacactagtccactgaaatgcctcattatcagtattgctgatgacct

SEQ ID NO: 335165 - DNA, 442 bp, Homo sapiens
ctgtggtctctaggagtcatggcagagttcgctgacactggtctgcttttaaccagccttgccagtgacctttcaaattccctgaggagcaaaaggccaaattgaacctgaaagaaaacacctctcagtgttgactgagttgcagtagaaaatggacctgacaaaacgttagtacactttctcaattgggttagctcaaaatatgttattaggtcttttttccagaggaaaatgcttacacagaccctcttcctccccactccttcacctctacaggagaaaatgaggcattacagaacactattattctgtcaggcggtgggtggggtggggggtctttttccttgttccatttcttgttagtttactgctggggatatgaggtaaaggctgtttaatttgtatgctgtgtagttgtcagattaaatcatcaaaccaatca

SEQ ID NO: 335166 - DNA, 817 bp, Homo sapiens
  misc_feature (9)..(9): n is a, c, g, or t
gcaactatnagaggtagcgaggcctgggtggtggagaagttgctgagtgtcctgatggaccccaagactgcttctgagacagaaacagatatctgtgctgaatgggagataaagaccatcactagtgctctgaagacctacctaagaatgcttccaggaccactcatgatgtaccagtttcaaagaagtttcatcaaagcagcaaaactggagaaccaggagtctcgggtctctgaaatccacagccttgttcatcggctcccagagaaaaatcggcagatgttacagctgctcatgaaccacttggcaaatgttgctaacaaccacaagcagaatttgatgacggtggcaaaccttggtgtggtgtttggacccactctgctgaggcctcaggaagaaacagtagcagccatcatggacatcaaatttcagaacattgtcattgagatcctaatagaaaaccacgaaaagatatttaacaccgtgcccgatatgcctctcaccaatgcccagctgcacctgtctcggaagaagagcagtgactccaagcccccgtcctgcagcgagaggcccctgacgctcttccacaccgttcagtcaacagagaaacaggaacaaaggaacagcatcatcaactccagtttggaatctgtctcatcaaatccaaacagcatccttaattccagcagcagcttacagcccaacatgaactccagtgacccagacctggctgtggtcaaacccacccggcccaactcactaaccaccaccccgaatccagcccaacacaccaggaagtccggtaccagctcgatga

SEQ ID NO: 335167 - DNA, 3757 bp, Homo sapiens
acctagtttcccccacagttaacactattatgatggcacatttgttgtgactaaggaagcaacacaggtacattactactaacccaactctccactttagatttcacttgttttgccctaatgtcctttttaatgcttccaggaccactcatgatgtaccagtttcaaagaagtttcatcaaagcagcaaaactggagaaccaggagtctcgggtctctgaaatccacagccttgttcatcggctcccagagaaaaatcggcagatgttacagctgctcatgaaccacttggcaaatgttgctaacaaccacaagcagaatttgatgacggtggcaaaccttggtgtggtgtttggacccactctgctgaggcctcaggaagaaacagtagcagccatcatggacatcaaatttcagaacattgtcattgagatcctaatagaaaaccacgaaaagatatttaacaccgtgcccgatatgcctctcaccaatgcccagctgcacctgtctcggaagaagagcagtgactccaagcccccgtcctgcagcgagaggcccctgacgctcttccacaccgttcagtcaacagagaaacaggaacaaaggaacagcatcatcaactccagtttggaatctgtctcatcaaatccaaacagcatccttaattccagcagcagcttacagcccaacatgaactccagtgacccagacctggctgtggtcaaacccacccggcccaactcactcacaccgttccggaaggcaaaagccttgtatgcctgcaaagctgaacatgactcagaactttcgttcacagcaggcacggtcttcgataatgttcacccatctcaggagcctggctggttggaggggactctgaacggaaagactggcctcatccctgagaattacgtggagttcctctaaccgtgggccccagcagaactgctgagctttacatggtatccatgacaactgctgattccagtgtcgaggccatttctctttgccactgagaaatgcagcgtgactgactctgttgctacctgtcaacatgaatgtttctgtgagctctggtgtcactcatctccatgatcatctcagccaacatgcatcagtactgcaagaaaagaagtcaatcagcagaggagagcatttgataactaagaggaagacttgcaaagccgttttctcatgagtaccctgaatagggggcactcattttgtttcaacggtccaaacgcccaaccttcagaaagaggaagtcagatagaaatagtccctgagagcacactgtgtagctaagcctgctggggctgggtgaagaaattggcgctgagatccaggctggatccattgcttttgtttacaataggcactctctctaccccacctctcagtacttgagacttaaagtgctacaggcagctggatctgtttgcatgcaggatgaagagggttaaaacactgtttatataagatccaatctctcaccatctctaaagcagccgttggcctgtcatcagtgagatacaatccagtcttctcatgcacgggaacacacacaccctgcgtttctccctcccaggctaggaacctctctgccaccaagggctgccatccatcgcctagtaaccacggcaacccaacctactctaaaaccaaaccaaaaaaataaaataacacatcctctttgcatgacacattttttttctcccctttttggtacactttttttgaatggttttctaacaacttgaagcacaggatcaaggaattagggtggtctacttgaggcagatgggatagtagctgggaactgttccctttctgattaatttcagcagcatcggaatatatttggagcacaccctagtaacctcttgagattaaattacatagtcttaatatttctgttcctccatgcaactgatgtttgttttttaaagggtaagatgctgcctcccaatgggtgatgccatctgactggtttccccatgtcctcccattcacccatctctgctcccacccttgcctgcctctaacccaccactggccagcccccttgccctactctgggctgctgaacactggtgctgtggtggttttcaaggttaattcctaggctaaccgtatggcctatagtttaaaagcacatctatgttcactgccactctgaaaaagggaattatttctcagtctttcaaggcttgagactaatataggccattgtgattcaggaagaaacccaaggttggagggtgggatgagtaccctctgaaaaagggaatttgctggtgaaaagaggctggatcttgtggaagactgtcttggatggggaagtactacctggagatttcaaattcacttggcctgcaaacaacagagttatccgtatcttccacatgtgaatgtcattgcaagggtgactctagacaaactacaaaccgatggaccgtcaagctccccaggagccccttggatggcagcgttgcttcagagtgtttcctgtttctggaattccttgttagggaactttaaagaagaaaagaaaaacttgaattgtgttgaattactgtatcttttactttttttttttgaaaagataaacttgtaaatagagtgatttgaaatactatatggcaaagttttatatttgatattctttaagttagttgctcacacacttaggctttgattgctgaagaagtatgtttaagagggagagaggggaggcaaagctgaagagagtcaaggtcactgtccccgcttcggcctgaaggaaagagaagacatttctatggccttgctctctgctgtcctgttggtgggcacgacacatcagtggtgttcagtctttatgtgtttttaagcatcccttgggctttggatttggagatgggaagagcatctccaggcaatgagtttttcaaagaatgcctacttagtagtaagatgaagctcaggatttaaataagtggggtcaggcattcgagtttttgtctttcttctcaggtgtatttcttggtacccccaagatatcaggccagaaagagatgagtcagttgctgtgctctttacttctttttctccacatcttctgaggctttagaaatgtggacaagctagttttcaaattttgtgtgcgtctgtaagttcttaaagaaccagcttcttagaatgttcagttctcaatgtgctgctgctttcccttctcctaaacattttaaaactcttccctttcacctccaattcccgtgatcccaaaagaagaggaagactccaggaggggtatagattgtgccgtcatagctttacaggtggttttaaagttagcaggggtttgtcatggtgattcactactcagtttatcagctcaaggattatacagctcttttccgggaactcacccaggagcaagcgagacactaccattgaatcagggaatgagaattaagaatggacaggaccaagacagaactcaagaaagccactggggaaaactcgagaagaaagggagtatactagtaggttagatctgtgaacctgaggacaagaagaccttgggaaatggaggcctcaggggatgtgcattcacatactattacgcttctcaaagagagaccaacatcatgcttttaacacatttgatgaggttttttatttgtgtttttgtttgttttttgagatggagtctcactctgtggcccctgcactccagcctgggtgacagagccagactccgtctcaaaggaaa

SEQ ID NO: 335168 - DNA, 3573 bp, Homo sapiens
gcccgggcaggtggttgcagcattgcagaagagaaaagtagtttgttggcagagaatcaggtattaatggaaagactcaatcaatctgattctatagaagaccctaacagtccagcaggaagaaggcatttgcagctccagactcaattagaacagctccaagaagaaacattcagactagaagcagccaaagatgattatcgaatacgttgtgaagagttagaaaaggagatctctgaacttcggcaacagaatgatgaactgaccactttggcagatgaagctcagtctctgaaagatgagatcgacgtgctgagacattcttctgataaagtatctaaactagaaggtcaagtatcactagaattcagcggccgctgaattctagggaggcgcgccccccggctgggcgccgcgcgcaccatggggctcccagcgctcgagttcagcgactgctgcctcgatagtccgcacttccgagagacgctcaagtcgcacgaagcagagctggacaagaccaacaaattcatcaaggagctcatcaaggacgggaagtcactcataagcgcgctcaagaatttgtcttcagcgaagcggaagtttgcagattccttaaatgaatttaaatttcagtgcataggagatgcagaaacagatgatgagatgtgtatagcaaggtctttgcaggagtttgccactgtcctcaggaatcttgaagatgaacggatacggatgattgagaatgccagcgaggtgctcatcactcccttggagaagtttcgaaaggaacagatcggggctgccaaggaagccaaaaagaaatatgacaaagagacagaaaagtattgtggcatcttagaaaaacacttgaatttgtcttccaaaaagaaagaatctcagcttcaggaggcagacagccaagtggacctggtccggcagcatttctatgaagtatccctggaatatgtcttcaaggtgcaggaagtccaagagagaaagatgtttgagtttgtggagcctctgctggccttcctgcaaggactcttcactttctatcaccatggttacgaactggccaaggatttcggggacttcaagacacagttaaccattagcatacagaacacaagaaatcgctttgaaggcactagatcagaagtggaatcactgatgaaaaagatgaaggagaatccccttgagcacaagaccatcagtccctacaccatggagggatacctctacgtgcaggagaaacgtcactttggaacttcttgggtgaagcactactgtacatatcaacgggattccaaacaaatcaccatggtaccatttgaccaaaagtcaggaggaaaagggggagaagatgaatcagttatcctcaaatcctgcacacggcggaaaacagactccattgagaagaggttttgctttgatgtggaagcagtagacaggccaggggttatcaccatgcaagctttgtcggaagaggaccggaggctctggatggaagccatggatggccgggaacctgtctacaactcgaacaaagacagccagagtgaagggactgcgcagttggacagcattggcttcagcataatcaggaaatgcatccatgctgtggaaaccagagggatcaacgagcaagggctgtatcgaattgtgggggtcaactccagagtgcagaagttgctgagtgtcctgatggaccccaagactgcttctgagacagaaacagatatctgtgctgaatgggagataaagaccatcactagtgctctgaagacctacctaagaatgcttccaggaccactcatgatgtaccagtttcaaagaagtttcatcaaagcagcaaaactggagaaccaggagtctcgggtctctgaaatccacagccttgttcatcggctcccagagaaaaatcggcagatgttacagctgctcatgaaccacttggcaaatgttgctaacaaccacaagcagaatttgatgacggtggcaaaccttggtgtggtgtttggacccactctgctgaggcctcaggaagaaacagtagcagccatcatggacatcaaatttcagaacattgtcattgagatcctaatagaaaaccacgaaaagatatttaacaccgtgcccgatatgcctctcaccaatgcccagctgcacctgtctcggaagaagagcagtgactccaagcccccgtcctgcagcgagaggcccctgacgctcttccacaccgttcagtcaacagagaaacaggaacaaaggaacagcatcatcaactccagtttggaatctgtctcatcaaatccaaacagcatccttaattccagcagcagcttacagcccaacatgaactccagtgacccagacctggctgtggtcaaacccacccggcccaactcactccccccgaatccaagcccaacttcacccctctcgccatcttggcccatgttctcggcgccatccagccctatgcccacctcatccacgtccagcgactcatcccccgtcaggtctgttgcagggtttgtttggttttctgttgctgccgttgttctctcattggctcggtcctctcttcatgcagtgttcagcctcctcgtcaactttgttccctgccatccaaacctgcacttgctttttgacaggccagaagaagcggtacatgaagactccagcacaccgttccggaaggcaaaagccttgtatgcctgcaaagctgaacatgactcagaactttcgttcacagcaggcacggtcttcgataatgagagtgtccttcagcttccacagccatcttcactgccacaccgaagctccgggcacctccacctctcacctgggcacttccactggccgcctgacacatcttctcacatctgctcttgctgccataaccccctctttacagagcagcgagagtgatctttgaaaaacggaaatggcattaaagcccttcagtggcctcccattgctctgagaattacttacaaggccctccagggcccagttcctgcccctctgacctcacgccctcacttgacatactacagcctcatgccttcttcatgttctcaagcaaggtcggcaaactatgacctgcccgtcaaatccaacctgccacctgtcacctaacaattctgtaactgctcccacatacaacatggtcgtcatcataaatcctataggtattgttgagagcaggaggaaagtttggttgagtgagtgagagaccttacccaagccttcctgtggtctctaggagtcatggcagagttcgctgacactggtctgcttttaaccagccttgccagtgacctttcaaattccctgaggagcaaaaggccaaattgaacctgaaagaaaacacctctcagtgttgactgagttgcagtagaaaatggacctgacaaaacgttagtacactttctcaattgggttagctcaaaatatgttattaggtctttttccttgttccatttcttgttagtttactgctggggatatgaggtaaaggctgtttaatttgtatgctgtgtagttgtcagattaaatcatcaaacc

SEQ ID NO: 335169 - DNA, 3676 bp, Homo sapiens
gcccgggcaggtggttgcagcattgcagaagagaaaagtagtttgttggcagagaatcaggtattaatggaaagactcaatcaatctgattctatagaagaccctaacagtccagcaggaagaaggcatttgcagctccagactcaattagaacagctccaagaagaaacattcagactagaagcagccaaagatgattatcgaatacgttgtgaagagttagaaaaggagatctctgaacttcggcaacagaatgatgaactgaccactttggcagatgaagctcagtctctgaaagatgagatcgacgtgctgagacattcttctgataaagtatctaaactagaaggtcaagtatcactagaattcagcggccgctgaattctagggaggcgcgccccccggctgggcgccgcgcgcaccatggggctcccagcgctcgagttcagcgactgctgcctcgatagtccgcacttccgagagacgctcaagtcgcacgaagcagagctggacaagaccaacaaattcatcaaggagctcatcaaggacgggaagtcactcataagcgcgctcaagaatttgtcttcagcgaagcggaagtttgcagattccttaaatgaatttaaatttcagtgcataggagatgcagaaacagatgatgagatgtgtatagcaaggtctttgcaggagtttgccactgtcctcaggaatcttgaagatgaacggatacggatgattgagaatgccagcgaggtgctcatcactcccttggagaagtttcgaaaggaacagatcggggctgccaaggaagccaaaaagaaatatgacaaagagacagaaaagtattgtggcatcttagaaaaacacttgaatttgtcttccaaaaagaaagaatctcagcttcaggaggcagacagccaagtggacctggtccggcagcatttctatgaagtatccctggaatatgtcttcaaggtgcaggaagtccaagagagaaagatgtttgagtttgtggagcctctgctggccttcctgcaaggactcttcactttctatcaccatggttacgaactggccaaggatttcggggacttcaagacacagttaaccattagcatacagaacacaagaaatcgctttgaaggcactagatcagaagtggaatcactgatgaaaaagatgaaggagaatccccttgagcacaagaccatcagtccctacaccatggagggatacctctacgtgcaggagaaacgtcactttggaacttcttgggtgaagcactactgtacatatcaacgggattccaaacaaatcaccatggtaccatttgaccaaaagtcaggaggaaaagggggagaagatgaatcagttatcctcaaatcctgcacacggcggaaaacagactccattgagaagaggttttgctttgatgtggaagcagtagacaggccaggggttatcaccatgcaagctttgtcggaagaggaccggaggctctggatggaagccatggatggccgggaacctgtctacaactcgaacaaagacagccagagtgaagggactgcgcagttggacagcattggcttcagcataatcaggaaatgcatccatgctgtggaaaccagagggatcaacgagcaagggctgtatcgaattgtgggggtcaactccagagtgcagaagttgctgagtgtcctgatggaccccaagactgcttctgagacagaaacagatatctgtgctgaatgggagataaagaccatcactagtgctctgaagacctacctaagaatgcttccaggaccactcatgatgtaccagtttcaaagaagtttcatcaaagcagcaaaactggagaaccaggagtctcgggtctctgaaatccacagccttgttcatcggctcccagagaaaaatcggcagatgttacagctgctcatgaaccacttggcaaatgttgctaacaaccacaagcagaatttgatgacggtggcaaaccttggtgtggtgtttggacccactctgctgaggcctcaggaagaaacagtagcagccatcatggacatcaaatttcagaacattgtcattgagatcctaatagaaaaccacgaaaagatatttaacaccgtgcccgatatgcctctcaccaatgcccagctgcacctgtctcggaagaagagcagtgactccaagcccccgtcctgcagcgagaggcccctgacgctcttccacaccgttcagtcaacagagaaacaggaacaaaggaacagcatcatcaactccagtttggaatctgtctcatcaaatccaaacagcatccttaattccagcagcagcttacagcccaacatgaactccagtgacccagacctggctgtggtcaaacccacccggcccaactcactccccccgaatccaagcccaacttcacccctctcgccatcttggcccatgttctcggcgccatccagccctatgcccacctcatccacgtccagcgactcatcccccgtcaggtctgttgcagggtttgtttggttttctgttgctgccgttgttctctcattggctcggtcctctcttcatgcagtgttcagcctcctcgtcaactttgttccctgccatccaaacctgcacttgctttttgacaggccagaagaagcggtacatgaagactccaggtaaaatctcggatgatgaccaatctgttcccgtttatccaaagctggccagggacaacagggggctgcccctgctctcctgtggttccatcctaagagaccagagctaaaagggaccatttgcatgaatcagcatggcatttttcacacccttttcaaccctgactcaagtttctgaattaacctctctggtgcctagagttaggggaaggagcacctcctgaaccagactctggttttgatggctctctcaatttcatgtgctctctgcactttggtgtaagataacataagaggaaacagtgttgggacatgtgccaaccttttcttttctcatgtttatcaggcagcgtcaggcaatatttatttgtggggttgggcccctggccctaagcactgacacccagtcacttagaccagatccactgggggagagacgtcgaacatagaataaaagcttgagagacgaagcgatttctcttaaattgctcacggcttatgcctcgttgtcccccatatactcccgaaaccatccatgctcccagcctgcttctgtctctgtgtgtcatgaagcctgagctgtcctgggaacaggcactacctctctctgagggagagcagcttgacctagttcctcttctcagggccatgctgtagttttccctgcttttgtgacttccgcacttaagttttttgctcttgtgctctttgggaaaaaaaaagagctctttacaaccgggaaaagaacgaatagggatcctgcagaattcctatgctgtggagctcctaaacgtgcttctctctcaagcttagtctcagctttcagacaaccaaattgtagagcccagttataagcatcagaagcgttttgggctttgggagtattttcccttctgtctttttctccaaagggtggatccagcagagaggcttaaataatttatgaagccgagtttcacttttagaagaaagaaaaccccatgctattt

SEQ ID NO: 335170 - DNA, 2485 bp, Homo sapiens
gcccgggcaggtggttgcagcattgcagaagagaaaagtagtttgttggcagagaatcaggtattaatggaaagactcaatcaatctgattctatagaagaccctaacagtccagcaggaagaaggcatttgcagctccagactcaattagaacagctccaagaagaaacattcagactagaagcagccaaagatgattatcgaatacgttgtgaagagttagaaaaggagatctctgaacttcggcaacagaatgatgaactgaccactttggcagatgaagctcagtctctgaaagatgagatcgacgtgctgagacattcttctgataaagtatctaaactagaaggtcaagtatcactagaattcagcggccgctgaattctagggaggcgcgccccccggctgggcgccgcgcgcaccatggggctcccagcgctcgagttcagcgactgctgcctcgatagtccgcacttccgagagacgctcaagtcgcacgaagcagagctggacaagaccaacaaattcatcaaggagctcatcaaggacgggaagtcactcataagcgcgctcaagaatttgtcttcagcgaagcggaagtttgcagattccttaaatgaatttaaatttcagtgcataggagatgcagaaacagatgatgagatgtgtatagcaaggtctttgcaggagtttgccactgtcctcaggaatcttgaagatgaacggatacggatgattgagaatgccagcgaggtgctcatcactcccttggagaagtttcgaaaggaacagatcggggctgccaaggaagccaaaaagaaatatgacaaagagacagaaaagtattgtggcatcttagaaaaacacttgaatttgtcttccaaaaagaaagaatctcagcttcaggaggcagacagccaagtggacctggtccggcagcatttctatgaagtatccctggaatatgtcttcaaggtgcaggaagtccaagagagaaagatgtttgagtttgtggagcctctgctggccttcctgcaaggactcttcactttctatcaccatggttacgaactggccaaggatttcggggacttcaagacacagttaaccattagcatacagaacacaagaaatcgctttgaaggcactagatcagaagtggaatcactgatgaaaaagatgaaggagaatccccttgagcacaagaccatcagtccctacaccatggagggatacctctacgtgcaggagaaacgtcactttggaacttcttgggtgaagcactactgtacatatcaacgggattccaaacaaatcaccatggtaccatttgaccaaaagtcaggaggaaaagggggagaagatgaatcagttatcctcaaatcctgcacacggcggaaaacagactccattgagaagaggttttgctttgatgtggaagcagtagacaggccaggggttatcaccatgcaagctttgtcggaagaggaccggaggctctggatggaagccatggatggccgggaacctgtctacaactcgaacaaagacagccagagtgaagggactgcgcagttggacagcattggcttcagcataatcaggaaatgcatccatgctgtggaaaccagagggatcaacgagcaagggctgtatcgaattgtgggggtcaactccagagtgcagaagttgctgagtgtcctgatggaccccaagactgcttctgagacagaaacagatatctgtgctgaatgggagataaagaccatcactagtgctctgaagacctacctaagaatgcttccaggaccactcatgatgtaccagtttcaaagaagtttcatcaaagcagcaaaactggagaaccaggagtctcgggtctctgaaatccacagccttgttcatcggctcccagagaaaaatcggcagatgttacagctgctcatgaaccacttggcaaatgttgctaacaaccacaagcagaatttgatgacggtggcaaaccttggtgtggtgtttggacccactctgctgaggcctcaggaagaaacagtagcagccatcatggacatcaaatttcagaacattgtcattgagatcctaatagaaaaccacgaaaagatatttaacaccgtgcccgatatgcctctcaccaatgcccagctgcacctgtctcggaagaagagcagtgactccaagcccccgtcctgcagcgagaggcccctgacgctcttccacaccgttcagtcaacagagaaacaggaacaaaggaacagcatcatcaactccagtttggaatctgtctcatcaaatccaaacagcatccttaattccagcagcagcttacagcccaacatgaactccagtgacccagacctggctgtggtcaaacccacccggcccaactcacttgttgctaacaaccacaagcagaatttgatgacggtggcaaaccttggtgtggtgtttggacccactctgctga

SEQ ID NO: 335171 - DNA, 878 bp, Homo sapiens
gaattagcctatcgaatggatatgtgatatccgtgcatctctcatacaatagagcatgcacgcatgcaggctttgtcctgttctgcgttttacaacctcattgctgaaattgctctgtgtgctgatggaccccaagactgcttctgagacagaaacagatatctgtgctgaatgggagataaagaccatcactagtgctctgaagacctacctaagaatgcttccaggaccactcatgatgtaccagtttcaaagaagtttcatcaaagcagcaaaactggagaaccaggagtctcgggtctctgaaatccacagccttgttcatcggctcccagagaaaaatcggcagatgttacagctgctcatgaaccacttggcaaagtatgctggaggcttaggaaagaaatgtgtgaaatgttcattgcagtggagaacagcagcaaatgccaagatggccttcccagaggatgctggggaagtgctcatgcaaccaggccaccaagcagagttttcagggggattttacctatggtgatcaagggcaaattggagtgtgttgtccatgataccaggtcaccacacagaattttgtgggattatatgttcttatgctcatcaagaacaaacaaaaatatgttgtgggtttacagaatttgggtttttagtaaagaggactggattctagagctgactctgttattaacctgctgcttaaccagccctgaacaaactgctgaactttctattccttagtttccccatctgtctaatatggataatagactcccctttttctacaaggatcattgatttttgaagttacatgcattaaagcctttgaagaagtataaagaataaaggaattatttttggcaaat

SEQ ID NO: 335172 - DNA, 930 bp, Homo sapiens
agcccgatgccggcggcgcggcgtggcagggttgtggttccgggtcgggccgcgccgcagccagctctcggctcgcagccgcagcgccccgcccccgcgctccggacctggcaggcggcggctgcagggcaggtccaggggccacatggctgagggggacgcagggagcgaccagaggcaggtgaggccccggcggggtgctgtctctccaggctcggctccggctcgcctcgccatgccagtcctcctcagccgaggggccctccgcctggggccgccccgggttccgccagcactggccacgccatttgctccaccgcgttccattttcccggcgcttcccgtcggccgagcgctcttaggccggcggctcctcggcggccgcggtctcggcctgtctcggacggtgtcctcgtcaaccattaacacgcgactaagcagctctgggccgaaggcaaaaaccggggtttcgatccccaccctgccgccgccgagtcatcttggacaaatcacttaagaattcgggtttccccctttgcaaaatggcaatagcccagaccctgcaggtcccgagagcccaccgaatctcactccttctggtccttggcatcgagctttccctgtgccttgttcacgtgggcgatcataagtcttttcctacagggctgtgagtacaaaatgaaatgctacgaagtcgaatggatactttgcttcccatcttttccctttaggtcctccagttatttttcttttttaaccccaagcccaaagaataatttatgaaacgttttaagggtttgattaccaagcaaccacccacccatctagtccttgtgtaccccctccccacctccccccaacacaaaatttaatacgaaggaaccagtgagacacccagcaggagtacacagataatgtggggcagagcta

SEQ ID NO: 335173 - DNA, 3558 bp, Homo sapiens
agcccgatgccggcggcgcggcgtggcagggttgtggttccgggtcgggccgcgccgcagccagctctcggctcgcagccgcagcgccccgcccccgcgctccggacctggcaggcggcggctgcagggcaggtccaggggccacatggctgagggggacgcagggagcgaccagaggcagaatgaggaaattgaagcaatggcagccatttatggcgaggagtggtgtgtcattgatgactgtgccaaaatattttgtattagaattagcgacgatatagatgaccccaaatggacactttgcttgcaggtgatgctgccgaatgaatacccaggtacagctccacctatctaccagttgaatgctccttggcttaaagggcaagaacgtgcggatttatcaaatagccttgaggaaatatatattcagaatatcggtgaaagtattctttacctgtgggtggagaaaataagagatgttcttatacaaaaatctcagatgacagaaccaggcccagatgtaaagaagaaaactgaagaggaagatgttgaatgtgaagatgatctcattttagcatgtcagccggaaagttcggttaaagcattggattttgatatcagtgaaactcggacagaagtagaagtagaagaattacctccgattgatcatggcattcctattacagaccgaagaagtacttttcaggcacacttggctccagtggtttgtcccaaacaggtgaaaatggttctttccaaattgtatgagaataagaaaatagctagtgccacccacaacatctatgcctacagaatatattgtgaggataaacagaccttcttacaggattgtgaggatgatggggaaacagcagctggtgggcgtcttcttcatctcatggagattttgaatgtgaagaatgtcatggtggtagtatcacgctggtatggagggattctgctaggaccagatcgctttaaacatatcaacaactgtgccagaaacatactagtggaaaagaactacacaaattcacctgaggagtcatctaaggctttgggaaagaacaaaaaagcttatttgggagaactaatttgaacttaatcaccacttcatctaattttagcaaggtaacagttgcccagggcagtacctgaattaactgtccatttcagtacatgtcaagtgcctttgttaggtggagaagaaatgtctctagaggaatataaatacctgatttcttgtcatcgagattcttgtactgttaaatgaatattgccttttactgctctttatggcttattggaataggagctcatttaagattgatcttggagagtttcttcttgtgattttagttcataagtatgtcacctttcattttatagtgttcatcattgagtaatggattaagtgaaaatccaggagtatccatctgcagttatgtgctgaggtgataattcatccaacatatttgttagcataaatattatgcttcagtttctgttgcaaattggtgattgtgaaattacagaaagtgattttctagtctgctttttttgtttaattcttgtaatgtaagcaataaatatggagtgtcagtagtctccttccaccccagaaatgtgttggtgtaacattctcgtttcttttaacaacctggaagtacctttcttgtgatcttcactgaggaattagaactatgatagaagttaggctgtggcaaatgggacattcgtagagtgggatagaggtggcagaatgaacctggtgtagggcaggagtatgttgtgtagttacatcaatttgatgcatgctttccatctgcactccagacggctttctcagttccaagattttgcagagagaaggagcaaaccttttcattggaaaaacagaaacaaccctcccccccattttttcccctctattcatcaaacctttatgtatctttcatcttccagttacctctaggcatttagatagtgaaatttacctttgagatataacaataagtgattaactgttcactttcagatgtaatggcaaacaattgttaaaagttattaactgatcacagatttgcctggacttcccttcccagggagggaacagaagttaggaggcaactttgggatggtgctagagcatggaaagcacagagaattggacaaacaggtctttttctcttttctctgatgttttacctttaaaagatccaacatccttaccgttggtatttttagtaaggttatagtaaatagctttacaccaggatggattctgaaatataaattctaaattatatttgttataactatattttatgttgtatgttatcaggagccatcagagaatgacctttttgtgtttggaacacttggttccatgaaaagtatgctttgtgttttaactgttaaaataatttaaaaattaattattttacataattaaagaagttaaaaactattaacattaaataatttcacaatttcaacatgtcaaacctatgaagggagataggaaacaatgagaaacttacttttgctcctttatacagaattattaactatattttactaactaaaaaactctagtattctttacctaaagtcaattggctggtaagagggagagatgcaaaattctccagctctgaacttggagctacttcacactctactcttaatggaaacttgaactaatgatagatagtatttttttcctctatttaaaatttttgtcttgattaggagatttttcagttctccatataataattttctacaatcagatctatgctgtggcatattttgctttatttaaaaatttttttttagagatgagttcttgctctgtcacctaggctggagtgcagtggcatgatcatggctcactgcagccttgaccttccagcctgccaagtagctgggattacagacaggcatgtgctattacacctggctaatttttaaagttttttttgtaaagatagggtctttctatgttgcccaggctcgtcttgagctcctggcctcaatcgatcttcctgccaaggttttggaattacaggtgtgagccaccatgcctggcctgctttgacatattttatagtgtgttaattacaaatagtcttcatatgccagaatataagagcaagtgttatctactttttagatgggaattgcagaagctgcatcaaaagtatgctttgaggtatatatagtgaaacagagcctttctgaagagaattatatcaaactaattacaaccaagaaataatagtatgaagcggatgctgtttggaggacaggaaaatttatcaggaaaattacataatccctctgattccactatccagagatagccattattattaatatttggtatgtacatccttatattatttttttcttatgcatgattttgtatatatggttatttttctttccataaaaatggtattaaactgtatatactgttttgtagcctacatatttcatatagaagtatattgttaacattttccatgtcaataaatattcttctatggctta

SEQ ID NO: 335174 - DNA, 3192 bp, Homo sapiens
agcccgatgccggcggcgcggcgtggcagggttgtggttccgggtcgggccgcgccgcagccagctctcggctcgcagccgcagcgccccgcccccgcgctccggacctggcaggcggcggctgcagggcaggtccaggggccacatggctgagggggacgcagggagcgaccagaggcagaatgaggaaattgaagcaatggcagccatttatggcgaggagtggtgtgtcattgatgactgtgccaaaatattttgtattagaattagcgacgatatagatgaccccaaatggacactttgcttgcaggtgatgctgccgaatgaatacccaggtacagctccacctatctaccagttgaatgctccttggcttaaagggcaagaacgtgcggatttatcaaatagccttgaggaaatatatattcagaatatcggtgaaagtattctttacctgtgggtggagaaaataagagatgttcttatacaaaaatctcagatgacagaaccaggcccagatgtaaagaagaaaactgaagaggaagatgttgaatgtgaagatgatctcattttagcatgtcagccggaaagttcggttaaagcattggattttgatatcagtgaaactcggacagaagtagaagtagaagaattacctccgattgatcatggcattcctattacagaccgaagaagtacttttcaggcacacttggctccagtggtttgtcccaaacaggtgaaaatggttctttccaaattgtatgagaataagaaaatagctagtgccacccacaacatctatgcctacagaatatattgtgaggataaacagaccttcttacaggattgtgaggatgatggggaaacagcagctggtgggcgtcttcttcatctcatggaggtaggtgtaagttaaactatcaatcctgaggagtcatctaaggctttgggaaagaacaaaaaagcttatttgggagaactaatttgaacttaatcaccacttcatctaattttagcaagtgttcatcattgagtaatggattaagtgaaaatccaggagtatccatctgcagttatgtgctgaggtgataattcatccaacatatttgttagcataaatattatgcttcagtttctgttgcaaattggtgattgtgaaattacagaaagtgattttctagtctgctttttttgtttaattcttgtaatgtaagcaataaatatggagtgtcagtagtctccttccaccccagaaatgtgttggtgtaacattctcgtttcttttaacaacctggaagtacctttcttgtgatcttcactgaggaattagaactatgatagaagttaggctgtggcaaatgggacattcgtagagtgggatagaggtggcagaatgaacctggtgtagggcaggagtatgttgtgtagttacatcaatttgatgcatgctttccatctgcactccagacggctttctcagttccaagattttgcagagagaaggagcaaaccttttcattggaaaaacagaaacaaccctcccccccattttttcccctctattcatcaaacctttatgtatctttcatcttccagttacctctaggcatttagatagtgaaatttacctttgagatataacaataagtgattaactgttcactttcagatgtaatggcaaacaattgttaaaagttattaactgatcacagatttgcctggacttcccttcccagggagggaacagaagttaggaggcaactttgggatggtgctagagcatggaaagcacagagaattggacaaacaggtctttttctcttttctctgatgttttacctttaaaagatccaacatccttaccgttggtatttttagtaaggttatagtaaatagctttacaccaggatggattctgaaatataaattctaaattatatttgttataactatattttatgttgtatgttatcaggagccatcagagaatgacctttttgtgtttggaacacttggttccatgaaaagtatgctttgtgttttaactgttaaaataatttaaaaattaattattttacataattaaagaagttaaaaactattaacattaaataatttcacaatttcaacatgtcaaacctatgaagggagataggaaacaatgagaaacttacttttgctcctttatacagaattattaactatattttactaactaaaaaactctagtattctttacctaaagtcaattggctggtaagagggagagatgcaaaattctccagctctgaacttggagctacttcacactctactcttaatggaaacttgaactaatgatagatagtatttttttcctctatttaaaatttttgtcttgattaggagatttttcagttctccatataataattttctacaatcagatctatgctgtggcatattttgctttatttaaaaatttttttttagagatgagttcttgctctgtcacctaggctggagtgcagtggcatgatcatggctcactgcagccttgaccttccagcctgccaagtagctgggattacagacaggcatgtgctattacacctggctaatttttaaagttttttttgtaaagatagggtctttctatgttgcccaggctcgtcttgagctcctggcctcaatcgatcttcctgccaaggttttggaattacaggtgtgagccaccatgcctggcctgctttgacatattttatagtgtgttaattacaaatagtcttcatatgccagaatataagagcaagtgttatctactttttagatgggaattgcagaagctgcatcaaaagtatgctttgaggtatatatagtgaaacagagcctttctgaagagaattatatcaaactaattacaaccaagaaataatagtatgaagcggatgctgtttggaggacaggaaaatttatcaggaaaattacataatccctctgattccactatccagagatagccattattattaatatttggtatgtacatccttatattatttttttcttatgcatgattttgtatatatggttatttttctttccataaaaatggtattaaactgtatatactgttttgtagcctacatatttcatatagaagtatattgttaacattttccatgtcaataaatattcttctatggctta

SEQ ID NO: 335175 - DNA, 3790 bp, Homo sapiens
agcccgatgccggcggcgcggcgtggcagggttgtggttccgggtcgggccgcgccgcagccagctctcggctcgcagccgcagcgccccgcccccgcgctccggacctggcaggcggcggctgcagggcaggtccaggggccacatggctgagggggacgcagggagcgaccagaggcagaatgaggaaattgaagcaatggcagccatttatggcgaggagtggtgtgtcattgatgactgtgccaaaatattttgtattagaattagcgacgatatagatgaccccaaatggacactttgcttgcaggtgatgctgccgaatgaatacccaggtacagctccacctatctaccagttgaatgctccttggcttaaagggcaagaacgtgcggatttatcaaatagccttgaggaaatatatattcagaatatcggtgaaagtattctttacctgtgggtggagaaaataagagatgttcttatacaaaaatctcagatgacagaaccaggcccagatgtaaagaagaaaactgaagaggaagatgttgaatgtgaagatgatctcattttagcatgtcagccggaaagttcggttaaagcattggattttgatatcagtgaaactcggacagaagtagaagtagaagaattacctccgattgatcatggcattcctattacagaccgaagaagtacttttcaggcacacttggctccagtggtttgtcccaaacaggtgaaaatggttctttccaaattgtatgagaataagaaaatagctagtgccacccacaacatctatgcctacagaatatattgtgaggataaacagaccttcttacaggattgtgaggatgatggggaaacagcagctggtgggcgtcttcttcatctcatggagattttgaatgtgaagaatgtcatggtggtagtatcacgctggtatggagggattctgctaggaccagatcgctttaaacatatcaacaactgtgccagaaacatactagtggaaaagaactacacaaattcacctgaggagtcatctaaggctttgggaaagaacaaaaaagtaagaaaagacaagaagaggaatgaacattaatacctgaaactataggaaaggttaatttgcctataattatatatacattccatagtcatcaaggaatatattgtgcagagagagtatccttgactgcttaagtcagccagttcagcatggataccaacattagcttttcttcttggttatatcatctgccaaaaatagagaacttatgatctattcatgtgtgtttcaggcttatttgggagaactaatttgaacttaatcaccacttcatctaattttagcaaggtaacagttgcccagggcagtacctgaattaactgtccatttcagtacatgtcaagtgcctttgttaggtggagaagaaatgtctctagaggaatataaatacctgatttcttgtcatcgagattcttgtactgttaaatgaatattgccttttactgctctttatggcttattggaataggagctcatttaagattgatcttggagagtttcttcttgtgattttagttcataagtatgtcacctttcattttatagtgttcatcattgagtaatggattaagtgaaaatccaggagtatccatctgcagttatgtgctgaggtgataattcatccaacatatttgttagcataaatattatgcttcagtttctgttgcaaattggtgattgtgaaattacagaaagtgattttctagtctgctttttttgtttaattcttgtaatgtaagcaataaatatggagtgtcagtagtctccttccaccccagaaatgtgttggtgtaacattctcgtttcttttaacaacctggaagtacctttcttgtgatcttcactgaggaattagaactatgatagaagttaggctgtggcaaatgggacattcgtagagtgggatagaggtggcagaatgaacctggtgtagggcaggagtatgttgtgtagttacatcaatttgatgcatgctttccatctgcactccagacggctttctcagttccaagattttgcagagagaaggagcaaaccttttcattggaaaaacagaaacaaccctcccccccattttttcccctctattcatcaaacctttatgtatctttcatcttccagttacctctaggcatttagatagtgaaatttacctttgagatataacaataagtgattaactgttcactttcagatgtaatggcaaacaattgttaaaagttattaactgatcacagatttgcctggacttcccttcccagggagggaacagaagttaggaggcaactttgggatggtgctagagcatggaaagcacagagaattggacaaacaggtctttttctcttttctctgatgttttacctttaaaagatccaacatccttaccgttggtatttttagtaaggttatagtaaatagctttacaccaggatggattctgaaatataaattctaaattatatttgttataactatattttatgttgtatgttatcaggagccatcagagaatgacctttttgtgtttggaacacttggttccatgaaaagtatgctttgtgttttaactgttaaaataatttaaaaattaattattttacataattaaagaagttaaaaactattaacattaaataatttcacaatttcaacatgtcaaacctatgaagggagataggaaacaatgagaaacttacttttgctcctttatacagaattattaactatattttactaactaaaaaactctagtattctttacctaaagtcaattggctggtaagagggagagatgcaaaattctccagctctgaacttggagctacttcacactctactcttaatggaaacttgaactaatgatagatagtatttttttcctctatttaaaatttttgtcttgattaggagatttttcagttctccatataataattttctacaatcagatctatgctgtggcatattttgctttatttaaaaatttttttttagagatgagttcttgctctgtcacctaggctggagtgcagtggcatgatcatggctcactgcagccttgaccttccagcctgccaagtagctgggattacagacaggcatgtgctattacacctggctaatttttaaagttttttttgtaaagatagggtctttctatgttgcccaggctcgtcttgagctcctggcctcaatcgatcttcctgccaaggttttggaattacaggtgtgagccaccatgcctggcctgctttgacatattttatagtgtgttaattacaaatagtcttcatatgccagaatataagagcaagtgttatctactttttagatgggaattgcagaagctgcatcaaaagtatgctttgaggtatatatagtgaaacagagcctttctgaagagaattatatcaaactaattacaaccaagaaataatagtatgaagcggatgctgtttggaggacaggaaaatttatcaggaaaattacataatccctctgattccactatccagagatagccattattattaatatttggtatgtacatccttatattatttttttcttatgcatgattttgtatatatggttatttttctttccataaaaatggtattaaactgtatatactgttttgtagcctacatatttcatatagaagtatattgttaacattttccatgtcaataaatattcttctatggctta

SEQ ID NO: 335176 - DNA, 3737 bp, Homo sapiens
agcccgatgccggcggcgcggcgtggcagggttgtggttccgggtcgggccgcgccgcagccagctctcggctcgcagccgcagcgccccgcccccgcgctccggacctggcaggcggcggctgcagggcaggtccaggggccacatggctgagggggacgcagggagcgaccagaggcagaatgaggaaattgaagcaatggcagccatttatggcgaggagtggtgtgtcattgatgactgtgccaaaatattttgtattagaattagcgacgatatagatgaccccaaatggacactttgcttgcaggtgatgctgccgaatgaatacccaggtacagctccacctatctaccagttgaatgctccttggcttaaagggcaagaacgtgcggatttatcaaatagccttgaggaaatatatattcagaatatcggtgaaagtattctttacctgtgggtggagaaaataagagatgttcttatacaaaaatctcagatgacagaaccaggcccagatgtaaagaagaaaactgaagaggaagatgttgaatgtgaagatgatctcattttagcatgtcagccggaaagttcggttaaagcattggattttgatatcagtgaaactcggacagaagtagaagtagaagaattacctccgattgatcatggcattcctattacagaccgaagaagtacttttcaggcacacttggctccagtggtttgtcccaaacaggtgaaaatggttctttccaaattgtatgagaataagaaaatagctagtgccacccacaacatctatgcctacagaatatattgtgaggataaacagaccttcttacaggattgtgaggatgatggggaaacagcagctggtgggcgtcttcttcatctcatggagattttgaatgtgaagaatgtcatggtggtagtatcacgctggtatggagggattctgctaggaccagatcgctttaaacatatcaacaactgtgccagaaacatactagtggaaaagaactacacaaattcacctgaggagtcatctaaggctttgggaaagaacaaaaaagtaagaaaagacaagaagaggaatgaacattaatacctgaaactataggaaaggttaatttgcctataattatatatacattccatagtcatcaaggaatatattgtgcagagagagtatccttgactgcttaagtcagccagttcagcatggataccaacattagcttttcttcttggttatatcatctgccaaaaatagagaacttatgatctattcatgtgtgtttcaggcttatttgggagaactaatttgaacttaatcaccacttcatctaattttagcaaggtaacagttgcccagggcagtacctgaattaactgtccatttcagtacatgtcaagtgcctttgttaggtggagaagaaatgtctctagaggaatataaatacctgatttcttgtcatcgagattcttgtactgttaaatgaatattgccttttactgctctttatggcttattggaataggagctcatttaagattgatcttggagagtttcttcttgtgattttagttcataagtatgtcacctttcattttatagtgttcatcattgagtaatggattaagtgaaaatccaggagtatccatctgcagttatgtgctgaggtgataattcatccaacatatttgttagcataaatattatgcttcagtttctgttgcaaattggtgattgtgaaattacagaaagtgattttctagtctgctttttttgtttaattcttgtaatgtaagcaataaatatggagtgtcagtagtctccttccaccccagaaatgtgttggtgtaacattctcgtttcttttaacaacctggaagtacctttcttgtgatcttcactgaggaattagaactatgatagaagttaggctgtggcaaatgggacattcgtagagtgggatagaggtggcagaatgaacctggtgtagggcaggagtatgttgtgtagttacatcaatttgatgcatgctttccatctgcactccagacggctttctcagttccaagattttgcagagagaaggagcaaaccttttcattggaaaaacagaaacaaccctcccccccattttttcccctctattcatcaaacctttatgtatctttcatcttccagttacctctaggcatttagatagtgaaatttacctttgagatataacaataagtgattaactgttcactttcagatgtaatggcaaacaattgttaaaagttattaactgatcacagatttgcctggacttcccttcccagggagggaacagaagttaggaggcaactttgggatggtgctagagcatggaaagcacagagaattggacaaacaggtctttttctcttttctctgatgttttacctttaaaagatccaacatccttaccgttggtatttttagtaaggttatagtaaatagctttacaccaggatggattctgaaatataaattctaaattatatttgttataactatattttatgttgtatgttatcaggagccatcagagaatgacctttttgtgtttggaacacttggttccatgaaaagtatgctttgtgttttaactgttaaaataatttaaaaattaattattttacataattaaagaagttaaaaactattaacattaaataatttcacaatttcaacatgtcaaacctatgaagggagataggaaacaatgagaaacttacttttgctcctttatacagaattattaactatattttactaactaaaaaactctagtattctttacctaaagtcaattggctggtaagagggagagatgcaaaattctccagctctgaacttggagctacttcacactctactcttaatggaaacttgaactaatgatagatagtatttttttcctctatttaaaatttttgtcttgattaggagatttttcagttctccatataataattttctacaatcagatctatgctgtggcatattttgctttatttatggcatgatcatggctcactgcagccttgaccttccagcctgccaagtagctgggattacagacaggcatgtgctattacacctggctaatttttaaagttttttttgtaaagatagggtctttctatgttgcccaggctcgtcttgagctcctggcctcaatcgatcttcctgccaaggttttggaattacaggtgtgagccaccatgcctggcctgctttgacatattttatagtgtgttaattacaaatagtcttcatatgccagaatataagagcaagtgttatctactttttagatgggaattgcagaagctgcatcaaaagtatgctttgaggtatatatagtgaaacagagcctttctgaagagaattatatcaaactaattacaaccaagaaataatagtatgaagcggatgctgtttggaggacaggaaaatttatcaggaaaattacataatccctctgattccactatccagagatagccattattattaatatttggtatgtacatccttatattatttttttcttatgcatgattttgtatatatggttatttttctttccataaaaatggtattaaactgtatatactgttttgtagcctacatatttcatatagaagtatattgttaacattttccatgtcaataaatattcttctatggctta

SEQ ID NO: 335177 - DNA, 2066 bp, Homo sapiens
agcccgatgccggcggcgcggcgtggcagggttgtggttccgggtcgggccgcgccgcagccagctctcggctcgcagccgcagcgccccgcccccgcgctccggacctggcaggcggcggctgcagggcaggtccaggggccacatggctgagggggacgcagggagcgaccagaggcagaatgaggaaattgaagcaatggcagccatttatggcgaggagtggtgtgtcattgatgactgtgccaaaatattttgtattagaattagcgacgatatagatgaccccaaatggacactttgcttgcaggtgatgctgccgaatgaatacccaggtacagctccacctatctaccagttgaatgctccttggcttaaagggcaagaacgtgcggatttatcaaatagccttgaggaaatatatattcagaatatcggtgaaagtattctttacctgtgggtggagaaaataagagatgttcttatacaaaaatctcagatgacagaaccaggcccagatgtaaagaagaaaactgaagaggaagatgttgaatgtgaagatgatctcattttagcatgtcagccggaaagttcggttaaagcattggattttgatatcagtgaaactcggacagaagtagaagtagaagaattacctccgattgatcatggcattcctattacagaccgaagaagtacttttcaggcacacttggctccagtggtttgtcccaaacaggtgaaaatggttctttccaaattgtatgagaataagaaaatagctagtgccacccacaacatctatgcctacagaatatattgtgaggataaacagaccttcttacaggattgtgaggatgatggggaaacagcagctggtgggcgtcttcttcatctcatggagattttgaatgtgaagaatgtcatggtggtagtatcacgctggtatggagggattctgctaggaccagatcgctttaaacatatcaacaactgtgccagaaacatactagtggaaaagaactacacaaattcacctgaggagtcatctaaggctttgggaaagaacaaaaaagtaagaaaagacaagaagaggaatgaacattaatacctgaaactataggaaaggttaatttgcctataattatatatacattccatagtcatcaaggaatatattgtgcagagagagtatccttgactgcttaagtcagccagttcagcatggataccaacattagcttttcttcttggttatatcatctgccaaaaatagagaacttatgatctattcatgtgtgtttcaggcttatttgggagaactaatttgaacttaatcaccacttcatctaattttagcaaggtaacagttgcccagggcagtacctgaattaactgtccatttcagtacatgtcaagtgcctttgttaggtggagaagaaatgtctctagaggaatataaatacctgatttcttgtcatcgagattcttgtactgttaaatgaatattgccttttactgctctttatggcttattggaataggagctcatttaagattgatcttggagagtttcttcttgtgattttagttcataagtatgtcacctttcattttatagtgttcatcattgagtaatggattaagtgaaaatccaggagtatccatctgcagttatgtgctgagatgggaattgcagaagctgcatcaaaagtatgctttgaggtatatatagtgaaacagagcctttctgaagagaattatatcaaactaattacaaccaagaaataatagtatgaagcggatgctgtttggaggacaggaaaatttatcaggaaaattacataatccctctgattccactatccagagatagccattattattaatatttggtatgtacatccttatattatttttttcttatgcatgattttgtatatatggttatttttctttccataaaaatggtattaaactgtatatactgttttgtagcctacatatttcatatagaagtatattgttaacattttccatgtcaataaatattcttctatggctta

SEQ ID NO: 335178 - DNA, 1573 bp, Homo sapiens
agcccgatgccggcggcgcggcgtggcagggttgtggttccgggtcgggccgcgccgcagccagctctcggctcgcagccgcagcgccccgcccccgcgctccggacctggcaggcggcggctgcagggcaggtccaggggccacatggctgagggggacgcagggagcgaccagaggcagaatgaggaaattgaagcaatggcagccatttatggcgaggagtggtgtgtcattgatgactgtgccaaaatattttgtattagaattagcgacgatatagatgaccccaaatggacactttgcttgcaggtgatgctgccgaatgaatacccaggtacagctccacctatctaccagttgaatgctccttggcttaaagggcaagaacgtgcggatttatcaaatagccttgaggaaatatatattcagaatatcggtgaaagtattctttacctgtgggtggagaaaataagagatgttcttatacaaaaatctcagatgacagaaccaggcccagatgtaaagaagaaaactgaagaggaagatgttgaatgtgaagatgatctcattttagcatgtcagccggaaagttcggttaaagcattggattttgatatcagtgaaactcggacagaagtagaagtagaagaattacctccgattgatcatggcattcctattacagaccgaagaagtacttttcaggcacacttggctccagtggtttgtcccaaacaggtgaaaatggttctttccaaattgtatgagaataagaaaatagctagtgccacccacaacatctatgcctacagaatatattgtgaggataaacagaccttcttacaggattgtgaggatgatggggaaacagcagctggtgggcgtcttcttcatctcatggagattttgaatgtgaagaatgtcatggtggtagtatcacgctggtatggagggattctgctaggaccagatcgctttaaacatatcaacaactgtgccagaaacatactagtggaaaagaactacacaaattcacctgaggagtcatctaaggctttgggaaagaacaaaaaagtaagaaaagacaagaagaggaatgaacattaatacctgaaactataggaaagtgttcatcattgagtaatggattaagtgaaaatccaggagtatccatctgcagttatgtgctgagatgggaattgcagaagctgcatcaaaagtatgctttgaggtatatatagtgaaacagagcctttctgaagagaattatatcaaactaattacaaccaagaaataatagtatgaagcggatgctgtttggaggacaggaaaatttatcaggaaaattacataatccctctgattccactatccagagatagccattattattaatatttggtatgtacatccttatattatttttttcttatgcatgattttgtatatatggttatttttctttccataaaaatggtattaaactgtatatactgttttgtagcctacatatttcatatagaagtatattgttaacattttccatgtcaataaatattcttctatggctta

SEQ ID NO: 335179 - DNA, 87 bp, Homo sapiens
cttctcaatcttgccatccttctaagttaccaccctagttctctttctctctttacactgaaatatttaattaaatatttctcattc

SEQ ID NO: 335180 - DNA, 435 bp, Homo sapiens
ttactatgtgccagggaggagtactagttattaactcatttaatcctcacaaaaacacaatgaattagttactaccattatactcattttacagacaagaaaacagaggcacagagaaatcaaataacttgcctaagattacacagactaaaatccagatactgatggaaccacaatctcttgttacagaaatcaagcatttagtgattcagcacaaaacaatgtacattgaattcttatcaagcaagttattgtgttatgcactctataagggacagaaaacttagtaagaaaaaatctgttttatctagcatttctattacattctttatctagcctgctttaattggtgatgattttgtgtttaaaccttgctttcttaactaggatacctgcaagtatttacaatgctaagtggaaattaaacaaatacaa

SEQ ID NO: 335181 - DNA, 1107 bp, Homo sapiens
actcaaaatttgaaaaataagcacatccaatgattgttttgaccaacagtggtcagtgacgtaaactgcatgtgcatctgaggacatttaaggggtcattaaaatttgaggagcatcaggccggagtagcagacttttagatgagtcatatttcagcattcactaagtcctcagcattccattcaaactgtcgtgtatatttggcctgattttttttcaagctttgcaataatttatgttattggtaaacacttggtgactatatctcagccttttctttaacaactcacaatatattagaaacacgtctacctatactgagagtatatttacaatagaagaacatactgtatgtgactttgtaaagctagacttttgattaagaaatatataatctctggatggtatttttgcattatacactcaggcacaacgtaaaccttgatggctcatcttgctacaattacgagttgaaaaacactacttacgtatttgtatgacctattagtcagaggaaatcatacatatgctttgtaaatagactttgcagataactaaatagactgaagaaatatgttgcatttgatagaagcaattgcataaatatttggtttctatattagagtctgtgagtaaagtcaagtaataaacctaagtaggtataacagatttttaaaccttgaaacttgctttgatggtagagaaaatcattgaagatttacatactgtatataagatgtaaaatgtacgctgcttattaccctcaattttccagaagcaatggtatataatgcagttgaaaaaccaaaaatcttggaaaactaagacgggtcttgtttaaaatgtctctcagctttggcaaccttcaaatcttaatcaactatttaaagcattactgtgtcttgtagcctgcattccacaacagctctgttattcaggtaaaagacttgaactgagccgtttgggacctatactgtaatattttcattgaggaacaatatcctattttgtaaagcatttccctatgtgtgactttaaactgtaaaattaaacactgcttttgtgggttcagtgggcataataaatataaattgtaaactaaaaaaa

SEQ ID NO: 335182 - DNA, 265 bp, Homo sapiens
ccattcaatctgactcctgtttgtttacatatatatgtttgtgatatcacaaagtcaaaatagcttatctcaagtccccactcttgaaattaaaaaaaaaatgttctgtagctaaccattaatgcatttaggaagaggatacatttccaaaaccatatttaaaaaaataaagttaggaattacagttaaaagattaccataaactgttaacgatgtgcatatagttaacacttaacacttaaaaatggttaagatggggccaacc

SEQ ID NO: 335183 - DNA, 530 bp, Homo sapiens
ctggaggagcaactgtgaggccccgagatggggagggagcccagattctggcttttggtcttcctgctgtttcttttgtctgatgctggtgcatttccatggacagtttatttcccttggacactgtgggcttggtttttccatgagtgtgtgacgctgtggtcattcaccaggccctgttggtggtctcggtgggggccacaaggctcagatctcacctgccccttttcctacctcctccactctttgctcagccatcaacattcctttctgtcccagaagtgttctttccaaaatgcagatctgcccatgtcccctaatgacgtcacttattgacttcgctatggaaaaggagcgatggggaatgtggccggaaggacagcagagagccagactgtggagacctttgaattccagaggaacaaaagtattttgggtggctcacacctgtaatcccagcactttgggagaccaaggcgggcagatcacctgaggtcaggagcttgagaccagcctgaccaacatggtag

SEQ ID NO: 335184 - DNA, 145 bp, Homo sapiens
tgggccagcagtttaacttaggtgtttttcaatttaaggttccggccttcccattacatgtttctttattttatagaaagtgtaagttaggccgggcacagtggctcaggcctgaaatctcagcattttgggaggccagtgcaga

SEQ ID NO: 335185 - DNA, 213 bp, Homo sapiens
agaaagaaggaaagaaggagagaaagaaagagaggaaggaaggaaggaaggaaggaaggaaggaaggttggttagttggtttataggttttggctatagccaactaaaaatggctgaaaacaactgggtgaaatggcccagaaaacaactataaagcttcaagctaaaaggaaatcacaccagatagtcacttcaatccataggaaatgaagg

SEQ ID NO: 335186 - DNA, 155 bp, Homo sapiens
cgtaaaacttgttatactccttagctgaatttggaaaaaaagaaagagcaaaactaatgagcaacatttaagccacattacctagccgcgtagtcagatcgagccgcgtagtcagatcgagccgcgtagtcagatcgagccgcgtagtcagatcg

SEQ ID NO: 335187 - DNA, 393 bp, Homo sapiens
ttcattctgactgaagggaatgtccagttccctgggtgacagatataagcttgaatggaggattctttaggactgttccacaaactaggtctgttgtggatccagtcatttctgggtctcatgcagacccctctccaggtgccaggatggtaccctgtaccagataggaatcatattttctgggtttatgggccacccggagtgcacctctccctgcaaagcacagggccagctgtcctctttgaaggagggctgtaatgataaactgcacatgcctgcttctggacactagagtcctctagagcaattgccacaccacagagtatctgcaaaacatacacagcaccagccacctccccctgccacctccactgcacatctgaaagctggcag

SEQ ID NO: 335188 - DNA, 430 bp, Homo sapiens
ctcactttcctcacctgtgaaaaggaggttgaggatcctcgtggctggagaatgactcgggctcagatgggatgctgttttgtaacagtgccaccttcactagcatttgctcgtctctggtgagtgtcatcaagggcacatgctctgagaactgagtcagagatggagaagaaagatggagggtaatgtggggtttaagaagagagagaaaatgtgtgtcactctttaaaatgacaagtgatagcagaaatgcattagtgctcccaagctgtccattacattctccaaactggagctgctgtggggtgtagttcacagctgggcctgctgagaactgtgagctgcctgttggacagcctagagagcctgcatgtcacctctgaaggacaaagaccaggaaggagggaagtgcaggaaggagggggctggg

SEQ ID NO: 335189 - DNA, 509 bp, Homo sapiens
aatacacattgagtgaaatgttattggggactggacatttatagtctcaaagtatcatcctgtagatacttactatttcaaagaggaagaattgcctttaaatggaaaatggtggacaccaccataaccataggaatccaccaataatggaacagggacagacagacatgatgaaggacacacatcttgtcagaagtgttggatctaaatataatcatagggacattatctgacagatggacattctacaaaagcaagtggtctggtctccaaaaatgacattgtcaagaaagaaaaaggcagagaactcttctagagactaaggaaatatgacagctaaaagcagcgcatgatccttgattggatcctgattgaaaacagcagctataaaagaaattggggaataattgggaaatttgcaggtggttgtatatcagctaagaaagttaacattgatacagtagtaagattgttgatggtgttgaagtgcttagggatgaagtttcatt

SEQ ID NO: 335190 - DNA, 749 bp, Homo sapiens
cgttgattaagtaaaacttgcttttctattttttatgtgagagctcattttgccatttgggtatgtcactttcatttatgtacttaggaagcattaggatttaagaacattgttaaaataagtctttataactttagaaatgtggttactttgaaaatggaaaaacctagactagccttactactttttttagataacagggaagacttatggaaatgaatgaaaggcaaattcaattggaaaaaagagattaatttcttattaaatcaaattctctgtatttataaattttgctgataaatccactcttgtatattattcagcatatttctattcagttcatttttagaatagtttatctacagcagtaagtctatgtgaaatctaaaaatttgactaacttttattatatttcatttttacagtaggcagtggatagtcattttcactgctaaatctatgtaccaaatctactgagtattgcaaaaacacactggatagaatattatttgcaaagtgattcttgttgtcattcaccatagattcttttgggacaaaaaaattcttaaagataaaatgttgcctgtatttataaaaatcattgaggattcttcccaaaaatagaaatgagaaaatagaatttaaacaatcaaatgattaagtttgctctatagccaagtgttttggtctaagtgtctttggttgaaagcatctggataaaagcatagtgacaattttgaagcatgtcc

SEQ ID NO: 335191 - DNA, 852 bp, Homo sapiens
gcttgagtttctttaaaatacccagccctgaagaaaaataaaagccaaaataaagaaaaagaataagatcctaattaatgactgctggggagacctgcagacatatacagaatcgttgagaagtacatttgttcatggaccacaaatttggaccagttatctacagagcatgaaagtgatgctacaaacggaaaatgaaataatcagacagcaacctggacagcctctcggggacagacgctgggcaatggcagaacctcttctgctaaacaataggctatgatagtctacacggaaggggtgccactcagaaatatacgtagctcaaatattattcaaaccatctctaggataaagcagaaatactctatacagacatttcagcaatcacattctagtcctgcaaagagcaatatttacagaaatcagaaaatgttcttgttattgcacagccctcctgttttagaatgcctacagcaagaaatgatgctggactttgtaagagctccagcacgaagaccattccctaaaataaaggtctccttgctcacaaaggaagtaatagcagagaacagcagcttccatgtgacttaaaggatatttcaccttttgacactctggtaagattaattaagagaagaaccaaaagacatcattataaatatcagtacagcatatgagcttcagagtcagagaatttcagattgaatcctggctttaccatttaatagatgtctgatcttgggcaagttatttatcaagttatttagaataagtcttagttgttatctcatttatattcactaacttatcacatgtctatggagaagacagatcaaaaccaacattatt

SEQ ID NO: 335192 - DNA, 113 bp, Homo sapiens
gctggtctcaaactcctggcctcaagtgatccgcctgccttggcctcccaaagtgcttggatcacaggcatgagccaccgtacctggccaaagagaggattttgaatgttcac

SEQ ID NO: 335193 - DNA, 459 bp, Homo sapiens
caagcaggggagtcagctttggattaccttgaagcttgtgctcttttcacgaggatttatgtatttagccagtttcagaattcaaggtatagttgtttccagatgatgtgtcctctaatcctttattacataatgaagcctcagtgccttctgctagcgctctaggtacactggcttttagtgacagcatatagttgagggaacatgtggtttctgactttatgttttatatattatgatttcaagtttgttgtggtttgatttgaatttggaattgaaaatatattttagtatttgagctagaataaaaaaaaatttaaacagaaggaaaagtcaccacatttttatattttatcctctcaagtgaggaaattaaaagagagtattctcatggtaacaattttattgtatattgtgttccatcatgaataatgcattaatttagttattgcacttagt

SEQ ID NO: 335194 - DNA, 386 bp, Homo sapiens
cacctgtaaccctataaatgtctgtaaataaaacactaaaatttttaataaggatcccctaggttgaaatgggcacagaaatttttatcactggaataacctaattttgaaaacactgatggttagtttcttgaaatattaatattactacaagtcataagtaaaagcattctatcttaagtgagaaactacaaagttggataattactatttgagtttgtggcttggtttgaataaacacttgcttgttttaagtaaaagttcagctgaagtgacaatcaacctttaatcttgtaaagcttctgtgttagatattttctatctctaacatgccaaacatgcatattaaactgagtttttttgcatgcaatttctgtgcccatttc

SEQ ID NO: 335195 - DNA, 90 bp, Homo sapiens
tatggcatatgagctaatgaggaaagtcatcattcattgaatatttatcgagaaacccagagttcttccattttcccttattactggatt

SEQ ID NO: 335196 - DNA, 481 bp, Homo sapiens
gggtgggtaaagaagtgaaggaagggagaattccaggcataacaagaggccacaacctcaaggcagtcaagtaactaaagcctcgaagacttgatcacagctgcgattgtcacaacccagcaatgacaatcccagtccttatgagtatgaagtgctttcacatctattatttcacaacaatactgcaagataggcagatgtcactcttcccttcttttctagatgagtgatatagtttgggtatttgtccctgcctaaatctcaggttaaaaatgtaattgccaatgctggaggtgggacctgatgggaggtatctgtgtcatgagggcagacctctcatggtttggtgctgtcctcataacagtgagtgaggtcacatgagctctggttgtttgaaggtgtgtggcatcgcccctctctctctcccttgctcctgctatcaccatctgatgtgcctacccccgctttgccttctgccatg

SEQ ID NO: 335197 - DNA, 502 bp, Homo sapiens
ctagagtatccccgcctagcacgtgatttcatcaagtataggcattgcggatccatggcataacaagaggccacaacctcaaggcagtcaagtaactaaagcctcgaagacttgatcacagctgcgattgtcacaacccagcaatgacaatcccagtccttatgagtatgaagtgctttcacatctattatttcacaacaatactgcaagataggcagatgtcactcttcccttcttttctagatgagtgatatagtttgggtatttgtccctgcctaaatctcaggttaaaaatgtaattgccaatgctggaggtgggacctgatgggaggtatctgtgtcatgagggcagacctctcatggtttggtgctgtcctcataacagtgagtgaggtcacatgagctctggttgtttgaaggtgtgtggcatcgcccctctctctctcccttgctcctgctatcaccatctgatgtgcctacccccgctttgccttctgccatg

SEQ ID NO: 335198 - DNA, 330 bp, Homo sapiens
ttgtacttgtgcctgattgtataaaaatgaatgatgtagttctcgtcaaaagattaaaatataatgagcaaatgcaggattcaagatatatactaagtccataagaacacaaaagacaggcaccccaaccggcatctgcatttcagaatggtttctgcctttgagtcctgtatttggcaacagcaccttatgattttcttctttgttaaacagaatcctagggtgatgcatgatctgtgctgctatatcccatgcacaccagaatttcctcatataaaatgggggccatacataattttatgagctttcaagaggtaaagctgccagcac

SEQ ID NO: 335199 - DNA, 373 bp, Homo sapiens
gcccaggcttgacaggagcaaaagggtggtcaaataatataactaggcatcaagacatttaacagaaataaaggttaaaatgttatgaaaatgaaagactgaatttataaggaagacttaacaatcctaaatgtgtacacatgacagcttcaaaatactttaagcaaaaactgctcaagtagacagatctagaattacagctggagattttaacataactctcaatacattgtaggatgagtaaaaaatcagtaaggacacagaagatgtgcatagtcacaagctccaccagttgatctaactgacatctaaagaacactgaaccaccgggcaccacggctcacgcccgtaatcccagcactttgggaggccg

SEQ ID NO: 335200 - DNA, 243 bp, Homo sapiens
ctgcccagcactaagtgcacagaaagcttcttcctgactcatggtttttacatttgaaaaagggagattaaggtggacaactagcttccccaccaacttgggttccttggcaggagacctgtccctgcttcaaaccaaagaaagcatggcaagtgcctgaagggtgaaatatgcctgaggacagacagagacaaaggtggaaggtgggactatcattcccagctctgaaagctctgctctata

SEQ ID NO: 335201 - DNA, 318 bp, Homo sapiens
acttctcagaggatcccagtgtcatgaatacagggaagctctggcatctgaatgcattaaccttctgattaatgtcttagggaaactgagcttgcaaggttcctatcaaacttctttatttttctttttagttgactgatgggaaaggtgttggatacttagaaacagtttgacttctgaaacaaaaatatttagagctacttaagttgatccatgttagctctgggtggtcaactcacttagcaaaacttaacgctgatgatgaagcttctaaaatgttttcgtaggagctctggtgtaagtgtatacatgaacacg

SEQ ID NO: 335202 - DNA, 523 bp, Homo sapiens
ctccagcctgaacgacaaagcgagtcttttttcccccaaaaaaaaaaaaaaaaaaaaaaaaaaaaaaaaaaaaaaaaaaagcagctgaggacctagaaaccggcttttagaattgtttcccaactaggagtccataggccgtgagtgaggctcagggtctttgggtaaagggccgccgtggaagggctttctcactgggcgttgtggtctccagcctggctgctcaggggtgtttggttctgtttattctttagtctttgttcctgaaagttggccttgccagatgaatgacctggtaacttttgaagggactgttatttctgtgtgcaatggcgaggggaggttgagaagccgacaaggaagtcaagaagcttggggcggaggggggtcttcagatggctccagggtggccacacggacgaggctgcagaccagctgagttgtgtatcagggtagaactaggcccctagagtgacacagcacctggctcacttagaggagagttttctaacagccaagaggg

SEQ ID NO: 335203 - DNA, 399 bp, Homo sapiens
ttagggagcagctgtggaaggccagctgaaattttgagggccagaacccaggtagttgctaggcagcttgggaggaagttggtttcaggatatgtttaggaaagtagaatttcataactgatcaagagagtgggaagaggaggagtctaggttaatggtcaggttctggcttggctgcctaagtaggtgatgggtgtagtaactaagacaggaaatttagaaagcagacagtgttgggattaaagaggatgtgcttgaccctgcagaagttgagctggaggcacattcaggtgaagatacctagcagcactctgtggcactcatttggagacatggccatggatgagatctcctaagaagaatgtatatggaagaggaagagaagctaaggacagaatg

SEQ ID NO: 335204 - DNA, 636 bp, Homo sapiens
aaacagcttgaagttatttcatttcactgaggttgtacagggttcctgaaactgtcctgtttcaggagctgccagataacctgatcctagagtgaaactcacttggcattcagattttgtctatgttgatatacctcaacagtttaagattcttttttaacttacatggctccatgaaagagggatgtgatgtttcagtgttcagttttggtagctattaattatcccttgtagccttccacttagaagtgatactttcagattgaacattgtttcttaagttttttcctttccacccctctctcttcttcttcagaaataaagctctgcatgtgtgttggtgtgttttaagtataatttttaatctgtttgtggaaccacagaaatggatccaagaggtaggtaaggtcttaaattgaatttgatgttaaataagctggcctttgacccataggcaatgagtgaggagcaccgttgggtgtaagactagaagcagaaatactaggcattttagaggccaggtgaagggtgaataaggacatttaggtcaattgaaataaaaagaaaaagacagatgtgaaatgtagaaggacttaattatggtaggaacttagtgatttggagcctggcagcctg

SEQ ID NO: 335205 - DNA, 565 bp, Homo sapiens
tggtgcgatctcggctcactgcaacctccgcctcctgggttcaagcgattcccctgcctcagcctcccaagtagctgggattacaagcgcacaccaccatgcctggctaattttttgtatttcagtagagacggggtttcaccatgttggccaggatggtcttgatctcctgacctggtgatccgcccaccttggcctcccaaagtgctgggattacaggcgagaataataatttttaaaagcatgtgcagtgggaagaatggctcagaaaatctgcagctacaggtcttaagcttactggaaatctctgatcaacctggttaagtacagacaagcttaatggaataagaatcacggaaataatagttgaagctaacaagaaatatgtgcataatttacattgtacatacttggaatgtttaagaaattttgaccagttagaatgacacacttatacatcctattttaaataaatgattatttgacttagaattttaattgagtcttaattttacacagaatattggaatgtctaagacagctttagatttattatgtttgaagg

SEQ ID NO: 335206 - DNA, 265 bp, Homo sapiens
aaccactttcttctccttctaaaacccctttcctagccttcccactacacccatgcattcccttctctgtctctttccctatcttcactgcctcctctcatatattttctacaagctatctttctccttgggcatcgtaatgtcagtattcaccaaagtctcagctgctttttctctttacactttctctcctcttgctccttaaccccttgaacttcaactagatctctatacaggtgatttcctcttgttttcaccactccag

SEQ ID NO: 335207 - DNA, 845 bp, Homo sapiens
tttctcctaagtcccttatccggcagctggatgagacttccaaacctgacagatgtcagccgagccgggcctggggctcctttctccagccagcaatgatgtccagaagaatattcaggacttaacggctccaggattttaacaaaagcaagactgttgctcaaatctattcagacaagcaacaggttttataatttttttattactgattttgttatttttatatcagcctgagtctcctgtgcccacatcccaggcttcaccctgaatggttccatgcctgagggtggagactaagccctgtcgagacacttgccttcttcacccagctaatctgtagggctggacctatgtcctaaggacacactaatcgaactatgaactacaaagcttctatcccaggaggtggctatggccacccgttctgctggcctggatctccccactctaggggtcaggctccattaggatttgccccttcccatctcttcctacccaaccactcaaattaatctttctttacctgagaccagttgggagcactggagtgcagggaggagaggggaagggccagtctgggctgccgggttctagtctcctttgcactgagggccacactattaccatgagaagagggcctgtgggagcctgcaaactcactgctcaagaagacatggagactcctgccctgttgtgtatagatgcaagatatttatatatatttttggttgtcaatattaaatacagacactaagttatagtatatctggacaagccaacttgtaaatacaccacctcactcctgttacttacctaaacagatataaatggctggtttttagaaa

SEQ ID NO: 335208 - DNA, 1116 bp, Homo sapiens
  misc_feature (1013)..(1013): n is a, c, g, or t
  misc_feature (1059)..(1059): n is a, c, g, or t
  misc_feature (1066)..(1066): n is a, c, g, or t
  misc_feature (1068)..(1068): n is a, c, g, or t
  misc_feature (1070)..(1070): n is a, c, g, or t
  misc_feature (1078)..(1078): n is a, c, g, or t
  misc_feature (1081)..(1082): n is a, c, g, or t
tcttctctaccttgtcccaggtcttccaggatgggtgtctcctttgagaagcaggactgcttttataagagcgtttatgagccggctcgcctcacggctcgcctcacgtctcgcctcacggctcgcctcacgtctcccctgcctcgcctcacgtctcgcctgcctcgcctcacgtctcgcctgccccgtctgctggcaacagcgagcgtgccggtcgctagtcgcgggtccccgagtgagcacgccagggagcaggagaccaaacgacgggggtcggagtcagagtcgcagtgggagtccccggaccggagcacgagcctgagcgggagagcgccgctcgcacgcccgtcgccacccgcgtacccggcgcagccagagccaccagcgcagcgctgccatggagcccagcagcaagaagctgacgggtcgcctcatgctggccgtgggaggagcagtgcttggctccctgcagtttggctacaacactggagtcatcaatgccccccagaaggtgatcgaggagttctacaaccagacatgggtccaccgctatggggagagcatcctgcccaccacgctcaccacgctctggtccctctcagtggccatcttttctgttgggggcatgattggctccttctctgtgggccttttcgttaaccgctttggccggcggaattcaatgctgatgatgaacctgctggccttcgtgtccgccgtgctcatgggcttctcgaaactgggcaagtcctttgagatgctgatcctgggccgcttcatcatcggtgtgtactgcggcctgaccacaggcttcgtgcccatgtatgtgggtgaagtgtcacccacagcccttcgtggggccctgggcaccctgcaccagctgggcatcgtcgtcggcatcctcatcgcccaggtgttcggcctggactccatcatgggcaacaaggacctgtggcccctgctgctgagcatcatcttcatccagcctgtgatgattgggtgcctttgccganagtcccgttctgtataaccgaaggaccggcaagtgtaaaattgggnactgttncntnctggaatnganntgatattggaaaagccccggggggccgaggacat

SEQ ID NO: 335209 - DNA, 551 bp, Homo sapiens
tggtaatcaataccactttctgtgggttgtcggtgaaactaggtggaatgttggcatgagtttatagctcatgaggaattctgtttcgaggtattgccccaactcagagttgcaacacacacaaaatgaaccacgttctttgtatgggcccaatgagctgtcaagctgccctgtgttcatttcatttggaattgccccctctggttcctctgtatactactgcttcatctctaaagacagctcatcctcctccttcacccctgaatttccagagcacttcatctgctccttcatcacaagtccagttttctgccactagtctgaatttcatgagaagatgccgatttggttcctgtgggtcctcagcactattcagtacagtgcttgatgcacagcaggcactcagaaaatactggaggaaataaaacaccaaagatatttgtctctagaggctcagctgacaaaatctgggagaagtttgcttttgtaactacaggcaggcttttttctccctgacatgaagagggagcagagaaggtcctgtagagaaa

SEQ ID NO: 335210 - DNA, 780 bp, Homo sapiens
tagtagagatagggtttcaccatgttggtctggctggtctcgaactcctgatctccagtgatctgcttgccttgatctcccaaagtgctgggattacaggcgtgagccaccacacctggtcttgtacctctctgttctatgcctgaacttccaccactgatcacttgccatcatcccagcaagtcacactgagcctgtgaaaccacagggcactggaaaccacacgttaggggaagtgggagagttggcggggctctcagatgaactccaaccccttgtttctcgcctggggaaagtgaggcccacaaaaatagagggacttggctcaagaacatgcagtgaatctgtggcagagccaggccctggccctctcttagggaggggtgcaaggggaaaggaaaaggaagactgggtcctggcccctggcttgctcacccaggctgcatctccccctgcaggtgatcgaggagttctacaaccagacatgggtccaccgctatggggagagcatcctgcccaccacgctcaccacgctctggtccctctcagtggccatcttttctgttgggggcatgattggctccttctctgtgggccttttcgttaaccgctttggccggtaagtaggagaggtcctggcactgcccttggagggcccatgccctcctgcccagggagtcccagatggggtgggaggtaggggagacttatctgcctgttccagggtattacctctgacccagcccctcggagcccaaggaatgtgggcactggcctgac

SEQ ID NO: 335211 - DNA, 793 bp, Homo sapiens
tcctgccctgtgaacagcaggaagggtagggcaaggtgggatcacatctccaatgtgacaaacgaagctgttgccattttgctgacaagcaaatggaggataggggagaggtggtacatgggggacttagcctgctggaattcacagagcaaacaggcagatgggctggaatcagaagccagcggcttcagctccaaatccagggtgcttctcctatctatatctgtgctattcctaccaagtaatttgggccccctcgcataggagggctggttcctgggcctcccagtcagagagtctagaaccaccagaccctaggcatggctccaccagggaaatgagacccccaagaatccaaagcctctccctctctgagacctggctacagagagagaagatcatacttcccctctctccccaggaaatggcccggccagcccagtatcttgaagtcagctaggctggtttgggcacctaaggtcaggaattggccaagtttcctgggagaaagactggtgtggtgccaagagtcaggcaagatatctgaacacagaaacttgccagtccaggccctgccctgtagtaacctgctcccagacacgcctataacagtgtggtttgtttctccgcaaagctgacgggtcgcctcatgctggccgtgggaggagcagtgcttggctccctgcagtttggctacaacactggagtcatcaatgccccccagaaggtgagtactgtgccatcgttggcttatggacaccagcctgctctgttgcacatcacacatgcccac

SEQ ID NO: 335212 - DNA, 684 bp, Homo sapiens
tcctgccctgtgaacagcaggaagggtagggcaaggtgggatcacatctccaatgtgacaaacgaagctgttgccattttgctgacaagcaaatggaggataggggagaggtggtacatgggggacttagcctgctggaattcacagagcaaacaggcagatgggctggaatcagaagccagcggcttcagctccaaatccagggtgcttctcctatctatatctgtgctattcctaccaagtaatttgggccccctcgcataggagggctggttcctgggcctcccagtcagagagtctagaaccaccagaccctaggcatggctccaccagggaaatgagacccccaagaatccaaagcctctccctctctgagacctggctacagagagagaagatcatacttcccctctctccccaggaaatggcccggccagcccagtatcttgaagtcagctaggctggtttgggcacctaaggtcaggaattggccaagtttcctgggagaaagactggtgtggtgccaagagtcaggcaagatatctgaacacagaaacttgccagtccaggccctgccctgtagtaacctgctcccagacacgcctataacagtgtggtttgtttctccgcacaaaaaataatctcttataaatacacattttggccgctttggccaattcgatt

SEQ ID NO: 335213 - DNA, 2630 bp, Homo sapiens
agccaatggccggggtcctataaacgctacggtccgcgcgctctctggcaagaggcaagaggtagcaacagcgagcgtgccggtcgctagtcgcgggtccccgagtgagcacgccagggagcaggagaccaaacgacgggggtcggagtcagagtcgcagtgggagtccccggaccggagcacgagcctgagcgggagagcgccgctcgcacgcccgtcgccacccgcgtacccggcgcagccagagccaccagcgcagcgctgccatggagcccagcagcaagaagctgacgggtcgcctcatgctggccgtgggaggagcagtgcttggctccctgcagtttggctacaacactggagtcatcaatgccccccagaaggtgatcgaggagttctacaaccagacatgggtccaccgctatggggagagcatcctgcccaccacgctcaccacgctctggtccctctcagtggccatcttttctgttgggggcatgattggctccttctctgtgggccttttcgttaaccgctttggccggcggaattcaatgctgatgatgaacctgctggccttcgtgtccgccgtgctcatgggcttctcgaaactgggcaagtcctttgagatgctgatcctgggccgcttcatcatcggtgtgtactgcggcctgaccacaggcttcgtgcccatgtatgtgggtgaagtgtcacccacagcccttcgtggggccctgggcaccctgcaccagctgggcatcgtcgtcggcatcctcatcgcccaggtgttcggcctggactccatcatgggcaacaaggacctgtggcccctgctgctgagcatcatcttcatcccggccctgctgcagtgcatcgtgctgcccttctgccccgagagtccccgcttcctgctcatcaaccgcaacgaggagaaccgggccaagagtgtgctaaagaagctgcgcgggacagctgacgtgacccatgacctgcaggagatgaaggaagagagtcggcagatgatgcgggagaagaaggtcaccatcctggagctgttccgctcccccgcctaccgccagcccatcctcatcgctgtggtgctgcagctgtcccagcagctgtctggcatcaacgctgtcttctattactccacgagcatcttcgagaaggcgggggtgcagcagcctgtgtatgccaccattggctccggtatcgtcaacacggccttcactgtcgtgtcgctgtttgtggtggagcgagcaggccggcggaccctgcacctcataggcctcgctggcatggcgggttgtgccatactcatgaccatcgcgctagcactgctggagcagctaccctggatgtcctatctgagcatcgtggccatctttggctttgtggccttctttgaagtgggtcctggccccatcccatggttcatcgtggctgaactcttcagccagggtccacgtccagctgccattgccgttgcaggcttctccaactggacctcaaatttcattgtgggcatgtgcttccagtatgtggagcaactgtgtggtccctacgtcttcatcatcttcactgtgctcctggttctgttcttcatcttcacctacttcaaagttcctgagactaaaggccggaccttcgatgagatcgcttccggcttccggcaggggggagccagccaaagtgacaagacacccgaggagctgttccatcccctgggggctgattcccaagtgtgagtcgccccagatcaccagcccggcctgctcccagcagccctaaggatctctcaggagcacaggcagctggatgagacttccaaacctgacagatgtcagccgagccgggcctggggctcctttctccagccagcaatgatgtccagaagaatattcaggacttaacggctccaggattttaacaaaagcaagactgttgctcaaatctattcagacaagcaacaggttttataatttttttattactgattttgttatttttatatcagcctgagtctcctgtgcccacatcccaggcttcaccctgaatggttccatgcctgagggtggagactaagccctgtcgagacacttgccttcttcacccagctaatctgtagggctggacctatgtcctaaggacacactaatcgaactatgaactacaaagcttctatcccaggaggtggctatggccacccgttctgctggcctggatctccccactctaggggtcaggctccattaggatttgccccttcccatctcttcctacccaaccactcaaattaatctttctttacctgagaccagttgggagcactggagtgcagggaggagaggggaagggccagtctgggctgccgggttctagtctcctttgcactgagggccacactattaccatgagaagagggcctgtgggagcctgcaaactcactgctcaagaagacatggagactcctgccctgttgtgtatagatgcaagatatttatatatatttttggttgtcaatattaaatacagacactaagttatagtatatctggacaagccaacttgtaaatacaccacctcactcctgttacttacctaaacagatataaatggctggtttttagaaa

SEQ ID NO: 335214 - DNA, 3518 bp, Homo sapiens
agccaatggccggggtcctataaacgctacggtccgcgcgctctctggcaagaggcaagaggtagcaacagcgagcgtgccggtcgctagtcgcgggtccccgagtgagcacgccagggagcaggagaccaaacgacgggggtcggagtcagagtcgcagtgggagtccccggaccggagcacgagcctgagcgggagagcgccgctcgcacgcccgtcgccacccgcgtacccggcgcagccagagccaccagcgcagcgctgccatggagcccagcagcaagaagctgacgggtcgcctcatgctggccgtgggaggagcagtgcttggctccctgcagtttggctacaacactggagtcatcaatgccccccagaaggtgatcgaggagttctacaaccagacatgggtccaccgctatggggagagcatcctgcccaccacgctcaccacgctctggtccctctcagtggccatcttttctgttgggggcatgattggctccttctctgtgggccttttcgttaaccgctttggccggcggaattcaatgctgatgatgaacctgctggccttcgtgtccgccgtgctcatgggcttctcgaaactgggcaagtcctttgagatgctgatcctgggccgcttcatcatcggtgtgtactgcggcctgaccacaggcttcgtgcccatgtatgtgggtgaagtgtcacccacagcccttcgtggggccctgggcaccctgcaccagctgggcatcgtcgtcggcatcctcatcgcccaggtgttcggcctggactccatcatgggcaacaaggacctgtggcccctgctgctgagcatcatcttcatcccggccctgctgcagtgcatcgtgctgcccttctgccccgagagtccccgcttcctgctcatcaaccgcaacgaggagaaccgggccaagagtgtgctaaagaagctgcgcgggacagctgacgtgacccatgacctgcaggagatgaaggaagagagtcggcagatgatgcgggagaagaaggtcaccatcctggagctgttccgctcccccgcctaccgccagcccatcctcatcgctgtggtgctgcagctgtcccagcagctgtctggcatcaacgctgtcttctattactccacgagcatcttcgagaaggcgggggtgcagcagcctgtgtatgccaccattggctccggtatcgtcaacacggccttcactgtcgtgtcgctgtttgtggtggagcgagcaggccggcggaccctgcacctcataggcctcgctggcatggcgggttgtgccatactcatgaccatcgcgctagcactgctggagcagctaccctggatgtcctatctgagcatcgtggccatctttggctttgtggccttctttgaagtgggtcctggccccatcccatggttcatcgtggctgaactcttcagccagggtccacgtccagctgccattgccgttgcaggcttctccaactggacctcaaatttcattgtgggcatgtgcttccagtatgtggagcaactgtgtggtccctacgtcttcatcatcttcactgtgctcctggttctgttcttcatcttcacctacttcaaagttcctgagactaaaggccggaccttcgatgagatcgcttccggcttccggcaggggggagccagccaaagtgacaagacacccgaggagctgttccatcccctgggggctgattcccaagtgtgagtcgccccagatcaccagcccggcctgctcccagcagccctaaggatctctcaggagcacaggcagctggatgagacttccaaacctgacagatgtcagccgagccgggcctggggctcctttctccagccagcaatgatgtccagaagaatattcaggacttaacggctccaggattttaacaaaagcaagactgttgctcaaatctattcagacaagcaacaggttttataatttttttattactgattttgttatttttatatcagcctgagtctcctgtgcccacatcccaggcttcaccctgaatggttccatgcctgagggtggagactaagccctgtcgagacacttgccttcttcacccagctaatctgtagggctggacctatgtcctaaggacacactaatcgaactatgaactacaaagcttctatcccaggaggtggctatggccacccgttctgctggcctggatctccccactctaggggtcaggctccattaggatttgccccttcccatctcttcctacccaaccactcaaattaatctttctttacctgagaccagttgggagcactggagtgcagggaggagaggggaagggccagtctgggctgccgggttctagtctcctttgcactgagggccacactattaccatgagaagagggcctgtgggagcctgcaaactcactgctcaagaagacatggagactcctgccctgttgtgtatagatgcaagatatttatatatatttttggttgtcaatattaaatacagacactaagttatagtatatctggacaagccaacttgtaaatacaccacctcactcctgttacttacctaaacagatataaatggctggtttttagaaacatggttttgaaatgcttgtggattgagggtaggaggtttggatgggagtgagacagaagtaagtggggttgcaaccactgcaacggcttagacttcgactcaggatccagtcccttacacgtacctctcatcagtgtcctcttgctcaaaaatctgtttgatccctgttacccagagaatatatacattctttatcttgacattcaaggcatttctatcacatatttgatagttggtgttcaaaaaaacactagttttgtgccagccgtgatgctcaggcttgaaatgcattattttgaatgtgaagtaaatactgtacctttatttgacaggctcaaagaggttatgtgcctgaagtcgcacagtgaataagctaaaacacctgcttttaacaatggtaccatacaaccactactccattaactccacccacctcctgcacccctccccacacacacaaaatgaaccacgttctttgtatgggcccaatgagctgtcaagctgccctgtgttcatttcatttggaattgccccctctggttcctctgtatactactgcttcatctctaaagacagctcatcctcctccttcacccctgaatttccagagcacttcatctgctccttcatcacaagtccagttttctgccactagtctgaatttcatgagaagatgccgatttggttcctgtgggtcctcagcactattcagtacagtgcttgatgcacagcaggcactcagaaaatactggaggaaataaaacaccaaagatatttgtctctagaggctcagctgacaaaatctgggagaagtttgcttttgtaactacaggcaggcttttttctccctgacatgaagagggagcagagaaggtcctgtagagaaa

SEQ ID NO: 335215 - DNA, 3249 bp, Homo sapiens
  misc_feature (3249)..(3249): n is a, c, g, or t
agccaatggccggggtcctataaacgctacggtccgcgcgctctctggcaagaggcaagaggtagcaacagcgagcgtgccggtcgctagtcgcgggtccccgagtgagcacgccagggagcaggagaccaaacgacgggggtcggagtcagagtcgcagtgggagtccccggaccggagcacgagcctgagcgggagagcgccgctcgcacgcccgtcgccacccgcgtacccggcgcagccagagccaccagcgcagcgctgccatggagcccagcagcaagaagctgacgggtcgcctcatgctggccgtgggaggagcagtgcttggctccctgcagtttggctacaacactggagtcatcaatgccccccagaaggtgatcgaggagttctacaaccagacatgggtccaccgctatggggagagcatcctgcccaccacgctcaccacgctctggtccctctcagtggccatcttttctgttgggggcatgattggctccttctctgtgggccttttcgttaaccgctttggccggcggaattcaatgctgatgatgaacctgctggccttcgtgtccgccgtgctcatgggcttctcgaaactgggcaagtcctttgagatgctgatcctgggccgcttcatcatcggtgtgtactgcggcctgaccacaggcttcgtgcccatgtatgtgggtgaagtgtcacccacagcccttcgtggggccctgggcaccctgcaccagctgggcatcgtcgtcggcatcctcatcgcccaggtgttcggcctggactccatcatgggcaacaaggacctgtggcccctgctgctgagcatcatcttcatcccggccctgctgcagtgcatcgtgctgcccttctgccccgagagtccccgcttcctgctcatcaaccgcaacgaggagaaccgggccaagagtgtgctaaagaagctgcgcgggacagctgacgtgacccatgacctgcaggagatgaaggaagagagtcggcagatgatgcgggagaagaaggtcaccatcctggagctgttccgctcccccgcctaccgccagcccatcctcatcgctgtggtgctgcagctgtcccagcagctgtctggcatcaacgctgtcttctattactccacgagcatcttcgagaaggcgggggtgcagcagcctgtgtatgccaccattggctccggtatcgtcaacacggccttcactgtcgtgtcgctgtttgtggtggagcgagcaggccggcggaccctgcacctcataggcctcgctggcatggcgggttgtgccatactcatgaccatcgcgctagcactgctggagcagctaccctggatgtcctatctgagcatcgtggccatctttggctttgtggccttctttgaagtgggtcctggccccatcccatggttcatcgtggctgaactcttcagccagggtccacgtccagctgccattgccgttgcaggcttctccaactggacctcaaatttcattgtgggcatgtgcttccagtatgtggagcaactgtgtggtccctacgtcttcatcatcttcactgtgctcctggttctgttcttcatcttcacctacttcaaagttcctgagactaaaggccggaccttcgatgagatcgcttccggcttccggcaggggggagccagccaaagtgacaagacacccgaggagctgttccatcccctgggggctgattcccaagtgtgagtcgccccagatcaccagcccggcctgctcccagcagccctaaggatctctcaggagcacaggcagctggatgagacttccaaacctgacagatgtcagccgagccgggcctggggctcctttctccagccagcaatgatgtccagaagaatattcaggacttaacggctccaggattttaacaaaagcaagactgttgctcaaatctattcagacaagcaacaggttttataatttttttattactgattttgttatttttatatcagcctgagtctcctgtgcccacatcccaggcttcaccctgaatggttccatgcctgagggtggagactaagccctgtcgagacacttgccttcttcacccagctaatctgtagggctggacctatgtcctaaggacacactaatcgaactatgaactacaaagcttctatcccaggaggtggctatggccacccgttctgctggcctggatctccccactctaggggtcaggctccattaggatttgccccttcccatctcttcctacccaaccactcaaattaatctttctttacctgagaccagttgggagcactggagtgcagggaggagaggggaagggccagtctgggctgccgggttctagtctcctttgcactgagggccacactattaccatgagaagagggcctgtgggagcctgcaaactcactgctcaagaagacatggagactcctgccctgttgtgtatagatgcaagatatttatatatatttttggttgtcaatattaaatacagacactaagttatagtatatctggacaagccaacttgtaaatacaccacctcactcctgttacttacctaaacagatataaatggctggtttttagaaaaaaaaaaaaaaaaaaaaaaaaaaaaaaaaaaaaaaaaaaaaaaaaaaaaaaaaaaaaaaaaaaaaaaaaaaaaaaaaaaaaaagggggggcccgctacaaaagatactaccctcgagggggcgcggaccagaatagtgagcgggcgcccccccggtttttttttgttaggaagagagggcgcgcccccatatagagggtggcggatctatataatatgtaaacgagcaagaggcgacgcgggcgactcagtttaataaaacaacggtgtcggtggaggaggaaaacaaaggtgcgaggtagcaggaggagctatttgggaggagaagacacccccctactatcgtcggggggggaggagagaacaatcgtgggggaacccaccaccctaccaccaagaagattatattatacacgccccctcgcgagaggggaaatataaacacaacgttgtcgaacagccgtgttatgtgggtgggcggtggaaacaaaaccacgtaaggatatattactgtcgtgcgtgcgcgagagaaaaatagcttgtgcgtaccacggacagtgtagattcatcagagaacaaaatcttttccccgggggcgcgttcatgaataaatagagagn

SEQ ID NO: 335216 - DNA, 2548 bp, Homo sapiens
agccaatggccggggtcctataaacgctacggtccgcgcgctctctggcaagaggcaagaggtagcaacagcgagcgtgccggtcgctagtcgcgggtccccgagtgagcacgccagggagcaggagaccaaacgacgggggtcggagtcagagtcgcagtgggagtccccggaccggagcacgagcctgagcgggagagcgccgctcgcacgcccgtcgccacccgcgtacccggcgcagccagagccaccagcgcagcgctgccatggagcccagcagcaagaagctgacgggtcgcctcatgctggccgtgggaggagcagtgcttggctccctgcagtttggctacaacactggagtcatcaatgccccccagaaggtgatcgaggagttctacaaccagacatgggtccaccgctatggggagagcatcctgcccaccacgctcaccacgctctggtccctctcagtggccatcttttctgttgggggcatgattggctccttctctgtgggccttttcgttaaccgctttggccggcggaattcaatgctgatgatgaacctgctggccttcgtgtccgccgtgctcatgggcttctcgaaactgggcaagtcctttgagatgctgatcctgggccgcttcatcatcggtgtgtactgcggcctgaccacaggcttcgtgcccatgtatgtgggtgaagtgtcacccacagcccttcgtggggccctgggcaccctgcaccagctgggcatcgtcgtcggcatcctcatcgcccaggtgttcggcctggactccatcatgggcaacaaggacctgtggcccctgctgctgagcatcatcttcatcccggccctgctgcagtgcatcgtgctgcccttctgccccgagagtccccgcttcctgctcatcaaccgcaacgaggagaaccgggccaagagtgtgctaaagaagctgcgcgggacagctgacgtgacccatgacctgcaggagatgaaggaagagagtcggcagatgatgcgggagaagaaggtcaccatcctggagctgttccgctcccccgcctaccgccagcccatcctcatcgctgtggtgctgcagctgtcccagcagctgtctggcatcaacgctgtcttctattactccacgagcatcttcgagaaggcgggggtgcagcagcctgtgtatgccaccattggctccggtatcgtcaacacggccttcactgtcgtgtcgctgtttgtggtggagcgagcaggccggcggaccctgcacctcataggcctcgctggcatggcgggttgtgccatactcatgaccatcgcgctagcactgctggagcagctaccctggatgtcctatctgagcatcgtggccatctttggctttgtggccttctttgaagtgggtcctggccccatcccatggttcatcgtggctgaactcttcagccagggtccacgtccagctgccattgccgttgcaggcttctccaactggacctcaaatttcattgtgggcatgtgcttccagtatgtggagcaactgtgtggtccctacgtcttcatcatcttcactgtgctcctggttctgttcttcatcttcacctacttcaaagttcctgagactaaaggccggaccttcgatgagatcgcttccggcttccggcaggggggagccagccaaagtgacaagacacccgaggagctgttccatcccctgggggctgattcccaagtgtgagtcgccccagatcaccagcccggcctgctcccagcagccctaaggatctctcaggagcacaggcagctggatgagacttccaaacctgacagatgtcagccgagccgggcctggggctcctttctccagccagcaatgatgtccagaagaatattcaggacttaacggctccaggattttaacaaaagcaagactgttgctcaaatctattcagacaagcaacaggttttataatttttttattactgattttgttatttttatatcagcctgagtctcctgtgcccacatcccaggcttcaccctgaatggttccatgcctgagggtggagactaagccctgtcgagacacttgccttcttcacccagctaatctgtagggctggacctatgtcctaaggacacactaatcgaactatgaactacaaagcttctatcccaggaggtggctatggccacccgttctgctggcctggatctccccactctaggggtcaggctccattaggatttgccccttcccatctcttcctacccaaccactcaaattaatctttctttacctgagaccagttgggagcactggagtgcagggaggagaggggaagggccagtctgggctgccgggttctagtctcctttgcactgagggccacactattaccatgagaagagggcctgtgggagcctgcaaactcactgctcaagaagacatggagactcctgccctgttgtgtatagatgcaagatatttatatatatttttggttgtcaatattaaatacagacactaagttatagta

SEQ ID NO: 335217 - DNA, 2291 bp, Homo sapiens
agccaatggccggggtcctataaacgctacggtccgcgcgctctctggcaagaggcaagaggtagcaacagcgagcgtgccggtcgctagtcgcgggtccccgagtgagcacgccagggagcaggagaccaaacgacgggggtcggagtcagagtcgcagtgggagtccccggaccggagcacgagcctgagcgggagagcgccgctcgcacgcccgtcgccacccgcgtacccggcgcagccagagccaccagcgcagcgctgccatggagcccagcagcaagaagctgacgggtcgcctcatgctggccgtgggaggagcagtgcttggctccctgcagtttggctacaacactggagtcatcaatgccccccagaaggtgatcgaggagttctacaaccagacatgggtccaccgctatggggagagcatcctgcccaccacgctcaccacgctctggtccctctcagtggccatcttttctgttgggggcatgattggctccttctctgtgggccttttcgttaaccgctttggccggcggaattcaatgctgatgatgaacctgctggccttcgtgtccgccgtgctcatgggcttctcgaaactgggcaagtcctttgagatgctgatcctgggccgcttcatcatcggtgtgtactgcggcctgaccacaggcttcgtgcccatgtatgtgggtgaagtgtcacccacagcccttcgtggggccctgggcaccctgcaccagctgggcatcgtcgtcggcatcctcatcgcccaggtgttcggcctggactccatcatgggcaacaaggacctgtggcccctgctgctgagcatcatcttcatcccggccctgctgcagtgcatcgtgctgcccttctgccccgagagtccccgcttcctgctcatcaaccgcaacgaggagaaccgggccaagagtgtgctaaagaagctgcgcgggacagctgacgtgacccatgacctgcaggagatgaaggaagagagtcggcagatgatgcgggagaagaaggtcaccatcctggagctgttccgctcccccgcctaccgccagcccatcctcatcgctgtggtgctgcagctgtcccagcagctgtctggcatcaacgctgtcttctattactccacgagcatcttcgagaaggcgggggtgcagcagcctgtgtatgccaccattggctccggtatcgtcaacacggccttcactgtcgtgtcgctgtttgtggtggagcgagcaggccggcggaccctgcacctcataggcctcgctggcatggcgggttgtgccatactcatgaccatcgcgctagcactgctggagcagctaccctggatgtcctatctgagcatcgtggccatctttggctttgtggccttctttgaagtgggtcctggccccatcccatggttcatcgtggctgaactcttcagccagggtccacgtccagctgccattgccgttgcaggcttctccaactggacctcaaatttcattgtgggctcctttctccagccagcaatgatgtccagaagaatattcaggacttaacggctccaggattttaacaaaagcaagactgttgctcaaatctattcagacaagcaacaggttttataatttttttattactgattttgttatttttatatcagcctgagtctcctgtgcccacatcccaggcttcaccctgaatggttccatgcctgagggtggagactaagccctgtcgagacacttgccttcttcacccagctaatctgtagggctggacctatgtcctaaggacacactaatcgaactatgaactacaaagcttctatcccaggaggtggctatggccacccgttctgctggcctggatctccccactctaggggtcaggctccattaggatttgccccttcccatctcttcctacccaaccactcaaattaatctttctttacctgagaccagttgggagcactggagtgcagggaggagaggggaagggccagtctgggctgccgggttctagtctcctttgcactgagggccacactattaccatgagaagagggcctgtgggagcctgcaaactcactgctcaagaagacatggagactcctgccctgttgtgtatagatgcaagatatttatatatatttttggttgtcaatattaaatacagacactaagttatagtatatctggacaagccaacttgtaaatacaccacctcactcctgttacttacctaaacagatataaatggctggtttttagaaa

SEQ ID NO: 335218 - DNA, 2977 bp, Homo sapiens
tcctgccctgtgaacagcaggaagggtagggcaaggtgggatcacatctccaatgtgacaaacgaagctgttgccattttgctgacaagcaaatggaggataggggagaggtggtacatgggggacttagcctgctggaattcacagagcaaacaggcagatgggctggaatcagaagccagcggcttcagctccaaatccagggtgcttctcctatctatatctgtgctattcctaccaagtaatttgggccccctcgcataggagggctggttcctgggcctcccagtcagagagtctagaaccaccagaccctaggcatggctccaccagggaaatgagacccccaagaatccaaagcctctccctctctgagacctggctacagagagagaagatcatacttcccctctctccccaggaaatggcccggccagcccagtatcttgaagtcagctaggctggtttgggcacctaaggtcaggaattggccaagtttcctgggagaaagactggtgtggtgccaagagtcaggcaagatatctgaacacagaaacttgccagtccaggccctgccctgtagtaacctgctcccagacacgcctataacagtgtggtttgtttctccgcaaagctgacgggtcgcctcatgctggccgtgggaggagcagtgcttggctccctgcagtttggctacaacactggagtcatcaatgccccccagaaggtgatcgaggagttctacaaccagacatgggtccaccgctatggggagagcatcctgcccaccacgctcaccacgctctggtccctctcagtggccatcttttctgttgggggcatgattggctccttctctgtgggccttttcgttaaccgctttggccggcggaattcaatgctgatgatgaacctgctggccttcgtgtccgccgtgctcatgggcttctcgaaactgggcaagtcctttgagatgctgatcctgggccgcttcatcatcggtgtgtactgcggcctgaccacaggcttcgtgcccatgtatgtgggtgaagtgtcacccacagcccttcgtggggccctgggcaccctgcaccagctgggcatcgtcgtcggcatcctcatcgcccaggtgttcggcctggactccatcatgggcaacaaggacctgtggcccctgctgctgagcatcatcttcatcccggccctgctgcagtgcatcgtgctgcccttctgccccgagagtccccgcttcctgctcatcaaccgcaacgaggagaaccgggccaagagtgtgctaaagaagctgcgcgggacagctgacgtgacccatgacctgcaggagatgaaggaagagagtcggcagatgatgcgggagaagaaggtcaccatcctggagctgttccgctcccccgcctaccgccagcccatcctcatcgctgtggtgctgcagctgtcccagcagctgtctggcatcaacgctgtcttctattactccacgagcatcttcgagaaggcgggggtgcagcagcctgtgtatgccaccattggctccggtatcgtcaacacggccttcactgtcgtgtcgctgtttgtggtggagcgagcaggccggcggaccctgcacctcataggcctcgctggcatggcgggttgtgccatactcatgaccatcgcgctagcactgctggagcagctaccctggatgtcctatctgagcatcgtggccatctttggctttgtggccttctttgaagtgggtcctggccccatcccatggttcatcgtggctgaactcttcagccagggtccacgtccagctgccattgccgttgcaggcttctccaactggacctcaaatttcattgtgggcatgtgcttccagtatgtggagcaactgtgtggtccctacgtcttcatcatcttcactgtgctcctggttctgttcttcatcttcacctacttcaaagttcctgagactaaaggccggaccttcgatgagatcgcttccggcttccggcaggggggagccagccaaagtgacaagacacccgaggagctgttccatcccctgggggctgattcccaagtgtgagtcgccccagatcaccagcccggcctgctcccagcagccctaaggatctctcaggagcacaggcagctggatgagacttccaaacctgacagatgtcagccgagccgggcctggggctcctttctccagccagcaatgatgtccagaagaatattcaggacttaacggctccaggattttaacaaaagcaagactgttgctcaaatctattcagacaagcaacaggttttataatttttttattactgattttgttatttttatatcagcctgagtctcctgtgcccacatcccaggcttcaccctgaatggttccatgcctgagggtggagactaagccctgtcgagacacttgccttcttcacccagctaatctgtagggctggacctatgtcctaaggacacactaatcgaactatgaactacaaagcttctatcccaggaggtggctatggccacccgttctgctggcctggatctccccactctaggggtcaggctccattaggatttgccccttcccatctcttcctacccaaccactcaaattaatctttctttacctgagaccagttgggagcactggagtgcagggaggagaggggaagggccagtctgggctgccgggttctagtctcctttgcactgagggccacactattaccatgagaagagggcctgtgggagcctgcaaactcactgctcaagaagacatggagactcctgccctgttgtgtatagatgcaagatatttatatatatttttggttgtcaatattaaatacagacactaagttatagtatatctggacaagccaacttgtaaatacaccacctcactcctgttacttacctaaacagatataaatggctggtttttagaaa

SEQ ID NO: 335219 - DNA, 2708 bp, Homo sapiens
tagtagagatagggtttcaccatgttggtctggctggtctcgaactcctgatctccagtgatctgcttgccttgatctcccaaagtgctgggattacaggcgtgagccaccacacctggtcttgtacctctctgttctatgcctgaacttccaccactgatcacttgccatcatcccagcaagtcacactgagcctgtgaaaccacagggcactggaaaccacacgttaggggaagtgggagagttggcggggctctcagatgaactccaaccccttgtttctcgcctggggaaagtgaggcccacaaaaatagagggacttggctcaagaacatgcagtgaatctgtggcagagccaggccctggccctctcttagggaggggtgcaaggggaaaggaaaaggaagactgggtcctggcccctggcttgctcacccaggctgcatctccccctgcaggtgatcgaggagttctacaaccagacatgggtccaccgctatggggagagcatcctgcccaccacgctcaccacgctctggtccctctcagtggccatcttttctgttgggggcatgattggctccttctctgtgggccttttcgttaaccgctttggccggcggaattcaatgctgatgatgaacctgctggccttcgtgtccgccgtgctcatgggcttctcgaaactgggcaagtcctttgagatgctgatcctgggccgcttcatcatcggtgtgtactgcggcctgaccacaggcttcgtgcccatgtatgtgggtgaagtgtcacccacagcccttcgtggggccctgggcaccctgcaccagctgggcatcgtcgtcggcatcctcatcgcccaggtgttcggcctggactccatcatgggcaacaaggacctgtggcccctgctgctgagcatcatcttcatcccggccctgctgcagtgcatcgtgctgcccttctgccccgagagtccccgcttcctgctcatcaaccgcaacgaggagaaccgggccaagagtgtgctaaagaagctgcgcgggacagctgacgtgacccatgacctgcaggagatgaaggaagagagtcggcagatgatgcgggagaagaaggtcaccatcctggagctgttccgctcccccgcctaccgccagcccatcctcatcgctgtggtgctgcagctgtcccagcagctgtctggcatcaacgctgtcttctattactccacgagcatcttcgagaaggcgggggtgcagcagcctgtgtatgccaccattggctccggtatcgtcaacacggccttcactgtcgtgtcgctgtttgtggtggagcgagcaggccggcggaccctgcacctcataggcctcgctggcatggcgggttgtgccatactcatgaccatcgcgctagcactgctggagcagctaccctggatgtcctatctgagcatcgtggccatctttggctttgtggccttctttgaagtgggtcctggccccatcccatggttcatcgtggctgaactcttcagccagggtccacgtccagctgccattgccgttgcaggcttctccaactggacctcaaatttcattgtgggcatgtgcttccagtatgtggagcaactgtgtggtccctacgtcttcatcatcttcactgtgctcctggttctgttcttcatcttcacctacttcaaagttcctgagactaaaggccggaccttcgatgagatcgcttccggcttccggcaggggggagccagccaaagtgacaagacacccgaggagctgttccatcccctgggggctgattcccaagtgtgagtcgccccagatcaccagcccggcctgctcccagcagccctaaggatctctcaggagcacaggcagctggatgagacttccaaacctgacagatgtcagccgagccgggcctggggctcctttctccagccagcaatgatgtccagaagaatattcaggacttaacggctccaggattttaacaaaagcaagactgttgctcaaatctattcagacaagcaacaggttttataatttttttattactgattttgttatttttatatcagcctgagtctcctgtgcccacatcccaggcttcaccctgaatggttccatgcctgagggtggagactaagccctgtcgagacacttgccttcttcacccagctaatctgtagggctggacctatgtcctaaggacacactaatcgaactatgaactacaaagcttctatcccaggaggtggctatggccacccgttctgctggcctggatctccccactctaggggtcaggctccattaggatttgccccttcccatctcttcctacccaaccactcaaattaatctttctttacctgagaccagttgggagcactggagtgcagggaggagaggggaagggccagtctgggctgccgggttctagtctcctttgcactgagggccacactattaccatgagaagagggcctgtgggagcctgcaaactcactgctcaagaagacatggagactcctgccctgttgtgtatagatgcaagatatttatatatatttttggttgtcaatattaaatacagacactaagttatagtatatctggacaagccaacttgtaaatacaccacctcactcctgttacttacctaaacagatataaatggctggtttttagaaa

SEQ ID NO: 335220 - DNA, 2149 bp, Homo sapiens
agccaatggccggggtcctataaacgctacggtccgcgcgctctctggcaagaggcaagaggtagcaacagcgagcgtgccggtcgctagtcgcgggtccccgagtgagcacgccagggagcaggagaccaaacgacgggggtcggagtcagagtcgcagtgggagtccccggaccggagcacgagcctgagcgggagagcgccgctcgcacgcccgtcgccacccgcgtacccggcgcagccagagccaccagcgcagcgctgccatggagcccagcagcaagaagctgacgggtcgcctcatgctggccgtgggaggagcagtgcttggctccctgcagtttggctacaacactggagtcatcaatgccccccagaaggtgatcgaggagttctacaaccagacatgggtccaccgctatggggagagcatcctgcccaccacgctcaccacgctctggtccctctcagtggccatcttttctgttgggggcatgattggctccttctctgtgggccttttcgttaaccgctttggccggcggaattcaatgctgatgatgaacctgctggccttcgtgtccgccgtgctcatgggcttctcgaaactgggcaagtcctttgagatgctgatcctgggccgcttcatcatcggtgtgtactgcggcctgaccacaggcttcgtgcccatgtatgtgggtgaagtgtcacccacagcccttcgtggggccctgggcaccctgcaccagctgggcatcgtcgtcggcatcctcatcgcccaggtgttcggcctggactccatcatgggcaacaaggacctgtggcccctgctgctgagcatcatcttcatcccggccctgctgcagtgcatcgtgctgcccttctgccccgagagtccccgcttcctgctcatcaaccgcaacgaggagaaccgggccaagagtgtgctaaagaagctgcgcgggacagctgacgtgacccatgacctgcaggagatgaaggaagagagtcggcagatgatgcgggagaagaaggtcaccatcctggagctgttccgctcccccgcctaccgccagcccatcctcatcgctgtggtgctgcagctgtcccagcagctgtctggcatcaacgctgtcttctattactccacgagcatcttcgagaaggcgggggtgcagcagcctgtgtatgccaccattggctccggtatcgtcaacacggccttcactgtcgtgtcgctgtttgtggtggagcgagcaggccggcggaccctgcacctcataggcctcgctggcatggcgggttgtgccatactcatgaccatcgcgctagcactgctggagcagctaccctggatgtcctatctgagcatcgtggccatctttggctttgtggccttctttgaagtgggtcctggccccatcccatggttcatcgtggctgaactcttcagccagggtccacgtccagctgccattgccgttgcaggcttctccaactggacctcaaatttcattgtgggcatgtgcttccagtatgtggagcaactgtgtggtccctacgtcttcatcatcttcactgtgctcctggttctgttcttcatcctgtcgagacacttgccttcttcacccagctaatctgtagggctggacctatgtcctaaggacacactaatcgaactatgaactacaaagcttctatcccaggaggtggctatggccacccgttctgctggcctggatctccccactctaggggtcaggctccattaggatttgccccttcccatctcttcctacccaaccactcaaattaatctttctttacctgagaccagttgggagcactggagtgcagggaggagaggggaagggccagtctgggctgccgggttctagtctcctttgcactgagggccacactattaccatgagaagagggcctgtgggagcctgcaaactcactgctcaagaagacatggagactcctgccctgttgtgtatagatgcaagatatttatatatatttttggttgtcaatattaaatacagacactaagttatagtatatctggacaagccaacttgtaaatacaccacctcactcctgttacttacctaaacagatataaatggctggtttttagaaa

SEQ ID NO: 335221 - DNA, 1499 bp, Homo sapiens
tggcgactctagacggacccctcagctggaccaaggcgggggtgcagcagcctgtgtatgccaccattggctccggtatcgtcaacacggccttcactgtcgtgtcgctgtttgtggtggagcgagcaggccggcggaccctgcacctcataggcctcgctggcatggcgggttgtgccatactcatgaccatcgcgctagcactgctggagcagctaccctggatgtcctatctgagcatcgtggccatctttggctttgtggccttctttgaagtgggtcctggccccatcccatggttcatcgtggctgaactcttcagccagggtccacgtccagctgccattgccgttgcaggcttctccaactggacctcaaatttcattgtgggcatgtgcttccagtatgtggagcaactgtgtggtccctacgtcttcatcatcttcactgtgctcctggttctgttcttcatcttcacctacttcaaagttcctgagactaaaggccggaccttcgatgagatcgcttccggcttccggcaggggggagccagccaaagtgacaagacacccgaggagctgttccatcccctgggggctgattcccaagtgtgagtcgccccagatcaccagcccggcctgctcccagcagccctaaggatctctcaggagcacaggcagctggatgagacttccaaacctgacagatgtcagccgagccgggcctggggctcctttctccagccagcaatgatgtccagaagaatattcaggacttaacggctccaggattttaacaaaagcaagactgttgctcaaatctattcagacaagcaacaggttttataatttttttattactgattttgttatttttatatcagcctgagtctcctgtgcccacatcccaggcttcaccctgaatggttccatgcctgagggtggagactaagccctgtcgagacacttgccttcttcacccagctaatctgtagggctggacctatgtcctaaggacacactaatcgaactatgaactacaaagcttctatcccaggaggtggctatggccacccgttctgctggcctggatctccccactctaggggtcaggctccattaggatttgccccttcccatctcttcctacccaaccactcaaattaatctttctttacctgagaccagttgggagcactggagtgcagggaggagaggggaagggccagtctgggctgccgggttctagtctcctttgcactgagggccacactattaccatgagaagagggcctgtgggagcctgcaaactcactgctcaagaagacatggagactcctgccctgttgtgtatagatgcaagatatttatatatatttttggttgtcaatattaaatacagacactaagttatagtatatctggacaagccaacttgtaaatacaccacctcactcctgttacttacctaaacagatataaatggctggtttttagaaa

SEQ ID NO: 335222 - DNA, 3524 bp, Homo sapiens
  misc_feature (2003)..(2003): n is a, c, g, or t
  misc_feature (2025)..(2026): n is a, c, g, or t
  misc_feature (2041)..(2041): n is a, c, g, or t
  misc_feature (2043)..(2044): n is a, c, g, or t
  misc_feature (2047)..(2048): n is a, c, g, or t
  misc_feature (2050)..(2050): n is a, c, g, or t
  misc_feature (2059)..(2059): n is a, c, g, or t
  misc_feature (2062)..(2063): n is a, c, g, or t
  misc_feature (2067)..(2068): n is a, c, g, or t
  misc_feature (2074)..(2074): n is a, c, g, or t
  misc_feature (2083)..(2083): n is a, c, g, or t
  misc_feature (2094)..(2095): n is a, c, g, or t
  misc_feature (2100)..(2100): n is a, c, g, or t
  misc_feature (2102)..(2102): n is a, c, g, or t
  misc_feature (2106)..(2106): n is a, c, g, or t
  misc_feature (2109)..(2109): n is a, c, g, or t
  misc_feature (2113)..(2113): n is a, c, g, or t
  misc_feature (2123)..(2125): n is a, c, g, or t
  misc_feature (2136)..(2136): n is a, c, g, or t
  misc_feature (2147)..(2148): n is a, c, g, or t
  misc_feature (2152)..(2152): n is a, c, g, or t
  misc_feature (2156)..(2156): n is a, c, g, or t
  misc_feature (2163)..(2163): n is a, c, g, or t
  misc_feature (2165)..(2165): n is a, c, g, or t
  misc_feature (2172)..(2172): n is a, c, g, or t
  misc_feature (2174)..(2174): n is a, c, g, or t
  misc_feature (2181)..(2182): n is a, c, g, or t
  misc_feature (2184)..(2184): n is a, c, g, or t
  misc_feature (2186)..(2186): n is a, c, g, or t
  misc_feature (2196)..(2198): n is a, c, g, or t
  misc_feature (2203)..(2204): n is a, c, g, or t
  misc_feature (2211)..(2213): n is a, c, g, or t
  misc_feature (2216)..(2216): n is a, c, g, or t
  misc_feature (2218)..(2218): n is a, c, g, or t
  misc_feature (2220)..(2221): n is a, c, g, or t
  misc_feature (2223)..(2223): n is a, c, g, or t
  misc_feature (2225)..(2225): n is a, c, g, or t
  misc_feature (2232)..(2234): n is a, c, g, or t
  misc_feature (2237)..(2237): n is a, c, g, or t
agccaatggccggggtcctataaacgctacggtccgcgcgctctctggcaagaggcaagaggtagcaacagcgagcgtgccggtcgctagtcgcgggtccccgagtgagcacgccagggagcaggagaccaaacgacgggggtcggagtcagagtcgcagtgggagtccccggaccggagcacgagcctgagcgggagagcgccgctcgcacgcccgtcgccacccgcgtacccggcgcagccagagccaccagcgcagcgctgccatggagcccagcagcaagaagctgacgggtcgcctcatgctggccgtgggaggagcagtgcttggctccctgcagtttggctacaacactggagtcatcaatgccccccagaaggtgatcgaggagttctacaaccagacatgggtccaccgctatggggagagcatcctgcccaccacgctcaccacgctctggtccctctcagtggccatcttttctgttgggggcatgattggctccttctctgtgggccttttcgttaaccgctttggccggcggaattcaatgctgatgatgaacctgctggccttcgtgtccgccgtgctcatgggcttctcgaaactgggcaagtcctttgagatgctgatcctgggccgcttcatcatcggtgtgtactgcggcctgaccacaggcttcgtgcccatgtatgtgggtgaagtgtcacccacagcccttcgtggggccctgggcaccctgcaccagctgggcatcgtcgtcggcatcctcatcgcccaggtgttcggcctggactccatcatgggcaacaaggacctgtggcccctgctgctgagcatcatcttcatcccggccctgctgcagtgcatcgtgctgcccttctgccccgagagtccccgcttcctgctcatcaaccgcaacgaggagaaccgggccaagagtgtgctaaagaagctgcgcgggacagctgacgtgacccatgacctgcaggagatgaaggaagagagtcggcagatgatgcgggagaagaaggtcaccatcctggagctgttccgctcccccgcctaccgccagcccatcctcatcgctgtggtgctgcagctgtcccagcagctgtctggcatcaacgctgtcttctattactccacgagcatcttcgagaaggcgggggtgcagcagcctgtgtatgccaccattggctccggtatcgtcaacacggccttcactgtcgtgtcgctgtttgtggtggagcgagcaggccggcggaccctgcacctcataggcctcgctggcatggcgggttgtgccatactcatgaccatcgcgctagcactgctggagcagctaccctggatgtcctatctgagcatcgtggccatctttggctttgtggccttctttgaagtgggtcctggccccatcccatggttcatcgtggctgaactcttcagccagggtccacgtccagctgccattgccgttgcaggcttctccaactggacctcaaatttcattgtgggcatgtgcttccagtatgtggagcaactgtgtggtccctacgtcttcatcatcttcactgtgctcctggttctgttcttcatcttcacctacttcaaagttcctgagactaaaggccggaccttcgatgagatcgcttccggcttccggcaggggggagccagccaaagtgacaagacacccgaggagctgttccatcccctgggggctgattcccaagtgtgagtcgccccagatcaccagcccggcctgctcccagcagccctaaggatctctcaggagcacaggcagctggatgagacttccaaacctgacagatgtcagccgagccgggcctggggctcctttctccagccagcaatgatgtccagaagaatattcaggacttaacggctccaggattttaacaaaagcaagactgttgctcaaatctattcagacaagcaacaggttttataatttttgtgtatttattcttttgtntgttgttgtttttgttcaagtnngagaatctcaaaaantnnatnnantaaaaatcntgnntganngcaatntggggcctnaatttcaaatnnacttnanattnaangagnaaaaaacagnnnatctccccatnctaatttttannttcntatntattttntnaatggcntnttttttnntnanataaatcccnnnccatnnctaaaannngtntnanncnangtttttnnntantctaggggtcaggctccattaggatttgccccttcccatctcttcctacccaaccactcaaattaatctttctttacctgagaccagttgggagcactggagtgcagggaggagaggggaagggccagtctgggctgccgggttctagtctcctttgcactgagggccacactattaccatgagaagagggcctgtgggagcctgcaaactcactgctcaagaagacatggagactcctgccctgttgtgtatagatgcaagatatttatatatatttttggttgtcaatattaaatacagacactaagttatagtatatctggacaagccaacttgtaaatacaccacctcactcctgttacttacctaaacagatataaatggctggtttttagaaacatggttttgaaatgcttgtggattgagggtaggaggtttggatgggagtgagacagaagtaagtggggttgcaaccactgcaacggcttagacttcgactcaggatccagtcccttacacgtacctctcatcagtgtcctcttgctcaaaaatctgtttgatccctgttacccagagaatatatacattctttatcttgacattcaaggcatttctatcacatatttgatagttggtgttcaaaaaaacactagttttgtgccagccgtgatgctcaggcttgaaatgcattattttgaatgtgaagtaaatactgtacctttatttgacaggctcaaagaggttatgtgcctgaagtcgcacagtgaataagctaaaacacctgcttttaacaatggtaccatacaaccactactccattaactccacccacctcctgcacccctccccacacacacaaaatgaaccacgttctttgtatgggcccaatgagctgtcaagctgccctgtgttcatttcatttggaattgccccctctggttcctctgtatactactgcttcatctctaaagacagctcatcctcctccttcacccctgaatttccagagcacttcatctgctccttcatcacaagtccagttttctgccactagtctgaatttcatgagaagatgccgatttggttcctgtgggtcctcagcactattcagtacagtgcttgatgcacagcaggcactcagaaaatactggaggaaataaaacaccaaagatatttgtctctagaggctcagctgacaaaatctgggagaagtttgcttttgtaactacaggcaggcttttttctccctgacatgaagagggagcagagaaggtcctgtagagaaa

SEQ ID NO: 335223 - DNA, 1606 bp, Homo sapiens
agccaatggccggggtcctataaacgctacggtccgcgcgctctctggcaagaggcaagaggtagcaacagcgagcgtgccggtcgctagtcgcgggtccccgagtgagcacgccagggagcaggagaccaaacgacgggggtcggagtcagagtcgcagtgggagtccccggaccggagcacgagcctgagcgggagagcgccgctcgcacgcccgtcgccacccgcgtacccggcgcagccagagccaccagcgcagcgctgccatggagcccagcagcaagaagctgacgggtcgcctcatgctggccgtgggaggagcagtgcttggctccctgcagtttggctacaacactggagtcatcaatgccccccagaaggtgatcgaggagttctacaaccagacatgggtccaccgctatggggagagcatcctgcccaccacgctcaccacgctctggtccctctcagtggccatcttttctgttgggggcatgattggctccttctctgtgggccttttcgttaaccgctttggccggcggaattcaatgctgatgatgaacctgctggccttcgtgtccgccgtgctcatgggcttctcgaaactgggcaagtcctttgagatgctgatcctgggccgcttcatcatcggtgtgtactgcggcctgaccacaggcttcgtgcccatgtatgtgggtgaagtgtcacccacagcccttcgtggggccctgggcaccctgcaccagctgggcatcgtcgtcggcatcctcatcgcccagggcagctggatgagacttccaaacctgacagatgtcagccgagccgggcctggggctcctttctccagccagcaatgatgtccagaagaatattcaggacttaacggctccaggattttaacaaaagcaagactgttgctcaaatctattcagacaagcaacaggttttataatttttttattactgattttgttatttttatatcagcctgagtctcctgtgcccacatcccaggcttcaccctgaatggttccatgcctgagggtggagactaagccctgtcgagacacttgccttcttcacccagctaatctgtagggctggacctatgtcctaaggacacactaatcgaactatgaactacaaagcttctatcccaggaggtggctatggccacccgttctgctggcctggatctccccactctaggggtcaggctccattaggatttgccccttcccatctcttcctacccaaccactcaaattaatctttctttacctgagaccagttgggagcactggagtgcagggaggagaggggaagggccagtctgggctgccgggttctagtctcctttgcactgagggccacactattaccatgagaagagggcctgtgggagcctgcaaactcactgctcaagaagacatggagactcctgccctgttgtgtatagatgcaagatatttatatatatttttggttgtcaatattaaatacagacactaagttatagtatatctggacaagccaacttgtaaatacaccacctcactcctgttacttacctaaacagatataaatggctggtttttagaaa

SEQ ID NO: 335224 - DNA, 1870 bp, Homo sapiens
agccaatggccggggtcctataaacgctacggtccgcgcgctctctggcaagaggcaagaggtagcaacagcgagcgtgccggtcgctagtcgcgggtccccgagtgagcacgccagggagcaggagaccaaacgacgggggtcggagtcagagtcgcagtgggagtccccggaccggagcacgagcctgagcgggagagcgccgctcgcacgcccgtcgccacccgcgtacccggcgcagccagagccaccagcgcagcgctgccatggagcccagcagcaagaagctgacgggtcgcctcatgctggccgtgggaggagcagtgcttggctccctgcagtttggctacaacactggagtcatcaatgccccccagaaggtgatcgaggagttctacaaccagacatgggtccaccgctatggggagagcatcctgcccaccacgctcaccacgctctggtccctctcagtggccatcttttctgttgggggcatgattggctccttctctgtgggccttttcgttaaccgctttggccggcggaattcaatgctgatgatgaacctgctggccttcgtgtccgccgtgctcatgggcttctcgaaactgggcaagtcctttgagatgctgatcctgggccgcttcatcatcggtgtgtactgcggcctgaccacaggcttcgtgcccatgtatgtgggtgaagtgtcacccacagcccttcgtggggccctgggcaccctgcaccagctgggcatcgtcgtcggcatcctcatcgcccaggtgttcggcctggactccatcatgggcaacaaggacctgtggcccctgctgctgagcatcatcttcatcccggccctgctgcagtgcatcgtgctgcccttctgccccgagagtccccgcttcctgctcatcaaccgcaacgaggagaaccgggccaagagtgtgctaaagaagctgcgcgggacagctgacgtgacccatgacctgcaggagatgaaggaagagagtcggcagatgatgcgggagaagaaggtcaccatcctggagctgttccgctcccccgcctaccgccagcccatcctcatcgctgtggtgctgcagctgtcccagcagctgtctggcatcaacgctgtcttctattactccacgagcatcttcgagaaggcgggggtgcagcagcctgtgtatgccaccattggctccggtatcgtcaacacggccttcactgtcgtgtcgctgtttgtggtggagcgagcaggccggcggaccctgcacctcataggcctcgctggcatggcgggttgtgccatactcatgaccatcgcgctagcactgctggagcagctaccctggatgtcctatctgagcatcgtggccatctttggctttgtggccttctttgaagtgggtcctggccccatcccatggttcatcgtggctgaactcttcagccagggtccacgtccagctgccattgccgttgcaggcttctccaactggacctcaaatttcattgtgggcatgtgcttccagtatgtggagcaactgtgtggtccctacgtcttcatcatcttcactgtgctcctggttctgttcttcatcttcacctacttcaaagttcctgagactaaaggccggaccttcgatgagatcgcttccggcttccggcaggggggagccagccaaagtgacaagacaccagactcctgccctgttgtgtatagatgcaagatatttatatatatttttggttgtcaatattaaatacagacactaagttatagtatatctggacaagccaacttgtaaatacaccacctcactcctgttacttacctaaacagatataaatggctggtttttagaaa

SEQ ID NO: 335225 - DNA, 1920 bp, Homo sapiens
agccaatggccggggtcctataaacgctacggtccgcgcgctctctggcaagaggcaagaggtagcaacagcgagcgtgccggtcgctagtcgcgggtccccgagtgagcacgccagggagcaggagaccaaacgacgggggtcggagtcagagtcgcagtgggagtccccggaccggagcacgagcctgagcgggagagcgccgctcgcacgcccgtcgccacccgcgtacccggcgcagccagagccaccagcgcagcgctgccatggagcccagcagcaagaagctgacgggtcgcctcatgctggccgtgggaggagcagtgcttggctccctgcagtttggctacaacactggagtcatcaatgccccccagaaggtgatcgaggagttctacaaccagacatgggtccaccgctatggggagagcatcctgcccaccacgctcaccacgctctggtccctctcagtggccatcttttctgttgggggcatgattggctccttctctgtgggccttttcgttaaccgctttggccggcggaattcaatgctgatgatgaacctgctggccttcgtgtccgccgtgctcatgggcttctcgaaactgggcaagtcctttgagatgctgatcctgggccgcttcatcatcggtgtgtactgcggcctgaccacaggcttcgtgcccatgtatgtgggtgaagtgtcacccacagcccttcgtggggccctgggcaccctgcaccagctgggcatcgtcgtcggcatcctcatcgcccaggtgttcggcctggactccatcatgggcaacaaggacctgtggcccctgctgctgagcatcatcttcatcccggccctgctgcagtgcatcgtgctgcccttctgccccgagagtccccgcttcctgctcatcaaccgcaacgaggagaaccgggccaagagtgtgctaaagaagctgcgcgggacagctgacgtgacccatgacctgcaggagatgaaggaagagagtcggcagatgatgcgggagaagaaggtcaccatcctggagctgttccgctcccccgcctaccgccagcccatcctcatcgctgtggtgctgcagctgtcccagcagctgtctggcatcaacgctgtcttctattactccacgagcatcttcgagaaggcgggggtgcagcagcctgtgtatgccaccattggctccggtatcgtcaacacggccttcactgtcgtgtcgctgtttgtggtggagcgagcaggccggcggaccctgcacctcataggcctcgctggcatggcgggttgtgccatactcatgaccatcgcgctagcactgctggagcagctaccctggatgtcctatctgagcatcgtggccatctttggctttgtggccttctttgaagtgggtcctggccccatcccatggttcatcgtggctgaactcttcagccagggtccacgtccagctgccattgccgttgcaggcttctccaactggacctcaaatttcattgtgggcatgtgcttccagtatgtggagcaactgtgtggtccctacgtcttcatcatcttcactgtgctcctggttctgttcttcatcttcacctacttcaaagttcctgagactaaaggccggaccttcgatgagatcgtgccgggttctagtctcctttgcactgagggccacactattaccatgagaagagggcctgtgggagcctgcaaactcactgctcaagaagacatggagactcctgccctgttgtgtatagatgcaagatatttatatatatttttggttgtcaatattaaatacagacactaagttatagtatatctggacaagccaacttgtaaatacaccacctcactcctgttacttacctaaacagatataaatggctggtttttagaaa

SEQ ID NO: 335226 - DNA, 985 bp, Homo sapiens
  misc_feature (882)..(882): n is a, c, g, or t
  misc_feature (928)..(928): n is a, c, g, or t
  misc_feature (935)..(935): n is a, c, g, or t
  misc_feature (937)..(937): n is a, c, g, or t
  misc_feature (939)..(939): n is a, c, g, or t
  misc_feature (947)..(947): n is a, c, g, or t
  misc_feature (950)..(951): n is a, c, g, or t
agccaatggccggggtcctataaacgctacggtccgcgcgctctctggcaagaggcaagaggtagcaacagcgagcgtgccggtcgctagtcgcgggtccccgagtgagcacgccagggagcaggagaccaaacgacgggggtcggagtcagagtcgcagtgggagtccccggaccggagcacgagcctgagcgggagagcgccgctcgcacgcccgtcgccacccgcgtacccggcgcagccagagccaccagcgcagcgctgccatggagcccagcagcaagaagctgacgggtcgcctcatgctggccgtgggaggagcagtgcttggctccctgcagtttggctacaacactggagtcatcaatgccccccagaaggtgatcgaggagttctacaaccagacatgggtccaccgctatggggagagcatcctgcccaccacgctcaccacgctctggtccctctcagtggccatcttttctgttgggggcatgattggctccttctctgtgggccttttcgttaaccgctttggccggcggaattcaatgctgatgatgaacctgctggccttcgtgtccgccgtgctcatgggcttctcgaaactgggcaagtcctttgagatgctgatcctgggccgcttcatcatcggtgtgtactgcggcctgaccacaggcttcgtgcccatgtatgtgggtgaagtgtcacccacagcccttcgtggggccctgggcaccctgcaccagctgggcatcgtcgtcggcatcctcatcgcccaggtgttcggcctggactccatcatgggcaacaaggacctgtggcccctgctgctgagcatcatcttcatccagcctgtgatgattgggtgcctttgccganagtcccgttctgtataaccgaaggaccggcaagtgtaaaattgggnactgttncntnctggaatnganntgatattggaaaagccccggggggccgaggacat

SEQ ID NO: 335227 - DNA, 888 bp, Homo sapiens
  misc_feature (789)..(789): n is a, c, g, or t
  misc_feature (870)..(870): n is a, c, g, or t
  misc_feature (884)..(884): n is a, c, g, or t
agccaatggccggggtcctataaacgctacggtccgcgcgctctctggcaagaggcaagaggtagcaacagcgagcgtgccggtcgctagtcgcgggtccccgagtgagcacgccagggagcaggagaccaaacgacgggggtcggagtcagagtcgcagtgggagtccccggaccggagcacgagcctgagcgggagagcgccgctcgcacgcccgtcgccacccgcgtacccggcgcagccagagccaccagcgcagcgctgccatggagcccagcagcaagaagctgacgggtcgcctcatgctggccgtgggaggagcagtgcttggctccctgcagtttggctacaacactggagtcatcaatgccccccagaaggtgatcgaggagttctacaaccagacatgggtccaccgctatggggagagcatcctgcccaccacgctcaccacgctctggtccctctcagtggccatcttttctgttgggggcatgattggctccttctctgtgggccttttcgttaaccgctttggccggcggaattcaatgctgatgatgaacctgctggccttcgtgtccgccgtgctcatgggcttctcgaaactgggcaagtcctttgagatgctgatcctgggccgcttcatcatcggtgtgtactgcggcctgaccacaggcttcgtgcccatgtatgtgggtgaagtgtcacccacagcccttcgtggggccctgggcaccctgcaccagctgggcatcgtcgtcggcatcctcatcgcccagagtgttncggcctgggacttccattcattggggccaacaaagggaccttgtgggccccttgcttgcttgaaccattaatctttcattncccaaaccccttgnttgg

SEQ ID NO: 335228 - DNA, 793 bp, Homo sapiens
agccaatggccggggtcctataaacgctacggtccgcgcgctctctggcaagaggcaagaggtagcaacagcgagcgtgccggtcgctagtcgcgggtccccgagtgagcacgccagggagcaggagaccaaacgacgggggtcggagtcagagtcgcagtgggagtccccggaccggagcacgagcctgagcgggagagcgccgctcgcacgcccgtcgccacccgcgtacccggcgcagccagagccaccagcgcagcgctgccatggagcccagcagcaagaagctgacgggtcgcctcatgctggccgtgggaggagcagtgcttggctccctgcagtttggctacaacactggagtcatcaatgccccccagaaggtgatcgaggagttctacaaccagacatgggtccaccgctatggggagagcatcctgcccaccacgctcaccacgctctggtccctctcagtggccatcttttctgttgggggcatgattggctccttctctgtgggccttttcgttaaccgctttggccggcggaattcaatgctgatgatgaacctgctggccttcgtgtccgccgtgctcatgggcttctcgaaactgggcaatcccaaacttgaaacaacagatacgcctctgccgaagaagtttccctttagaccccaagcccgtaaggtcactgcagtgcagtgtcccttctgcctgagtatttgtccccttcattctttactcatcctgggtcccacatccactgctacagaggcagggaagggccacaatgtcca

SEQ ID NO: 335229 - DNA, 1517 bp, Homo sapiens
tctgaggcaatctagaggatcccttggtcatacaggtgggtgccagccagaacaagaggcgaggagctgttccatcccctgggggctgattcccaagtgtgagtcgccccagatcaccagcccggcctgctcccagcagccctaaggatctctcaggagcacaggcagctggatgagacttccaaacctgacagatgtcagccgagccgggcctggggctcctttctccagccagcaatgatgtccagaagaatattcaggacttaacggctccaggattttaacaaaagcaagactgttgctcaaatctattcagacaagcaacaggttttataatttttttattactgattttgttatttttatatcagcctgagtctcctgtgcccacatcccaggcttcaccctgaatggttccatgcctgtgggagcctgcaaactcactgctcaagaagacatggagactcctgccctgttgtgtatagatgcaagatatttatatatatttttggttgtcaatattaaatacagacactaagttatagtatatctggacaagccaacttgtaaatacaccacctcactcctgttacttacctaaacagatataaatggctggtttttagaaacatggttttgaaatgcttgtggattgagggtaggaggtttggatgggagtgagacagaagtaagtggggttgcaaccactgcaacggcttagacttcgactcaggatccagtcccttacacgtacctctcatcagtgtcctcttgctcaaaaatctgtttgatccctgttacccagagaatatatacattctttatcttgacattcaaggcatttctatcacatatttgatagttggtgttcaaaaaaacactagttttgtgccagccgtgatgctcaggcttgaaatgcattattttgaatgtgaagtaaatactgtacctttatttgacaggctcaaagaggttatgtgcctgaagtcgcacagtgaataagctaaaacacctgcttttaacaatggtaccatacaaccactactccattaactccacccacctcctgcacccctccccacacacacaaaatgaaccacgttctttgtatgggcccaatgagctgtcaagctgccctgtgttcatttcatttggaattgccccctctggttcctctgtatactactgcttcatctctaaagacagctcatcctcctccttcacccctgaatttccagagcacttcatctgctccttcatcacaagtccagttttctgccactagtctgaatttcatgagaagatgccgatttggttcctgtgggtcctcagcactattcagtacagtgcttgatgcacagcaggcactcagaaaatactggaggaaataaaacaccaaagatatttgtctctagaggctcagctgacaaaatctgggagaagtttgcttttgtaactacaggcaggcttttttctccctgacatgaagagggagcagagaaggtcctgtagagaaa

SEQ ID NO: 335230 - DNA, 1161 bp, Homo sapiens
  misc_feature (2)..(2): n is a, c, g, or t
  misc_feature (7)..(7): n is a, c, g, or t
  misc_feature (9)..(9): n is a, c, g, or t
  misc_feature (17)..(17): n is a, c, g, or t
  misc_feature (19)..(19): n is a, c, g, or t
  misc_feature (21)..(21): n is a, c, g, or t
  misc_feature (47)..(47): n is a, c, g, or t
  misc_feature (66)..(66): n is a, c, g, or t
  misc_feature (68)..(68): n is a, c, g, or t
  misc_feature (76)..(76): n is a, c, g, or t
cngtctngngtgccggntntngtggggttgggagggagggcgggggnagtggcgtgagaggagggngngtgggggnggggggggtcactgctcaagaagacatggagactcctgccctgttgtgtatagatgcaagatatttatatatatttttggttgtcaatattaaatacagacactaagttatagtatatctggacaagccaacttgtaaatacaccacctcactcctgttacttacctaaacagatataaatggctggtttttagaaacatggttttgaaatgcttgtggattgagggtaggaggtttggatgggagtgagacagaagtaagtggggttgcaaccactgcaacggcttagacttcgactcaggatccagtcccttacacgtacctctcatcagtgtcctcttgctcaaaaatctgtttgatccctgttacccagagaatatatacattctttatcttgacattcaaggcatttctatcacatatttgatagttggtgttcaaaaaaacactagttttgtgccagccgtgatgctcaggcttgaaatgcattattttgaatgtgaagtaaatactgtacctttatttgacaggctcaaagaggttatgtgcctgaagtcgcacagtgaataagctaaaacacctgcttttaacaatggtaccatacaaccactactccattaactccacccacctcctgcacccctccccacacacacaaaatgaaccacgttctttgtatgggcccaatgagctgtcaagctgccctgtgttcatttcatttggaattgccccctctggttcctctgtatactactgcttcatctctaaagacagctcatcctcctccttcacccctgaatttccagagcacttcatctgctccttcatcacaagtccagttttctgccactagtctgaatttcatgagaagatgccgatttggttcctgtgggtcctcagcactattcagtacagtgcttgatgcacagcaggcactcagaaaatactggaggaaataaaacaccaaagatatttgtctctagaggctcagctgacaaaatctgggagaagtttgcttttgtaactacaggcaggcttttttctccctgacatgaagagggagcagagaaggtcctgtagagaaa

SEQ ID NO: 335231 - DNA, 446 bp, Homo sapiens
agccaatggccggggtcctataaacgctacggtccgcgcgctctctggcaagaggcaagaggtagcaacagcgagcgtgccggtcgctagtcgcgggtccccgagtgagcacgccagggagcaggagaccaaacgacgggggtcggagtcagagtcgcagtgggagtccccggaccggagcacgagcctgagcgggagagcgccgctcgcacgcccgtcgccacccgcgtacccggcgcagccagagccaccagcgcagcgctgccatggagcccagcagcaagaagctgacgggtcgcctcatgctggccgtgggaggagcagtgcttggctccctgcagtttggctacaacactggagtcatcaatgccccccagaaggtgagtactgtgccatcgttggcttatggacaccagcctgctctgttgcacatcacacatgcccac

SEQ ID NO: 335232 - DNA, 228 bp, Homo sapiens
gtatgccaccattggctccggtatcgtcaacacggccttcactgtcgtgtcggtgagtctttgcttactggcccccccagccaaaccccagggaggaggcagtgccatcttccccactggtctttgcagtgccctgtgactttctcagctcttgaggcaaggcctctgggtgggtgggttcagaagggcactaggcaggggtggcactgacactgtctctgcccacag

SEQ ID NO: 335233 - DNA, 426 bp, Homo sapiens
cttctccaactggacctcaaatttcattgtgggcatgtgcttccagtatgtggaggtgagaacccccactgtctctatactcaccatttctcacccgcacgcatgaccccacagtgctgtgcaaagtgctggcccagcattctcattaggaatcatgctgaggaggaaactgagggtaggaagcccaggtcacatgaccaagaatgctgacctcaactccagggttctccccttagccttgaatggtgctcctggagcctgttacattctaggtacaagcgtggtctcagttaattatgatagcatccctgggtaggtggatgttcccttttcagctcaaaggcccaaaggtaaagtgacttatccaaagtcctacagccaggatgtagggtcatgactccaaccaagtgtgtctgtgtgtctttc

SEQ ID NO: 335234 - DNA, 230 bp, Homo sapiens
cagccaagccctctggtcaagtgtgcatggtgaacaagtcccaaacttgaaacaacagatacgcctctgccgaagaagtttccctttagaccccaagcccgtaaggtcactgcagtgcagtgtcccttctgcctgagtatttgtccccttcattctttactcatcctgggtcccacatccactgctacagaggcagggaagggccacaatgtccaggtaggccccaacag

SEQ ID NO: 335235 - DNA, 510 bp, Homo sapiens
gtgtccgccgtgctcatgggcttctcgaaactgggcaagtcctttgagatgctgatcctgggccgcttcatcatcggtgtgtactgcggcctgaccacaggcttcgtgcccatgtatgtgggtgaagtgtcacccacagcccttcgtggggccctgggcaccctgcaccagctgggcatcgtcgtcggcatcctcatcgcccagggtaagctggggcaggatctacctgcctggcacggcccctgcccacagcttcagtggctctcggatctgtgcccagcagggcagagtttctcttccgcccagcccccacagccttgcagaggacaactatggtacacaggtccagagaacacagcaccatggcctcccagttgacagcaagatgacttgactcttctcagtccctttcttctcactctaggcttccaaccacagggcccgccttcccccaacatgccgcaggctgttatgcacagtaccctctctccaggaggcttccccttccct

SEQ ID NO: 335236 - DNA, 573 bp, Homo sapiens
  misc_feature (1)..(1): n is a, c, g, or t
  misc_feature (23)..(23): n is a, c, g, or t
  misc_feature (30)..(30): n is a, c, g, or t
  misc_feature (61)..(61): n is a, c, g, or t
  misc_feature (90)..(90): n is a, c, g, or t
ntaggatttggcccttcccaatnttttccntacccaaccacttcaaattaatcctttcttnacctgagcccagtcgccagatgatgcggnagaagaaggtcaccatcctgaagcttgttccggttcccccgcctaccgccagcccatcctcatcaaccgcaacgaggagaaccgggccaagagtgtgctaaagaagctgcgcgggacagctgacgtgacccatgacctgcaggagatgaaggaagagagtcggcagatgatgcgggagcactggagtgcagggaggagaggggaagggccagtctgggctgccgggttctagtctcctttgcactgagggccacactattaccatgagaagagggcctgtgggagcctgcaaactcactgctcaagaagacatggagactcctgccctgttgtgtatagatgcaagatatttatatatatttttggttgtcaatattaaatacagacactaagttatagtatatctggacaagccaacttgtaaatacaccacctcactcctgttacttacctaaacagatataaatggctggtttttagaaa

SEQ ID NO: 335237 - DNA, 2620 bp, Homo sapiens
  misc_feature (33)..(33): n is a, c, g, or t
tgtcttttcgggcgtattttttcctcccgccgncccggccggaattcccgggatgcaacagcgagcgtgccggtcgctagtcgcgggtccccgagtgagcacgccagggagcaggagaccaaacgacgggggtcggagtcagagtcgcagtgggagtccccggaccggagcacgagcctgagcgggagagcgccgctcgcacgcccgtcgccacccgcgtacccggcgcagccagagccaccagcgcagcgctgccatggagcccagcagcaagaagctgacgggtcgcctcatgctggccgtgggaggagcagtgcttggctccctgcagtttggctacaacactggagtcatcaatgccccccagaaggtgatcgaggagttctacaaccagacatgggtccaccgctatggggagagcatcctgcccaccacgctcaccacgctctggtccctctcagtggccatcttttctgttgggggcatgattggctccttctctgtgggccttttcgttaaccgctttggccggcggaattcaatgctgatgatgaacctgctggccttcgtgtccgccgtgctcatgggcttctcgaaactgggcaagtcctttgagatgctgatcctgggccgcttcatcatcggtgtgtactgcggcctgaccacaggcttcgtgcccatgtatgtgggtgaagtgtcacccacagcccttcgtggggccctgggcaccctgcaccagctgggcatcgtcgtcggcatcctcatcgcccaggtgttcggcctggactccatcatgggcaacaaggacctgtggcccctgctgctgagcatcatcttcatcccggccctgctgcagtgcatcgtgctgcccttctgccccgagagtccccgcttcctgctcatcaaccgcaacgaggagaaccgggccaagagtgtgctaaagaagctgcgcgggacagctgacgtgacccatgacctgcaggagatgaaggaagagagtcggcagatgatgcgggagaagaaggtcaccatcctggagctgttccgctcccccgcctaccgccagcccatcctcatcgctgtggtgctgcagctgtcccagcagctgtctggcatcaacgctgtcttctattactccacgagcatcttcgagaaggcgggggtgcagcagcctgtgtatgccaccattggctccggtatcgtcaacacggccttcactgtcgtgtcgctgtttgtggtggagcgagcaggccggcggaccctgcacctcataggcctcgctggcatggcgggttgtgccatactcatgaccatcgcgctagcactgctggagcagctaccctggatgtcctatctgagcatcgtggccatctttggctttgtggccttctttgaagtgggtcctggccccatcccatggttcatcgtggctgaactcttcagccagggtccacgtccagctgccattgccgttgcaggcttctccaactggacctcaaatttcattgtgggcatgtgcttccagtatgtggagcaactgtgtggtccctacgtcttcatcatcttcactgtgctcctggttctgttcttcatcttcacctacttcaaagttcctgagactaaaggccggaccttcgatgagatcgcttccggcttccggcaggggggagccagccaaagtgacaagacacccgaggagctgttccatcccctgggggctgattcccaagtgtgagtcgccccagatcaccagcccggcctgctcccagcagccctaaggatctctcaggagcacaggcagctggatgagacttccaaacctgacagatgtcagccgagccgggcctggggctcctttctccagccagcaatgatgtccagaagaatattcaggacttaacggctccaggattttaacaaaagcaagactgttgctcaaatctattcagacaagcaacaggttttataatttttttattactgattttgttatttttatatcagcctgagtctcctgtgcccacatcccaggcttcaccctgaatggttccatgcctgagggtggagactaagccctgtcgagacacttgccttcttcacccagctaatctgtagggctggacctatgtcctaaggacacactaatcgaactatgaactacaaagcttctatcccaggaggtggctatggccacccgttctgctggcctggatctccccactctaggggtcaggctccattaggatttgccccttcccatctcttcctacccaaccactcaaattaatctttctttacctgagaccagttgggagcactggagtgcagggaggagaggggaagggccagtctgggctgccgggttctagtctcctttgcactgagggccacactattaccatgagaagagggcctgtgggagcctgcaaactcactgctcaagaagacatggagactcctgccctgttgtgtatagatgcaagatatttatatatatttttggttgtcaatattaaatacagacactaagttatagtatatctggacaagccaacttgtaaatacaccacctcactcctgttacttacctaaacagatataaatggctggtttttagaaa

SEQ ID NO: 335238 - DNA, 2761 bp, Homo sapiens
tcttctctaccttgtcccaggtcttccaggatgggtgtctcctttgagaagcaggactgcttttataagagcgtttatgagccggctcgcctcacggctcgcctcacgtctcgcctcacggctcgcctcacgtctcccctgcctcgcctcacgtctcgcctgcctcgcctcacgtctcgcctgccccgtctgctggcaacagcgagcgtgccggtcgctagtcgcgggtccccgagtgagcacgccagggagcaggagaccaaacgacgggggtcggagtcagagtcgcagtgggagtccccggaccggagcacgagcctgagcgggagagcgccgctcgcacgcccgtcgccacccgcgtacccggcgcagccagagccaccagcgcagcgctgccatggagcccagcagcaagaagctgacgggtcgcctcatgctggccgtgggaggagcagtgcttggctccctgcagtttggctacaacactggagtcatcaatgccccccagaaggtgatcgaggagttctacaaccagacatgggtccaccgctatggggagagcatcctgcccaccacgctcaccacgctctggtccctctcagtggccatcttttctgttgggggcatgattggctccttctctgtgggccttttcgttaaccgctttggccggcggaattcaatgctgatgatgaacctgctggccttcgtgtccgccgtgctcatgggcttctcgaaactgggcaagtcctttgagatgctgatcctgggccgcttcatcatcggtgtgtactgcggcctgaccacaggcttcgtgcccatgtatgtgggtgaagtgtcacccacagcccttcgtggggccctgggcaccctgcaccagctgggcatcgtcgtcggcatcctcatcgcccaggtgttcggcctggactccatcatgggcaacaaggacctgtggcccctgctgctgagcatcatcttcatcccggccctgctgcagtgcatcgtgctgcccttctgccccgagagtccccgcttcctgctcatcaaccgcaacgaggagaaccgggccaagagtgtgctaaagaagctgcgcgggacagctgacgtgacccatgacctgcaggagatgaaggaagagagtcggcagatgatgcgggagaagaaggtcaccatcctggagctgttccgctcccccgcctaccgccagcccatcctcatcgctgtggtgctgcagctgtcccagcagctgtctggcatcaacgctgtcttctattactccacgagcatcttcgagaaggcgggggtgcagcagcctgtgtatgccaccattggctccggtatcgtcaacacggccttcactgtcgtgtcgctgtttgtggtggagcgagcaggccggcggaccctgcacctcataggcctcgctggcatggcgggttgtgccatactcatgaccatcgcgctagcactgctggagcagctaccctggatgtcctatctgagcatcgtggccatctttggctttgtggccttctttgaagtgggtcctggccccatcccatggttcatcgtggctgaactcttcagccagggtccacgtccagctgccattgccgttgcaggcttctccaactggacctcaaatttcattgtgggcatgtgcttccagtatgtggagcaactgtgtggtccctacgtcttcatcatcttcactgtgctcctggttctgttcttcatcttcacctacttcaaagttcctgagactaaaggccggaccttcgatgagatcgcttccggcttccggcaggggggagccagccaaagtgacaagacacccgaggagctgttccatcccctgggggctgattcccaagtgtgagtcgccccagatcaccagcccggcctgctcccagcagccctaaggatctctcaggagcacaggcagctggatgagacttccaaacctgacagatgtcagccgagccgggcctggggctcctttctccagccagcaatgatgtccagaagaatattcaggacttaacggctccaggattttaacaaaagcaagactgttgctcaaatctattcagacaagcaacaggttttataatttttttattactgattttgttatttttatatcagcctgagtctcctgtgcccacatcccaggcttcaccctgaatggttccatgcctgagggtggagactaagccctgtcgagacacttgccttcttcacccagctaatctgtagggctggacctatgtcctaaggacacactaatcgaactatgaactacaaagcttctatcccaggaggtggctatggccacccgttctgctggcctggatctccccactctaggggtcaggctccattaggatttgccccttcccatctcttcctacccaaccactcaaattaatctttctttacctgagaccagttgggagcactggagtgcagggaggagaggggaagggccagtctgggctgccgggttctagtctcctttgcactgagggccacactattaccatgagaagagggcctgtgggagcctgcaaactcactgctcaagaagacatggagactcctgccctgttgtgtatagatgcaagatatttatatatatttttggttgtcaatattaaatacagacactaagttatagtatatctggacaagccaacttgtaaatacaccacctcactcctgttacttacctaaacagatataaatggctggtttttagaaa

SEQ ID NO: 335239 - DNA, 2735 bp, Homo sapiens
tcttctctaccttgtcccaggtcttccaggatgggtgtctcctttgagaagcaggactgcttttataagagcgtttatgagccggctcgcctcacggctcgcctcacgtctcgcctcacggctcgcctcacgtctcccctgcctcgcctcacgtctcgcctgcctcgcctcacgtctcgcctgccccgtctgctggcaacagcgagcgtgccggtcgctagtcgcgggtccccgagtgagcacgccaggggagtcagagtcgcagtgggagtccccggaccggagcacgagcctgagcgggagagcgccgctcgcacgcccgtcgccacccgcgtacccggcgcagccagagccaccagcgcagcgctgccatggagcccagcagcaagaagctgacgggtcgcctcatgctggccgtgggaggagcagtgcttggctccctgcagtttggctacaacactggagtcatcaatgccccccagaaggtgatcgaggagttctacaaccagacatgggtccaccgctatggggagagcatcctgcccaccacgctcaccacgctctggtccctctcagtggccatcttttctgttgggggcatgattggctccttctctgtgggccttttcgttaaccgctttggccggcggaattcaatgctgatgatgaacctgctggccttcgtgtccgccgtgctcatgggcttctcgaaactgggcaagtcctttgagatgctgatcctgggccgcttcatcatcggtgtgtactgcggcctgaccacaggcttcgtgcccatgtatgtgggtgaagtgtcacccacagcccttcgtggggccctgggcaccctgcaccagctgggcatcgtcgtcggcatcctcatcgcccaggtgttcggcctggactccatcatgggcaacaaggacctgtggcccctgctgctgagcatcatcttcatcccggccctgctgcagtgcatcgtgctgcccttctgccccgagagtccccgcttcctgctcatcaaccgcaacgaggagaaccgggccaagagtgtgctaaagaagctgcgcgggacagctgacgtgacccatgacctgcaggagatgaaggaagagagtcggcagatgatgcgggagaagaaggtcaccatcctggagctgttccgctcccccgcctaccgccagcccatcctcatcgctgtggtgctgcagctgtcccagcagctgtctggcatcaacgctgtcttctattactccacgagcatcttcgagaaggcgggggtgcagcagcctgtgtatgccaccattggctccggtatcgtcaacacggccttcactgtcgtgtcgctgtttgtggtggagcgagcaggccggcggaccctgcacctcataggcctcgctggcatggcgggttgtgccatactcatgaccatcgcgctagcactgctggagcagctaccctggatgtcctatctgagcatcgtggccatctttggctttgtggccttctttgaagtgggtcctggccccatcccatggttcatcgtggctgaactcttcagccagggtccacgtccagctgccattgccgttgcaggcttctccaactggacctcaaatttcattgtgggcatgtgcttccagtatgtggagcaactgtgtggtccctacgtcttcatcatcttcactgtgctcctggttctgttcttcatcttcacctacttcaaagttcctgagactaaaggccggaccttcgatgagatcgcttccggcttccggcaggggggagccagccaaagtgacaagacacccgaggagctgttccatcccctgggggctgattcccaagtgtgagtcgccccagatcaccagcccggcctgctcccagcagccctaaggatctctcaggagcacaggcagctggatgagacttccaaacctgacagatgtcagccgagccgggcctggggctcctttctccagccagcaatgatgtccagaagaatattcaggacttaacggctccaggattttaacaaaagcaagactgttgctcaaatctattcagacaagcaacaggttttataatttttttattactgattttgttatttttatatcagcctgagtctcctgtgcccacatcccaggcttcaccctgaatggttccatgcctgagggtggagactaagccctgtcgagacacttgccttcttcacccagctaatctgtagggctggacctatgtcctaaggacacactaatcgaactatgaactacaaagcttctatcccaggaggtggctatggccacccgttctgctggcctggatctccccactctaggggtcaggctccattaggatttgccccttcccatctcttcctacccaaccactcaaattaatctttctttacctgagaccagttgggagcactggagtgcagggaggagaggggaagggccagtctgggctgccgggttctagtctcctttgcactgagggccacactattaccatgagaagagggcctgtgggagcctgcaaactcactgctcaagaagacatggagactcctgccctgttgtgtatagatgcaagatatttatatatatttttggttgtcaatattaaatacagacactaagttatagtatatctggacaagccaacttgtaaatacaccacctcactcctgttacttacctaaacagatataaatggctggtttttagaaa

SEQ ID NO: 335240 - DNA, 2534 bp, Homo sapiens
agccaatggccggggtcctataaacgctacggtccgcgcgctctctggcaagaggcaagaggtagcaacagcgagcgtgccggtcgctagtcgcgggtccccgagtgagcacgccagggagcaggagaccaaacgacgggggtcggagtcagagtcgcagtgggagtccccggaccggagcacgagcctgagcgggagagcgccgctcgcacgcccgtcgccacccgcgtacccggcgcagccagagccaccagcgcagcgctgccatggagcccagcagcaaggtgatcgaggagttctacaaccagacatgggtccaccgctatggggagagcatcctgcccaccacgctcaccacgctctggtccctctcagtggccatcttttctgttgggggcatgattggctccttctctgtgggccttttcgttaaccgctttggccggcggaattcaatgctgatgatgaacctgctggccttcgtgtccgccgtgctcatgggcttctcgaaactgggcaagtcctttgagatgctgatcctgggccgcttcatcatcggtgtgtactgcggcctgaccacaggcttcgtgcccatgtatgtgggtgaagtgtcacccacagcccttcgtggggccctgggcaccctgcaccagctgggcatcgtcgtcggcatcctcatcgcccaggtgttcggcctggactccatcatgggcaacaaggacctgtggcccctgctgctgagcatcatcttcatcccggccctgctgcagtgcatcgtgctgcccttctgccccgagagtccccgcttcctgctcatcaaccgcaacgaggagaaccgggccaagagtgtgctaaagaagctgcgcgggacagctgacgtgacccatgacctgcaggagatgaaggaagagagtcggcagatgatgcgggagaagaaggtcaccatcctggagctgttccgctcccccgcctaccgccagcccatcctcatcgctgtggtgctgcagctgtcccagcagctgtctggcatcaacgctgtcttctattactccacgagcatcttcgagaaggcgggggtgcagcagcctgtgtatgccaccattggctccggtatcgtcaacacggccttcactgtcgtgtcgctgtttgtggtggagcgagcaggccggcggaccctgcacctcataggcctcgctggcatggcgggttgtgccatactcatgaccatcgcgctagcactgctggagcagctaccctggatgtcctatctgagcatcgtggccatctttggctttgtggccttctttgaagtgggtcctggccccatcccatggttcatcgtggctgaactcttcagccagggtccacgtccagctgccattgccgttgcaggcttctccaactggacctcaaatttcattgtgggcatgtgcttccagtatgtggagcaactgtgtggtccctacgtcttcatcatcttcactgtgctcctggttctgttcttcatcttcacctacttcaaagttcctgagactaaaggccggaccttcgatgagatcgcttccggcttccggcaggggggagccagccaaagtgacaagacacccgaggagctgttccatcccctgggggctgattcccaagtgtgagtcgccccagatcaccagcccggcctgctcccagcagccctaaggatctctcaggagcacaggcagctggatgagacttccaaacctgacagatgtcagccgagccgggcctggggctcctttctccagccagcaatgatgtccagaagaatattcaggacttaacggctccaggattttaacaaaagcaagactgttgctcaaatctattcagacaagcaacaggttttataatttttttattactgattttgttatttttatatcagcctgagtctcctgtgcccacatcccaggcttcaccctgaatggttccatgcctgagggtggagactaagccctgtcgagacacttgccttcttcacccagctaatctgtagggctggacctatgtcctaaggacacactaatcgaactatgaactacaaagcttctatcccaggaggtggctatggccacccgttctgctggcctggatctccccactctaggggtcaggctccattaggatttgccccttcccatctcttcctacccaaccactcaaattaatctttctttacctgagaccagttgggagcactggagtgcagggaggagaggggaagggccagtctgggctgccgggttctagtctcctttgcactgagggccacactattaccatgagaagagggcctgtgggagcctgcaaactcactgctcaagaagacatggagactcctgccctgttgtgtatagatgcaagatatttatatatatttttggttgtcaatattaaatacagacactaagttatagtatatctggacaagccaacttgtaaatacaccacctcactcctgttacttacctaaacagatataaatggctggtttttagaaa

SEQ ID NO: 335241 - DNA, 2100 bp, Homo sapiens
agccaatggccggggtcctataaacgctacggtccgcgcgctctctggcaagaggcaagaggtagcaacagcgagcgtgccggtcgctagtcgcgggtccccgagtgagcacgccagggagcaggagaccaaacgacgggggtcggagtcagagtcgcagtgggagtccccggaccggagcacgagcctgagcgggagagcgccgctcgcacgcccgtcgccacccgcgtacccggcgcagccagagccaccagcgcagcgctgccatggagcccagcagcaagaagctgacgggtcgcctcatgctggccgtgggaggagcagtgcttggctccctgcagtttggctacaacactggagtcatcaatgccccccagaaggtgatcgaggagttctacaaccagacatgggtccaccgctatggggagagcatcctgcccaccacgctcaccacgctctggtccctctcagtggccatcttttctgttgggggcatgattggctccttctctgtgggccttttcgttaaccgctttggccggcggaattcaatgctgatgatgaacctgctggccttcgtgtccgccgtgctcatgggcttctcgaaactgggcaagtcctttgagatgctgatcctgggccgcttcatcatcggtgtgtactgcggcctgaccacaggcttcgtgcccatgtatgtgggtgaagtgtcacccacagcccttcgtggggccctgggcaccctgcaccagctgggcatcgtcgtcggcatcctcatcgcccaggtgttcggcctggactccatcatgggcaacaaggacctgtggcccctgctgctgagcatcatcttcatcccggccctgctgcagtgcatcgtgctgcccttctgccccgagagtccccgcttcctgctcatcaaccgcaacgaggagaaccgggccaagagtgtgctaaagaagctgcgcgggacagctgacgtgacccatgacctgcaggagatgaaggaagagagtcggcagatgatgcgggagaagaaggtcaccatcctggagctgttccgctcccccgcctaccgccagcccatcctcatcgctgtggtgctgcagctgtcccagcagctgtctggcatcaacgctgtcttctattactccacgagcatcttcgagaaggcgggggtgcagcagcctgtgtatgccaccattggctccggtatcgtcaacacggccttcactgtcgtgtcgctgtttgtggtggagcgagcaggccggcggaccctgcacctcataggcctcgctggcatggcgggttgtgccatactcatgaccatcgcgctagcactgctggagcagctaccctggatgtcctatctgagcatcgtggccatctttggctttgtggccttctttgaagtgggtcctggccccatcccatggttcatcgtggctgaactcttcagccagggtccacgtccagctgccattgccgttgcaggcttctccaactggacctcaaatttcattgtgggcatgtgcttccagtatgtggagcaactgtgtggtccctacgtcttcatcatcttcactgtgctcctggttctgttcttcatctatgtcctaaggacacactaatcgaactatgaactacaaagcttctatcccaggaggtggctatggccacccgttctgctggcctggatctccccactctaggggtcaggctccattaggatttgccccttcccatctcttcctacccaaccactcaaattaatctttctttacctgagaccagttgggagcactggagtgcagggaggagaggggaagggccagtctgggctgccgggttctagtctcctttgcactgagggccacactattaccatgagaagagggcctgtgggagcctgcaaactcactgctcaagaagacatggagactcctgccctgttgtgtatagatgcaagatatttatatatatttttggttgtcaatattaaatacagacactaagttatagtatatctggacaagccaacttgtaaatacaccacctcactcctgttacttacctaaacagatataaatggctggtttttagaaa

SEQ ID NO: 335242 - DNA, 2272 bp, Homo sapiens
agccaatggccggggtcctataaacgctacggtccgcgcgctctctggcaagaggcaagaggtagcaacagcgagcgtgccggtcgctagtcgcgggtccccgagtgagcacgccagggagcaggagaccaaacgacgggggtcggagtcagagtcgcagtgggagtccccggaccggagcacgagcctgagcgggagagcgccgctcgcacgcccgtcgccacccgcgtacccggcgcagccagagccaccagcgcagcgctgccatggagcccagcagcaagaagctgacgggtcgcctcatgctggccgtgggaggagcagtgcttggctccctgcagtttggctacaacactggagtcatcaatgccccccagaaggtgatcgaggagttctacaaccagacatgggtccaccgctatggggagagcatcctgcccaccacgctcaccacgctctggtccctctcagtggccatcttttctgttgggggcatgattggctccttctctgtgggccttttcgttaaccgctttggccggcggaattcaatgctgatgatgaacctgctggccttcgtgtccgccgtgctcatgggcttctcgaaactgggcaagtcctttgagatgctgatcctgggccgcttcatcatcggtgtgtactgcggcctgaccacaggcttcgtgcccatgtatgtgggtgaagtgtcacccacagcccttcgtggggccctgggcaccctgcaccagctgggcatcgtcgtcggcatcctcatcgcccaggtgttcggcctggactccatcatgggcaacaaggacctgtggcccctgctgctgagcatcatcttcatcccggccctgctgcagtgcatcgtgctgcccttctgccccgagagtccccgcttcctgctcatcaaccgcaacgaggagaaccgggccaagagtgtgctaaagaagctgcgcgggacagctgacgtgacccatgacctgcaggagatgaaggaagagagtcggcagatgatgcgggagaagaaggtcaccatcctggagctgttccgctcccccgcctaccgccagcccatcctcatcgctgtggtgctgcagctgtcccagcagctgtctggcatcaacgctgtcttctattactccacgagcatcttcgagaaggcgggggtgcagcagcctgtgtatgccaccattggctccggtatcgtcaacacggccttcactgtcgtgtcgctgtttgtggtggagcgagcaggccggcggaccctgcacctcataggcctcgctggcatggcgggttgtgccatactcatgaccatcgcgctagcactgctggagcagctaccctggatgtcctatctgagcatcgtggccatctttggctttgtggccttctttgaagtgggtcctggccccatcccatggttcatcgtggctgaactcttcagccagggtccacgtccagctgccattgccgttgcaggcttctccaactggacctcaaatttcattgtgggcatgtgcttccagtatgtggagcaactgtgtggtccctacgtcttcatcatcttcactgtgctcctggttctgttcttcatcttcacctacttcaaagttcctgagactaaaggccggaccttcgatgagatcgcttccggcttccggcaggggggagccagccaaagtgacaagacacccgaggagctgttccatcccctgggggctgattcccaagtgtgagtcgccccagatcaccagcccggcctgctcccagcagccctaaggatctctcaggagcacaggcagctggatgagacttccaaacctgacagatgtcagccgagccgggcctggggctcctttctccagccagcaatgatgtccagaagaatattcaggacttaacggctccaggattttaacaaaagcaagactgttgctcaaatctattcagacaagcaacaggttttataatttttttattactgattttgttatttttatatcagcctgagtctcctgtgcccacatcccaggcttcaccctgaatggttccatgcctgtgggagcctgcaaactcactgctcaagaagacatggagactcctgccctgttgtgtatagatgcaagatatttatatatatttttggttgtcaatattaaatacagacactaagttatagtatatctggacaagccaacttgtaaatacaccacctcactcctgttacttacctaaacagatataaatggctggtttttagaaa

SEQ ID NO: 335243 - DNA, 1297 bp, Homo sapiens
gtcatcttcacctacttcaaagttcctgagactaaaggccggaccttcgatgagatcgcttccggcttccggcaggggggagccagccaaagtgacaagacaccctgcacctcataggcctcgctggcatggcgggttgtgccatactcatgaccatcgcgctagcactgctggagcagctaccctggatgtcctatctgagcatcgtggccatctttggctttgtggccttctttgaagtgggtcctggccccatcccatggttcatcgtggctgaactcttcagccagggtccacgtccagctgccattgccgttgcaggcttctccaactggacctcaaatttcattgtgggcatgtgcttccagtatgtggagcaactgtgtggtccctacgtcttcatcatcttcactgtgctcctggttctgttcttcatctgctcccagcagccctaaggatctctcaggagcacaggcagctggatgagacttccaaacctgacagatgtcagccgagccgggcctggggctcctttctccagccagcaatgatgtccagaagaatattcaggacttaacggctccaggattttaacaaaagcaagactgttgctcaaatctattcagacaagcaacaggttttataatttttttattactgattttgttatttttatatcagcctgagtctcctgtgcccacatcccaggcttcaccctgaatggttccatgcctgagggtggagactaagccctgtcgagacacttgccttcttcacccagctaatctgtagggctggacctatgtcctaaggacacactaatcgaactatgaactacaaagcttctatcccaggaggtggctatggccacccgttctgctggcctggatctccccactctaggggtcaggctccattaggatttgccccttcccatctcttcctacccaaccactcaaattaatctttctttacctgagaccagttgggagcactggagtgcagggaggagaggggaagggccagtctgggctgccgggttctagtctcctttgcactgagggccacactattaccatgagaagagggcctgtgggagcctgcaaactcactgctcaagaagacatggagactcctgccctgttgtgtatagatgcaagatatttatatatatttttggttgtcaatattaaatacagacactaagttatagtatatctggacaagccaacttgtaaatacaccacctcactcctgttacttacctaaacagatataaatggctggtttttagaaa

SEQ ID NO: 335244 - DNA, 737 bp, Homo sapiens
agccaatggccggggtcctataaacgctacggtccgcgcgctctctggcaagaggcaagaggtagcaacagcgagcgtgccggtcgctagtcgcgggtccccgagtgagcacgccagggagcaggagaccaaacgacgggggtcggagtcagagtcgcagtgggagtccccggaccggagcacgagcctgagcgggagagcgccgctcgcacgcccgtcgccacccgcgtacccggcgcagccagagccaccagcgcagcgctgccatggagcccagcagcaagaagctgacgggtcgcctcatgctggccgtgggaggagcagtgcttggctccctgcagtttggctacaacactggagtcatcaatgccccccagaaggtgatcgaggagttctacaaccagacatgggtccaccgctatggggagagcatcctgcccaccacgctcaccacgctctggtccctctcagtggccatcttttctgttgggggcatgattggctccttctctgtgggccttttcgttaaccgctttggccggcggaattcaatgctgatgatgaacctgctggccttcgtgtccgccgtgctcatgggcttctcgaaactgggcaagtcctttgagatgctgatcctgggccgcttcatcatcggtgtgtactgcggcctgaccacaggcttcgtgctggagcccctcccggccccccacagagaggcgtcggtaccgagctgatta

SEQ ID NO: 335245 - DNA, 332 bp, Homo sapiens
acaacataaccctatctcccacaagataaaatgcttaagtagacatgcagcatgcaatacaggtgttagataatgtctccttaccctgtgttagacatcactcaggcccagaggcaaattccatttcttgaattattctacagtaaaccaggctgtcttttgagacagggtctctctctctcacccaggctggagtgcagtgacacaattacagctcactgcagcctcgacctcctggactcaagagatcctcccacctcagcctcctgagtggctgggaccacaggtgcatgcaactacgcccagctaatttttgtatttttttgttgaga

SEQ ID NO: 335246 - DNA, 270 bp, Homo sapiens
aggctcctcccaacccaggattcctgagacataccccagtagggtgagctgaatgccctcaggaaactgaaagtgcttaaaggagcgcttgaggaacaaataccccaaagcccaaagagaagtggcttggggaagtgtcggtgtggctcttctccagctctgcaatgatcagtgggaccaagggccaaggagaaggagatgcccaaagagagggaataggatagcgttcccagcagctttctctcaaaggacctggtttagggggtaggg

SEQ ID NO: 335247 - DNA, 1040 bp, Homo sapiens
agagccaagaagataatcaacaatcaaaaggtgatacgattatttcaagttcccctctttagagttcatggctgttgctgatgatgctggtgccagagtagtgttttaaccttagcgctctcccatggtaaccacaaaggcagcaggagggcaggtgggaggttccagagttgtcagcacgttggtgaaatgcctgccctcattttaacgacgccgtggatgtttgtgtttgccttccgttggctgtttcaaacttaactttctagtttgacaatcatattttaccttcagtgattcttttgtttcagaactgattgtgtcctctaatagctaactaatatttttgtatattttgattatttctagtaatttttgttaattttattcatatatacacaatttggaaaatcctcttgctgtagttatgaatactttttatagatgctaagattttaaaattgctggaatagataataaatttgcaattttatttttaaatgacttaccttttttcccctactgtgtcaggaaccttaaaggcggtgtttcaaggttggtgggtctcataactgctttgcttgcttttccctgaaaggggtctgtcttttcacgggagtttctctaacgtgctttgcagagtgatgcttgccttactgcaggccgctgattgttttgctaatgctttttatctttgctttgggaaactgcagatctgaagctgtcttatttatggcaacttctgtttgaggccctaatgcttatgttggtgtggaacatcaaaagaatgcttcttaacccattttcaagccccaaaaagttgatatttcactagaccttagcttttcagctgttggagaagtatgcgtttttccagaaccattgtccattcactttagtgctactcaaaagagctgctcccagaaagctctggaggataaaaacagggcttccttatctggggatttgctgttaggctgacagtgaccagctggtgacaagtgtgacgccgggcacagcagtcctgtgaggctggtctggtg

SEQ ID NO: 335248 - DNA, 849 bp, Homo sapiens
gtgtgctggtaacaaacattcatttgaggagttttagaaacacaatcccaaataagcacctttgtccttttaatgagctgaggcccaagtgcccatactcgggttctccctgcagtacagcaggttctttcatacatctcagtgaagcacacaggacccccatactgcggctgtgacagcagggggtgacatcagtcacctggctaggccctggagaaaagcctgcacagcactccctccaccagcctctcatggtccccgagtcccgggcatcctgcagctcactccagtcggcttatctccctgacctttggccactctcatgctgaggtcacctatgaccctgatattcctggttctggagagcgcacctctaccacatccatgggcagcactgggcacagctgtccgtgctcccatagcgcgatggcctccaagccacctgtgattccaccctcggaggttggctccttctcaacctccttagccagctgcagcgtgtctgcggggactttaaatgttggcatccctcccagaccaatcctgtgccctcctttctcctcccacactctctgttgggatctcatccttgccccaatgccatcatgtgcctggctcccaagggcccccttccagcccagatctctcttctgagttccaggtccagatctcaaacacctcagactcagcatgtccaaaactgaagccttagtccctcaccggtctgctcctgtaatgggccccaccccagtggccagcatcatctccgtcaccgcttgtccttgacaccccctcacttctcatatccaagcagtgatcgtgcctttggactctctgcacaacgtgtcc

SEQ ID NO: 335249 - DNA, 215 bp, Homo sapiens
catttggtcattcacagaaaaagtttgccaacccttgacttagaagaatctctagatgagtggtcttcaaccgaagtactaaaggcatttaggatgaaacaagtcttcattgtatagggttgtcccttgctgtgcgggatagtcagcgtttttagtccccaacaggacctagcaccctaatcattatgactgaaaaatcttgttccaaacactct

SEQ ID NO: 335250 - DNA, 149 bp, Homo sapiens
gatgctctcatcaaagagtttcagacttttgatggaaacagctgaaacttttaaagtaatttacattcactgttttgacttgggctgtatgtgaagagggttcctctggccgggcaacagtcccgtcagctatctcttttttttttttt

SEQ ID NO: 335251 - DNA, 154 bp, Homo sapiens
ctggagagtgtcttcgtttgggcaccttgatgctgcagggacctcagcggtgggtggcaggcagcacccacaggagagggaggctggtgggtggtagagcccacacccagaggacacatcctcaattccattttttttttagagatagggtctt

SEQ ID NO: 335252 - DNA, 170 bp, Homo sapiens
acctatacatgcacatgcccatcacatagcctggtcagaaaagagctctggggctctcagggctgcacgtcctgtaacatcactgatgaggctgttttgtcataaaataaaaggcacccaaatcagtaggtaaatacatgactaagtgaggggagggtggttgggagttg

SEQ ID NO: 335253 - DNA, 389 bp, Homo sapiens
atgcgtgtgccaccacacccagattttttttgtattttaacagaggtaggtcatcaccaggttgcccaggctgatctcgaactcctgagctcagacaatcctccttccttggcttctcaaagtgctaggattatagatgtgagccacagtgcctggccctgtggcgttgttatctttactttatagatgaaaatgttgaagtctaaaggttaagtaacatgcaaaatcacgtagtgcctcagcacagctgaaaccccttttctttgccttttcccacagcatctccctctagtaacggatttcactagcttcttcgtaaaagtagtcccaatattggcttcttttccacgtatgtgtgtaatctgtcacattttgaaaatattatcagc

SEQ ID NO: 335254 - DNA, 455 bp, Homo sapiens
tcttgaactcttaggtcatgagtacaaatagaagtcccttctcttagaaatcagaggccttgctcacgcctgtaatcccagcactttgggaggccaaggtgggcgcatcacaaggtcaggagttcaagaccagcctgaccaatatggtgaaaccccatctgtactaaaaatacaaaaatgctgggcgctgtggcgcatgtctgtaatcccagcactttgggaggccgaggtgggtggatcacctgatgtcaggagtcgagaccagcctggccaacatggcgaaatcttgtctctactaaaaataacaaaatttagttgggcgtggtgggtgcctgtagtcccagctacccaggaggctgaggcatgggaatcgcttgaacccaggaggcagaggttgcagtgagccgagatcgcactattccactccagcctgggcgacagggagactccatctc

SEQ ID NO: 335255 - DNA, 456 bp, Homo sapiens
taaattggcctgagagtcaggcgactggagttctaattctaatccttagacgcttgagcatagatgaatttcctttgcgtcttactttttgtgttaaatgtgagtaatggctttctcttgctataattctggggttattagggttaaagagagacacatgttagaagtctttgtacattgttgttacttcgtgcgctgtggcttaattttgtctttgttattgggggaaatctctgaatgagtcaagtttacactaatgtcaatttggaggtgtaaaaaataaagtgggacttaaaaaatattcaaacattaattgaatgcctgcttacctaagactattacttgacattgacttatcaatgtgtgtctaatgaaatccttaagaatggaattaggcagctgggccttagggaaaccagtatttccgaaactatcacctattgtctctactgtctt

SEQ ID NO: 335256 - DNA, 435 bp, Homo sapiens
gttcctgaagagcagtttggggctctccccaacaaagatatcattctctacctacatgctttatctgcaatgtaacgatgccatgctctaaagacggttctgtatcccaatcgattcaactaatctaatatgaagcttttctccatgacactaactaccatataatcttccactgtaagactgagtcctgatttataaaactacactcttactattggatgtgtcctaaactctttttcaaaaatgatctgtgatgcacagaagaatgaaagggtgggctggtcagtttggttgatttagaagataatcctaatcatgtctgtgtagagaagtcataggtcttcttgcctaaactctggttgaccacctgacagatgctgtcaaaatagagacgatgacacagatgacgggattaactcaactctgtgtctagga

SEQ ID NO: 335257 - DNA, 766 bp, Homo sapiens
tgagaccctgtctcaaaaaaaaaaagtgtgccttcaatagaaggcttgaacgtattttatgggatttggtttagctgaaaaaaacagtgagaagcagattaagctggtaatttctgacaaaaagtatctaaaagatgaagtgaagaatgttaaacatcaagtattatattacagttgctcttagactagtagcttttagtttataacatgtcatttgtttgctctgaagattaagcaagttcatacttcttggaagttaaatttgacttttccagaagcactggattatttacgaaataaaaaatataattgataactttaaactactatttcaggtagtctattactagtaaatgtatgattctacatttaaatttcaggtaaatctttgttagtaacctactgcctaaaaaaatgttacatgagggagtacttttgtttgcatgttaggatcataataggccatacataataatcttgagcttgggaggagcttgttagccaaacagcatgccttaatgttgacttgcagaagacaattttaaatattgcctttgaaaggcagtggataatgtgacagtgagggggtttatgaaaccataaaattgagctttttgacttagtttttgtttttaagttgttcagatcttgggagtcatttcttcaaaacaaatgactatgaggtggaaaattacttaccttgaataaattaattggaaaatcagagaacactgggtttatttaggatgaggttgtttggtatgtg

SEQ ID NO: 335258 - DNA, 1125 bp, Homo sapiens
  misc_feature (77)..(77): n is a, c, g, or t
  misc_feature (87)..(87): n is a, c, g, or t
  misc_feature (98)..(98): n is a, c, g, or t
  misc_feature (109)..(109): n is a, c, g, or t
  misc_feature (165)..(165): n is a, c, g, or t
aggatccccctggattatagtaggagttttagttttggttttggtttagtttttgctaactagcagtctaggtttcnaccaggcagncgggctctaangttcttagaanatgtttgcatgctgtactatgcttctcccacaggatactaacttaaactgtggtgnagcatgtcattatttaatgttttgaaatctgtaaatttatttctaaaaaaaaattaaaatctcaaatttttatatttgaggttctttcactgaaggatgttgatctgctcaatataagtagagggcaagattttgaaaaggagcagtgcaagtaattatacccacagcgcataactaattttacagatctgtcatagaggcttatactttgtaccactcattaaatggaatatagaaccttgagatctgaaagaatgtccagggatttaaatatttagggatgtgtggtttggaaaacactttgtctgtgggcttaattttgtaaatcaaccaaactctaacctacgatgtagcatgtgtattataagaagtgtgaaatgtcatcaataatcagcatagtagtttcctagaacttgactggcagaaaactttctttgatagtatcagtgggtgctcacccattagataactaaaagatgtgtattcacgtgctaatgaattaaaactgattgctatttgttcatatgtcctcacaaatttagcaagacaggcatggaggtgaaaaaaatagtaacaactagatgagggaaagattgtatacactgaagaaaagttgagaggagaatactaaagggaaatatggtttcccttccctccttttaagttacttatatatatagttatatataatccttactgtcccatgactttcaccaaagatggagtgactaggcctgactgatatgtagaagaaaagttgtgatctttccttgaaaccaggaccctatcatctgacttaccaagattcataaatactgtataactccagaagattagaacataatgttaaatcacattagtccttacaaacttgttttttctacctttgaaattgccacttatacattagttttttgaacattacaattgatcaggatatataagctatgagacttatga

SEQ ID NO: 335259 - DNA, 2766 bp, Homo sapiens
gtcataggaaatatttttttcacaagtggtacccaagtgtattttagtgtaaatcaactagtgcttgtaggctcacctgttgtatctttttatttttcgtcttttagtttttataggatgagataattgtctttatttgtaattggttaaagaattagaacaatgcgagaagcttgtctggagatgccctttttaaaatcgtttctggccgggcgcagtggctcacgcctgtaatccaacaatttttgggaggctgaggcgggtggattacttgaggttaggagttcgagactagcctgcccaacgtggtgaaaccctgtctctactaaaaatacaaaattagccgggcgtggtggcgtgcgcctgtgatcacagctacttaggaggctgaggcaggagaattacttgaacctgggaggcggaattgcgccacgacactccagtctaggcaacagaatgagactcttgtctcaaaaataagtaaatacgtaggtccataaaagcaattttaagtggagatgtcctttggagctgggagtgaaggtagcacttaagcggtggctttgcatgtcttgataaaagtaatgagttgtttgcctcaatacagcttcaactaaaattcggattttgagctcaaaaaatgttaatgcccttcatagaaattaaggggaatggaaatcttttcttaacattttacacctctacccctaaaattttaagaactgtactttataaaaatgtgcaattttcatacagcatcccagtgttgatcatggaggttaatgattctttattgttagggacctatcttgtaattccagagttatttatgttttctacagttgaagaggaaaaataccgcttcttattgcctccttttcaggatttcttctggcttcttgagtagctggagtatttttgagagactcctacaggccctgcggggtggcacatgcctgtaatcctagctacttaggaggctgaggtgggagaattgcttaaacccgggaggcagaggttgcagtgagccgagatcgcatcactgcactccagcctgggcgacagagcaagactctgtctcgaaaaaaaaaaaggcaaacaaatttatctgtatcaatttggaattaaaagatttgtgtgtatagattttttgttaaaaatagaagaaatagggggagggtccttttctgaaatctgagaatgatagggatgatgactatcaaaacccaggcctgtgactggcttgtttaaaaacaaaacaaggccggcccggtggctcacgcctgtaatcccagcgctttgggaggctgaggcgggcggatcacaaggtcaagagatggagaccatcctggccaatatggtgaaatacagtctctactaaaaatacaaaaattagctgggcgtggtggcgcgcgtctgtagtcccagctactcgggagggtgaggcagagaatcacttgaacccgggaggcggaggttgcagtgagccgaggtcggccactgcactccagcctggcaatagagcgagactcgtctcaaaaacaaaacaaaaaaaaacacagaacttttaaattgggcttaaaatttttttgtgtatgaagttttaagataaatgtgagagatgtcatagcattttgcttattcagcgtctttagcaatttaattccatatatcatcaaattgaccttacataagggtaaagctttctttcttatagtagggatagtgttaacctaagagagtcttgggtttaatctattttcctaaatttaagtactatcatttatctgattttaatgctttcagttgttctcctctccccttccatttaagcaaagaatttgtaaactaaaaaaaaattaaaatctcaaatttttatatttgaggttctttcactgaaggatgttgatctgctcaatataagtagagggcaagattttgaaaaggagcagtgcaagtaattatacccacagcgcataactaattttacagatctgtcatagaggcttatactttgtaccactcattaaatggaatatagaaccttgagatctgaaagaatgtccagggatttaaatatttagggatgtgtggtttggaaaacactttgtctgtgggcttaattttgtaaatcaaccaaactctaacctacgatgtagcatgtgtattataagaagtgtgaaatgtcatcaataatcagcatagtagtttcctagaacttgactggcagaaaactttctttgatagtatcagtgggtgctcacccattagataactaaaagatgtgtattcacgtgctaatgaattaaaactgattgctatttgttcatatgtcctcacaaatttagcaagacaggcatggaggtgaaaaaaatagtaacaactagatgagggaaagattgtatacactgaagaaaagttgagaggagaatactaaagggaaatatggtttcccttccctccttttaagttacttatatatatagttatatataatccttactgtcccatgactttcaccaaagatggagtgactaggcctgactgatatgtagaagaaaagttgtgatctttccttgaaaccaggaccctatcatctgacttaccaagattcataaatactgtataactccagaagattagaacataatgttaaatcacattagtccttacaaacttgttttttctacctttgaaattgccacttatacattagttttttgaacattacaattgatcaggatatataagctatgagacttatga

SEQ ID NO: 335260 - DNA, 376 bp, Homo sapiens
tcccagataattttttgtatttttagtagagacagggtttcaccgtgttgaccagtctggtctcgaactcctgacctcagatgatccacccatcttggcctcccaaagtgctggaattacaggcatgagtcaccgtgcccagtctagtattttttttttctcattcatttctcaggtcccacagttcacttatttcatagtgttgcacctgagcttcatattattacacgggaaattgagcgctcatttgcagggcatggctactcaacctgcttgcgttgtgccacagggacttaaagggctcagtgatgactttgtgttgcttctttgataggctgcttggtgagggggtgttaaggctccttcaagtgtgggg

SEQ ID NO: 335261 - DNA, 846 bp, Homo sapiens
gatgaaggacccgacttttgccaccttcatgtatgaactgtgctgtgggaagcagacagccttcttctcatcccagggccaggagtacaccgtggtgttttgggatggaaaagaggagtccaggaactacacggtggtgaacacagagaagggcctcatggaggtgcagaggatgtgctgccctgggatgaaggtgagctgccagctccaggtccagagatccctgtggacagccaccgaggaccagaaaatctacatctacaccctcaagggcatgtgcccgttaaacacaccccaacaggccttggatactccagctgtcgtcacctgcttcttggccgtgcctgttattaaaaaggtgaggtcggggcaaaggcaggtatgcaggtctctgatgcacttccacgcctaggaggcgtctcctagctatgtcagggtggcgcctgcagagccacacctaggaccacctggcctaggacgtagacttagagacggtgggaggaaagatatcagacctggtccgtcattagtgccttccggtttgcaaaaacctaagtcaagtccccagccagactgcaggccgaatgaaaaaccccctttcacatgcaaatgccctgactcaggtggaaggactgttggtacaaatggcacggtgagcagtcatgcgtgtgcccttcccctatccggagcctcttccccacctgcccaggccagagccacctcacagccacttgatcaccaggtcctggaggtcctgatctccctccctccatctctgcctcccgccaagtactcgccgtcttacaccagacgcagtttctctttgtgcagcatagccctgcagac

SEQ ID NO: 335262 - DNA, 359 bp, Homo sapiens
aaataccacagagaacttctgagaggctgtgcccccagatcccaatgttggttttctctggggaatagatgacgggctattttctgtttcctctttagactagtctgtctttttcaacgtttctacaaagagcagaaatccataaacaacccaccagaacgtgtcaatccatgtaactttccaagacccataggggatccccaagtccaagtgcatcctcatgggaatggcttgggaaatgccagacactttccagcctgggtctcacagtggacctgtctgcctctgcaggaccagaaaatctacatctacaccctcaagggcatgtgcccgttaaacacaccccaacaggccttgga

SEQ ID NO: 335263 - DNA, 334 bp, Homo sapiens
ggcagcagcacagcctgggagttcagtcaggtgctgggtctcgacatctccacccgctggctcggtagcggggtcctctcctaaccagccccgagaaagatgagcatagctgctgcttggttttgaaggaacacattcctgtgtctatatttgtctggagcccactagtggattttgggaggattccgtttcccaaacacacagtttgggctgcaggaactgcagtgattatggcaaattggcaggtgcggggattgtttatgaattgctgtttttggtcccagcttgagcttttaattcacagagcaaactgttgggtgcagtggaaacagca

SEQ ID NO: 335264 - DNA, 922 bp, Homo sapiens
agcggagggacacgagagagaggaatcggggtttctgggtgacggtgatctcggggtgggcaggactccaaaggcccgtcgacccggtggtggactccttgcactgggattggacatatgcaagcgggagatttggggccggcgctcaaaatcggggggcgggggtggactcgggtttggaccccaggatccgatcagcggacccttgattcaacgtgggctccagcgtgacatggctgaagcgcaccaggccgtgggcttccgaccctcgctgacctcggacggggctgaagtggaactcagtgcccctgtgctgcaggagatctacctctctggcctgcgctcctggaaaaggcatctctcacgtttctggaatgactttctcaccggtgtgtttcctgccagccccctcagttggcttttcctcttcagtgccatccagcttgcctggttcctccagctggatccttccttaggactgatggagaagatcaaagagttgctgcctgactggggtggacaacaccacgggctccggggggtcctggcagccgcgctgtttgcctcgtgtttgtggggagccctgatcttcacactgcacgtggccctgaggctgcttctgtcctaccacggctggcttcttgagccccacggagccatgtcctcccccaccaagacctggctggccctggtccgcatcttctctggccgcacccgatgctgttcagttaccagcgctccctgccacgccagcccgtgccctctgtgcaggacaccgtgcgcaagtacctggagtcggtcggccatcctctcgaagaggaattcgatgacgggctgcgcggatcatgagtgggcttagtgagaggtagtggcaagcaggaggcaataggaggggagaggacgagacacaataaagaggaga

SEQ ID NO: 335265 - DNA, 477 bp, Homo sapiens
tccatggaaggagtttggactctggggccagacacacctaggaacccgcctggctctccctggctgtgtgaacctggccaaatgatttcccctctctaagcctcagttccccatctgtaaaatggggttgatattcccaccttgcagggatgtggcaaactcagttgaggccagatgtgccgcaggcccagccctaagtcgacttcctgtctttccatgacctgtgacctccctggggactgcaggacccacagtgcctcgccctgttccgcgtggcagtggacaagcaccaggctctgctgaaggcagccatgagcgggcagggagttgaccgccacctgtttgcgctgtacatcgtgtcccgattcctccacctgcagtcgcccttcctgacccaggttggggcacagggaaagggttagagagggaagtgggagaccatggaagaagggagaggtttcagggaaggagggtgat

SEQ ID NO: 335266 - DNA, 2805 bp, Homo sapiens
agcggagggacacgagagagaggaatcggggtttctgggtgacggtgatctcggggtgggcaggactccaaaggcccgtcgacccggtggtggactccttgcactgggattggacatatgcaagcgggagatttggggccggcgctcaaaatcggggggcgggggtggactcgggtttggaccccaggatccgatcagcggacccttgattcaacgtgaggtcccgaattgacgtccttccctcaaaacctccgggtctacaaaccaggaccctcaagacccttcagggctccagcgtgacatggctgaagcgcaccaggccgtgggcttccgaccctcgctgacctcggacggggctgaagtggaactcagtgcccctgtgctgcaggagatctacctctctggcctgcgctcctggaaaaggcatctctcacgtttctggaatgactttctcaccggtgtgtttcctgccagccccctcagttggcttttcctcttcagtgccatccagcttgcctggttcctccagctggatccttccttaggactgatggagaagatcaaagagttgctgcctgactggggtggacaacaccacgggctccggggggtcctggcagccgcgctgtttgcctcgtgtttgtggggagccctgatcttcacactgcacgtggccctgaggctgcttctgtcctaccacggctggcttcttgagccccacggagccatgtcctcccccaccaagacctggctggccctggtccgcatcttctctggccgcacccgatgctgttcagttaccagcgctccctgccacgccagcccgtgccctctgtgcaggacaccgtgcgcaagtacctggagtcggtccggcccatcctctccgacgaggacttcgactggaccgcggtcctggcgcaggaattcctgaggctgcaggcgtcgctgctgcagtggtacctgcggctcaagtcctggtgggcgtccaattatgtcagtgactggtgggaggaatttgtgtacctgcgctcccgaaatccgctgatggtgaacagcaactattacatgatggcagctcgcgctgggaatgccgtccatgccctcctcctgtaccgccaccgcctgaaccgccaggagatacccccgactttgctgatgggaatgcgccccttatgctctgcccagtacgagaagatcttcaacaccacgcggattccaggggtccaaaaagactacatccgccacctccatgacagccaacacgtggctgtcttccaccggggccgattcttccgcatggggacccactcccgaaacagcctgctttccccgagagccctggagcagcagtttcagagaatcctggatgatccctcaccggcctgcccccacgaggaacatctggcagctctgacagctgctcccaggggcacgtgggcccaggtgcggacatccctgaagacccaggcagcggaggccctggaggcggtggaaggggccgctttctttgtgtcactggatgctgagcccgcggggctcaccagggaggacccggcagcgtcgttggatgcctacgcccatgctctgctggccggccggggccatgatcgctggtttgacaaatccttcaccctaatcgtcttctctaacgggaagctgggcctcagcgtggagcactcctgggccgactgccccatctcaggacacatgtgggagttcactctggctacagaatgctttcagctgggctactcaacagacggccactgcaaggggcacccggaccccacactaccccagccccagcggctgcaatgggaccttccagaccagatccactcctccatctctctagccctgaggggagccaagatcttgtctgaaaatgtcgactgccatgtcgttccattctccctatttggcaagagcttcatccgacgctgccacctctcttcagacagcttcatccagatcgccttgcaactggcccacttccgggacaggggtcaattctgcctgacttatgagtcggccatgactcgcttattcctggaaggccggacggagacggtgcggtcttgcacgagggaggcctgcaactttgtcagggccatggaggacaaagagaagacggacccacagtgcctcgccctgttccgcgtggcagtggacaagcaccaggctctgctgaaggcagccatgagcgggcagggagttgaccgccacctgtttgcgctgtacatcgtgtcccgattcctccacctgcagtcgcccttcctgacccaggtccattcggagcagtggcagctgtccaccagccagatccctgttcagcaaatgcatctgtttgacgtccacaattacccggactatgtttcctcaggcggtggattcgggcctgctgatgaccatggttatggtgtttcttatatcttcatgggggatggcatgatcaccttccacatctccagcaaaaaatcaagcacaaaaacggattcccacaggctggggcagcacattgaggacgcactgctggatgtggcctccctgttccaggcgggacagcattttaagcgccggttcagagggtcagggaaggagaactccaggcacaggtgtggatttctctcccgccagactggggcctccaaggcctcaatgacatccaccgacttctgactccttccagcaggcagctggcctctccaaggaataagggtgaaattgccacagctggctgacacaggacaggggcaactggtttggcaaccccacatccaggccaataaagatgtgtgagctggg

SEQ ID NO: 335267 - DNA, 3430 bp, Homo sapiens
agcggagggacacgagagagaggaatcggggtttctgggtgacggtgatctcggggtgggcaggactccaaaggcccgtcgacccggtggtggactccttgcactgggattggacatatgcaagcgggagatttggggccggcgctcaaaatcggggggcgggggtggactcgggtttggaccccaggatccgatcagcggacccttgattcaacgtgaggtcccgaattgacgtccttccctcaaaacctccgggtctacaaaccaggaccctcaagacccttcagggctccagcgtgacatggctgaagcgcaccaggccgtgggcttccgaccctcgctgacctcggacggggctgaagtggaactcagtgcccctgtgctgcaggagatctacctctctggcctgcgctcctggaaaaggcatctctcacgtttctggaatgactttctcaccggtgtgtttcctgccagccccctcagttggcttttcctcttcagtgccatccagcttgcctggttcctccagctggatccttccttaggactgatggagaagatcaaagagttgctgcctgactggggtggacaacaccacgggctccggggggtcctggcagccgcgctgtttgcctcgtgtttgtggggagccctgatcttcacactgcacgtggccctgaggctgcttctgtcctaccacggctggcttcttgagccccacggagccatgtcctcccccaccaagacctggctggccctggtccgcatcttctctggccgcacccgatgctgttcagttaccagcgctccctgccacgccagcccgtgccctctgtgcaggacaccgtgcgcaagtacctggagtcggtccggcccatcctctccgacgaggacttcgactggaccgcggtcctggcgcaggaattcctgaggctgcaggcgtcgctgctgcagtggtacctgcggctcaagtcctggtgggcgtccaattatgtcagtgactggtgggaggaatttgtgtacctgcgctcccgaaatccgctgatggtgaacagcaactattacatgatggcagctcgcgctgggaatgccgtccatgccctcctcctgtaccgccaccgcctgaaccgccaggagatacccccgactttgctgatgggaatgcgccccttatgctctgcccagtacgagaagatcttcaacaccacgcggattccaggggtccaaaaagactacatccgccacctccatgacagccaacacgtggctgtcttccaccggggccgattcttccgcatggggacccactcccgaaacagcctgctttccccgagagccctggagcagcagtttcagagaatcctggatgatccctcaccggcctgcccccacgaggaacatctggcagctctgacagctgctcccaggggcacgtgggcccaggtgcggacatccctgaagacccaggcagcggaggccctggaggcggtggaaggggccgctttctttgtgtcactggatgctgagcccgcggggctcaccagggaggacccggcagcgtcgttggatgcctacgcccatgctctgctggccggccggggccatgatcgctggtttgacaaatccttcaccctaatcgtcttctctaacgggaagctgggcctcagcgtggagcactcctgggccgactgccccatctcaggacacatgtgggagttcactctggctacagaatgctttcagctgggctactcaacagacggccactgcaaggggcacccggaccccacactaccccagccccagcggctgcaatgggaccttccagaccagatccactcctccatctctctagccctgaggggagccaagatcttgtctgaaaatgtcgactgccatgtcgttccattctccctatttggcaagagcttcatccgacgctgccacctctcttcagacagcttcatccagatcgccttgcaactggcccacttccgggacaggggtcaattctgcctgacttatgagtcggccatgactcgcttattcctggaaggccggacggagacggtgcggtcttgcacgagggaggcctgcaactttgtcagggccatggaggacaaagagaagacggacccacagtgcctcgccctgttccgcgtggcagtggacaagcaccaggctctgctgaaggcagccatgagcgggcagggagttgaccgccacctgtttgcgctgtacatcgtgtcccgattcctccacctgcagtcgcccttcctgacccaggtccattcggagcagtggcagctgtccaccagccagatccctgttcagcaaatgcatctgtttgacgtccacaattacccggactatgtttcctcaggcggtggattcgggcctgctgatgaccatggttatggtgtttcttatatcttcatgggggatggcatgatcaccttccacatctccagcaaaaaatcaagcacaaaaacggattcccacaggctggggcagcacattgaggacgcactgctggatgtggcctccctgttccaggcgggacagcattttaagcgccggttcagagggtcagggaaggagaactccaggcacaggtgtggatttctctcccgccagactggggcctccaaggcctcaatgacatccaccgacttctgactccttccagcaggcagctggcctctccaaggaataagggtgaaattgccacagctggctgacacaggacaggggcaactggtttggcaaccccacatccaggccaataaagatgtgtgagctgggaaaaaaaaaaaaaaaaaaaaaaaaaaaaaaaaaaaaaaaaaaaaaaaaaaataaaaaaaaaaataaaaaaaaaaaaaatttgatgggagaaatcttttccgtgcggtttgaattagagctaatttggccttttgcccctatagggagcggactgaaaataaagtgcctttggctaaacaccctaaaaattgggaaaacccctgttaaacccacgttatttgaaaaccacaaaattggcaaatcctaagggggccaaaaaaaaaaaaggttggaacaaatgcccttttcaaaaagtggcgcaacctgaaaggggattgaaaattttgcccttcaaaatattgtaaaaataagagtgaaattttaaatttgcaggctaattttttaacaataggccgaataaacttattttttatcaaatcaatttataaccccaagcccggtttgggtaaaagcctattttggacaaaagattcgccttttaatgaactttggcttcaaacgaaaattggcaaagaaccggtttttaaaagaaagggggccttaaatgacaaattccggtaaacgggtttttatgggaaagggcccttaaaaaactttttccgtaaccaaatttttggccgccctt

SEQ ID NO: 335268 - DNA, 2754 bp, Homo sapiens
gctgagcggatgaatttatagacaccatccccctcgccttggcatgaaaagcggcaatggggtggacagcgtcaatgtctaacaggtgttgtttcatatgggtctaaaactaatgcttttctcaagaccccgcaactcagcctggaccagtttccctcctccacccacccccgaatcttgagaatcctgtactggggggagggcactgcccccgcaccatgttcttgggagagcagggctccagcgtgacatggctgaagcgcaccaggccgtgggcttccgaccctcgctgacctcggacggggctgaagtggaactcagtgcccctgtgctgcaggagatctacctctctggcctgcgctcctggaaaaggcatctctcacgtttctggaatgactttctcaccggtgtgtttcctgccagccccctcagttggcttttcctcttcagtgccatccagcttgcctggttcctccagctggatccttccttaggactgatggagaagatcaaagagttgctgcctgactggggtggacaacaccacgggctccggggggtcctggcagccgcgctgtttgcctcgtgtttgtggggagccctgatcttcacactgcacgtggccctgaggctgcttctgtcctaccacggctggcttcttgagccccacggagccatgtcctcccccaccaagacctggctggccctggtccgcatcttctctggccgcacccgatgctgttcagttaccagcgctccctgccacgccagcccgtgccctctgtgcaggacaccgtgcgcaagtacctggagtcggtccggcccatcctctccgacgaggacttcgactggaccgcggtcctggcgcaggaattcctgaggctgcaggcgtcgctgctgcagtggtacctgcggctcaagtcctggtgggcgtccaattatgtcagtgactggtgggaggaatttgtgtacctgcgctcccgaaatccgctgatggtgaacagcaactattacatgatggcagctcgcgctgggaatgccgtccatgccctcctcctgtaccgccaccgcctgaaccgccaggagatacccccgactttgctgatgggaatgcgccccttatgctctgcccagtacgagaagatcttcaacaccacgcggattccaggggtccaaaaagactacatccgccacctccatgacagccaacacgtggctgtcttccaccggggccgattcttccgcatggggacccactcccgaaacagcctgctttccccgagagccctggagcagcagtttcagagaatcctggatgatccctcaccggcctgcccccacgaggaacatctggcagctctgacagctgctcccaggggcacgtgggcccaggtgcggacatccctgaagacccaggcagcggaggccctggaggcggtggaaggggccgctttctttgtgtcactggatgctgagcccgcggggctcaccagggaggacccggcagcgtcgttggatgcctacgcccatgctctgctggccggccggggccatgatcgctggtttgacaaatccttcaccctaatcgtcttctctaacgggaagctgggcctcagcgtggagcactcctgggccgactgccccatctcaggacacatgtgggagttcactctggctacagaatgctttcagctgggctactcaacagacggccactgcaaggggcacccggaccccacactaccccagccccagcggctgcaatgggaccttccagaccagatccactcctccatctctctagccctgaggggagccaagatcttgtctgaaaatgtcgactgccatgtcgttccattctccctatttggcaagagcttcatccgacgctgccacctctcttcagacagcttcatccagatcgccttgcaactggcccacttccgggacaggggtcaattctgcctgacttatgagtcggccatgactcgcttattcctggaaggccggacggagacggtgcggtcttgcacgagggaggcctgcaactttgtcagggccatggaggacaaagagaagacggacccacagtgcctcgccctgttccgcgtggcagtggacaagcaccaggctctgctgaaggcagccatgagcgggcagggagttgaccgccacctgtttgcgctgtacatcgtgtcccgattcctccacctgcagtcgcccttcctgacccaggtccattcggagcagtggcagctgtccaccagccagatccctgttcagcaaatgcatctgtttgacgtccacaattacccggactatgtttcctcaggcggtggattcgggcctgctgatgaccatggttatggtgtttcttatatcttcatgggggatggcatgatcaccttccacatctccagcaaaaaatcaagcacaaaaacggattcccacaggctggggcagcacattgaggacgcactgctggatgtggcctccctgttccaggcgggacagcattttaagcgccggttcagagggtcagggaaggagaactccaggcacaggtgtggatttctctcccgccagactggggcctccaaggcctcaatgacatccaccgacttctgactccttccagcaggcagctggcctctccaaggaataagggtgaaattgccacagctggctgacacaggacaggggcaactggtttggcaaccccacatccaggccaataaagatgtgtgagctggg

SEQ ID NO: 335269 - DNA, 2104 bp, Homo sapiens
agcggagggacacgagagagaggaatcggggtttctgggtgacggtgatctcggggtgggcaggactccaaaggcccgtcgacccggtggtggactccttgcactgggattggacatatgcaagcgggagatttggggccggcgctcaaaatcggggggcgggggtggactcgggtttggaccccaggatccgatcagcggacccttgattcaacgtgaggtcccgaattgacgtccttccctcaaaacctccgggtctacaaaccaggaccctcaagacccttcagggctccagcgtgacatggctgaagcgcaccaggccgtgggcttccgaccctcgctgacctcggacggggctgaagtggaactcagtgcccctgtgctgcaggagatctacctctctggcctgtaccgccaccgcctgaaccgccaggagatacccccgactttgctgatgggaatgcgccccttatgctctgcccagtacgagaagatcttcaacaccacgcggattccaggggtccaaaaagactacatccgccacctccatgacagccaacacgtggctgtcttccaccggggccgattcttccgcatggggacccactcccgaaacagcctgctttccccgagagccctggagcagcagtttcagagaatcctggatgatccctcaccggcctgcccccacgaggaacatctggcagctctgacagctgctcccaggggcacgtgggcccaggtgcggacatccctgaagacccaggcagcggaggccctggaggcggtggaaggggccgctttctttgtgtcactggatgctgagcccgcggggctcaccagggaggacccggcagcgtcgttggatgcctacgcccatgctctgctggccggccggggccatgatcgctggtttgacaaatccttcaccctaatcgtcttctctaacgggaagctgggcctcagcgtggagcactcctgggccgactgccccatctcaggacacatgtgggagttcactctggctacagaatgctttcagctgggctactcaacagacggccactgcaaggggcacccggaccccacactaccccagccccagcggctgcaatgggaccttccagaccagatccactcctccatctctctagccctgaggggagccaagatcttgtctgaaaatgtcgactgccatgtcgttccattctccctatttggcaagagcttcatccgacgctgccacctctcttcagacagcttcatccagatcgccttgcaactggcccacttccgggacaggggtcaattctgcctgacttatgagtcggccatgactcgcttattcctggaaggccggacggagacggtgcggtcttgcacgagggaggcctgcaactttgtcagggccatggaggacaaagagaagacggacccacagtgcctcgccctgttccgcgtggcagtggacaagcaccaggctctgctgaaggcagccatgagcgggcagggagttgaccgccacctgtttgcgctgtacatcgtgtcccgattcctccacctgcagtcgcccttcctgacccaggtccattcggagcagtggcagctgtccaccagccagatccctgttcagcaaatgcatctgtttgacgtccacaattacccggactatgtttcctcaggcggtggattcgggcctgctgatgaccatggttatggtgtttcttatatcttcatgggggatggcatgatcaccttccacatctccagcaaaaaatcaagcacaaaaacggattcccacaggctggggcagcacattgaggacgcactgctggatgtggcctccctgttccaggcgggacagcattttaagcgccggttcagagggtcagggaaggagaactccaggcacaggtgtggatttctctcccgccagactggggcctccaaggcctcaatgacatccaccgacttctgactccttccagcaggcagctggcctctccaaggaataagggtgaaattgccacagctggctgacacaggacaggggcaactggtttggcaaccccacatccaggccaataaagatgtgtgagctggg

SEQ ID NO: 335270 - DNA, 1200 bp, Homo sapiens
agcggagggacacgagagagaggaatcggggtttctgggtgacggtgatctcggggtgggcaggactccaaaggcccgtcgacccggtggtggactccttgcactgggattggacatatgcaagcgggagatttggggccggcgctcaaaatcggggggcgggggtggactcgggtttggaccccaggatccgatcagcggacccttgattcaacgtgaggtcccgaattgacgtccttccctcaaaacctccgggtctacaaaccaggaccctcaagacccttcagggctccagcgtgacatggctgaagcgcaccaggccgtgggcttccgaccctcgctgacctcggacggggctgaagtggaactcagtgcccctgtgctgcaggagatctacctctctggcctgcgctcctggaaaaggcatctctcacgtttctggaatgactttctcaccggtgtgtttcctgccagccccctcagttggcttttcctcttcagtgccatccagcttgcctggttcctccagctggatccttccttaggactgatggagaagatcaaagagttgctgcctgactggggtggacaacaccacgggctccggggggtcctggcagccgcgctgtttgcctcgtgtttgtggggagccctgatcttcacactgcacgtggccctgaggctgcttctgtcctaccacggctggcttcttgagccccacggagccatgtcctcccccaccaagacctggctggccctggtccgcatcttctctggccgcacccgatgctgttcagttaccagcgctccctgccacgccagcccgtgccctctgtgcaggacaccgtgcgcaagtacctggagtcggtccggcccatcctctccgacgaggacttcgactggaccgcggtcctggcgcaggaattcctgaggctgcaggcgtcgctgctgcagtggtacctgcggctcaagtcctggtgggcgtccaattatgtcagtgactggtgggaggaatttgtgtacctgcgctcccgaaatccgctgatggtgaacagcaactattacatgatggcagctcgcgctgggaatgccgtccatgccctcctcctgtaccgccaccgcctgaaccgccaggagatacccccggtgagagggccccagtgggttagggatggaggtgtggtcctgtggcctttgggc

SEQ ID NO: 335271 - DNA, 2405 bp, Homo sapiens
gctgagcggatgaatttatagacaccatccccctcgccttggcatgaaaagcggcaatggggtggacagcgtcaatgtctaacagggctccagcgtgacatggctgaagcgcaccaggccgtgggcttccgaccctcgctgacctcggacggggctgaagtggaactcagtgcccctgtgctgcaggagatctacctctctggcctgcgctcctggaaaaggcatctctcacgtttctggtgccatccagcttgcctggttcctccagctggatccttccttaggactgatggagaagatcaaagagttgctgcctgactggccctggtccgcatcttctctggccgcacccgatgctgttcagttaccagcgctccctgccacgccagcccgtgccctctgtgcaggacaccgtgcgcaagtacctggagtcggtccggcccatcctctccgacgaggacttcgactggaccgcggtcctggcgcaggaattcctgaggctgcaggcgtcgctgctgcagtggtacctgcggctcaagtcctggtgggcgtccaattatgtcagtgactggtgggaggaatttgtgtacctgcgctcccgaaatccgctgatggtgaacagcaactattacatgatggacttcctgtatgtcacacccacgcctctgcaggcagctcgcgctgggaatgccgtccatgccctcctcctgtaccgccaccgcctgaaccgccaggagatacccccgactttgctgatgggaatgcgccccttatgctctgcccagtacgagaagatcttcaacaccacgcggattccaggggtccaaaaagactacatccgccacctccatgacagccaacacgtggctgtcttccaccggggccgattcttccgcatggggacccactcccgaaacagcctgctttccccgagagccctggagcagcagtttcagagaatcctggatgatccctcaccggcctgcccccacgaggaacatctggcagctctgacagctgctcccaggggcacgtgggcccaggtgcggacatccctgaagacccaggcagcggaggccctggaggcggtggaaggggccgctttctttgtgtcactggatgctgagcccgcggggctcaccagggaggacccggcagcgtcgttggatgcctacgcccatgctctgctggccggccggggccatgatcgctggtttgacaaatccttcaccctaatcgtcttctctaacgggaagctgggcctcagcgtggagcactcctgggccgactgccccatctcaggacacatgtgggagttcactctggctacagaatgctttcagctgggctactcaacagacggccactgcaaggggcacccggaccccacactaccccagccccagcggctgcaatgggaccttccagaccagatccactcctccatctctctagccctgaggggagccaagatcttgtctgaaaatgtcgactgccatgtcgttccattctccctatttggcaagagcttcatccgacgctgccacctctcttcagacagcttcatccagatcgccttgcaactggcccacttccgggacaggggtcaattctgcctgacttatgagtcggccatgactcgcttattcctggaaggccggacggagacggtgcggtcttgcacgagggaggcctgcaactttgtcagggccatggaggacaaagagaagacggacccacagtgcctcgccctgttccgcgtggcagtggacaagcaccaggctctgctgaaggcagccatgagcgggcagggagttgaccgccacctgtttgcgctgtacatcgtgtcccgattcctccacctgcagtcgcccttcctgacccaggtccattcggagcagtggcagctgtccaccagccagatccctgttcagcaaatgcatctgtttgacgtccacaattacccggactatgtttcctcaggcggtggattcgggcctgctgatgaccatggttatggtgtttcttatatcttcatgggggatggcatgatcaccttccacatctccagcaaaaaatcaagcacaaaaacggattcccacaggctggggcagcacattgaggacgcactgctggatgtggcctccctgttccaggcgggacagcattttaagcgccggttcagagggtcagggaaggagaactccaggcacaggtgtggatttctctcccgccagactggggcctccaaggcctcaatgacatccaccgacttctgactccttccagcaggcagctggcctctccaaggaataagggtgaaattgccacagctggctgacacaggacaggggcaactggtttggcaaccccacatccaggccaataaagatgtgtgagctggg

SEQ ID NO: 335272 - DNA, 917 bp, Homo sapiens
tccatggaaggagtttggactctggggccagacacacctaggaacccgcctggctctccctggctgtgtgaacctggccaaatgatttcccctctctaagcctcagttccccatctgtaaaatggggttgatattcccaccttgcagggatgtggcaaactcagttgaggccagatgtgccgcaggcccagccctaagtcgacttcctgtctttccatgacctgtgacctccctggggactgcaggacccacagtgcctcgccctgttccgcgtggcagtggacaagcaccaggctctgctgaaggcagccatgagcgggcagggagttgaccgccacctgtttgcgctgtacatcgtgtcccgattcctccacctgcagtcgcccttcctgacccaggtccattcggagcagtggcagctgtccaccagccagatccctgttcagcaaatgcatctgtttgacgtccacaattacccggactatgtttcctcaggcggtggattcgggcctgctgatgaccatggttatggtgtttcttatatcttcatgggggatggcatgatcaccttccacatctccagcaaaaaatcaagcacaaaaacggattcccacaggctggggcagcacattgaggacgcactgctggatgtggcctccctgttccaggcgggacagcattttaagcgccggttcagagggtcagggaaggagaactccaggcacaggtgtggatttctctcccgccagactggggcctccaaggcctcaatgacatccaccgacttctgactccttccagcaggcagctggcctctccaaggaataagggtgaaattgccacagctggctgacacaggacaggggcaactggtttggcaaccccacatccaggccaataaagatgtgtgagctggg

SEQ ID NO: 335273 - DNA, 617 bp, Homo sapiens
gctgagcggatgaatttatagacaccatccccctcgccttggcatgaaaagcggcaatggggtggacagcgtcaatgtctaacaggtgttgtttcatatgggtctaaaactaatgcttttctcaagaccccgcaactcagcctggaccagtttccctcctccacccacccccgaatcttgagaatcctgtactggggggagggcactgcccccgcaccatgttcttgggagagcagggctccagcgtgacatggctgaagcgcaccaggccgtgggcttccgaccctcgctgacctcggacggggctgaagtggaactcagtgcccctgtgctgcaggagatctacctctctggcctccctgttccaggcgggacagcattttaagcgccggttcagagggtcagggaaggagaactccaggcacaggtgtggatttctctcccgccagactggggcctccaaggcctcaatgacatccaccgacttctgactccttccagcaggcagctggcctctccaaggaataagggtgaaattgccacagctggctgacacaggacaggggcaactggtttggcaaccccacatccaggccaataaagatgtgtgagctggg

SEQ ID NO: 335274 - DNA, 627 bp, Homo sapiens
ctggatccttccttaggactgatggagaagatcaaagagttgctgcctgactggtgaggtccccccactccagcccagtaacccccaatcactctcccttcacccagtaagttcctctgtcattgtggtgtacctgctaaagaaaagtaacctctgagacttacattgggtcagattaataaaggcatggcatgaagaaaaaggaggtgaggccgggcacagtggctcacccctgtaatcccagcacattgggcattgggaggctgaggtgggtgtatcgcttgaggtcaggagttcgagaccagcctggccaacatggtgaaaccttgtctctactaaaaatacaaaaattaggccaggcatggtggctcatgcctgtaatcccagcactttggaaggctgaggcacgtggatcaactgagatcaggagttcaagaccagcctggccaacagggtgaaaccctgtctctactaaaaatacaaaaaattagctgggcgtggtggcaggagcctgtaattccagctactagggaggctgaggcaggagaatcgcttgaacccgggaggtggaggttgcagtgagccgagattgcgccattgcactccagcttgggtgacaagagcgaa

SEQ ID NO: 335275 - DNA, 397 bp, Homo sapiens
ggtccgagggagaagaggagagggacgtgggtgtgggtggtgagacgagtgaggggcgtggccagatagggcgtggtcaggagaagggcgtggttagggagaaggaggcccggatttacgggtaaaaaaaaagccagggatgcagggagtgaagtggagccaagggccggaactgcagatctctgtcctgcacatgtgatgggctcctgtcctcaggtccattcggagcagtggcagctgtccaccagccagatccctgttcagcaaatgcatctgtttgacgtccacaattacccggactatgtttcctcaggcggtggattcgggcctgtgagtggagctgggcgcgctggcccccagaggaaagagggggctggggggcctgcactcctgcata

SEQ ID NO: 335276 - DNA, 888 bp, Homo sapiens
ggtggtgagacgagtgaggggcgtggccagatagggcgtggtcaggagaagggcgtggttagggagaaggaggcccggatttacgggtaaaaaaaaagccagggatgcagggagtgaagtggagccaagggccggaactgcagatctctgtcctgcacatgtgatgggctcctgtcctcaggtccattcggagcagtggcagctgtccaccagccagatccctgttcagcaaatgcatctgtttgacgtccacaattacccggactatgtttcctcaggcggtggattcgggcctgctgatgaccatggttatggtgtttcttatatcttcatgggggatggcatgatcaccttccacatctccagcaaaaaatcaagcacaaaaacggattcccacaggctggggcagcacattgaggacgcactgctggatgtggcctccctgttccaggcgggacagcattttaagcgccggttcagagggtcagggaaggagaactccaggcacaggtgtggatttctctcccgccagactggggcctccaaggcctcaatgacatccaccgacttctgactccttccagcaggcagctggcctctccaaggaataagggtgaaattgccacagctggctgacacaggacaggggcaactggtttggcaaccccacatccaggccaataaagatgtgtgagctgggaaaccaacaccccctttcaacaccatctaccccccacaacaacaaacaccacctcacaacaccctaacaaccatactcacacacaccaccgccaccaacaacacacaaaacacgcggccccccacaaatacaacactcacaacatacaacacaaaaacagaaacaaatcattcaaaaaaacccaccca

SEQ ID NO: 335277 - DNA, 2993 bp, Homo sapiens
agcggagggacacgagagagaggaatcggggtttctgggtgacggtgatctcggggtgggcaggactccaaaggcccgtcgacccggtggtggactccttgcactgggattggacatatgcaagcgggagatttggggccggcgctcaaaatcggggggcgggggtggactcgggtttggaccccaggatccgatcagcggacccttgattcaacgtgaggtcccgaattgacgtccttccctcaaaacctccgggtctacaaaccaggaccctcaagacccttcagggctccagcgtgacatggctgaagcgcaccaggccgtgggcttccgaccctcgctgacctcggacggggctgaagtggaactcagtgcccctgtgctgcaggagatctacctctctggcctgcgctcctggaaaaggcatctctcacgtttctggaatgactttctcaccggtgtgtttcctgccagccccctcagttggcttttcctcttcagtgccatccagcttgcctggttcctccagctggatccttccttaggactgatggagaagatcaaagagttgctgcctgactggggtggacaacaccacgggctccggggggtcctggcagccgcgctgtttgcctcgtgtttgtggggagccctgatcttcacactgcacgtggccctgaggctgcttctgtcctaccacggctggcttcttgagccccacggagccatgtcctcccccaccaagacctggctggccctggtccgcatcttctctggccgcacccgatgctgttcagttaccagcgctccctgccacgccagcccgtgccctctgtgcaggacaccgtgcgcaagtacctggagtcggtccggcccatcctctccgacgaggacttcgactggaccgcggtcctggcgcaggaattcctgaggctgcaggcgtcgctgctgcagtggtacctgcggctcaagtcctggtgggcgtccaattatgtcagtgactggtgggaggaatttgtgtacctgcgctcccgaaatccgctgatggtgaacagcaactattacatgatggcagctcgcgctgggaatgccgtccatgccctcctcctgtaccgccaccgcctgaaccgccaggagatacccccgactttgctgatgggaatgcgccccttatgctctgcccagtacgagaagatcttcaacaccacgcggattccaggggtccaaaaagactacatccgccacctccatgacagccaacacgtggctgtcttccaccggggccgattcttccgcatggggacccactcccgaaacagcctgctttccccgagagccctggagcagcagtttcagagaatcctggatgatccctcaccggcctgcccccacgaggaacatctggcagctctgacagctgctcccaggggcacgtgggcccaggtgcggacatccctgaagacccaggcagcggaggccctggaggcggtggaaggggccgctttctttgtgtcactggatgctgagcccgcggggctcaccagggaggacccggcagcgtcgttggatgcctacgcccatgctctgctggccggccggggccatgatcgctggtttgacaaatccttcaccctaatcgtcttctctaacgggaagctgggcctcagcgtggagcactcctgggccgactgccccatctcaggacacatgtgggagttcactctggctacagaatgctttcagctgggctactcaacagacggccactgcaaggggcacccggaccccacactaccccagccccagcggctgcaatgggaccttccagaccagatccactcctccatctctctagccctgaggggagccaagatcttgtctgaaaatgtcgactgccatgtcgttccattctccctatttggcaagagcttcatccgacgctgccacctctcttcagacagcttcatccagatcgccttgcaactggcccacttccgggacaggggtcaattctgcctgacttatgagtcggccatgactcgcttattcctggaaggccggacggagacggtgcggtcttgcacgagggaggcctgcaactttgtcagggccatggaggacaaagagaagacggacccacagtgcctcgccctgttccgcgtggcagtggacaagcaccaggctctgctgaaggcagccatgagcgggcagggagttgaccgccacctgtttgcgctgtacatcgtgtcccgattcctccacctgcagtcgcccttcctgacccaggtccattcggagcagtggcagctgtccaccagccagatccctgttcagcaaatgcatctgtttgacgtccacaattacccggactatgtttcctcaggcggtggattcgggcctgctgatgaccatggttatggtgtttcttatatcttcatgggggatggcatgatcaccttccacatctccagcaaaaaatcaagcacaaaaacggattcccacaggctggggcagcacattgaggacgcactgctggatgtggcctccctgttccaggcgggacagcattttaagcgccggttcagagggtcagggaaggagaactccaggcacaggtgtggatttctctcccgccagactggggcctccaaggcctcaatgacatccaccgacttctgactccttccagcaggcagctggcctctccaaggaataagggtgaaattgccacagctggctgacacaggacaggggcaactggtttggcaaccccacatccaggccaataaagatgtgtgagctgggaaaccaacaccccctttcaacaccatctaccccccacaacaacaaacaccacctcacaacaccctaacaaccatactcacacacaccaccgccaccaacaacacacaaaacacgcggccccccacaaatacaacactcacaacatacaacacaaaaacagaaacaaatcattcaaaaaaacccaccca

SEQ ID NO: 335278 - DNA, 2861 bp, Homo sapiens
agcggagggacacgagagagaggaatcggggtttctgggtgacggtgatctcggggtgggcaggactccaaaggcccgtcgacccggtggtggactccttgcactgggattggacatatgcaagcgggagatttggggccggcgctcaaaatcggggggcgggggtggactcgggtttggaccccaggatccgatcagcggacccttgattcaacgtgaggtcccgaattgacgtccttccctcaaaacctccgggtctacaaaccaggaccctcaagacccttcagggctccagcgtgacatggctgaagcgcaccaggccgtgggcttccgaccctcgctgacctcggacggggctgaagtggaactcagtgcccctgtgctgcaggagatctacctctctggcctgcgctcctggaaaaggcatctctcacgtttctggaatgactttctcaccggtgtgtttcctgccagccccctcagttggcttttcctcttcagtgccatccagcttgcctggttcctccagctggatccttccttaggactgatggagaagatcaaagagttgctgcctgactggggtggacaacaccacgggctccggggggtcctggcagccgcgctgtttgcctcgtgtttgtggggagccctgatcttcacactgcacgtggccctgaggctgcttctgtcctaccacggctggcttcttgagccccacggagccatgtcctcccccaccaagacctggctggccctggtccgcatcttctctggccgcacccgatgctgttcagttaccagcgctccctgccacgccagcccgtgccctctgtgcaggacaccgtgcgcaagtacctggagtcggtccggcccatcctctccgacgaggacttcgactggaccgcggtcctggcgcaggaattcctgaggctgcaggcgtcgctgctgcagtggtacctgcggctcaagtcctggtgggcgtccaattatgtcagtgactggtgggaggaatttgtgtacctgcgctcccgaaatccgctgatggtgaacagcaactattacatgatggcagctcgcgctgggaatgccgtccatgccctcctcctgtaccgccaccgcctgaaccgccaggagatacccccgactttgctgatgggaatgcgccccttatgctctgcccagtacgagaagatcttcaacaccacgcggattccaggggtccaaaaagactacatccgccacctccatgacagccaacacgtggctgtcttccaccggggccgattcttccgcatggggacccactcccgaaacagcctgctttccccgagagccctggagcagcagtttcagagaatcctggatgatccctcaccggcctgcccccacgaggaacatctggcagctctgacagctgctcccaggggcacgtgggcccaggtgcggacatccctgaagacccaggcagcggaggccctggaggcggtggaaggggccgctttctttgtgtcactggatgctgagcccgcggggctcaccagggaggacccggcagcgtcgttggatgcctacgcccatgctctgctggccggccggggccatgatcgctggtttgacaaatccttcaccctaatcgtcttctctaacgggaagctgggcctcagcgtggagcactcctgggccgactgccccatctcaggacacatgtgggagttcactctggctacagaatgctttcagctgggctactcaacagacggccactgcaaggggcacccggaccccacactaccccagccccagcggctgcaatgggaccttccagaccagatccactcctccatctctctagccctgaggggagccaagatcttgtctgaaaatgtcgactgccatgtcgttccattctccctatttggcaagagcttcatccgacgctgccacctctcttcagacagcttcatccagatcgccttgcaactggcccacttccgggacaggggtcaattctgcctgacttatgagtcggccatgactcgcttattcctggaaggccggacggagacggtgcggtcttgcacgagggaggcctgcaactttgtcagggccatggaggacaaagagaagacggacccacagtgcctcgccctgttccgcgtggcagtggacaagcaccaggctctgctgaaggcagccatgagcgggcagggagttgaccgccacctgtttgcgctgtacatcgtgtcccgattcctccacctgcagtcgcccttcctgacccaggtccattcggagcagtggcagctgtccaccagccagatccctgttcagcaaatgcatctgtttgacgtccacaattacccggactatgtttcctcaggcggtggattcgggcctgctgatgaccatggttatggtgtttcttatatcttcatgggggatggcatgatcaccttccacatctccagcaaaaaatcaagcacaaaaacggattcccacaggctggggcagcacattgaggacgcactgctggatgtggcctccctgttccaggcgggacagcattttaagcgccggttcagagggtcagggaaggagaactccaggcacaggtgtggatttctctcccgccagactggggcctccaaggcctcaatgacatccaccgacttctgactccttccagcaggcagctggcctctccaaggaataagggtgaaattgccacagctggctgacacaggacaggggcaactggtttggcaaccccacatccaggccaataaagatgtgtgagctggggaaataaataaatgttccgtaaacttaagaaattaataaaactcaaggggggggcc

SEQ ID NO: 335279 - DNA, 2736 bp, Homo sapiens
agcggagggacacgagagagaggaatcggggtttctgggtgacggtgatctcggggtgggcaggactccaaaggcccgtcgacccggtggtggactccttgcactgggattggacatatgcaagcgggagatttggggccggcgctcaaaatcggggggcgggggtggactcgggtttggaccccaggatccgatcagcggacccttgattcaacgtgggctccagcgtgacatggctgaagcgcaccaggccgtgggcttccgaccctcgctgacctcggacggggctgaagtggaactcagtgcccctgtgctgcaggagatctacctctctggcctgcgctcctggaaaaggcatctctcacgtttctggaatgactttctcaccggtgtgtttcctgccagccccctcagttggcttttcctcttcagtgccatccagcttgcctggttcctccagctggatccttccttaggactgatggagaagatcaaagagttgctgcctgactggggtggacaacaccacgggctccggggggtcctggcagccgcgctgtttgcctcgtgtttgtggggagccctgatcttcacactgcacgtggccctgaggctgcttctgtcctaccacggctggcttcttgagccccacggagccatgtcctcccccaccaagacctggctggccctggtccgcatcttctctggccgcacccgatgctgttcagttaccagcgctccctgccacgccagcccgtgccctctgtgcaggacaccgtgcgcaagtacctggagtcggtccggcccatcctctccgacgaggacttcgactggaccgcggtcctggcgcaggaattcctgaggctgcaggcgtcgctgctgcagtggtacctgcggctcaagtcctggtgggcgtccaattatgtcagtgactggtgggaggaatttgtgtacctgcgctcccgaaatccgctgatggtgaacagcaactattacatgatggcagctcgcgctgggaatgccgtccatgccctcctcctgtaccgccaccgcctgaaccgccaggagatacccccgactttgctgatgggaatgcgccccttatgctctgcccagtacgagaagatcttcaacaccacgcggattccaggggtccaaaaagactacatccgccacctccatgacagccaacacgtggctgtcttccaccggggccgattcttccgcatggggacccactcccgaaacagcctgctttccccgagagccctggagcagcagtttcagagaatcctggatgatccctcaccggcctgcccccacgaggaacatctggcagctctgacagctgctcccaggggcacgtgggcccaggtgcggacatccctgaagacccaggcagcggaggccctggaggcggtggaaggggccgctttctttgtgtcactggatgctgagcccgcggggctcaccagggaggacccggcagcgtcgttggatgcctacgcccatgctctgctggccggccggggccatgatcgctggtttgacaaatccttcaccctaatcgtcttctctaacgggaagctgggcctcagcgtggagcactcctgggccgactgccccatctcaggacacatgtgggagttcactctggctacagaatgctttcagctgggctactcaacagacggccactgcaaggggcacccggaccccacactaccccagccccagcggctgcaatgggaccttccagaccagatccactcctccatctctctagccctgaggggagccaagatcttgtctgaaaatgtcgactgccatgtcgttccattctccctatttggcaagagcttcatccgacgctgccacctctcttcagacagcttcatccagatcgccttgcaactggcccacttccgggacaggggtcaattctgcctgacttatgagtcggccatgactcgcttattcctggaaggccggacggagacggtgcggtcttgcacgagggaggcctgcaactttgtcagggccatggaggacaaagagaagacggacccacagtgcctcgccctgttccgcgtggcagtggacaagcaccaggctctgctgaaggcagccatgagcgggcagggagttgaccgccacctgtttgcgctgtacatcgtgtcccgattcctccacctgcagtcgcccttcctgacccaggtccattcggagcagtggcagctgtccaccagccagatccctgttcagcaaatgcatctgtttgacgtccacaattacccggactatgtttcctcaggcggtggattcgggcctgctgatgaccatggttatggtgtttcttatatcttcatgggggatggcatgatcaccttccacatctccagcaaaaaatcaagcacaaaaacggattcccacaggctggggcagcacattgaggacgcactgctggatgtggcctccctgttccaggcgggacagcattttaagcgccggttcagagggtcagggaaggagaactccaggcacaggtgtggatttctctcccgccagactggggcctccaaggcctcaatgacatccaccgacttctgactccttccagcaggcagctggcctctccaaggaataagggtgaaattgccacagctggctgacacaggacaggggcaactggtttggcaaccccacatccaggccaataaagatgtgtgagctggg

SEQ ID NO: 335280 - DNA, 2857 bp, Homo sapiens
agcggagggacacgagagagaggaatcggggtttctgggtgacggtgatctcggggtgggcaggactccaaaggcccgtcgacccggtggtggactccttgcactgggattggacatatgcaagcgggagatttggggccggcgctcaaaatcggggggcgggggtggactcgggtttggaccccaggatccgatcagcggacccttgattcaacgtgggctccagcgtgacatggctgaagcgcaccaggccgtgggcttccgaccctcgctgacctcggacggggctgaagtggaactcagtgcccctgtgctgcaggagatctacctctctggcctgcgctcctggaaaaggcatctctcacgtttctggggtcttacttactttgttacccaggctggagtgcagtgtcaccatcacagctcacttcatccctgaactcctgggctcaagcgatcctcctgcttcagccttccaagtagctgggactaagaatgactttctcaccggtgtgtttcctgccagccccctcagttggcttttcctcttcagtgccatccagcttgcctggttcctccagctggatccttccttaggactgatggagaagatcaaagagttgctgcctgactggggtggacaacaccacgggctccggggggtcctggcagccgcgctgtttgcctcgtgtttgtggggagccctgatcttcacactgcacgtggccctgaggctgcttctgtcctaccacggctggcttcttgagccccacggagccatgtcctcccccaccaagacctggctggccctggtccgcatcttctctggccgcacccgatgctgttcagttaccagcgctccctgccacgccagcccgtgccctctgtgcaggacaccgtgcgcaagtacctggagtcggtccggcccatcctctccgacgaggacttcgactggaccgcggtcctggcgcaggaattcctgaggctgcaggcgtcgctgctgcagtggtacctgcggctcaagtcctggtgggcgtccaattatgtcagtgactggtgggaggaatttgtgtacctgcgctcccgaaatccgctgatggtgaacagcaactattacatgatggcagctcgcgctgggaatgccgtccatgccctcctcctgtaccgccaccgcctgaaccgccaggagatacccccgactttgctgatgggaatgcgccccttatgctctgcccagtacgagaagatcttcaacaccacgcggattccaggggtccaaaaagactacatccgccacctccatgacagccaacacgtggctgtcttccaccggggccgattcttccgcatggggacccactcccgaaacagcctgctttccccgagagccctggagcagcagtttcagagaatcctggatgatccctcaccggcctgcccccacgaggaacatctggcagctctgacagctgctcccaggggcacgtgggcccaggtgcggacatccctgaagacccaggcagcggaggccctggaggcggtggaaggggccgctttctttgtgtcactggatgctgagcccgcggggctcaccagggaggacccggcagcgtcgttggatgcctacgcccatgctctgctggccggccggggccatgatcgctggtttgacaaatccttcaccctaatcgtcttctctaacgggaagctgggcctcagcgtggagcactcctgggccgactgccccatctcaggacacatgtgggagttcactctggctacagaatgctttcagctgggctactcaacagacggccactgcaaggggcacccggaccccacactaccccagccccagcggctgcaatgggaccttccagaccagatccactcctccatctctctagccctgaggggagccaagatcttgtctgaaaatgtcgactgccatgtcgttccattctccctatttggcaagagcttcatccgacgctgccacctctcttcagacagcttcatccagatcgccttgcaactggcccacttccgggacaggggtcaattctgcctgacttatgagtcggccatgactcgcttattcctggaaggccggacggagacggtgcggtcttgcacgagggaggcctgcaactttgtcagggccatggaggacaaagagaagacggacccacagtgcctcgccctgttccgcgtggcagtggacaagcaccaggctctgctgaaggcagccatgagcgggcagggagttgaccgccacctgtttgcgctgtacatcgtgtcccgattcctccacctgcagtcgcccttcctgacccaggtccattcggagcagtggcagctgtccaccagccagatccctgttcagcaaatgcatctgtttgacgtccacaattacccggactatgtttcctcaggcggtggattcgggcctgctgatgaccatggttatggtgtttcttatatcttcatgggggatggcatgatcaccttccacatctccagcaaaaaatcaagcacaaaaacggattcccacaggctggggcagcacattgaggacgcactgctggatgtggcctccctgttccaggcgggacagcattttaagcgccggttcagagggtcagggaaggagaactccaggcacaggtgtggatttctctcccgccagactggggcctccaaggcctcaatgacatccaccgacttctgactccttccagcaggcagctggcctctccaaggaataagggtgaaattgccacagctggctgacacaggacaggggcaactggtttggcaaccccacatccaggccaataaagatgtgtgagctggg

SEQ ID NO: 335281 - DNA, 2450 bp, Homo sapiens
agcggagggacacgagagagaggaatcggggtttctgggtgacggtgatctcggggtgggcaggactccaaaggcccgtcgacccggtggtggactccttgcactgggattggacatatgcaagcgggagatttggggccggcgctcaaaatcggggggcgggggtggactcgggtttggaccccaggatccgatcagcggacccttgattcaacgtgaggtcccgaattgacgtccttccctcaaaacctccgggtcctggcagccgcgctgtttgcctcgtgtttgtggggagccctgatcttcacactgcacgtggccctgaggctgcttctgtcctaccacggctggcttcttgagccccacggagccatgtcctcccccaccaagacctggctggccctggtccgcatcttctctggccgcacccgatgctgttcagttaccagcgctccctgccacgccagcccgtgccctctgtgcaggacaccgtgcgcaagtacctggagtcggtccggcccatcctctccgacgaggacttcgactggaccgcggtcctggcgcaggaattcctgaggctgcaggcgtcgctgctgcagtggtacctgcggctcaagtcctggtgggcgtccaattatgtcagtgactggtgggaggaatttgtgtacctgcgctcccgaaatccgctgatggtgaacagcaactattacatgatggcagctcgcgctgggaatgccgtccatgccctcctcctgtaccgccaccgcctgaaccgccaggagatacccccgactttgctgatgggaatgcgccccttatgctctgcccagtacgagaagatcttcaacaccacgcggattccaggggtccaaaaagactacatccgccacctccatgacagccaacacgtggctgtcttccaccggggccgattcttccgcatggggacccactcccgaaacagcctgctttccccgagagccctggagcagcagtttcagagaatcctggatgatccctcaccggcctgcccccacgaggaacatctggcagctctgacagctgctcccaggggcacgtgggcccaggtgcggacatccctgaagacccaggcagcggaggccctggaggcggtggaaggggccgctttctttgtgtcactggatgctgagcccgcggggctcaccagggaggacccggcagcgtcgttggatgcctacgcccatgctctgctggccggccggggccatgatcgctggtttgacaaatccttcaccctaatcgtcttctctaacgggaagctgggcctcagcgtggagcactcctgggccgactgccccatctcaggacacatgtgggagttcactctggctacagaatgctttcagctgggctactcaacagacggccactgcaaggggcacccggaccccacactaccccagccccagcggctgcaatgggaccttccagaccagatccactcctccatctctctagccctgaggggagccaagatcttgtctgaaaatgtcgactgccatgtcgttccattctccctatttggcaagagcttcatccgacgctgccacctctcttcagacagcttcatccagatcgccttgcaactggcccacttccgggacaggggtcaattctgcctgacttatgagtcggccatgactcgcttattcctggaaggccggacggagacggtgcggtcttgcacgagggaggcctgcaactttgtcagggccatggaggacaaagagaagacggacccacagtgcctcgccctgttccgcgtggcagtggacaagcaccaggctctgctgaaggcagccatgagcgggcagggagttgaccgccacctgtttgcgctgtacatcgtgtcccgattcctccacctgcagtcgcccttcctgacccaggtccattcggagcagtggcagctgtccaccagccagatccctgttcagcaaatgcatctgtttgacgtccacaattacccggactatgtttcctcaggcggtggattcgggcctgctgatgaccatggttatggtgtttcttatatcttcatgggggatggcatgatcaccttccacatctccagcaaaaaatcaagcacaaaaacggattcccacaggctggggcagcacattgaggacgcactgctggatgtggcctccctgttccaggcgggacagcattttaagcgccggttcagagggtcagggaaggagaactccaggcacaggtgtggatttctctcccgccagactggggcctccaaggcctcaatgacatccaccgacttctgactccttccagcaggcagctggcctctccaaggaataagggtgaaattgccacagctggctgacacaggacaggggcaactggtttggcaaccccacatccaggccaataaagatgtgtgagctggg

SEQ ID NO: 335282 - DNA, 5950 bp, Homo sapiens
gcggccgcgctcgaggggcgcgcggctgcagcggcggcggcgccgcgcgtgaggggccgcctaaggccgagcgggcgcggcgagcggccgggcgagcgcagccaacatgtcggataccaaggtaaaagttgccgtccgggtccggcccatgaaccgacgagaactggaactgaacaccaagtgcgtggtggagatggaagggaatcaaacggtcctgcaccctcctccttctaacaccaaacagggagaaaggaaacctcccaaggtatttgcctttgattattgcttttggtccatggatgaatctaacactacaaaatacgctggtcaagaagtggttttcaagtgccttggggaaggaattcttgaaaaagcctttcaggggtataatgcgtgtatttttgcatatggacagacaggttcgggaaaatccttttccatgatgggccatgctgagcagctgggccttattccaaggctctgctgtgctttatttaaaaggatctctttggagcaaaatgagtcacagacctttaaagttgaagtgtcctatatggaaatttataatgagaaagttcgggatcttttagaccccaaagggagtagacagtctcttaaagttcgagaacataaagttttgggaccatatgtagatggtttatctcaactagctgtcactagttttgaggatattgagtcattgatgtctgagggaaataagtctcgaacggtagctgctaccaacatgaacgaagaaagcagccgctcccatgctgtgttcaacatcataatcacacagacactttatgacctgcagtctgggaattccggggagaaagtcagtaaggtcagcttggtagacctggcgggtagcgaaagagtatctaaaacaggagctgcaggagagcgactgaaagaaggcagcaacattaacaaatcgcttacaaccttggggttggttatatcatcactggctgaccaggcagctggcaagggtaaaagcaaatttgtgccttatcgagattcagtcctcacttggctgcttaaggacaacttggggggcaacagccaaacctctatgatagccacaatcagcccagccgcagacaactatgaagagaccctctccacattaagatatgcagaccgagccaaaaggattgtgaaccatgctgttgtgaatgaggaccccaacgcaaaagtgatccgagaactgcgggaggaagtcgagaaactgagagagcagctctctcaggcagaggccatgaaggcccctgaactgaaggagaagctcgaagagtctgaaaagctgataaaagaactaacagtgacttgggaagagaagctgaggaaaacagaagagatcgcacaggaaagacaacgacaacttgaaagcatggggatttccctggagatgtccggtatcaaggtgggggatgacaaatgctacttagtcaatctgaatgcagaccctgctcttaacgaacttctggtttattatttaaaggatcacaccagggtgggtgcagatacctctcaagatatccagctttttggcataggaattcagcctcagcactgtgagattgacattgcatctgatggagacgtcactctcactccaaaagaaaatgcaaggtcctgtgtgaacggcacccttgtgtgcagtaccacccagctgtggcatggtgaccgaatcctatggggaaataatcacttttttagaataaacttacctaagaggaaacgtcgagattggttgaaagactttgaaaaagaaacgggcccgccagagcatgacctggatgcagccagtgaggcttcctctgaaccagactataactatgaatttgcacagatggaagttatcatgaaaaccctgaatagtaatgacccagttcaaaatgtggttcaggtcctggagaaacaatacctagaagaaaagagaagtgccctagaggagcagcggctcatgtatgagcgggaactggagcaactccgccagcagctctcccccgacaggcagccacagagtagcggccctgaccgcctggcctacagcagccagacagcgcagcagaaggtgacccagtgggcagaagagagggatgaactcttccgacaaagcctggcaaaactgcgagagcagctggttaaagctaataccttggtgagggaagcaaacttcctggctgaggaaatgagcaaactcaccgattaccaagtgactcttcagatccctgctgcaaacctcagtgccaataggaagagaggtgcaatagtgagtgaaccagctatccaagtgaggaggaaaggaaagagcacccaagtgtggaccattgagaagctggagaataaattaattgacatgagagacctttaccaagaatggaaggaaaaagttcctgaggcaaagagactctacggaaaacgaggtgaccctttctatgaagcccaagaaaatcacaacctcatcggggtggcgaatgtattcttggaatgcctcttctgtgatgtgaaacttcagtatgcagtccctatcatcagccagcagggggaggttgcagggcgtctccacgtggaagtgatgcgtgttacaggagctgttccagagcgtgtggtggaggatgactcttcggagaattccagtgaaagtgggagccttgaagtcgtagacagcagcggggaaatcattcaccgagtcaaaaagctgacatgtcgggtaaaaattaaagaagcaacggggctgcccttaaacctctcaaattttgtcttctgtcaatacacattctgggaccagtgtgagtctacggtggctgccccggtggtggaccccgaggtgccttcaccacagtccaaggatgcccagtacacagtgaccttctcccactgtaaggactatgtggtgaatgtaacagaagaatttctggagttcatttcagatggagcactggccattgaagtatggggccaccggtgtgctggaaatggcagctccatctgggaggtcgattctcttcatgctaagacaagaacactgcatgacaggtggaatgaagtaacgcgaagaatagaaatgtggatctccatattagaattgaatgagttaggagagtatgctgcagtggaacttcatcaggcaaaagatgtcaacacaggaggcatctttcaacttagacagggtcattcccgtagagtacaagtcacggtgaaacctgtgcagcattcagggacactgccacttatggttgaagccatcctgtcagtatccatcggctgtgtaactgccaggtccaccaaactccaaagagggctggacagttaccagagagatgatgaggatggtgatgatatggatagttatcaggaagaagacttaaactgcgtaagggagaggtggtcagatgcactcattaaacgacgagaatacctggatgaacagataaaaaaagtcagcaataaaacagagaaaacagaggacgatgtggagcgggaagcccagcttgtggagcagtgggtagggctgactgaggaaaggaatgctgtgctggtgccagccccaggcagtgggattcctggggcacctgccgactggatcccacctcctggaatggaaacccacataccagttctcttcctcgatttgaatgcggatgacctcagtgccaatgagcagcttgttggcccccatgcatccggcgtgaactccatcctgcccaaggagcatggcagccagtttttctacctgcccatcataaagcacagtgatgatgaggtttcagccacagcctcttgggattcctcggtgcatgattctgttcacttgaatagggtcacaccacagaatgaaaggatttacctaattgtgaaaaccacagttcaactcagccaccctgctgctatggagttagtattacgaaaacgaattgcagccaatatttacaacaaacagagtttcacgcagagtttgaagaggagaatatccctgaaaaatatattttattcctgtggtgtaacctatgaaatagtatccaatataccaaaggcaactgaggagatagaggaccgggaaacgctggctctcctggcagcaaggagtgaaaacgaaggcacatcagatggggagacgtacattgagaagtacactcgaggcgtgctgcaggtggaaaacattctgagtcttgaacggctccggcaggccgtcacagtcaaagaagcactttccaccaaagcccggcacattcggaggagcctcagtacaccaaatgttcataatgtctcttccagccgaccggacctttctggctttgatgaagatgacaagggttggccagagaaccagttggacatgtctgactatagctccagttaccaagatgtagcatgttatggaactttacccagggattctcctcgaaggaataaagaaggttgtacatcagagactcctcatgccttaaccgtcagcccttttaaagcattctctcctcagccaccaaagtttttcaagcccctaatgcctgtaaaagaggagcataagaaaaggatagccctggaagcaaggcctcttctaagccaggagagcatgcctccacctcaggcacataaccctggctgcattgtaccctcaggaagcaatggcagcagcatgccagtagaacacaatagcaaacgtgagaagaagattgactctgaggaggaagaaaatgagctggaagctattaacaggaagctaataagttcacagccttatgtacctgtggagtttgctgacttcagtgtttacaatgccagcttggagaacagggaatggttttcctctaaagtagatctgtcaaactcacgggtcttggagaaagaagtgtcccgtagccctaccaccagcagtattaccagtggctacttttcccacagtgcctccaatgccaccctgtctgacatggtggtcccttctagtgacagctcagaccagctggccattcagacgaaggatgcagactccaccgagcactccacaccatcgcttgtgcatgatttcaggccgtcctcaaacaaagagttgacagaagtcgaaaaaggcttggtaaaggacaagataattgtggtgccactcaaggaaaacagtgccttagccaaagggagcccatcatcccagagcatccctgagaaaaactccaaatcactgtgcaggactggctcatgttcagaactagatgcctgccccagcaaaattagccagccagccaggggattctgccccagggaggtgacggtagaacacaccaccaacatccttgaagaccattctttcacagaatttatgggagtgtcagagggaaaagattttgatggtttgacagattcttctgctggagagctttccagtaggaggagtctaccaaataaaacaggcggcaagactgtctccgatgggctccaccaccccagccagctgcattccaagttagagaatgaccaggtaataattccagaggcagccttttgggttctgtgctgtcaatgagtatgtctaactgtatgtcaaccccagaggcccttcaccgcaacaacttggtaggaaagattcatccagttgtttgtgacagcaaagatgagcccacagagaagcaggctcacttcctgcacagctgtctctgtcggagagcaagtctgttttgggaactagaacgcaattgtgaaattataagaccagtggatttttttacctggcacatgggttggtgttgaatgaagtgttcagatggataaggatcaatctcatattcattccctgggatgtttagttaccagttttcccaaagtgttctggtagcatctaccatatttcatcaaatctgtgattcctttgattattatatgaaccattattttatgtatcattaagaaaaaatactgccaattaaactctgtcatatcaaaaaaaaaaaga

SEQ ID NO: 335283 - DNA, 5806 bp, Homo sapiens
gcggccgcgctcgaggggcgcgcggctgcagcggcggcggcgccgcgcgtgaggggccgcctaaggccgagcgggcgcggcgagcggccgggcgagcgcagccaacatgtcggataccaaggtaaaagttgccgtccgggtccggcccatgaaccgacgagaactggaactgaacaccaagtgcgtggtggagatggaagggaatcaaacggtcctgcaccctcctccttctaacaccaaacagggagaaaggaaacctcccaaggtatttgcctttgattattgcttttggtccatggatgaatctaacactacaaaatacgctggtcaagaagtggttttcaagtgccttggggaaggaattcttgaaaaagcctttcaggggtataatgcgtgtatttttgcatatggacagacaggttcgggaaaatccttttccatgatgggccatgctgagcagctgggccttattccaaggctctgctgtgctttatttaaaaggatctctttggagcaaaatgagtcacagacctttaaagttgaagtgtcctatatggaaatttataatgagaaagttcgggatcttttagaccccaaagggagtagacagtctcttaaagttcgagaacataaagttttgggaccatatgtagatggtttatctcaactagctgtcactagttttgaggatattgagtcattgatgtctgagggaaataagtctcgaacggtagctgctaccaacatgaacgaagaaagcagccgctcccatgctgtgttcaacatcataatcacacagacactttatgacctgcagtctgggaattccggggagaaagtcagtaaggtcagcttggtagacctggcgggtagcgaaagagtatctaaaacaggagctgcaggagagcgactgaaagaaggcagcaacattaacaaatcgcttacaaccttggggttggttatatcatcactggctgaccaggcagctggcaagggtaaaagcaaatttgtgccttatcgagattcagtcctcacttggctgcttaaggacaacttggggggcaacagccaaacctctatgatagccacaatcagcccagccgcagacaactatgaagagaccctctccacattaagatatgcagaccgagccaaaaggattgtgaaccatgctgttgtgaatgaggaccccaacgcaaaagtgatccgagaactgcgggaggaagtcgagaaactgagagagcagctctctcaggcagaggccatgaaggcccctgaactgaaggagaagctcgaagagtctgaaaagctgataaaagaactaacagtgacttgggaagagaagctgaggaaaacagaagagatcgcacaggaaagacaacgacaacttgaaagcatggggatttccctggagatgtccggtatcaaggtgggggatgacaaatgctacttagtcaatctgaatgcagaccctgctcttaacgaacttctggtttattatttaaaggatcacaccagggtgggtgcagatacctctcaagatatccagctttttggcataggaattcagcctcagcactgtgagattgacattgcatctgatggagacgtcactctcactccaaaagaaaatgcaaggtcctgtgtgaacggcacccttgtgtgcagtaccacccagctgtggcatggtgaccgaatcctatggggaaataatcacttttttagaataaacttacctaagaggaaacgtcgagattggttgaaagactttgaaaaagaaacgggcccgccagagcatgacctggatgcagccagtgaggcttcctctgaaccagactataactatgaatttgcacagatggaagttatcatgaaaaccctgaatagtaatgacccagttcaaaatgtggttcaggtcctggagaaacaatacctagaagaaaagagaagtgccctagaggagcagcggctcatgtatgagcgggaactggagcaactccgccagcagctctcccccgacaggcagccacagagtagcggccctgaccgcctggcctacagcagccagacagcgcagcagaaggtgacccagtgggcagaagagagggatgaactcttccgacaaagcctggcaaaactgcgagagcagctggttaaagctaataccttggtgagggaagcaaacttcctggctgaggaaatgagcaaactcaccgattaccaagtgactcttcagatccctgctgcaaacctcagtgccaataggaagagaggtgcaatagtgagtgaaccagctatccaagtgaggaggaaaggaaagagcacccaagtgtggaccattgagaagctggagaataaattaattgacatgagagacctttaccaagaatggaaggaaaaagttcctgaggcaaagagactctacggaaaacgaggtgaccctttctatgaagcccaagaaaatcacaacctcatcggggtggcgaatgtattcttggaatgcctcttctgtgatgtgaaacttcagtatgcagtccctatcatcagccagcagggggaggttgcagggcgtctccacgtggaagtgatgcgtgttacaggagctgttccagagcgtgtggtggaggatgactcttcggagaattccagtgaaagtgggagccttgaagtcgtagacagcagcggggaaatcattcaccgagtcaaaaagctgacatgtcgggtaaaaattaaagaagcaacggggctgcccttaaacctctcaaattttgtcttctgtcaatacacattctgggaccagtgtgagtctacggtggctgccccggtggtggaccccgaggtgccttcaccacagtccaaggatgcccagtacacagtgaccttctcccactgtaaggactatgtggtgaatgtaacagaagaatttctggagttcatttcagatggagcactggccattgaagtatggggccaccggtgtgctggaaatggcagctccatctgggaggtcgattctcttcatgctaagacaagaacactgcatgacaggtggaatgaagtaacgcgaagaatagaaatgtggatctccatattagaattgaatgagttaggagagtatgctgcagtggaacttcatcaggcaaaagatgtcaacacaggaggcatctttcaacttagacagggtcattcccgtagagtacaagtcacggtgaaacctgtgcagcattcagggacactgccacttatggttgaagccatcctgtcagtatccatcggctgtgtaactgccaggtccaccaaactccaaagagggctggacagttaccaggaagaagacttaaactgcgtaagggagaggtggtcagatgcactcattaaacgacgagaatacctggatgaacagataaaaaaagtcagcaataaaacagagaaaacagaggacgatgtggagcgggaagcccagcttgtggagcagtgggtagggctgactgaggaaaggaatgctgtgctggtgccagccccaggcagtgggattcctggggcacctgccgactggatcccacctcctggaatggaaacccacataccagttctcttcctcgatttgaatgcggatgacctcagtgccaatgagcagcttgttggcccccatgcatccggcgtgaactccatcctgcccaaggagcatggcagccagtttttctacctgcccatcataaagcacagtgatgatgaggtttcagccacagcctcttgggattcctcggtgcatgattctgttcacttgaatagggtcacaccacagaatgaaaggatttacctaattgtgaaaaccacagttcaactcagccaccctgctgctatggagttagtattacgaaaacgaattgcagccaatatttacaacaaacagagtttcacgcagagtttgaagaggagaatatccctgaaaaatatattttattcctgtggtgtaacctatgaaatagtatccaatataccaaaggcaactgaggagatagaggaccgggaaacgctggctctcctggcagcaaggagtgaaaacgaaggcacatcagatggggagacgtacattgagaagtacactcgaggcgtgctgcaggtggaaaacattctgagtcttgaacggctccggcaggccgtcacagtcaaagaagcactttccaccaaagcccggcacattcggaggagcctcagtacaccaaatgttcataatgtctcttccagccgaccggacctttctggctttgatgaagatgacaagggttggccagagaaccagttggacatgtctgactatagctccagttaccaagatgtagcatgttatggaactttacccagggattctcctcgaaggaataaagaaggttgtacatcagagactcctcatgccttaaccgtcagcccttttaaagcattctctcctcagccaccaaagtttttcaagcccctaatgcctgtaaaagaggagcataagaaaaggatagccctggaagcaaggcctcttctaagccaggaggactctgaggaggaagaaaatgagctggaagctattaacaggaagctaataagttcacagccttatgtacctgtggagtttgctgacttcagtgtttacaatgccagcttggagaacagggaatggttttcctctaaagtagatctgtcaaactcacgggtcttggagaaagaagtgtcccgtagccctaccaccagcagtattaccagtggctacttttcccacagtgcctccaatgccaccctgtctgacatggtggtcccttctagtgacagctcagaccagctggccattcagacgaaggatgcagactccaccgagcactccacaccatcgcttgtgcatgatttcaggccgtcctcaaacaaagagttgacagaagtcgaaaaaggcttggtaaaggacaagataattgtggtgccactcaaggaaaacagtgccttagccaaagggagcccatcatcccagagcatccctgagaaaaactccaaatcactgtgcaggactggctcatgttcagaactagatgcctgccccagcaaaattagccagccagccaggggattctgccccagggaggtgacggtagaacacaccaccaacatccttgaagaccattctttcacagaatttatgggagtgtcagagggaaaagattttgatggtttgacagattcttctgctggagagctttccagtaggaggagtctaccaaataaaacaggcggcaagactgtctccgatgggctccaccaccccagccagctgcattccaagttagagaatgaccaggtaataattccagaggcagccttttgggttctgtgctgtcaatgagtatgtctaactgtatgtcaaccccagaggcccttcaccgcaacaacttggtaggaaagattcatccagttgtttgtgacagcaaagatgagcccacagagaagcaggctcacttcctgcacagctgtctctgtcggagagcaagtctgttttgggaactagaacgcaattgtgaaattataagaccagtggatttttttacctggcacatgggttggtgttgaatgaagtgttcagatggataaggatcaatctcatattcattccctgggatgtttagttaccagttttcccaaagtgttctggtagcatctaccatatttcatcaaatctgtgattcctttgattattatatgaaccattattttatgtatcattaagaaaaaatactgccaattaaactctgtcatatcaaaaaaaaaaaga

SEQ ID NO: 335284 - DNA, 5855 bp, Homo sapiens
gcggccgcgctcgaggggcgcgcggctgcagcggcggcggcgccgcgcgtgaggggccgcctaaggccgagcgggcgcggcgagcggccgggcgagcgcagccaacatgtcggataccaaggtaaaagttgccgtccgggtccggcccatgaaccgacgagaactggaactgaacaccaagtgcgtggtggagatggaagggaatcaaacggtcctgcaccctcctccttctaacaccaaacagggagaaaggaaacctcccaaggtatttgcctttgattattgcttttggtccatggatgaatctaacactacaaaatacgctggtcaagaagtggttttcaagtgccttggggaaggaattcttgaaaaagcctttcaggggtataatgcgtgtatttttgcatatggacagacaggttcgggaaaatccttttccatgatgggccatgctgagcagctgggccttattccaaggctctgctgtgctttatttaaaaggatctctttggagcaaaatgagtcacagacctttaaagttgaagtgtcctatatggaaatttataatgagaaagttcgggatcttttagaccccaaagggagtagacagtctcttaaagttcgagaacataaagttttgggaccatatgtagatggtttatctcaactagctgtcactagttttgaggatattgagtcattgatgtctgagggaaataagtctcgaacggtagctgctaccaacatgaacgaagaaagcagccgctcccatgctgtgttcaacatcataatcacacagacactttatgacctgcagtctgggaattccggggagaaagtcagtaaggtcagcttggtagacctggcgggtagcgaaagagtatctaaaacaggagctgcaggagagcgactgaaagaaggcagcaacattaacaaatcgcttacaaccttggggttggttatatcatcactggctgaccaggcagctggcaagggtaaaagcaaatttgtgccttatcgagattcagtcctcacttggctgcttaaggacaacttggggggcaacagccaaacctctatgatagccacaatcagcccagccgcagacaactatgaagagaccctctccacattaagatatgcagaccgagccaaaaggattgtgaaccatgctgttgtgaatgaggaccccaacgcaaaagtgatccgagaactgcgggaggaagtcgagaaactgagagagcagctctctcaggcagaggccatgaaggcccctgaactgaaggagaagctcgaagagtctgaaaagctgataaaagaactaacagtgacttgggaagagaagctgaggaaaacagaagagatcgcacaggaaagacaacgacaacttgaaagcatggggatttccctggagatgtccggtatcaaggtgggggatgacaaatgctacttagtcaatctgaatgcagaccctgctcttaacgaacttctggtttattatttaaaggatcacaccagggtgggtgcagatacctctcaagatatccagctttttggcataggaattcagcctcagcactgtgagattgacattgcatctgatggagacgtcactctcactccaaaagaaaatgcaaggtcctgtgtgaacggcacccttgtgtgcagtaccacccagctgtggcatggtgaccgaatcctatggggaaataatcacttttttagaataaacttacctaagaggaaacgtcgagattggttgaaagactttgaaaaagaaacgggcccgccagagcatgacctggatgcagccagtgaggcttcctctgaaccagactataactatgaatttgcacagatggaagttatcatgaaaaccctgaatagtaatgacccagttcaaaatgtggttcaggtcctggagaaacaatacctagaagaaaagagaagtgccctagaggagcagcggctcatgtatgagcgggaactggagcaactccgccagcagctctcccccgacaggcagccacagagtagcggccctgaccgcctggcctacagcagccagacagcgcagcagaaggtgacccagtgggcagaagagagggatgaactcttccgacaaagcctggcaaaactgcgagagcagctggttaaagctaataccttggtgagggaagcaaacttcctggctgaggaaatgagcaaactcaccgattaccaagtgactcttcagatccctgctgcaaacctcagtgccaataggaagagaggtgcaatagtgagtgaaccagctatccaagtgaggaggaaaggaaagagcacccaagtgtggaccattgagaagctggagaataaattaattgacatgagagacctttaccaagaatggaaggaaaaagttcctgaggcaaagagactctacggaaaacgaggtgaccctttctatgaagcccaagaaaatcacaacctcatcggggtggcgaatgtattcttggaatgcctcttctgtgatgtgaaacttcagtatgcagtccctatcatcagccagcagggggaggttgcagggcgtctccacgtggaagtgatgcgtgttacaggagctgttccagagcgtgtggtggaggatgactcttcggagaattccagtgaaagtgggagccttgaagtcgtagacagcagcggggaaatcattcaccgagtcaaaaagctgacatgtcgggtaaaaattaaagaagcaacggggctgcccttaaacctctcaaattttgtcttctgtcaatacacattctgggaccagtgtgagtctacggtggctgccccggtggtggaccccgaggtgccttcaccacagtccaaggatgcccagtacacagtgaccttctcccactgtaaggactatgtggtgaatgtaacagaagaatttctggagttcatttcagatggagcactggccattgaagtatggggccaccggtgtgctggaaatggcagctccatctgggaggtcgattctcttcatgctaagacaagaacactgcatgacaggtggaatgaagtaacgcgaagaatagaaatgtggatctccatattagaattgaatgagttaggagagtatgctgcagtggaacttcatcaggcaaaagatgtcaacacaggaggcatctttcaacttagacagggtcattcccgtagagtacaagtcacggtgaaacctgtgcagcattcagggacactgccacttatggttgaagccatcctgtcagtatccatcggctgtgtaactgccaggtccaccaaactccaaagagggctggacagttaccaggaagaagacttaaactgcgtaagggagaggtggtcagatgcactcattaaacgacgagaatacctggatgaacagataaaaaaagtcagcaataaaacagagaaaacagaggacgatgtggagcgggaagcccagcttgtggagcagtgggtagggctgactgaggaaaggaatgctgtgctggtgccagccccaggcagtgggattcctggggcacctgccgactggatcccacctcctggaatggaaacccacataccagttctcttcctcgatttgaatgcggatgacctcagtgccaatgagcagcttgttggcccccatgcatccggcgtgaactccatcctgcccaaggagcatggcagccagtttttctacctgcccatcataaagcacagtgatgatgaggtttcagccacagcctcttgggattcctcggtgcatgattctgttcacttgaatagggtcacaccacagaatgaaaggatttacctaattgtgaaaaccacagttcaactcagccaccctgctgctatggagttagtattacgaaaacgaattgcagccaatatttacaacaaacagagtttcacgcagagtttgaagaggagaatatccctgaaaaatatattttattcctgtggtgtaacctatgaaatagtatccaatataccaaaggcaactgaggagatagaggaccgggaaacgctggctctcctggcagcaaggagtgaaaacgaaggcacatcagatggggagacgtacattgagaagtacactcgaggcgtgctgcaggtggaaaacattctgagtcttgaacggctccggcaggccgtcacagtcaaagaagcactttccaccaaagcccggcacattcggaggagcctcagtacaccaaatgttcataatgtctcttccagccgaccggacctttctggctttgatgaagatgacaagggttggccagagaaccagttggacatgtctgactatagctccagttaccaagatgtagcatgttatggaactttacccagggattctcctcgaaggaataaagaaggttgtacatcagagactcctcatgccttaaccgtcagcccttttaaagcattctctcctcagccaccaaagtttttcaagcccctaatgcctgtaaaagaggagcataagaaaaggatagccctggaagcaaggcctcttctaagccaggaggactctgaggaggaagaaaatgagctggaagctattaacaggaagctaataagttcacagccttatgtacctgtggagtttgctgacttcagtgtttacaatgccagcttggagaacagggaatggttttcctctaaagtagatctgtcaaactcacgggtcttggagaaagaagtgtcccgtagccctaccaccagcagtattaccagtggctacttttcccacagtgcctccaatgccaccctgtctgacatggtggtcccttctagtgacagctcagaccagctggccattcagacgaaggatgcagactccaccgagcactccacaccatcgcttgtgcatgatttcaggccgtcctcaaacaaagagttgacagaagtcgaaaaaggcttggtaaaggacaagataattgtggtgccactcaaggaaaacagtgccttagccaaagggagcccatcatcccagagcatccctgagaaaaactccaaatcactgtgcaggactggctcatgttcagaactagatgcctgccccagcaaaattagccagccagccaggggattctgccccagggaggtgacggtagaacacaccaccaacatccttgaagaccattctttcacagaatttatgggagtgtcagagggaaaagattttgatggtttgacagattcttctgctggagagctttccagtaggaggagtctaccaaataaaacaggcggcaagactgtctccgatgggctccaccaccccagccagctgcattccaagttagagaatgacggaggcacaacctcacggtgagagcagcaagcacccctcctcaggccacagcttggcgtctttgttcgcctggtcaccttgggcaagcaccagccccatctctaaaacatgctgccgcctggctggacctcagaccagaagctggagaatccacaccgtgcacttcctgggccacctcctttcccctccccagtgggagaagcggcactttgtcacttgggtgaatcaacagcctctgctttttccagaaagcaagagaactgaaaatcctggattaactaagtgacagtatttttttttgcacttactacacacctccactgtatagaaacctctacagattccaacagactttattcttgtacaattttaatcagttcttactgtagaatctggagtcaatgctctaatctgttttttataaataatatatattatgtatatgaaatgtgtatctatagtatgtctggagacagacaaggctgcacactaaaatgcagataaaggtgatttgtagaaaatc

SEQ ID NO: 335285 - DNA, 2817 bp, Homo sapiens
  misc_feature (2544)..(2544): n is a, c, g, or t
  misc_feature (2696)..(2696): n is a, c, g, or t
gcggccgcgctcgaggggcgcgcggctgcagcggcggcggcgccgcgcgtgaggggccgcctaaggccgagcgggcgcggcgagcggccgggcgagcgcagccaacatgtcggataccaaggtaaaagttgccgtccgggtccggcccatgaaccgacgagaactggaactgaacaccaagtgcgtggtggagatggaagggaatcaaacggtcctgcaccctcctccttctaacaccaaacagggagaaaggaaacctcccaaggtatttgcctttgattattgcttttggtccatggatgaatctaacactacaaaatacgctggtcaagaagtggttttcaagtgccttggggaaggaattcttgaaaaagcctttcaggggtataatgcgtgtatttttgcatatggacagacaggttcgggaaaatccttttccatgatgggccatgctgagcagctgggccttattccaaggctctgctgtgctttatttaaaaggatctctttggagcaaaatgagtcacagacctttaaagttgaagtgtcctatatggaaatttataatgagaaagttcgggatcttttagaccccaaagggagtagacagtctcttaaagttcgagaacataaagttttgggaccatatgtagatggtttatctcaactagctgtcactagttttgaggatattgagtcattgatgtctgagggaaataagtctcgaacggtagctgctaccaacatgaacgaagaaagcagccgctcccatgctgtgttcaacatcataatcacacagacactttatgacctgcagtctgggaattccggggagaaagtcagtaaggtcagcttggtagacctggcgggtagcgaaagagtatctaaaacaggagctgcaggagagcgactgaaagaaggcagcaacattaacaaatcgcttacaaccttggggttggttatatcatcactggctgaccaggcagctggcaagggtaaaagcaaatttgtgccttatcgagattcagtcctcacttggctgcttaaggacaacttggggggcaacagccaaacctctatgatagccacaatcagcccagccgcagacaactatgaagagaccctctccacattaagatatgcagaccgagccaaaaggattgtgaaccatgctgttgtgaatgaggaccccaacgcaaaagtgatccgagaactgcgggaggaagtcgagaaactgagagagcagctctctcaggcagaggccatgaaggcccctgaactgaaggagaagctcgaagagtctgaaaagctgataaaagaactaacagtgacttgggaagagaagctgaggaaaacagaagagatcgcacaggaaagacaacgacaacttgaaagcatggggatttccctggagatgtccggtatcaaggtgggggatgacaaatgctacttagtcaatctgaatgcagaccctgctcttaacgaacttctggtttattatttaaaggatcacaccagggtgggtgcagatacctctcaagatatccagctttttggcataggaattcagcctcagcactgtgagattgacattgcatctgatggagacgtcactctcactccaaaagaaaatgcaaggtcctgtgtgaacggcacccttgtgtgcagtaccacccagctgtggcatggtgaccgaatcctatggggaaataatcacttttttagaataaacttacctaagaggaaacgtcgagattggttgaaagactttgaaaaagaaacgggcccgccagagcatgacctggatgcagccagtgaggcttcctctgaaccagactataactatgaatttgcacagatggaagttatcatgaaaaccctgaatagtaatgacccagttcaaaatgtggttcaggtcctggagaaacaatacctagaagaaaagagaagtgccctagaggagcagcggctcatgtatgagcgggaactggagcaactccgccagcagctctcccccgacaggcagccacagagtagcggccctgaccgcctggcctacagcagccagacagcgcagcagaaggtgacccagtgggcagaagagagttatcacctgggaaaaaccagccatacagagataggagctgaagggacacagtgagaagtgaccagaagacaagtgtaagccctctgttactcccaaacagggccactagagggctccctggtctagtggtaaggccagtgcctgagaaggcgcccattacctagcgggccttggtctagcagtagcgtcagtgcctggggaaggcactagttacttagcagactgggaaagggagtctcccttttcccgggggagttagagaagactctgctccaccacctcttgtggaaggcctgacatgagtcaggcccgcccgcagccatccagaggcctgtctccctgtgatgctgtgcttcagtggtcactctcctggtctgctttcatgttccaccctgtacgcctggctctgccttctcgatagcagtaacaggattagngaaagtacttaaagtctttgaaatacatagaagaaataatggtgtaagctgtcctctctctgtctccgccttggctgccaaacagggaagggacccttgtccagtggacacatgacttgcgtgaccttcctgtcattggtgatggctcacantctttcccctgcccccttttcttgtatccaataaataacagtgcagccaggcattcggggccactaccggtctctgcgtctaggtggtagtggtcccccgggcccagctgtcttttcttct

SEQ ID NO: 335286 - DNA, 3742 bp, Homo sapiens
agacgatcttatgctgctccctcttcagatccctgctggtaacctcagtgccaataggaagagaggtgcaatagtgagtgaaccagctatccaagtgaggaggaaaggaaagagcacccaagtgtggaccattgagaagctggagaataaattaattgacatgagagacctttaccaagaatggaaggaaaaagttcctgaggcaaagagactctacggaaaacgaggtgaccctttctatgaagcccaagaaaatcacaacctcatcggggtggcgaatgtattcttggaatgcctcttctgtgatgtgaaacttcagtatgcagtccctatcatcagccagcagggggaggttgcagggcgtctccacgtggaagtgatgcgtgttacaggagctgttccagagcgtgtggtggaggatgactcttcggagaattccagtgaaagtgggagccttgaagtcgtagacagcagcggggaaatcattcaccgagtcaaaaagctgacatgtcgggtaaaaattaaagaagcaacggggctgcccttaaacctctcaaattttgtcttctgtcaatacacattctgggaccagtgtgagtctacggtggctgccccggtggtggaccccgaggtgccttcaccacagtccaaggatgcccagtacacagtgaccttctcccactgtaaggactatgtggtgaatgtaacagaagaatttctggagttcatttcagatggagcactggccattgaagtatggggccaccggtgtgctggaaatggcagctccatctgggaggtcgattctcttcatgctaagacaagaacactgcatgacaggtggaatgaagtaacgcgaagaatagaaatgtggatctccatattagaattgaatgagttaggagagtatgctgcagtggaacttcatcaggcaaaagatgtcaacacaggaggcatctttcaacttagacagggtcattcccgtagagtacaagtcacggtgaaacctgtgcagcattcagggacactgccacttatggttgaagccatcctgtcagtatccatcggctgtgtaactgccaggtccaccaaactccaaagagggctggacagttaccagagagatgatgaggatggtgatgatatggatagttatcaggaagaagacttaaactgcgtaagggagaggtggtcagatgcactcattaaacgacgagaatacctggatgaacagataaaaaaagtcagcaataaaacagagaaaacagaggacgatgtggagcgggaagcccagcttgtggagcagtgggtagggctgactgaggaaaggaatgctgtgctggtgccagccccaggcagtgggattcctggggcacctgccgactggatcccacctcctggaatggaaacccacataccagttctcttcctcgatttgaatgcggatgacctcagtgccaatgagcagcttgttggcccccatgcatccggcgtgaactccatcctgcccaaggagcatggcagccagtttttctacctgcccatcataaagcacagtgatgatgaggtttcagccacagcctcttgggattcctcggtgcatgattctgttcacttgaatagggtcacaccacagaatgaaaggatttacctaattgtgaaaaccacagttcaactcagccaccctgctgctatggagttagtattacgaaaacgaattgcagccaatatttacaacaaacagagtttcacgcagagtttgaagaggagaatatccctgaaaaatatattttattcctgtggtgtaacctatgaaatagtatccaatataccaaaggcaactgaggagatagaggaccgggaaacgctggctctcctggcagcaaggagtgaaaacgaaggcacatcagatggggagacgtacattgagaagtacactcgaggcgtgctgcaggtggaaaacattctgagtcttgaacggctccggcaggccgtcacagtcaaagaagcactttccaccaaagcccggcacattcggaggagcctcagtacaccaaatgttcataatgtctcttccagccgaccggacctttctggctttgatgaagatgacaagggttggccagagaaccagttggacatgtctgactatagctccagttaccaagatgtagcatgttatggaactttacccagggattctcctcgaaggaataaagaaggttgtacatcagagactcctcatgccttaaccgtcagcccttttaaagcattctctcctcagccaccaaagtttttcaagcccctaatgcctgtaaaagaggagcataagaaaaggatagccctggaagcaaggcctcttctaagccaggagagcatgcctccacctcaggcacataaccctggctgcattgtaccctcaggaagcaatggcagcagcatgccagtagaacacaatagcaaacgtgagaagaagattgactctgaggaggaagaaaatgagctggaagctattaacaggaagctaataagttcacagccttatgtacctgtggagtttgctgacttcagtgtttacaatgccagcttggagaacagggaatggttttcctctaaagtagatctgtcaaactcacgggtcttggagaaagaagtgtcccgtagccctaccaccagcagtattaccagtggctacttttcccacagtgcctccaatgccaccctgtctgacatggtggtcccttctagtgacagctcagaccagctggccattcagacgaaggatgcagactccaccgagcactccacaccatcgcttgtgcatgatttcaggccgtcctcaaacaaagagttgacagaagtcgaaaaaggcttggtaaaggacaagataattgtggtgccactcaaggaaaacagtgccttagccaaagggagcccatcatcccagagcatccctgagaaaaactccaaatcactgtgcaggactggctcatgttcagaactagatgcctgccccagcaaaattagccagccagccaggggattctgccccagggaggtgacggtagaacacaccaccaacatccttgaagaccattctttcacagaatttatgggagtgtcagagggaaaagattttgatggtttgacagattcttctgctggagagctttccagtaggaggagtctaccaaataaaacaggcggcaagactgtctccgatgggctccaccaccccagccagctgcattccaagttagagaatgaccaggtaataattccagaggcagccttttgggttctgtgctgtcaatgagtatgtctaactgtatgtcaaccccagaggcccttcaccgcaacaacttggtaggaaagattcatccagttgtttgtgacagcaaagatgagcccacagagaagcaggctcacttcctgcacagctgtctctgtcggagagcaagtctgttttgggaactagaacgcaattgtgaaattataagaccagtggatttttttacctggcacatgggttggtgttgaatgaagtgttcagatggataaggatcaatctcatattcattccctgggatgtttagttaccagttttcccaaagtgttctggtagcatctaccatatttcatcaaatctgtgattcctttgattattatatgaaccattattttatgtatcattaagaaaaaatactgccaattaaactctgtcatatcaaaaaaaaaaaga

SEQ ID NO: 335287 - DNA, 1577 bp, Homo sapiens
gcggccgcgctcgaggggcgcgcggctgcagcggcggcggcgccgcgcgtgaggggccgcctaaggccgagcgggcgcggcgagcggccgggcgagcgcagccaacatgtcggataccaaggtaaaagttgccgtccgggtccggcccatgaaccgacgagaactggaactgaacaccaagtgcgtggtggagatggaagggaatcaaacggtcctgcaccctcctccttctaacaccaaacagggagaaaggaaacctcccaaggtatttgcctttgattattgcttttggtccatggatgaatctaacactacaaaatacgctggtcaagaagtggttttcaagtgccttggggaaggaattcttgaaaaagcctttcaggggtataatgcgtgtatttttgcatatggacagacaggttcgggaaaatccttttccatgatgggccatgctgagcagctgggccttattccaaggctctgctgtgctttatttaaaaggatctctttggagcaaaatgagtcacagacctttaaagttgaagtgtcctatatggaaatttataatgagaaagttcgggatcttttagaccccaaagggagtagacagtctcttaaagttcgagaacataaagttttgggaccatatgtagatggtttatctcaactagctgtcactagttttgaggatattgagtcattgatgtctgagggaaataagtctcgaacggtagctgctaccaacatgaacgaagaaagcagccgctcccatgctgtgttcaacatcataatcacacagacactttatgacctgcagtctgggaattccggggagaaagtcagtaaggtcagcttggtagacctggcgggtagcgaaagagtatctaaaacaggagctgcaggagagcgactgaaagaaggcagcaacattaacaaatcgcttacaaccttggggttggttatatcatcactggctgaccaggcagctggcaagggtaaaagcaaatttgtgccttatcgagattcagtcctcacttggctgcttaaggacaacttggggggcaacagccaaacctctatgatagccacaatcagcccagccgcagacaactatgaagagaccctctccacattaagatatgcagaccgagccaaaaggattgtgaaccatgctgttgtgaatgaggaccccaacgcaaaagtgatccgagaactgcgggaggaagtcgagaaactgagagagcagctctctcaggcagaggccatgaaggcccctgaactgaaggagaagctcgaagagtctgaaaagctgataaaagaactaacagtgacttgggaagagaagctgaggaaaacagaagagatcgcacaggaaagacaacgacaacttgaaagcatggggatttccctggagatgtccggtatcaaggtgggggatgacaaatgctacttagtcaatctgaatgcagaccctgctcttaacgaacttctggtttattatttaaagtctttcaaccagtctcgacgtttcctcttaggtgagtttatgctaaaagagtgattatttccccatagga

SEQ ID NO: 335288 - DNA, 1291 bp, Homo sapiens
gcggccgcgctcgaggggcgcgcggctgcagcggcggcggcgccgcgcgtgaggggccgcctaaggccgagcgggcgcggcgagcggccgggcgagcgcagccaacatgtcggataccaaggtaaaagttgccgtccgggtccggcccatgaaccgacgagaactggaactgaacaccaagtgcgtggtggagatggaagggaatcaaacggtcctgcaccctcctccttctaacaccaaacagggagaaaggaaagctggtcacagtggctcacatctctaattccagcactttgggaggccaaggcaagaggatcacttgagccgaggatttcaagaccagcctttgcaacatggcaaaaccccatctctacaaaaaatttgtttaaaattagctggacgtggtggcgcatacctgtggtcccagctactcaggagactgaggcaggaggctccagtgagctgtttgagccactgcacgccagcctgggtgacagagccagaccctgtcttcaaaaaaataaaaaattaaagtggcgtgaggtgaattgcatcagaccccacatatgaataaatggatggttggcaaagtgttatatataataagtacaattccttaggtgtccttaggtgtactactaaagtgggtttgtgatagcccatatatttagtcatttatgttcaatagtgttatattcatttgagaaattattttaagaaatttaaaattaagaaagttttaaaagtcctttagtaattagagatttctctgggtgggtggatacggttgtttctaattatcccacacatttaatcatttatgttcaatagtgttgtattttttgagaaattattttaagaaatgcaaaattaagaaagatttaaaagtcctttagtaattagagatttttctagttgggtggataagggttatttctaagtatcttttgagtattttttgtcatatatttcgttttttaggcatgattaaaagtgtatttgaggactcttagacacataaagttgaattcctcagattgagagatagttattgctttttaattttgttaagatgctcagctgttggataaataatgcttttgttaaaatcctgtggggcattcatccaacaaatggggtataagaaaggaatgtgtgtttgtgtacatgttcttctatctgttggtcctaaagagtgtaagaaggtaaatttgaccagtgaaattcataattacagagttttatttggtaatccattaataaatcattttctgaaagcacatgtctgtga

SEQ ID NO: 335289 - DNA, 337 bp, Homo sapiens
gtaagaagttgcttttatagaccagatgtgggggatcatgcctataatcccaggacttggtgaggctggggtgggaggatctcctgagcccaggagtttgagaccagcctgggcaacatagtaagacccgtctttataaaaactaaaaacattagcccagcgtggtggcacacctgtagtcccagcttcttgggagactgaggtgggaggatggcttgagcccaggagtttgagactgtagtgagccatgatcacaccactgcactccagcctgagcaacagggtttgaggctaagttggccactcttctgctatgttaccatggccagtatatggg

SEQ ID NO: 335290 - DNA, 384 bp, Homo sapiens
atttgcacagatggaagttatcatgaaaaccctgaatagtaatggtaagaccctcactctgtgttccagcgccttgggcatttcctcacctcacaccattcagtgagggataagcatgcatcaggtgtcattccgcattccacattttaaacacataaaactgctcatttctttaaaaggccatcagtgaataactaatgacaagatgtgggggagatggtcttctccctcagttacaatgaggatatggatggtcccgtttttgagacctcttattcccaagcgaattgtggtgacatttccacgggcctagagtactgaatgattttgacaaaattccttaccaaatttctcatcatcgagcctgtcatatctgaatccttg

SEQ ID NO: 335291 - DNA, 192 bp, Homo sapiens
cctcccaaggtatttgcctttgattattgcttttggtccatggatgaatctaacactacaaaatacgctggtaagttttctccctctacacctgacagttgggcttctggcctcttcttccattgagtttattttctttaattcctctggagttttactttccctgtgtaattcacacctgttctttccaat

SEQ ID NO: 335292 - DNA, 562 bp, Homo sapiens
tggtgacaaaggcatcagaggaatcataattaatacatatacctggtgtgcaggactacattcttgtgtttttgcttatggtcttttccttatgctttgcccctaggatattgagtcattgatgtctgagggaaataagtctcgaacggtagctgctaccaacatgaacgaagaaagcagccgctcccatgctgtgttcaacatcataatcacacagacactttatgacctgcagtctggggtaagggattaggcagaacctttttggagtgggggtggaagaactgaaagtgtccatataggtaaagtctttcatggttgggttcagtggctgagaattgtatgttggctcttctgcttactaggtgagctactttgcttatcatttaatttgttaggtctttctttatatttgactttttaaaaaattggattttggcctggtgcagtggctcctgcctgtaattccagcattttgggagtctgaggcgggaggattgcttgagggcagaagttcatgaccatcttgtacaatatagcaacacccagactctacaaaaac

SEQ ID NO: 335293 - DNA, 147 bp, Homo sapiens
gtgttttatcagctaacaagatgtaaaatacatattttgttatgattaaatgttgttattaaatttaggatcccacctcctggaatggaaacccacataccagttctcttcctcgatttgaatggtaagtagacacttaaagtcaca

SEQ ID NO: 335294 - DNA, 571 bp, Homo sapiens
gtgaacctgagaggtggagcttgtagtgagcggagatcgcaccactgcactccagcctgggcgacagagcaagactctgtctcaagaaaaaaaaaaagaaagaaacgggttgagttaaattacctcccaattttctttccagatctaacattctgtggttctttatggttttctataaaacagaagagacggatttaaggtcacgatcaggctaatatactctaaaataaatataacagttgaaaggtcaaaaggaaatttcacagactcctttaagcataattcttttgctttcccccacttatcccaggactatgtggtgaatgtaacagaagaatttctggagttcatttcagatggagcactggccattgaagtatggggccaccggtgtgctggaaatggcagctccatctgggaggtcgattctcttcatgctaagacaagaacactgcatgacaggtttgtacttggctgtgagctttaggtacaaggttaagactaggacttgagcagagtctctgaacctactctggcctaggaggctgcttataaaaaaataaaatcattt

SEQ ID NO: 335295 - DNA, 5845 bp, Homo sapiens
gcggccgcgctcgaggggcgcgcggctgcagcggcggcggcgccgcgcgtgaggggccgcctaaggccgagcgggcgcggcgagcggccgggcgagcgcagccaacatgtcggataccaaggtaaaagttgccgtccgggtccggcccatgaaccgacgagaactggaactgaacaccaagtgcgtggtggagatggaagggaatcaaacggtcctgcaccctcctccttctaacaccaaacagggagaaaggaaacctcccaaggtatttgcctttgattattgcttttggtccatggatgaatctaacactacaaaatacgctggtcaagaagtggttttcaagtgccttggggaaggaattcttgaaaaagcctttcaggggtataatgcgtgtatttttgcatatggacagacaggttcgggaaaatccttttccatgatgggccatgctgagcagctgggccttattccaaggctctgctgtgctttatttaaaaggatctctttggagcaaaatgagtcacagacctttaaagttgaagtgtcctatatggaaatttataatgagaaagttcgggatcttttagaccccaaagggagtagacagtctcttaaagttcgagaacataaagttttgggaccatatgtagatggtttatctcaactagctgtcactagttttgaggatattgagtcattgatgtctgagggaaataagtctcgaacggtagctgctaccaacatgaacgaagaaagcagccgctcccatgctgtgttcaacatcataatcacacagacactttatgacctgcagtctgggaattccggggagaaagtcagtaaggtcagcttggtagacctggcgggtagcgaaagagtatctaaaacaggagctgcaggagagcgactgaaagaaggcagcaacattaacaaatcgcttacaaccttggggttggttatatcatcactggctgaccaggcagctggcaagggtaaaagcaaatttgtgccttatcgagattcagtcctcacttggctgcttaaggacaacttggggggcaacagccaaacctctatgatagccacaatcagcccagccgcagacaactatgaagagaccctctccacattaagatatgcagaccgagccaaaaggattgtgaaccatgctgttgtgaatgaggaccccaacgcaaaagtgatccgagaactgcgggaggaagtcgagaaactgagagagcagctctctcaggcagaggccatgaaggcccctgaactgaaggagaagctcgaagagtctgaaaagctgataaaagaactaacagtgacttgggaagagaagctgaggaaaacagaagagatcgcacaggaaagacaacgacaacttgaaagcatggggatttccctggagatgtccggtatcaaggtgggggatgacaaatgctacttagtcaatctgaatgcagaccctgctcttaacgaacttctggtttattatttaaaggatcacaccagggtgggtgcagatacctctcaagatatccagctttttggcataggaattcagcctcagcactgtgagattgacattgcatctgatggagacgtcactctcactccaaaagaaaatgcaaggtcctgtgtgaacggcacccttgtgtgcagtaccacccagctgtggcatggtgaccgaatcctatggggaaataatcacttttttagaataaacttacctaagaggaaacgtcgagattggttgaaagactttgaaaaagaaacgggcccgccagagcatgacctggatgcagccagtgaggcttcctctgaaccagactataactatgaatttgcacagatggaagttatcatgaaaaccctgaatagtaatgacccagttcaaaatgtggttcaggtcctggagaaacaatacctagaagaaaagagaagtgccctagaggagcagcggctcatgtatgagcgggaactggagcaactccgccagcagctctcccccgacaggcagccacagagtagcggccctgaccgcctggcctacagcagccagacagcgcagcagaaggtgacccagtgggcagaagagagggatgaactcttccgacaaagcctggcaaaactgcgagagcagctggttaaagctaataccttggtgagggaagcaaacttcctggctgaggaaatgagcaaactcaccgattaccaagtgactcttcagatccctgctgcaaacctcagtgccaataggaagagaggtgcaatagtgagtgaaccagctatccaagtgaggaggaaaggaaagagcacccaagtgtggaccattgagaagctggagaataaattaattgacatgagagacctttaccaagaatggaaggaaaaagttcctgaggcaaagagactctacggaaaacgaggtgaccctttctatgaagcccaagaaaatcacaacctcatcggggtggcgaatgtattcttggaatgcctcttctgtgatgtgaaacttcagtatgcagtccctatcatcagccagcagggggaggttgcagggcgtctccacgtggaagtgatgcgtgttacaggagctgttccagagcgtgtggtggaggatgactcttcggagaattccagtgaaagtgggagccttgaagtcgtagacagcagcggggaaatcattcaccgagtcaaaaagctgacatgtcgggtaaaaattaaagaagcaacggggctgcccttaaacctctcaaattttgtcttctgtcaatacacattctgggaccagtgtgagtctacggtggctgccccggtggtggaccccgaggtgccttcaccacagtccaaggatgcccagtacacagtgaccttctcccactgtaaggactatgtggtgaatgtaacagaagaatttctggagttcatttcagatggagcactggccattgaagtatggggccaccggtgtgctggaaatggcagctccatctgggaggtcgattctcttcatgctaagacaagaacactgcatgacaggtggaatgaagtaacgcgaagaatagaaatgtggatctccatattagaattgaatgagttaggagagtatgctgcagtggaacttcatcaggcaaaagatgtcaacacaggaggcatctttcaacttagacagggtcattcccgtagagtacaagtcacggtgaaacctgtgcagcattcagggacactgccacttatggttgaagccatcctgtcagtatccatcggctgtgtaactgccaggtccaccaaactccaaagagggctggacagttaccagagagatgatgaggatggtgatgatatggatagttatcaggaagaagacttaaactgcgtaagggagaggtggtcagatgcactcattaaacgacgagaatacctggatgaacagataaaaaaagtcagcaataaaacagagaaaacagaggacgatgtggagcgggaagcccagcttgtggagcagtgggtagggctgactgaggaaaggaatgctgtgctggtgccagccccaggcagtgggattcctggggcacctgccgactggatcccacctcctggaatggaaacccacataccagttctcttcctcgatttgaatgcggatgacctcagtgccaatgagcagcttgttggcccccatgcatccggcgtgaactccatcctgcccaaggagcatggcagccagtttttctacctgcccatcataaagcacagtgatgatgaggtttcagccacagcctcttgggattcctcggtgcatgattctgttcacttgaatagggtcacaccacagaatgaaaggatttacctaattgtgaaaaccacagttcaactcagccaccctgctgctatggagttagtattacgaaaacgaattgcagccaatatttacaacaaacagagtttcacgcagagtttgaagaggagaatatccctgaaaaatatattttattcctgtggtgtaacctatgaaatagtatccaatataccaaaggcaactgaggagatagaggaccgggaaacgctggctctcctggcagcaaggagtgaaaacgaaggcacatcagatggggagacgtacattgagaagtacactcgaggcgtgctgcaggtggaaaacattctgagtcttgaacggctccggcaggccgtcacagtcaaagaagcactttccaccaaagcccggcacattcggaggagcctcagtacaccaaatgttcataatgtctcttccagccgaccggacctttctggctttgatgaagatgacaagggttggccagagaaccagttggacatgtctgactatagctccagttaccaagatgtagcatgttatggaactttacccagggattctcctcgaaggaataaagaaggttgtacatcagagactcctcatgccttaaccgtcagcccttttaaagcattctctcctcagccaccaaagtttttcaagcccctaatgcctgtaaaagaggagcataagaaaaggatagccctggaagcaaggcctcttctaagccaggaggactctgaggaggaagaaaatgagctggaagctattaacaggaagctaataagttcacagccttatgtacctgtggagtttgctgacttcagtgtttacaatgccagcttggagaacagggaatggttttcctctaaagtagatctgtcaaactcacgggtcttggagaaagaagtgtcccgtagccctaccaccagcagtattaccagtggctacttttcccacagtgcctccaatgccaccctgtctgacatggtggtcccttctagtgacagctcagaccagctggccattcagacgaaggatgcagactccaccgagcactccacaccatcgcttgtgcatgatttcaggccgtcctcaaacaaagagttgacagaagtcgaaaaaggcttggtaaaggacaagataattgtggtgccactcaaggaaaacagtgccttagccaaagggagcccatcatcccagagcatccctgagaaaaactccaaatcactgtgcaggactggctcatgttcagaactagatgcctgccccagcaaaattagccagccagccaggggattctgccccagggaggtgacggtagaacacaccaccaacatccttgaagaccattctttcacagaatttatgggagtgtcagagggaaaagattttgatggtttgacagattcttctgctggagagctttccagtaggaggagtctaccaaataaaacaggcggcaagactgtctccgatgggctccaccaccccagccagctgcattccaagttagagaatgaccaggtaataattccagaggcagccttttgggttctgtgctgtcaatgagtatgtctaactgtatgtcaaccccagaggcccttcaccgcaacaacttggtaggaaagattcatccagttgtttgtgacagcaaagatgagcccacagagaagcaggctcacttcctgcacagctgtctctgtcggagagcaagtctgttttgggaactagaacgcaattgtgaaattataagaccagtggatttttttacctggcacatgggttggtgttgaatgaagtgttcagatggataaggatcaatctcatattcattccctgggatgtttagttaccagttttcccaaagtgttctggtagcatctaccatatttcatcaaatctgtgattcctttgattattatatgaaccattattttatgtatcattaagaaaaaatactgccaattaaactctgtcatatcaaaaaaaaaaaga

SEQ ID NO: 335296 - DNA, 6105 bp, Homo sapiens
gcggccgcgctcgaggggcgcgcggctgcagcggcggcggcgccgcgcgtgaggggccgcctaaggccgagcgggcgcggcgagcggccgggcgagcgcagccaacatgtcggataccaaggtaaaagttgccgtccgggtccggcccatgaaccgacgagaactggaactgaacaccaagtgcgtggtggagatggaagggaatcaaacggtcctgcaccctcctccttctaacaccaaacagggagaaaggaaacctcccaaggtatttgcctttgattattgcttttggtccatggatgaatctaacactacaaaatacgctggtcaagaagtggttttcaagtgccttggggaaggaattcttgaaaaagcctttcaggggtataatgcgtgtatttttgcatatggacagacaggttcgggaaaatccttttccatgatgggccatgctgagcagctgggccttattccaaggctctgctgtgctttatttaaaaggatctctttggagcaaaatgagtcacagacctttaaagttgaagtgtcctatatggaaatttataatgagaaagttcgggatcttttagaccccaaagggagtagacagtctcttaaagttcgagaacataaagttttgggaccatatgtagatggtttatctcaactagctgtcactagttttgaggatattgagtcattgatgtctgagggaaataagtctcgaacggtagctgctaccaacatgaacgaagaaagcagccgctcccatgctgtgttcaacatcataatcacacagacactttatgacctgcagtctgggaattccggggagaaagtcagtaaggtcagcttggtagacctggcgggtagcgaaagagtatctaaaacaggagctgcaggagagcgactgaaagaaggcagcaacattaacaaatcgcttacaaccttggggttggttatatcatcactggctgaccaggcagctggcaagggtaaaagcaaatttgtgccttatcgagattcagtcctcacttggctgcttaaggacaacttggggggcaacagccaaacctctatgatagccacaatcagcccagccgcagacaactatgaagagaccctctccacattaagatatgcagaccgagccaaaaggattgtgaaccatgctgttgtgaatgaggaccccaacgcaaaagtgatccgagaactgcgggaggaagtcgagaaactgagagagcagctctctcaggcagaggccatgaaggcccctgaactgaaggagaagctcgaagagtctgaaaagctgataaaagaactaacagtgacttgggaagagaagctgaggaaaacagaagagatcgcacaggaaagacaacgacaacttgaaagcatggggatttccctggagatgtccggtatcaaggtgggggatgacaaatgctacttagtcaatctgaatgcagaccctgctcttaacgaacttctggtttattatttaaaggatcacaccagggtgggtgcagatacctctcaagatatccagctttttggcataggaattcagcctcagcactgtgagattgacattgcatctgatggagacgtcactctcactccaaaagaaaatgcaaggtcctgtgtgaacggcacccttgtgtgcagtaccacccagctgtggcatggtgaccgaatcctatggggaaataatcacttttttagaataaacttacctaagaggaaacgtcgagattggttgaaagactttgaaaaagaaacgggcccgccagagcatgacctggatgcagccagtgaggcttcctctgaaccagactataactatgaatttgcacagatggaagttatcatgaaaaccctgaatagtaatgacccagttcaaaatgtggttcaggtcctggagaaacaatacctagaagaaaagagaagtgccctagaggagcagcggctcatgtatgagcgggaactggagcaactccgccagcagctctcccccgacaggcagccacagagtagcggccctgaccgcctggcctacagcagccagacagcgcagcagaaggtgacccagtgggcagaagagagggatgaactcttccgacaaagcctggcaaaactgcgagagcagctggttaaagctaataccttggtgagggaagcaaacttcctggctgaggaaatgagcaaactcaccgattaccaagtgactcttcagatccctgctgcaaacctcagtgccaataggaagagaggtgcaatagtgagtgaaccagctatccaagtgaggaggaaaggaaagagcacccaagtgtggaccattgagaagctggagaataaattaattgacatgagagacctttaccaagaatggaaggaaaaagttcctgaggcaaagagactctacggaaaacgaggtgaccctttctatgaagcccaagaaaatcacaacctcatcggggtggcgaatgtattcttggaatgcctcttctgtgatgtgaaacttcagtatgcagtccctatcatcagccagcagggggaggttgcagggcgtctccacgtggaagtgatgcgtgttacaggagctgttccagagcgtgtggtggaggatgactcttcggagaattccagtgaaagtgggagccttgaagtcgtagacagcagcggggaaatcattcaccgagtcaaaaagctgacatgtcgggtaaaaattaaagaagcaacggggctgcccttaaacctctcaaattttgtcttctgtcaatacacattctgggaccagtgtgagtctacggtggctgccccggtggtggaccccgaggtgccttcaccacagtccaaggatgcccagtacacagtgaccttctcccactgtaaggactatgtggtgaatgtaacagaagaatttctggagttcatttcagatggagcactggccattgaagtatggggccaccggtgtgctggaaatggcagctccatctgggaggtcgattctcttcatgctaagacaagaacactgcatgacaggtggaatgaagtaacgcgaagaatagaaatgtggatctccatattagaattgaatgagttaggagagtatgctgcagtggaacttcatcaggcaaaagatgtcaacacaggaggcatctttcaacttagacagggtcattcccgtagagtacaagtcacggtgaaacctgtgcagcattcagggacactgccacttatggttgaagccatcctgtcagtatccatcggctgtgtaactgccaggtccaccaaactccaaagagggctggacagttaccagagagatgatgaggatggtgatgatatggatagttatcaggaagaagacttaaactgcgtaagggagaggtggtcagatgcactcattaaacgacgagaatacctggatgaacagataaaaaaagtcagcaataaaacagagaaaacagaggacgatgtggagcgggaagcccagcttgtggagcagtgggtagggctgactgaggaaaggaatgctgtgctggtgccagccccaggcagtgggattcctggggcacctgccgactggatcccacctcctggaatggaaacccacataccagttctcttcctcgatttgaatgcggatgacctcagtgccaatgagcagcttgttggcccccatgcatccggcgtgaactccatcctgcccaaggagcatggcagccagtttttctacctgcccatcataaagcacagtgatgatgaggtttcagccacagcctcttgggattcctcggtgcatgattctgttcacttgaatagggtcacaccacagaatgaaaggatttacctaattgtgaaaaccacagttcaactcagccaccctgctgctatggagttagtattacgaaaacgaattgcagccaatatttacaacaaacagagtttcacgcagagtttgaagaggagaatatccctgaaaaatatattttattcctgtggtgtaacctatgaaatagtatccaatataccaaaggcaactgaggagatagaggaccgggaaacgctggctctcctggcagcaaggagtgaaaacgaaggcacatcagatggggagacgtacattgagaagtacactcgaggcgtgctgcaggtggaaaacattctgagtcttgaacggctccggcaggccgtcacagtcaaagaagcactttccaccaaagcccggcacattcggaggagcctcagtacaccaaatgttcataatgtctcttccagccgaccggacctttctggctttgatgaagatgacaagggttggccagagaaccagttggacatgtctgactatagctccagttaccaagatgtagcatgttatggaactttacccagggattctcctcgaaggaataaagaaggttgtacatcagagactcctcatgccttaaccgtcagcccttttaaagcattctctcctcagccaccaaagtttttcaagcccctaatgcctgtaaaagaggagcataagaaaaggatagccctggaagcaaggcctcttctaagccaggaggtaaatgcttgacttgtctgtactatgcagaatagagcagagttgtgtcacctgtgaagcagcagtgtgcattagcaagctgagtgctgcatgtggacatgcacggtcatcactccatggttcccgttctcgaattcctctttctcaagcatgcagagtcatggtagaatctcttgtttgttgttgctgctgtggttttatttctttgtgtttatggcttttcaaagtatttttttatgtttcaagtgagaaagatgttttctaggtgttttgaaaagattaaaggccttttttaaaattatttttcttttttgtctttttggggatttctgattttgttttttatagagatagggtcttgctgtgttgcccaggctggtctgaaactcctggcctcaagtgattcttttgccccagcctcccaaggcactgggattgcaggcatgagccgttgtacctggtcaaaaggctgttttttaaataagactaattatgctttttgccacagaatctgtttattcctgtcatatctctccagtagtttaactctggcctgcagaattggctgctgcattactcacatgtaataaaagtgttagcattgcttttctaacttgcatgtacttaatatgtattttggccgttgtcgtctttgtgtgtgatgcatctgtgtgtcttaacctttgcagagcatgcctccacctcaggcacataaccctggctgcattgtaccctcaggaagcaatggcagcagcatgccagtagaacacaatagcaaacgtgagaagaagattgtaagttccggaaccatttctgtcatattgcctggtggtgggtttaaggccctttcacagacaatcatccaaatgctagaagaaattaagacatgtattgggtctttgtcttaaagaaaataaaaatgtgaccattggtaatgatattttgcatggatgtggccatgacctacaattttatcttatttatttatttattttttgcttaagtttgcttagaaaaagggagaaaggcacttttattgcttctggcctttataaaaagtgtaacaaagagatctttttaataccaaaatctttctaatgtgcctatacatattgcctagattctgaagttaatctacctagaggaagtgcacttacttggagtaagtaatcatgcatttaatgcatttagctgtggatatgtttggaagcttttttatgttgcctgatgctattgccaagataattctgtagttagagctgcactacaatctatcataatcacccttcatcgtctcactgtctagggtagcctttgttaattagctggcaaaatatattccaataccttggtgccagccttgcattcaggatggcttatatatattttgccacaggtaggctgaaactctacccacaaaacctcattccttagcacttggttttaaaattattaatttgagatacagttttaaaaacactgcataccaggcaccttaggttataaattatacctcaatttac

SEQ ID NO: 335297 - DNA, 5662 bp, Homo sapiens
gcggccgcgctcgaggggcgcgcggctgcagcggcggcggcgccgcgcgtgaggggccgcctaaggccgagcgggcgcggcgagcggccgggcgagcgcagccaacatgtcggataccaaggtaaaagttgccgtccgggtccggcccatgaaccgacgagaactggaactgaacaccaagtgcgtggtggagatggaagggaatcaaacggtcctgcaccctcctccttctaacaccaaacagggagaaaggaaacctcccaaggtatttgcctttgattattgcttttggtccatggatgaatctaacactacaaaatacgctggtcaagaagtggttttcaagtgccttggggaaggaattcttgaaaaagcctttcaggggtataatgcgtgtatttttgcatatggacagacaggttcgggaaaatccttttccatgatgggccatgctgagcagctgggccttattccaaggctctgctgtgctttatttaaaaggatctctttggagcaaaatgagtcacagacctttaaagttgaagtgtcctatatggaaatttataatgagaaagttcgggatcttttagaccccaaagggagtagacagtctcttaaagttcgagaacataaagttttgggaccatatgtagatggtttatctcaactagctgtcactagttttgaggatattgagtcattgatgtctgagggaaataagtctcgaacggtagctgctaccaacatgaacgaagaaagcagccgctcccatgctgtgttcaacatcataatcacacagacactttatgacctgcagtctgggaattccggggagaaagtcagtaaggtcagcttggtagacctggcgggtagcgaaagagtatctaaaacaggagctgcaggagagcgactgaaagaaggcagcaacattaacaaatcgcttacaaccttggggttggttatatcatcactggctgaccaggcagctggcaagggtaaaagcaaatttgtgccttatcgagattcagtcctcacttggctgcttaaggacaacttggggggcaacagccaaacctctatgatagccacaatcagcccagccgcagacaactatgaagagaccctctccacattaagatatgcagaccgagccaaaaggattgtgaaccatgctgttgtgaatgaggaccccaacgcaaaagtgatccgagaactgcgggaggaagtcgagaaactgagagagcagctctctcaggcagaggccatgaaggcccctgaactgaaggagaagctcgaagagtctgaaaagctgataaaagaactaacagtgacttgggaagagaagctgaggaaaacagaagagatcgcacaggaaagacaacgacaacttgaaagcatggggatttccctggagatgtccggtatcaaggtgggggatgacaaatgctacttagtcaatctgaatgcagaccctgctcttaacgaacttctggtttattatttaaaggatcacaccagggtgggtgcagatacctctcaagatatccagctttttggcataggaattcagcctcagcactgtgagattgacattgcatctgatggagacgtcactctcactccaaaagaaaatgcaaggtcctgtgtgaacggcacccttgtgtgcagtaccacccagctgtggcatggtgaccgaatcctatggggaaataatcacttttttagaataaacttacctaagaggaaacgtcgagattggttgaaagactttgaaaaagaaacgggcccgccagagcatgacctggatgcagccagtgaggcttcctctgaaccagactataactatgaatttgcacagatggaagttatcatgaaaaccctgaatagtaatgacccagttcaaaatgtggttcaggtcctggagaaacaatacctagaagaaaagagaagtgccctagaggagcagcggctcatgtatgagcgggaactggagcaactccgccagcagctctcccccgacaggcagccacagagtagcggccctgaccgcctggcctacagcagccagacagcgcagcagaaggtgacccagtgggcagaagagagggatgaactcttccgacaaagcctggcaaaactgcgagagcagctggttaaagctaataccttggtgagggaagcaaacttcctggctgaggaaatgagcaaactcaccgattaccaagtgactcttcagatccctgctgcaaacctcagtgccaataggaagagaggtgcaatagtgagtgaaccagctatccaagtgaggaggaaaggaaagagcacccaagtgtggaccattgagaagctggagaataaattaattgacatgagagacctttaccaagaatggaaggaaaaagttcctgaggcaaagagactctacggaaaacgaggtgaccctttctatgaagcccaagaaaatcacaacctcatcggggtggcgaatgtattcttggaatgcctcttctgtgatgtgaaacttcagtatgcagtccctatcatcagccagcagggggaggttgcagggcgtctccacgtggaagtgatgcgtgttacaggagctgttccagagcgtgtggtggaggatgactcttcggagaattccagtgaaagtgggagccttgaagtcgtagacagcagcggggaaatcattcaccgagtcaaaaagctgacatgtcgggtaaaaattaaagaagcaacggggctgcccttaaacctctcaaattttgtcttctgtcaatacacattctgggaccagtgtgagtctacggtggctgccccggtggtggaccccgaggtgccttcaccacagtccaaggatgcccagtacacagtgaccttctcccactgtaaggactatgtggtgaatgtaacagaagaatttctggagttcatttcagatggagcactggccattgaagtatggggccaccggtgtgctggaaatggcagctccatctgggaggtcgattctcttcatgctaagacaagaacactgcatgacaggtggaatgaagtaacgcgaagaatagaaatgtggatctccatattagaattgaatgagttaggagagtatgctgcagtggaacttcatcaggcaaaagatgtcaacacaggaggcatctttcaacttagacagggtcattcccgtagagtacaagtcacggtgaaacctgtgcagcattcagggacactgccacttatggttgaagccatcctgtcagtatccatcggctgtgtaactgccaggtccaccaaactccaaagagggctggacagttaccagagagatgatgaggatggtgatgatatggatagttatcaggaagaagacttaaactgcgtaagggagaggtggtcagatgcactcattaaacgacgagaatacctggatgaacagataaaaaaagtcagcaataaaacagagaaaacagaggacgatgtggagcgggaagcccagcttgtggagcagtgggtagggctgactgaggaaaggaatgctgtgctggtgccagccccaggcagtgggattcctggggcacctgccgactggatcccacctcctggaatggaaacccacataccagttctcttcctcgatttgaatgcggatgacctcagtgccaatgagcagcttgttggcccccatgcatccggcgtgaactccatcctgcccaaggagcatggcagccagtttttctacctgcccatcataaagcacagtgatgatgaggtttcagccacagcctcttgggattcctcggtgcatgattctgttcacttgaatagggtcacaccacagaatgaaaggatttacctaattgtgaaaaccacagttcaactcagccaccctgctgctatggagttagtattacgaaaacgaattgcagccaatatttacaacaaacagagtttcacgcagagtttgaagaggagaatatccctgaaaaatatattttattcctgtggtgtaacctatgaaatagtatccaatataccaaaggcaactgaggagatagaggaccgggaaacgctggctctcctggcagcaaggagtgaaaacgaaggcacatcagatggggagacgtacattgagaagtacactcgaggcgtgctgcaggtggaaaacattctgagtcttgaacggctccggcaggccgtcacagtcaaagaagcactttccaccaaagcccggcacattcggaggagcctcagtacaccaaatgttcataatgtctcttccagccgaccggacctttctggctttgatgaagatgacaagggttggccagagaaccagttggacatgtctgactatagctccagttaccaagatgtagcatgttatggaactttacccagggattctcctcgaaggaataaagaaggttgtacatcagagactcctcatgccttaaccgtcagcccttttaaagcattctctcctcagccaccaaagtttttcaagcccctaatgcctgtaaaagaggagcataagaaaaggatagccctggaagcaaggcctcttctaagccaggaggactctgaggaggaagaaaatgagctggaagctattaacaggaagctaataagttcacagccttatgtacctgtggagtttgctgacttcagtgtttacaatgccagcttggagaacagggaatggttttcctctaaagtagatctgtcaaactcacgggtcttggagaaagaagtgtcccgtagccctaccaccagcagtattaccagtggctacttttcccacagtgcctccaatgccaccctgtctgacatggtggtcccttctagtgacagctcagaccagctggccattcagacgaaggatgcagactccaccgagcactccacaccatcgcttgtgcatgatttcaggccgtcctcaaacaaagagttgacagaagtcgaaaaaggcttggtaaaggacaagataattgtggtgccactcaaggaaaacagtgccttagccaaagggagcccatcatcccagagcatccctgagaaaaactccaaatcactgtgcaggactggctcatgttcagaactagatgcctgccccagcaaaattagccagccagccaggggattctgccccagggaggtgacggtagaacacaccaccaacatccaggtaataattccagaggcagccttttgggttctgtgctgtcaatgagtatgtctaactgtatgtcaaccccagaggcccttcaccgcaacaacttggtaggaaagattcatccagttgtttgtgacagcaaagatgagcccacagagaagcaggctcacttcctgcacagctgtctctgtcggagagcaagtctgttttgggaactagaacgcaattgtgaaattataagaccagtggatttttttacctggcacatgggttggtgttgaatgaagtgttcagatggataaggatcaatctcatattcattccctgggatgtttagttaccagttttcccaaagtgttctggtagcatctaccatatttcatcaaatctgtgattcctttgattattatatgaaccattattttatgtatcattaagaaaaaatactgccaattaaactctgtcatatcaaaaaaaaaaaga

SEQ ID NO: 335298 - DNA, 2571 bp, Homo sapiens
caggaagattcattgagcctaggagttcaagaccagactggacaacatagtaagacctcatctctattaaacataatgattttttaaaaaagaaaaaaagctgttgtgagtcttggagtctctatttcaactgcagaataaggaatgaaagaaaaaagaaaaatgtgttatgtgtaaacttcaactgtaaaaagcatatatttaaatttttggtgtttgcttaaaaactgactttcccctactgttttttctgtgctcctgatgtggttagcggatgacctcagtgccaatgagcagcttgttggcccccatgcatccggcgtgaactccatcctgcccaaggagcatggcagccagtttttctacctgcccatcataaagcacagtgatgatgaggtttcagccacagcctcttgggattcctcggtgcatgattctgttcacttgaatagggtcacaccacagaatgaaaggatttacctaattgtgaaaaccacagttcaactcagccaccctgctgctatggagttagtattacgaaaacgaattgcagccaatatttacaacaaacagagtttcacgcagagtttgaagaggagaatatccctgaaaaatatattttattcctgtggtgtaacctatgaaatagtatccaatataccaaaggcaactgaggagatagaggaccgggaaacgctggctctcctggcagcaaggagtgaaaacgaaggcacatcagatggggagacgtacattgagaagtacactcgaggcgtgctgcaggtggaaaacattctgagtcttgaacggctccggcaggccgtcacagtcaaagaagcactttccaccaaagcccggcacattcggaggagcctcagtacaccaaatgttcataatgtctcttccagccgaccggacctttctggctttgatgaagatgacaagggttggccagagaaccagttggacatgtctgactatagctccagttaccaagatgtagcatgttatggaactttacccagggattctcctcgaaggaataaagaaggttgtacatcagagactcctcatgccttaaccgtcagcccttttaaagcattctctcctcagccaccaaagtttttcaagcccctaatgcctgtaaaagaggagcataagaaaaggatagccctggaagcaaggcctcttctaagccaggagagcatgcctccacctcaggcacataaccctggctgcattgtaccctcaggaagcaatggcagcagcatgccagtagaacacaatagcaaacgtgagaagaagattgactctgaggaggaagaaaatgagctggaagctattaacaggaagctaataagttcacagccttatgtacctgtggagtttgctgacttcagtgtttacaatgccagcttggagaacagggaatggttttcctctaaagtagatctgtcaaactcacgggtcttggagaaagaagtgtcccgtagccctaccaccagcagtattaccagtggctacttttcccacagtgcctccaatgccaccctgtctgacatggtggtcccttctagtgacagctcagaccagctggccattcagacgaaggatgcagactccaccgagcactccacaccatcgcttgtgcatgatttcaggccgtcctcaaacaaagagttgacagaagtcgaaaaaggcttggtaaaggacaagataattgtggtgccactcaaggaaaacagtgccttagccaaagggagcccatcatcccagagcatccctgagaaaaactccaaatcactgtgcaggactggctcatgttcagaactagatgcctgccccagcaaaattagccagccagccaggggattctgccccagggaggtgacggtagaacacaccaccaacatccttgaagaccattctttcacagaatttatgggagtgtcagagggaaaagattttgatggtttgacagattcttctgctggagagctttccagtaggaggagtctaccaaataaaacaggcggcaagactgtctccgatgggctccaccaccccagccagctgcattccaagttagagaatgaccaggtaataattccagaggcagccttttgggttctgtgctgtcaatgagtatgtctaactgtatgtcaaccccagaggcccttcaccgcaacaacttggtaggaaagattcatccagttgtttgtgacagcaaagatgagcccacagagaagcaggctcacttcctgcacagctgtctctgtcggagagcaagtctgttttgggaactagaacgcaattgtgaaattataagaccagtggatttttttacctggcacatgggttggtgttgaatgaagtgttcagatggataaggatcaatctcatattcattccctgggatgtttagttaccagttttcccaaagtgttctggtagcatctaccatatttcatcaaatctgtgattcctttgattattatatgaaccattattttatgtatcattaagaaaaaatactgccaattaaactctgtcatatcaaaaaaaaaaaga

SEQ ID NO: 335299 - DNA, 1237 bp, Homo sapiens
gcggccgcgctcgaggggcgcgcggctgcagcggcggcggcgccgcgcgtgaggggccgcctaaggccgagcgggcgcggcgagcggccgggcgagcgcagccaacatgtcggataccaaggtaaaagttgccgtccgggtccggcccatgaaccgacgagaactggaactgaacaccaagtgcgtggtggagatggaagggaatcaaacggtcctgcaccctcctccttctaacaccaaacagggagaaaggaaagctggtcacagtggctcacatctctaattccagcactttgggaggccaaggcaagaggatcacttgagccgaggatttcaagaccagcctttgcaacatggcaaaaccccatctctacaaaaaatttgtttaaaattagctggacgtggtggcgcatacctgtggtcccagctactcaggagactgaggcaggaggctccagtgagctgtttgagccactgcacgccagcctgggtgacagagccagaccctgtatatgaataaatggatggttggcaaagtgttatatataataagtacaattccttaggtgtccttaggtgtactactaaagtgggtttgtgatagcccatatatttagtcatttatgttcaatagtgttatattcatttgagaaattattttaagaaatttaaaattaagaaagttttaaaagtcctttagtaattagagatttctctgggtgggtggatacggttgtttctaattatcccacacatttaatcatttatgttcaatagtgttgtattttttgagaaattattttaagaaatgcaaaattaagaaagatttaaaagtcctttagtaattagagatttttctagttgggtggataagggttatttctaagtatcttttgagtattttttgtcatatatttcgttttttaggcatgattaaaagtgtatttgaggactcttagacacataaagttgaattcctcagattgagagatagttattgctttttaattttgttaagatgctcagctgttggataaataatgcttttgttaaaatcctgtggggcattcatccaacaaatggggtataagaaaggaatgtgtgtttgtgtacatgttcttctatctgttggtcctaaagagtgtaagaaggtaaatttgaccagtgaaattcataattacagagttttatttggtaatccattaataaatcattttctgaaagcacatgtctgtga

SEQ ID NO: 335300 - DNA, 189 bp, Homo sapiens
ctggaaacataaaagtcattttttttcttcgaatttgtagtcccaaaaccactgctcataaaaataagctttacaacatctttgagaatccaaaagaaccccggtcaagatttttttggctagaaaagaaagcagttttgatattcaaaaatttggctgctcttagtcaatccccaaaagagaaaaatc

SEQ ID NO: 335301 - DNA, 200 bp, Homo sapiens
gtcgtagatcgagcggtaccccgcggccaatggcactttagaaggggaatattcatttttcatgagaacatcaataaaataagccacctcagcaccaacaacacggagattgtttacagcatggatgtattcccgtgaaccgttgatccaatctaaattaatgcaatttatatcttccagctgtagcaacacctggcaca

SEQ ID NO: 335302 - DNA, 1548 bp, Homo sapiens
gtggattaacaactgtctttattccaatggagttttttgggggttttttcttcttcttaaagacaaaaaaataatctaccgctgacactcaacaagaaccgtcgtagaatggacaagtcttcggatcgcgctgtgcagatccctcagcaaattgtgacagtattatggcactttggcctaagctgttaaagagacgatgtaatgaacagctgcggatttctgaggcacaattgtgtgacacaggaagcccaagtgttggccatcctcaacgaaggcagctgccgggctccggtttgcttcagcaaaccctcacccctcgccttcaaccaggcgggtgtcgtcagctgtccgccagctgctgcccgcgcctttccgcccccgcgcgccggccaaggccgaggcggccgggaccagaggcgcgcgccctcagtgcatgtgacggggtgggagggggaggtttcttcctcccccgtccccaagccccgccttctccagagaggctgcggcttcctattgcgccaccaccgaaatgaccaccgtgccagccaatcaagacgtgattcatgaagtaagacccgccccttactggtccccaggttccttcccgctcacgccggagtcacttccgaagagagaaccgccatgaagagagaagggggtgccgcccacctctgctccgacagcctcccggagtcccagcagcaagacggcaaccacgcacccaacttctccagccacggctcatgccgccgtcgccagcggcgccgacatgacaaggcgctgcatgcccgctaggccaggtttcccctcatccccagccccggggtcgtcgcccccgcgctgccatctgagacccggtagtaccgcccatgctgcagcgggaaagagaacagagagtcctggggacaggtaccgtgcagagggcttgagaaggggccgggtcgcgggggcaagggtatgaggggagggctgcagaccgccgctcttccagttcccgccatcctccgcgagctcaggcgttggcatttcggggcctggcaaatccccgccccgcctccgcgcaggggctactgggagttggagtttgcttctctgtagttgggcagctgctcttggtctagtgaccaccagcctggacagctacggagaacccgccttaggtagaaagaaagtgatttttttcctttgcaagagtttgacccgggaccctaactgcttaatgcatatttagatcgttttctgtacgttgtcagttctactgatcctagtggtttagtaatataaaccttttctatgttgtgggtgaaattatgtaacctgtgatgagggaatcccttccacgaattactttgtagtccagcgtgcacgctagttcatacttaaaagaacttgcagatttggaatgtgacgtgttttctctttcagtaacttcacgcctctccaagaggctaatttttttgtaaagattttgtgggagctatgtaatgagatggggagtttcatctaatgacatcctctgacaataaaacatgtttaaattccctacga

SEQ ID NO: 335303 - DNA, 364 bp, Homo sapiens
ttaccattgtcagaactttattaaaccaaatagtgaaatccagcctttattttataaatctttctccatttaatctgagttatgaaggttttaatatttgcttatatgatgccatattatgcttttattttcaggaagcagtcaattatagatttcttcaaaccagcttcaaaacaaggtatgtacactgttgatgcattttttgtgggctattttgggggtgaggagagagacagattcaactttaaaacctactctaaactgttttagtaaacgtagtgttcaaaattgaaaataaaatgaagatgcagtattttgttttacaaggataaactgaagttctaaatatgaaagtctttttgct

SEQ ID NO: 335304 - DNA, 1460 bp, Homo sapiens
gtggattaacaactgtctttattccaatggagttttttgggggttttttcttcttcttaaagacaaaaaaataatctaccgctgacactcaacaagaaccgtcgtagaatggacaagtcttcggatcgcgctgtgcagatccctcagcaaattgtgacagtattatggcactttggcctaagctgttaaagagacgatgtaatgaacagctgcggatttctgaggcacaattgtgtgacacaggaagcccaagtgttggccatcctcaacgaaggcagctgccgggctccggtttgcttcagcaaaccctcacccctcgccttcaaccaggcgggtgtcgtcagctgtccgccagctgctgcccgcgcctttccgcccccgcgcgccggccaaggccgaggcggccgggaccagaggcgcgcgccctcagtgcatgtgacggggtgggagggggaggtttcttcctcccccgtccccaagccccgccttctccagagaggctgcggcttcctattgcgccaccaccgaaatgaccaccgtgccagccaatcaagacgtgattcatgaagtaagacccgccccttactggtccccaggttccttcccgctcacgccggagtcacttccgaagagagaaccgccatgaagagagaagggggtgccgcccacctctgctccgacagcctcccggagtcccagcagcaagacggcaaccacgcacccaacttctccagccacggctcatgccgccgtcgccagcggcgccgacatgacaaggcgctgcatgcccgctaggccaggtttcccctcatccccagccccggggtcgtcgcccccgcgctgccatctgagacccggtagtaccgcccatgctgcagcgggaaagagaacagagagtcctggggacaggaagcagtcaattatagatttcttcaaaccagcttcaaaacaagacagacacatgttggattcaccacaaaaatcaaacatcaaatatggaggaagtagattgtctatcactgggacagagcagtttgaaaggaaactatcctcaccaaaagaatctaaacccaaaagggtgccaccagaaaagagccctattatagaagctttcatgaaaggtgttaaagagcaccatgaagatcatggtatacatgagtcacgtcggccttgtctgtcactagcctccaaatatttagccaaaggaacaaatatctatgttccttcttcatatcacttgccaaaggagatgaagtcactaaagaaaaaacatcgatccccagagagaaggaagtcactattcattcatgaaaataatgagaagaatgatagagatcgaggcaaaaccaatgcagactccaaaaagcagaccacagtggcagaagctgacatcttcaataacagctccagaagccttagcagcaggagcagcctgtccaggcaccacccggaagaaagcc

SEQ ID NO: 335305 - DNA, 1747 bp, Homo sapiens
cgagtaggcgcgagctaagcaggaggcggaggcggaggcggagggcgaggggcggggagcgccgcctggagcgcggcaggtcatattgaacattccagatacctatcattactcgatgctgttgataacagcaagatggctttgaactcagggtcaccaccagctattggaccttactatgaaaaccatggataccaaccggaaaacccctatcccgcacagcccactgtggtccccactgtctacgaggtgcatccggctcagtactacccgtcccccgtgccccagtacgccccgagggtcctgacgcaggcttccaaccccgtcgtctgcacgcagcccaaatccccatccgggacagtgtgcacctcaaagactaagaaagcactgtgcatcaccttgaccctggggaccttcctcgtgggagctgcgctggccgctggcctactctggaagttcatgggcagcaagtgctccaactctgggatagagtgcgactcctcaggtacctgcatcaacccctctaactggtgtgatggcgtgtcacactgccccggcggggaggacgagaatcggtgtgttcgcctctacggaccaaacttcatccttcagatgtactcatctcagaggaagtcctggcaccctgtgtgccaagacgactggaacgagaactacgggcgggcggcctgcagggacatgggctataagaataatttttactctagccaaggaatagtggatgacagcggatccaccagctttatgaaactgaacacaagtgccggcaatgtcgatatctataaaaaactgtaccacagtgatgcctgttcttcaaaagcagtggtttctttacgctgtatagcctgcggggtcaacttgaactcaagccgccagagcaggatcgtgggcggtgagagcgcgctcccgggggcctggccctggcaggtcagcctgcacgtccagaacgtccacgtgtgcggaggctccatcatcacccccgagtggatcgtgacagccgcccactgcgtggaaaaacctcttaacaatccatggcattggacggcatttgcggggattttgagacaatctttcatgttctatggagccggataccaagtagaaaaagtgatttctcatccaaattatgactccaagaccaagaacaatgacattgcgctgatgaagctgcagaagcctctgactttcaacgacctagtgaaaccagtgtgtctgcccaacccaggcatgatgctgcagccagaacagctctgctggatttccgggtggggggccaccgaggagaaagggaagacctcagaagtgctgaacgctgccaaggtgcttctcattgagacacagagatgcaacagcagatatgtctatgacaacctgatcacaccagccatgatctgtgccggcttcctgcaggggaacgtcgattcttgccagggtgacagtggagggcctctggtcacttcgaagaacaatatctggtggctgataggggatacaagctggggttctggctgtgccaaagcttacagaccaggagtgtacgggaatgtgatggtattcacggactggatttatcgacaaatgagggcagacggctaatccacatggtcttcgtccttgacgtcgttttacaagaaaacaatggggctggttttgcttccccgtgcatgatttactcttagagatgattcagaggtcacttcatttttattaaacagtgaacttgtctggc

SEQ ID NO: 335306 - DNA, 724 bp, Homo sapiens
cgagtaggcgcgagctaagcaggaggcggaggcggaggcggagggcgaggggcggggagcgccgcctggagcgcggcaggtcatattgaacattccagatacctatcattactcgatgctgttgataacagcaagatggctttgaactcacctatttcagctgctttgacaaaatgactggctcctgacttaacgttctataaatgaatgtgctgaagcaaagtgcccatggtggcggcgaagaagagaaagatgtgttttgttttggactctctgtggtcccttccaatgctgtgggtttccaaccaggggaagggtcccttttgcattgccaagtgccataaccatgagcactactctaccatggttctgcctcctggccaagcaggctggtttgcaagaatgaaatgaatgattctacagctaggacttaaccttgaaatggaaagtcttgcaatcccatttgcaggatccgtctgtgcacatgcctctgtagagagcagcattcccagggaccttggaaacagttggcactgtaaggtgcttgctccccaagacacatcctaaaaggtgttgtaatggtgaaaacgtcttccttctttattgccccttcttatttatgtgaacaactgtttgtctttttttgtatcttttttaaactgtaaagttcaattgtgaaaatgaatatcatgcaaataaattatgcgatttttttttcaaagta

SEQ ID NO: 335307 - DNA, 750 bp, Homo sapiens
ggttaagtccagcaggatgcctgggcttagtggcactggagttgtgggtggccttgagccccaggcagtcccctgagagcccttcccgatggatgtttgagtcactgagtgtgttccttcttctttctggtcaggctgtcctggccgctgcacttacaattgcaccccatcctcctacccactctgatcccagaggagagtgcttctgctgtaacctctaaggcacaagtgggtcccaaagtccttaaatatggagggatgtggggaagcagtggtgaagatgcaggccaaaggtcagcaggcaacactggtctttgttgtaggtaaccttcatctagagattcttctagttctttccagatttatcttctaaaaactaactggtatggaaatattacagtcctgtaattctttcttctaggtcatattgaacattccagatacctatcattactcgatgctgttgataacagcaagatggctttgaactcatcagtaagtggttaattattaccttcctggccttttctttgttcccttgtcccttctgttattcccaacattgtttggggtcagcaattgcaagggctatttgtagggaacgccgggccacgctgatgctgttcaaggcaccctctagaaagagtgagtcaggtgcgcagccacacagctgcccaggtgagtcgcaagagccatggctgttgggtacacgtgggtgatatgcattctcaccttgacctcatcccttcc

SEQ ID NO: 335308 - DNA, 708 bp, Homo sapiens
cgagtaggcgcgagctaagcaggaggcggaggcggaggcggagggcgaggggcggggagcgccgcctggagcgcggcaggtcatattgaacattccagatacctatcattactcgatgctgttgataacagcaagatggctttgaactcagaggtcaggagtttgagaccagcctgaccaatatggtgaaaccttatctccactaaaaatacaaaaattagccaagcacggtggcgggtgcctgtaattccagctattcaggaggctgaggcaggagaatcacttgaacctgggaggcggaggttgcagtgagctgagatcacgccactgcattccagcctgggagacagagctggctcaaaaaataaattaattaattaaaaacaaaattggagatgcactatgttattttcaaaacaagctgcctttaaaggtctatctgttgtcacagggtgggctcatctgtttcattttattttctgtggtttatctatttatttattttaatgaactaggaagcattgctcctatttatggcataccacatgatgtttggatacgtgtatgcctgtggcatggctaagtcaagctagaacatgggccttacctcatatacgtgtcttattaagaacacataaaacctactcttgtagtgattttcaaatatgcaacatatagtttattaactgcagtcactatgatgtacaa

SEQ ID NO: 335309 - DNA, 3465 bp, Homo sapiens
cgagtaggcgcgagctaagcaggaggcggaggcggaggcggagggcgaggggcggggagcgccgcctggagcgcggcaggtcatattgaacattccagatacctatcattactcgatgctgttgataacagcaagatggctttgaactcagggtcaccaccagctattggaccttactatgaaaaccatggataccaaccggaaaacccctatcccgcacagcccactgtggtccccactgtctacgaggtgcatccggctcagtactacccgtcccccgtgccccagtacgccccgagggtcctgacgcaggcttccaaccccgtcgtctgcacgcagcccaaatccccatccgggacagtgtgcacctcaaagactaagaaagcactgtgcatcaccttgaccctggggaccttcctcgtgggagctgcgctggccgctggcctactctggaagttcatgggcagcaagtgctccaactctgggatagagtgcgactcctcaggtacctgcatcaacccctctaactggtgtgatggcgtgtcacactgccccggcggggaggacgagaatcggtgtgttcgcctctacggaccaaacttcatccttcagatgtactcatctcagaggaagtcctggcaccctgtgtgccaagacgactggaacgagaactacgggcgggcggcctgcagggacatgggctataagaataatttttactctagccaaggaatagtggatgacagcggatccaccagctttatgaaactgaacacaagtgccggcaatgtcgatatctataaaaaactgtaccacagtgatgcctgttcttcaaaagcagtggtttctttacgctgtatagcctgcggggtcaacttgaactcaagccgccagagcaggatcgtgggcggtgagagcgcgctcccgggggcctggccctggcaggtcagcctgcacgtccagaacgtccacgtgtgcggaggctccatcatcacccccgagtggatcgtgacagccgcccactgcgtggaaaaacctcttaacaatccatggcattggacggcatttgcggggattttgagacaatctttcatgttctatggagccggataccaagtagaaaaagtgatttctcatccaaattatgactccaagaccaagaacaatgacattgcgctgatgaagctgcagaagcctctgactttcaacgacctagtgaaaccagtgtgtctgcccaacccaggcatgatgctgcagccagaacagctctgctggatttccgggtggggggccaccgaggagaaagggaagacctcagaagtgctgaacgctgccaaggtgcttctcattgagacacagagatgcaacagcagatatgtctatgacaacctgatcacaccagccatgatctgtgccggcttcctgcaggggaacgtcgattcttgccagggtgacagtggagggcctctggtcacttcgaagaacaatatctggtggctgataggggatacaagctggggttctggctgtgccaaagcttacagaccaggagtgtacgggaatgtgatggtattcacggactggatttatcgacaaatgagggcagacggctaatccacatggtcttcgtccttgacgtcgttttacaagaaaacaatggggctggttttgcttccccgtgcatgatttactcttagagatgattcagaggtcacttcatttttattaaacagtgaacttgtctggctttggcactctctgccattctgtgcaggctgcagtggctcccctgcccagcctgctctccctaaccccttgtccgcaaggggtgatggccggctggttgtgggcactggcggtcaagtgtggaggagaggggtggaggctgccccattgagatcttcctgctgagtcctttccaggggccaattttggatgagcatggagctgtcacctctcagctgctggatgacttgagatgaaaaaggagagacatggaaagggagacagccaggtggcacctgcagcggctgccctctggggccacttggtagtgtccccagcctacctctccacaaggggattttgctgatgggttcttagagccttagcagccctggatggtggccagaaataaagggaccagcccttcatgggtggtgacgtggtagtcacttgtaaggggaacagaaacatttttgttcttatggggtgagaatatagacagtgcccttggtgcgagggaagcaattgaaaaggaacttgccctgagcactcctggtgcaggtctccacctgcacattgggtggggctcctgggagggagactcagccttcctcctcatcctccctgaccctgctcctagcaccctggagagtgcacatgccccttggtcctggcagggcgccaagtctggcaccatgttggcctcttcaggcctgctagtcactggaaattgaggtccatgggggaaatcaaggatgctcagtttaaggtacactgtttccatgttatgtttctacacattgctacctcagtgctcctggaaacttagcttttgatgtctccaagtagtccaccttcatttaactctttgaaactgtatcatctttgccaagtaagagtggtggcctatttcagctgctttgacaaaatgactggctcctgacttaacgttctataaatgaatgtgctgaagcaaagtgcccatggtggcggcgaagaagagaaagatgtgttttgttttggactctctgtggtcccttccaatgctgtgggtttccaaccaggggaagggtcccttttgcattgccaagtgccataaccatgagcactactctaccatggttctgcctcctggccaagcaggctggtttgcaagaatgaaatgaatgattctacagctaggacttaaccttgaaatggaaagtcttgcaatcccatttgcaggatccgtctgtgcacatgcctctgtagagagcagcattcccagggaccttggaaacagttggcactgtaaggtgcttgctccccaagacacatcctaaaaggtgttgtaatggtgaaaacgtcttccttctttattgccccttcttatttatgtgaacaactgtttgtctttttttgtatcttttttaaactgtaaagttcaattgtgaaaatgaatatcatgcaaataaattatgcgatttttttttcaaagtaaaaactgaacatctttgaagttctgcctggtgagtaggaccagcctccatttccttataagggggtgatgttgaggctgctggtcagaggaccaaaggtgaggcaaggccagacttggtgctcctgtggttggtgccctcagttcctgcagcctgtcctgttggagaggtccctcaaatgactccttcttattattctattagtctgtttccatgctcctaataaagacatacccaagactgcaatttacaaaagaaagaa

SEQ ID NO: 335310 - DNA, 3124 bp, Homo sapiens
catgagccactgcgcccagcgaagcataccatactttttaaaagagcctaacctcggtgtactttgctgaagatcacagcttcctcctgttggtctccaaattgcataaggtttagtgttatggaagaagtaggatcgtccatgatatttcttaaaattaaaagtcacatttttaagtgtatatgaaataattatttcttaatgtggtgtactataaaaataatagataacatttgagagcatgacttctaaacaactctggtctgaacgttgcactctcctccttcttccagagactaagaaagcactgtgcatcaccttgaccctggggaccttcctcgtgggagctgcgctggccgctggcctactctggaagttcatgggcagcaagtgctccaactctgggatagagtgcgactcctcaggtacctgcatcaacccctctaactggtgtgatggcgtgtcacactgccccggcggggaggacgagaatcggtgtgttcgcctctacggaccaaacttcatccttcagatgtactcatctcagaggaagtcctggcaccctgtgtgccaagacgactggaacgagaactacgggcgggcggcctgcagggacatgggctataagaataatttttactctagccaaggaatagtggatgacagcggatccaccagctttatgaaactgaacacaagtgccggcaatgtcgatatctataaaaaactgtaccacagtgatgcctgttcttcaaaagcagtggtttctttacgctgtatagcctgcggggtcaacttgaactcaagccgccagagcaggatcgtgggcggtgagagcgcgctcccgggggcctggccctggcaggtcagcctgcacgtccagaacgtccacgtgtgcggaggctccatcatcacccccgagtggatcgtgacagccgcccactgcgtggaaaaacctcttaacaatccatggcattggacggcatttgcggggattttgagacaatctttcatgttctatggagccggataccaagtagaaaaagtgatttctcatccaaattatgactccaagaccaagaacaatgacattgcgctgatgaagctgcagaagcctctgactttcaacgacctagtgaaaccagtgtgtctgcccaacccaggcatgatgctgcagccagaacagctctgctggatttccgggtggggggccaccgaggagaaagggaagacctcagaagtgctgaacgctgccaaggtgcttctcattgagacacagagatgcaacagcagatatgtctatgacaacctgatcacaccagccatgatctgtgccggcttcctgcaggggaacgtcgattcttgccagggtgacagtggagggcctctggtcacttcgaagaacaatatctggtggctgataggggatacaagctggggttctggctgtgccaaagcttacagaccaggagtgtacgggaatgtgatggtattcacggactggatttatcgacaaatgagggcagacggctaatccacatggtcttcgtccttgacgtcgttttacaagaaaacaatggggctggttttgcttccccgtgcatgatttactcttagagatgattcagaggtcacttcatttttattaaacagtgaacttgtctggctttggcactctctgccattctgtgcaggctgcagtggctcccctgcccagcctgctctccctaaccccttgtccgcaaggggtgatggccggctggttgtgggcactggcggtcaagtgtggaggagaggggtggaggctgccccattgagatcttcctgctgagtcctttccaggggccaattttggatgagcatggagctgtcacctctcagctgctggatgacttgagatgaaaaaggagagacatggaaagggagacagccaggtggcacctgcagcggctgccctctggggccacttggtagtgtccccagcctacctctccacaaggggattttgctgatgggttcttagagccttagcagccctggatggtggccagaaataaagggaccagcccttcatgggtggtgacgtggtagtcacttgtaaggggaacagaaacatttttgttcttatggggtgagaatatagacagtgcccttggtgcgagggaagcaattgaaaaggaacttgccctgagcactcctggtgcaggtctccacctgcacattgggtggggctcctgggagggagactcagccttcctcctcatcctccctgaccctgctcctagcaccctggagagtgcacatgccccttggtcctggcagggcgccaagtctggcaccatgttggcctcttcaggcctgctagtcactggaaattgaggtccatgggggaaatcaaggatgctcagtttaaggtacactgtttccatgttatgtttctacacattgctacctcagtgctcctggaaacttagcttttgatgtctccaagtagtccaccttcatttaactctttgaaactgtatcatctttgccaagtaagagtggtggcctatttcagctgctttgacaaaatgactggctcctgacttaacgttctataaatgaatgtgctgaagcaaagtgcccatggtggcggcgaagaagagaaagatgtgttttgttttggactctctgtggtcccttccaatgctgtgggtttccaaccaggggaagggtcccttttgcattgccaagtgccataaccatgagcactactctaccatggttctgcctcctggccaagcaggctggtttgcaagaatgaaatgaatgattctacagctaggacttaaccttgaaatggaaagtcttgcaatcccatttgcaggatccgtctgtgcacatgcctctgtagagagcagcattcccagggaccttggaaacagttggcactgtaaggtgcttgctccccaagacacatcctaaaaggtgttgtaatggtgaaaacgtcttccttctttattgccccttcttatttatgtgaacaactgtttgtctttttttgtatcttttttaaactgtaaagttcaattgtgaaaatgaatatcatgcaaataaattatgcgatttttttttcaaagta

SEQ ID NO: 335311 - DNA, 2935 bp, Homo sapiens
cgagtaggcgcgagctaagcaggaggcggaggcggaggcggagggcgaggggcggggagcgccgcctggagcgcggcaggtcatattgaacattccagatacctatcattactcgatgctgttgataacagcaagatggctttgaactcagggtcaccaccagctattggaccttactatgaaaaccatggataccaaccggaaaacccctatcccgcacagcccactgtggtccccactgtctacgaggtgcatccggctcagtactacccgtcccccctgccccggcggggaggacgagaatcggtgtgttcgcctctacggaccaaacttcatccttcagatgtactcatctcagaggaagtcctggcaccctgtgtgccaagacgactggaacgagaactacgggcgggcggcctgcagggacatgggctataagaataatttttactctagccaaggaatagtggatgacagcggatccaccagctttatgaaactgaacacaagtgccggcaatgtcgatatctataaaaaactgtaccacagtgatgcctgttcttcaaaagcagtggtttctttacgctgtatagcctgcggggtcaacttgaactcaagccgccagagcaggatcgtgggcggtgagagcgcgctcccgggggcctggccctggcaggtcagcctgcacgtccagaacgtccacgtgtgcggaggctccatcatcacccccgagtggatcgtgacagccgcccactgcgtggaaaaacctcttaacaatccatggcattggacggcatttgcggggattttgagacaatctttcatgttctatggagccggataccaagtagaaaaagtgatttctcatccaaattatgactccaagaccaagaacaatgacattgcgctgatgaagctgcagaagcctctgactttcaacgacctagtgaaaccagtgtgtctgcccaacccaggcatgatgctgcagccagaacagctctgctggatttccgggtggggggccaccgaggagaaagggaagacctcagaagtgctgaacgctgccaaggtgcttctcattgagacacagagatgcaacagcagatatgtctatgacaacctgatcacaccagccatgatctgtgccggcttcctgcaggggaacgtcgattcttgccagggtgacagtggagggcctctggtcacttcgaagaacaatatctggtggctgataggggatacaagctggggttctggctgtgccaaagcttacagaccaggagtgtacgggaatgtgatggtattcacggactggatttatcgacaaatgagggcagacggctaatccacatggtcttcgtccttgacgtcgttttacaagaaaacaatggggctggttttgcttccccgtgcatgatttactcttagagatgattcagaggtcacttcatttttattaaacagtgaacttgtctggctttggcactctctgccattctgtgcaggctgcagtggctcccctgcccagcctgctctccctaaccccttgtccgcaaggggtgatggccggctggttgtgggcactggcggtcaagtgtggaggagaggggtggaggctgccccattgagatcttcctgctgagtcctttccaggggccaattttggatgagcatggagctgtcacctctcagctgctggatgacttgagatgaaaaaggagagacatggaaagggagacagccaggtggcacctgcagcggctgccctctggggccacttggtagtgtccccagcctacctctccacaaggggattttgctgatgggttcttagagccttagcagccctggatggtggccagaaataaagggaccagcccttcatgggtggtgacgtggtagtcacttgtaaggggaacagaaacatttttgttcttatggggtgagaatatagacagtgcccttggtgcgagggaagcaattgaaaaggaacttgccctgagcactcctggtgcaggtctccacctgcacattgggtggggctcctgggagggagactcagccttcctcctcatcctccctgaccctgctcctagcaccctggagagtgcacatgccccttggtcctggcagggcgccaagtctggcaccatgttggcctcttcaggcctgctagtcactggaaattgaggtccatgggggaaatcaaggatgctcagtttaaggtacactgtttccatgttatgtttctacacattgctacctcagtgctcctggaaacttagcttttgatgtctccaagtagtccaccttcatttaactctttgaaactgtatcatctttgccaagtaagagtggtggcctatttcagctgctttgacaaaatgactggctcctgacttaacgttctataaatgaatgtgctgaagcaaagtgcccatggtggcggcgaagaagagaaagatgtgttttgttttggactctctgtggtcccttccaatgctgtgggtttccaaccaggggaagggtcccttttgcattgccaagtgccataaccatgagcactactctaccatggttctgcctcctggccaagcaggctggtttgcaagaatgaaatgaatgattctacagctaggacttaaccttgaaatggaaagtcttgcaatcccatttgcaggatccgtctgtgcacatgcctctgtagagagcagcattcccagggaccttggaaacagttggcactgtaaggtgcttgctccccaagacacatcctaaaaggtgttgtaatggtgaaaacgtcttccttctttattgccccttcttatttatgtgaacaactgtttgtctttttttgtatcttttttaaactgtaaagttcaattgtgaaaatgaatatcatgcaaataaattatgcgatttttttttcaaagta

SEQ ID NO: 335312 - DNA, 1945 bp, Homo sapiens
gatgggggctatctctttgggggttacatctctgttaccatcaccccttgatggtggagattcgaagcccacacagtcactcgtaactcacactgcgacccccgccccccaactcctctaggcctggtcagtggtgtgcggcagattgtgacttgattttctgctctctgtaccttgctgtgtcccacagggtgacagtggagggcctctggtcacttcgaagaacaatatctggtggctgataggggatacaagctggggttctggctgtgccaaagcttacagaccaggagtgtacgggaatgtgatggtattcacggactggatttatcgacaaatgagggcagacggctaatccacatggtcttcgtccttgacgtcgttttacaagaaaacaatggggctggttttgcttccccgtgcatgatttactcttagagatgattcagaggtcacttcatttttattaaacagtgaacttgtctggctttggcactctctgccattctgtgcaggctgcagtggctcccctgcccagcctgctctccctaaccccttgtccgcaaggggtgatggccggctggttgtgggcactggcggtcaagtgtggaggagaggggtggaggctgccccattgagatcttcctgctgagtcctttccaggggccaattttggatgagcatggagctgtcacctctcagctgctggatgacttgagatgaaaaaggagagacatggaaagggagacagccaggtggcacctgcagcggctgccctctggggccacttggtagtgtccccagcctacctctccacaaggggattttgctgatgggttcttagagccttagcagccctggatggtggccagaaataaagggaccagcccttcatgggtggtgacgtggtagtcacttgtaaggggaacagaaacatttttgttcttatggggtgagaatatagacagtgcccttggtgcgagggaagcaattgaaaaggaacttgccctgagcactcctggtgcaggtctccacctgcacattgggtggggctcctgggagggagactcagccttcctcctcatcctccctgaccctgctcctagcaccctggagagtgcacatgccccttggtcctggcagggcgccaagtctggcaccatgttggcctcttcaggcctgctagtcactggaaattgaggtccatgggggaaatcaaggatgctcagtttaaggtacactgtttccatgttatgtttctacacattgctacctcagtgctcctggaaacttagcttttgatgtctccaagtagtccaccttcatttaactctttgaaactgtatcatctttgccaagtaagagtggtggcctatttcagctgctttgacaaaatgactggctcctgacttaacgttctataaatgaatgtgctgaagcaaagtgcccatggtggcggcgaagaagagaaagatgtgttttgttttggactctctgtggtcccttccaatgctgtgggtttccaaccaggggaagggtcccttttgcattgccaagtgccataaccatgagcactactctaccatggttctgcctcctggccaagcaggctggtttgcaagaatgaaatgaatgattctacagctaggacttaaccttgaaatggaaagtcttgcaatcccatttgcaggatccgtctgtgcacatgcctctgtagagagcagcattcccagggaccttggaaacagttggcactgtaaggtgcttgctccccaagacacatcctaaaaggtgttgtaatggtgaaaacgtcttccttctttattgccccttcttatttatgtgaacaactgtttgtctttttttgtatcttttttaaactgtaaagttcaattgtgaaaatgaatatcatgcaaataaattatgcgatttttttttcaaagta

SEQ ID NO: 335313 - DNA, 2481 bp, Homo sapiens
cgagtaggcgcgagctaagcaggaggcggaggcggaggcggagggcgaggggcggggagcgccgcctggagcgcggcaggtcatattgaacattccagatacctatcattactcgatgctgttgataacagcaagatggctttgaactcagggtcaccaccagctattggaccttactatgaaaaccatggataccaaccggaaaacccctatcccgcacagcccactgtggtccccactgtctacgaggtgcatccggctcagtactacccgtcccccgtgccccagtacgccccgagggtcctgacgcaggcttccaaccccgtcgtctgcacgcagcccaaatccccatccgggacagtgtgcacctcaaagactaagaaagcactgtgcatcaccttgaccctggggaccttcctcgtgggagctgcgctggccgctggcctactctggaagttcatgggcagcaagtgctccaactctgggatagagtgcgactcctcaggtacctgcatcaacccctctaactggtgtgatggcgtgtcacactgccccggcggggaggacgagaatcggtgtgttcgcctctacggaccaaacttcatccttcagatgtactcatctcagaggaagtcctggcaccctgtgtgccaagacgactggaacgagaactacgggcgggcggcctgcagggacatgggctataagaataatttttactctagccaaggaatagtggatgacagcggatccaccagctttatgaaactgaacacaagtgccggcaatgtcgatatctataaaaaactgtaccacagtgatgcctgttcttcaaaagcagtggtttctttacgctgtatagcctgcggggtcaacttgaactcaagccgccagagcaggatcgtgggcggtgagagcgcgctcccgggggcctggccctggcaggtcagcctgcacgtccagaacgtccacgtgtgcggaggctccatcatcacccccgagtggatcgtgacagccgcccactgcgtggaaaaacctcttaacaatccatggcattggacggcatttgcggggattttgagacaatctttcatgttctatggagccggataccaagtagaaaaagtgatttctcatccaaattatgactccaagaccaagaacaatgacattgcgctgatgaagctgcagaagcctctgactttcaacgacctagtgaaaccagtgtgtctgcccaacccaggcatgatgctgcagccagaacagctctgctggatttccgggtggggggccaccgaggagaaagggaagacctcagaagtgctgaacgctgccaaggtgcttctcattgagacacagagatgcaacagcagatatgtctatgacaacctgatcacaccagccatgatctgtgccggcttcctgcaggggaacgtcgattcttgccagggtgacagtggagggcctctggtcacttcgaagaacaatatctggtggctgataggggatacaagctggggttctggctgtgccaaagcttacagaccaggagtgtacgggaatgtgatggtattcacggactggatttatcgacaaatgagggcagacggctaatccacatggtcttcgtccttgacgtcgttttacaagaaaacaatggggctggttttgcttccccgtgcatgatttactcttagagatgattcagaggtcacttcatttttattaaacagtgaacttgtctggctttggcactctctgccattctgtgcaggctgcagtggctcccctgcccagcctgctctccctaaccccttgtccgcaaggggtgatggccggctggttgtgggcactggcggtcaagtgtggaggagaggggtggaggctgccccattgagatcttcctgctgagtcctttccaggggccaattttggatgagcatggagctgtcacctctcagctgctggatgacttgagatgaaaaaggagagacatggaaagggagacagccaggtggcacctgcagcggctgccctctggggccacttggtagtgtccccagcctacctctccacaaggggattttgctgatgggttcttagagccttagcagccctggatggttctgcctcctggccaagcaggctggtttgcaagaatgaaatgaatgattctacagctaggacttaaccttgaaatggaaagtcttgcaatcccatttgcaggatccgtctgtgcacatgcctctgtagagagcagcattcccagggaccttggaaacagttggcactgtaaggtgcttgctccccaagacacatcctaaaaggtgttgtaatggtgaaaacgtcttccttctttattgccccttcttatttatgtgaacaactgtttgtctttttttgtatcttttttaaactgtaaagttcaattgtgaaaatgaatatcatgcaaataaattatgcgatttttttttcaaagta

SEQ ID NO: 335314 - DNA, 366 bp, Homo sapiens
cacctgaggtcaggagtttgagaccacaagcctggccaacatgttgaaactccatctctactaaaaatacaaaaattagtcaggcgtggtggcgtgcacctgtaatcccagctacttaggaggctggggcaggaggatcacttgaacccaggagttggaggttgcagtgagccaagattgtgcccctgcactccagcctgggtgacagaatgagacttcatctcaaaaacaaaacaaaacaaaacacagtggggccaggagttggaggctgcagcgagctacagtaatgccacggtgttcctcactccatgaggctcattgggtttctcagcctgaagggcacctctcttctgttttctctgcaag

SEQ ID NO: 335315 - DNA, 449 bp, Homo sapiens
aaggggagaccgagcccctcttccactatctccctgtgtggtttttggtgaaccatcctgcctctgggtgtcttgcctccagcttctgacgttggaagttcatcctccgagagctctgtgtttatggctctgagatactgagtccttcttctctcccagacctcttaacaatccatggcattggacggcatttgcggggattttgagacaatctttcatgttctatggagccggataccaagtagaaaaagtgatttctcatccaaattatgactccaagaccaagaacaatgacattgcgctgatgaagctgcagaagcctctgactttcaacggtacgtgtggctcaggcttggcaagcaggttggcagaatcttaaagagatgttgattggaaatgacacttgtgctatgccaaatggaagggaggcatttgcgttgagcgagggt

SEQ ID NO: 335316 - DNA, 360 bp, Homo sapiens
gggctatctctttgggggttacatctctgttaccatcaccccttgatggtggagattcgaagcccacacagtcactcgtaactcacactgcgacccccgccccccaactcctctaggcctggtcagtggtgtgcggcagattgtgacttgattttctgctctctgtaccttgctgtgtcccacagggtgacagtggagggcctctggtcacttcgaagaacaatatctggtggctgataggggatacaagctggggttctggctgtgccaaagcttacagaccaggagtgtacgggaatgtgatggtattcacggactggatttatcgacaaatgagggtaactatcctgtcctccttct

SEQ ID NO: 335317 - DNA, 3204 bp, Homo sapiens
cgagtaggcgcgagctaagcaggaggcggaggcggaggcggagggcgaggggcggggagcgccgcctggagcgcggcaggtcatattgaacattccagatacctatcattactcgatgctgttgataacagcaagatggctttgaactcagggtcaccaccagctattggaccttactatgaaaaccatggataccaaccggaaaacccctatcccgcacagcccactgtggtccccactgtctacgaggtgcatccggctcagtactacccgtcccccgtgccccagtacgccccgagggtcctgacgcaggcttccaaccccgtcgtctgcacgcagcccaaatccccatccgggacagtgtgcacctcaaagactaagaaagcactgtgcatcaccttgaccctggggaccttcctcgtgggagctgcgctggccgctggcctactctggaagttcatgggcagcaagtgctccaactctgggatagagtgcgactcctcaggtacctgcatcaacccctctaactggtgtgatggcgtgtcacactgccccggcggggaggacgagaatcggtgtgttcgcctctacggaccaaacttcatccttcagatgtactcatctcagaggaagtcctggcaccctgtgtgccaagacgactggaacgagaactacgggcgggcggcctgcagggacatgggctataagaataatttttactctagccaaggaatagtggatgacagcggatccaccagctttatgaaactgaacacaagtgccggcaatgtcgatatctataaaaaactgtaccacagtgatgcctgttcttcaaaagcagtggtttctttacgctgtatagcctgcggggtcaacttgaactcaagccgccagagcaggatcgtgggcggtgagagcgcgctcccgggggcctggccctggcaggtcagcctgcacgtccagaacgtccacgtgtgcggaggctccatcatcacccccgagtggatcgtgacagccgcccactgcgtggaaaaacctcttaacaatccatggcattggacggcatttgcggggattttgagacaatctttcatgttctatggagccggataccaagtagaaaaagtgatttctcatccaaattatgactccaagaccaagaacaatgacattgcgctgatgaagctgcagaagcctctgactttcaacgacctagtgaaaccagtgtgtctgcccaacccaggcatgatgctgcagccagaacagctctgctggatttccgggtggggggccaccgaggagaaagggaagacctcagaagtgctgaacgctgccaaggtgcttctcattgagacacagagatgcaacagcagatatgtctatgacaacctgatcacaccagccatgatctgtgccggcttcctgcaggggaacgtcgattcttgccagggtgacagtggagggcctctggtcacttcgaagaacaatatctggtggctgataggggatacaagctggggttctggctgtgccaaagcttacagaccaggagtgtacgggaatgtgatggtattcacggactggatttatcgacaaatgagggcagacggctaatccacatggtcttcgtccttgacgtcgttttacaagaaaacaatggggctggttttgcttccccgtgcatgatttactcttagagatgattcagaggtcacttcatttttattaaacagtgaacttgtctggctttggcactctctgccattctgtgcaggctgcagtggctcccctgcccagcctgctctccctaaccccttgtccgcaaggggtgatggccggctggttgtgggcactggcggtcaagtgtggaggagaggggtggaggctgccccattgagatcttcctgctgagtcctttccaggggccaattttggatgagcatggagctgtcacctctcagctgctggatgacttgagatgaaaaaggagagacatggaaagggagacagccaggtggcacctgcagcggctgccctctggggccacttggtagtgtccccagcctacctctccacaaggggattttgctgatgggttcttagagccttagcagccctggatggtggccagaaataaagggaccagcccttcatgggtggtgacgtggtagtcacttgtaaggggaacagaaacatttttgttcttatggggtgagaatatagacagtgcccttggtgcgagggaagcaattgaaaaggaacttgccctgagcactcctggtgcaggtctccacctgcacattgggtggggctcctgggagggagactcagccttcctcctcatcctccctgaccctgctcctagcaccctggagagtgcacatgccccttggtcctggcagggcgccaagtctggcaccatgttggcctcttcaggcctgctagtcactggaaattgaggtccatgggggaaatcaaggatgctcagtttaaggtacactgtttccatgttatgtttctacacattgctacctcagtgctcctggaaacttagcttttgatgtctccaagtagtccaccttcatttaactctttgaaactgtatcatctttgccaagtaagagtggtggcctatttcagctgctttgacaaaatgactggctcctgacttaacgttctataaatgaatgtgctgaagcaaagtgcccatggtggcggcgaagaagagaaagatgtgttttgttttggactctctgtggtcccttccaatgctgtgggtttccaaccaggggaagggtcccttttgcattgccaagtgccataaccatgagcactactctaccatggttctgcctcctggccaagcaggctggtttgcaagaatgaaatgaatgattctacagctaggacttaaccttgaaatggaaagtcttgcaatcccatttgcaggatccgtctgtgcacatgcctctgtagagagcagcattcccagggaccttggaaacagttggcactgtaaggtgcttgctccccaagacacatcctaaaaggtgttgtaatggtgaaaacgtcttccttctttattgccccttcttatttatgtgaacaactgtttgtctttttttgtatcttttttaaactgtaaagttcaattgtgaaaatgaatatcatgcaaataaattatgcgatttttttttcaaagta

SEQ ID NO: 335318 - DNA, 969 bp, Homo sapiens
gcaaaagacctcatggaatccaagatgaagggaatatcgacaaatatttgtgcgcacctgcacctagtacaggctgggtgctactcaggtgctgggaatgcagaagtgaacagagtaagacaaatgtctctgctgtcaggagctttacctctcttctggatgtcggtggtggggacggggcaggtgtggtcagacagatgggagacaaacaactgagcgaggtacttccaaacatctgagggtggggatcacaaggtcccggctattttgaaggggtggtcaggaaaggcttctcggaagaggtggcatttgagctgagactcaaatggcaaaaatgtgtacacatcaaaaaggctagtgcatgtatcttcaggtgtggtcaaggggccaaggaggtgggctggggccagattgcataggtccttgtggattatggtgaagacaccagcttctcatctgcttgaggtggggagatcgtgagccggggagtgccatgatctggcagctgcgtggggagtggggatgaatggatggagacgaggatgatggtgacaagtccattgctgtggttccttgagacaggaagccagctcatagcagagtgcgggcgtggatgtgaagagatgagggtacactagggctagagccaccagacttactgatgggttgcatgtctgtgggagagagagtgagaagtcagggacgatggctttccactctgtggctgaagccccagggtggcgggtggtgccatttttcaagccaggaaatattggttggtgagaatttggggtgggagaaggtgtgacggagggttctggttttgcacactaagcccacggtgcccagaagatgcccgaggggaggcagcaaagcgagagtgggaaatgcagaggtggcaagtgcatggtcagagtccgataacactgcgatggtgttttcccgacggacgacaaaagaagttctgga

SEQ ID NO: 335319 - DNA, 3274 bp, Homo sapiens
gcaaaagacctcatggaatccaagatgaagggaatatcgacaaatatttgtgcgcacctgcacctagtacaggctgggtgctactcaggtgctgggaatgcagaagtgaacagagtaagacaaatgtctctgctgtcaggagctttacctctcttctggatgtcggtggtggggacggggcaggtgtggtcagacagatgggagacaaacaactgagcgaggtacttccaaacatctgagggtggggatcacaaggtcccggctattttgaaggggtggtcaggaaaggcttctcggaagaggtggcatttgagctgagactcaaatggcaaaaatgtgtacacatcaaaaaggctagtgcatgtatcttcaggtgtggtcaaggggccaaggaggtgggctggggccagattgcataggtccttgtggattatggtgaagacaccagcttctcatctgcttgaggtggggagatcgtgagccggggagtgccatgatctggcagctgcgtggggagtggggatgaatggatggagacgaggatgatggtgacaagtccattgctgtggttccttgagacaggaagccagctcatagcagagtgcgggcgtggatgtgaagagatgagggtacactagggctagagccaccagacttactgatgggttgcatgtctgtgggagagagagtgagaagtcagggacgatggctttccactctgtggctgaagccccagggtggcgggtggtgccatttttcaagccaggaaatattggttggtgagaatttggggtgggagaaggtgtgacggagggttctggttttgcacactaagcccacggtgcccagaagatgcccgaggggaggcagcaaagcgagagtgggaaatgcagaggtggcaagtgcaggccgtgtcttgagaagctctaatgtgcaggggagccgagaagcaggcggcctagggagggtcgcgtgtgctccagaagagtgtgtgcatgccagaggggaaacaggcgcctgtgtgtcctgggtggggttcagtgaggagtgggaaattggttcagcagaaccaagccgttgggtgaatagagggggattccatggcactgatagagccctatagtttcagagctgggaatttctttccctgaagctgaactccagagctgcattcagcacaggcaccgccagttgtaaggagaatccaggtttcccaggagaggggttggtgctgggatgagctgacgggggcagggctggagaatagggctgtgaccatctgtgtagtgcgtgtggaggtctcagggagggaagtgtgctctccctgcgagagctgcaggcaacactgggagctcaacaagtctccctgtccttagggaagacctcagaagtgctgaacgctgccaaggtgcttctcattgagacacagagatgcaacagcagatatgtctatgacaacctgatcacaccagccatgatctgtgccggcttcctgcaggggaacgtcgattcttgccagggtgacagtggagggcctctggtcacttcgaagaacaatatctggtggctgataggggatacaagctggggttctggctgtgccaaagcttacagaccaggagtgtacgggaatgtgatggtattcacggactggatttatcgacaaatgagggcagacggctaatccacatggtcttcgtccttgacgtcgttttacaagaaaacaatggggctggttttgcttccccgtgcatgatttactcttagagatgattcagaggtcacttcatttttattaaacagtgaacttgtctggctttggcactctctgccattctgtgcaggctgcagtggctcccctgcccagcctgctctccctaaccccttgtccgcaaggggtgatggccggctggttgtgggcactggcggtcaagtgtggaggagaggggtggaggctgccccattgagatcttcctgctgagtcctttccaggggccaattttggatgagcatggagctgtcacctctcagctgctggatgacttgagatgaaaaaggagagacatggaaagggagacagccaggtggcacctgcagcggctgccctctggggccacttggtagtgtccccagcctacctctccacaaggggattttgctgatgggttcttagagccttagcagccctggatggtggccagaaataaagggaccagcccttcatgggtggtgacgtggtagtcacttgtaaggggaacagaaacatttttgttcttatggggtgagaatatagacagtgcccttggtgcgagggaagcaattgaaaaggaacttgccctgagcactcctggtgcaggtctccacctgcacattgggtggggctcctgggagggagactcagccttcctcctcatcctccctgaccctgctcctagcaccctggagagtgcacatgccccttggtcctggcagggcgccaagtctggcaccatgttggcctcttcaggcctgctagtcactggaaattgaggtccatgggggaaatcaaggatgctcagtttaaggtacactgtttccatgttatgtttctacacattgctacctcagtgctcctggaaacttagcttttgatgtctccaagtagtccaccttcatttaactctttgaaactgtatcatctttgccaagtaagagtggtggcctatttcagctgctttgacaaaatgactggctcctgacttaacgttctataaatgaatgtgctgaagcaaagtgcccatggtggcggcgaagaagagaaagatgtgttttgttttggactctctgtggtcccttccaatgctgtgggtttccaaccaggggaagggtcccttttgcattgccaagtgccataaccatgagcactactctaccatggttctgcctcctggccaagcaggctggtttgcaagaatgaaatgaatgattctacagctaggacttaaccttgaaatggaaagtcttgcaatcccatttgcaggatccgtctgtgcacatgcctctgtagagagcagcattcccagggaccttggaaacagttggcactgtaaggtgcttgctccccaagacacatcctaaaaggtgttgtaatggtgaaaacgtcttccttctttattgccccttcttatttatgtgaacaactgtttgtctttttttgtatcttttttaaactgtaaagttcaattgtgaaaatgaatatcatgcaaataaattatgcgatttttttttcaaagta

SEQ ID NO: 335320 - DNA, 1907 bp, Homo sapiens
ggtccgggctggggaggggaacctgggcgcctgggacccgccgatgccccctgccccgcccggaggtgaaagcgggtgtgaggagcgcggcgcggcaggtcatattgaacattccagatacctatcattactcgatgctgttgataacagcaagatggctttgaactcagggtcaccaccagctattggaccttactatgaaaaccatggatacaagctggggttctggctgtgccaaagcttacagaccaggagtgtacgggaatgtgatggtattcacggactggatttatcgacaaatgagggcagacggctaatccacatggtcttcgtccttgacgtcgttttacaagaaaacaatggggctggttttgcttccccgtgcatgatttactcttagagatgattcagaggtcacttcatttttattaaacagtgaacttgtctggctttggcactctctgccattctgtgcaggctgcagtggctcccctgcccagcctgctctccctaaccccttgtccgcaaggggtgatggccggctggttgtgggcactggcggtcaagtgtggaggagaggggtggaggctgccccattgagatcttcctgctgagtcctttccaggggccaattttggatgagcatggagctgtcacctctcagctgctggatgacttgagatgaaaaaggagagacatggaaagggagacagccaggtggcacctgcagcggctgccctctggggccacttggtagtgtccccagcctacctctccacaaggggattttgctgatgggttcttagagccttagcagccctggatggtggccagaaataaagggaccagcccttcatgggtggtgacgtggtagtcacttgtaaggggaacagaaacatttttgttcttatggggtgagaatatagacagtgcccttggtgcgagggaagcaattgaaaaggaacttgccctgagcactcctggtgcaggtctccacctgcacattgggtggggctcctgggagggagactcagccttcctcctcatcctccctgaccctgctcctagcaccctggagagtgcacatgccccttggtcctggcagggcgccaagtctggcaccatgttggcctcttcaggcctgctagtcactggaaattgaggtccatgggggaaatcaaggatgctcagtttaaggtacactgtttccatgttatgtttctacacattgctacctcagtgctcctggaaacttagcttttgatgtctccaagtagtccaccttcatttaactctttgaaactgtatcatctttgccaagtaagagtggtggcctatttcagctgctttgacaaaatgactggctcctgacttaacgttctataaatgaatgtgctgaagcaaagtgcccatggtggcggcgaagaagagaaagatgtgttttgttttggactctctgtggtcccttccaatgctgtgggtttccaaccaggggaagggtcccttttgcattgccaagtgccataaccatgagcactactctaccatggttctgcctcctggccaagcaggctggtttgcaagaatgaaatgaatgattctacagctaggacttaaccttgaaatggaaagtcttgcaatcccatttgcaggatccgtctgtgcacatgcctctgtagagagcagcattcccagggaccttggaaacagttggcactgtaaggtgcttgctccccaagacacatcctaaaaggtgttgtaatggtgaaaacgtcttccttctttattgccccttcttatttatgtgaacaactgtttgtctttttttgtatcttttttaaactgtaaagttcaattgtgaaaatgaatatcatgcaaataaattatgcgatttttttttcaaagta

SEQ ID NO: 335321 - DNA, 245 bp, Homo sapiens
ctgccccggcggggaggacgagaatcggtgtggtgagtcagccttaaccttgggaagggactcctctgctcaccttggagacagcagccgggtccaggggcctttgggtgactgggcctggcgtgcgtccagtacgctgacacatgatgtcattgaatccctgctccaggctgagccctggggctcagagaggttgtgtttccggcccaacctcacccagcaggtgggagatgacagggccaccg

SEQ ID NO: 335322 - DNA, 212 bp, Homo sapiens
ccttccctaacttgcttaattttgaacaggaaccttctttaacaaagtgagctatgaacccaaccaaagtctttttaaaacatcatgtgtttttccaaaaaatttaattgtagcaccaaagcagcatatcaaaatatcatttgcactgaattgatagatcatctatttggattcttagaattgggtgactagtgtatacaggacactgtagt

SEQ ID NO: 335323 - DNA, 219 bp, Homo sapiens
ctcggcctcccaaagtgctggaattacaggtgtgagccaccacgccgtgcttgaggcatatttttaaaataaaggtagcctgactggggcctagagcaaggttaatgactgttctcagccgtggagaaagtaagggagggagtgaacgttgcatcctggttgtttctgtgtcggtggcttttcttctaaagcactgcttattggtctttttctccagtg

SEQ ID NO: 335324 - DNA, 469 bp, Homo sapiens
ctgcctctccatccctctgctgctgcgctccatcagcctccctcacgcctcgcctggccaatggcaacagcctcttgctcatcagccttgcctcctgactctggtccttggctatccaactgtcccaatcgaccctctggaactcactattgtggacaatggtcatcattgaaggacacaccacccagggccttttaagaagtgactgcagactgtgtgtcccacctgccacttgactctgctcatcctctcgggtcccacagcaaggcccttcacactccccaagtgggcacactctctctgtgcatgcatgccaggcccgcctctgactcccctcctggggatcccgtctggctcagtgggaagcctatcgctcttggtaaattactcagtaagcacttctctcctgaggcctggctcctctcctgccctcggcgggagacctgggaacgggcctgccagcgcccag

SEQ ID NO: 335325 - DNA, 112 bp, Homo sapiens
aatgagtttttgaagacctctacatgagtggttttacttttagtatctgttgctgtgagaaacagaggttctacagattcagtaaggttgaatttcattgcatctatgaaca

SEQ ID NO: 335326 - DNA, 383 bp, Homo sapiens
gcagctgatgtatggatgggtagctggagagagaggccatcagtaacttcacatctctctgtttccatttcctgccctcaaatgccttcataatagagtctacgtaataaggttatagggattcagtgcagatgaagtgctggcacttgatacgggatcagtaagtattagctattattctatcacattaagttgcataaactttaacctcattactcttaaattctctatagaaacctagtctttatctgtcttacaagccctcaaatttagctaatagcgttgttcattgaataccttaaaattgtatttaaagacaggccgtgaatacaattaggcattgctttttgaagccaaaataccatgagggtggggagggtcat

SEQ ID NO: 335327 - DNA, 376 bp, Homo sapiens
cagcggaacaagcaacaacaacaacaaaaaaagacatctttctgtgtatttgcaaactacatatagtcttttcagtttttacaccaatagcagcattatgctaaagtattgtctctctcctcccccaccattggcttcagtaactgatttaatgtcatggaaaattttaaaaaacaatttatatatttttgatgagacggggtctcgctctgttccctaggctggtctggaattcctgggctcaagtgatcctctcacctgggcttcccaaaatgctgggactacaggcatgagccaccatgcctggccagtgtcatggaaattaaccttttgtgcatattgcaaatattattgtcccattcttttgcttgtgttt

SEQ ID NO: 335328 - DNA, 442 bp, Homo sapiens
ttttcgtgcctcagttacccaagtagctgggattacaggtgtgtgccaccatgcccggctaatttttgtatttttagtagagatggagtttcaccatgttggccaggctggtcttgaaatcctgacctcaggtgaaccacccccctccgcctcccaaagtgctgggattacaagtgtgagcactgtgcctgatcgccatccttttattggtgagaagaaaagggagcaagatgaggttgacccctgcatcttatgtgtgtactgtctctgcctctgtacacacacacatgcaccacagacacaccacacacacacagcccacatacacagcccacatacatgcacacacaatttagggttttcccccttctcacaaaaatcctctttaacgtgatttttactaataaagttataaatgtctggggttagaagacagccaaag

SEQ ID NO: 335329 - DNA, 417 bp, Homo sapiens
ttttcgtgcctcagttacccaagtagctgggattacaggtgtgtgccaccatgcccggctaatttttgtatttttagtagagatggagtttcaccatgttggccaggctggtcttgaaatcctgacctcaggtgaaccacccccctccgcctcccaaagtgctgggattacaagtgtgagcactgtgcctgatcgccatccttttattggtgagaagaaaagggagcaagatgaggttgacccctgcatcttatgtgtgtactgtctctgcctctgtacacacacacatgcaccacagacacaccaataagaggatggcgatcaggcacagtgctcacacttgtaatcccagcacttacatatgtcatggcactttctcctggcctataacgtttccactgaaagtctgctgcaatg

SEQ ID NO: 335330 - DNA, 583 bp, Homo sapiens
tcctacgaagatagaagggtttcgacgcaccgtgaagagagcttagtcactatgaagaggtccagtaggaaaaatgagacagacacacatcagccactggacctagagtgcaaggcagaatgtggcaaggacctgttagagaaccacactcaaaagaacccccacctcaaaaaaaaagtgggttgggggagaagcctatagcctttagggtgggccttgaaaagtcattaacagtttagaagaattttgctgcacagcactgtgtcaacagggacattcctattcttttacatttaggcaacagagtttgaataaatgcattgcactttaggctttacctcattttcccatattatccatctctccagaagatttcttccccacattttaacagcagccatttccacaaatcttggtctctttggtaatgactaaactagtagctttcaaactcagaactcttgttcagatagtgtggaagcataatatgtaaaatgaaggacagctgaagaaatttctggctgagatgggttcatcttcagaactcctctccttcccacttggccccaatgtcccttctctc

SEQ ID NO: 335331 - DNA, 112 bp, Homo sapiens
taaaattcttaaatgtcttttacaactttgttgactaaagtagtaatatgaaaaaaacgcccaggcacagaggcctgtaatcccaacactttgggaggccaaggtgggtcaa

SEQ ID NO: 335332 - DNA, 336 bp, Homo sapiens
tcctcagctactcgggtggctgaggcatgggaattgcttgaacctgggaggtggaggttgcagtgagccaagatcacaacactgcactccagcctaggcgacagagcgagaccccgtctcaaaacaaaaaagcaaaaaacaaaacaaaacaaaaaaacaaacaaaaaaccccacaccactactttgcagctgatccaagtatagttaacaaagggttccacttgatcagctgaggaccatcgttgaccgatggtcctcagctacgagtgctgtcctggatatgacaaggtccctgggggagaagggctggccagcagaccatacactctcaaacct

SEQ ID NO: 335333 - DNA, 272 bp, Homo sapiens
tcctcagctactcgggtggctgaggcatgggaattgcttgaacctgggaggtggaggttgcagtgagccaagatcacaacactgcactccagcctaggcgacagagcgagaccccgtctcaaaacaaaaaagcaaaaaacaaaacaaaacaaaaaaacaaacaaaaaaccccacaccactactttgcagctgatccaagtatagttaacaaagggttccacttctggatcagctgaggccatcgttggggatctctagagtcacccgcatca

SEQ ID NO: 335334 - DNA, 1416 bp, Homo sapiens
agcagacaggcacaggcagcctgcatacactccttttcctggtgtcaacattatttaaaagcatgggaaatagtaatgagacagtgtcttcttcattagaaccttaggagtctactagatttcttcatctctatttgttgttattagtagccaaactgtgcaaaaaacacggtcttgagaaatgacagcacagtatcttagagggaaaggaaatgtaggatgccagtgtggggacaaatttctgattgccagtgattgttgtgagcataacaataatttcatgaacattaaagcctctattgagggcagctgcagttgtaaaggaaaaaaaatggtcctgaacatttaaaactacactggtgtacatcataatcaaacaaagtaaacagaaaaaaatttaaactttgctaaaaaaaaaaagcagaagcacttgatctttaggaaggcacgcagttgcttattatgaatcatttctagagtccgatgcattttcaaagccggttacagtcattacgaagcacacccttgtgaggtaagtgtatcatcacctttggttcataaataaaaaagctgagacgccgagcgattaagtcactcgcctaaggagaatgagtcaacgtcaagagtcatagttgacccggcctaaagactccagaccatcagtccagggcttagtcagcggggcccggagtggcttccctggctggcatctggacttaggctatttccgtgcacgtaaaagcggaatattggaacggttgcacagaacttccaaataatttttaccgccacgcaagatttagccctgaggtcttaatctcaggatttgggacagtaaaagctgtcgtccctccccctcgtccagccggtggcaagcgggtactgcgggcggttccgtccgtcccctttcgcagaaatggcaacgaatgaccaccagcattagctgagccaggggacgtgggagggttgattgcctaaacgactctgcatcgccgcctctttttgaaactaagagaaaatggtgggagatcaaaagaaaactaaataaacacacaggcaacttgtcctgggacctcaactaagcaaatgaagccttattgtgtgtgctgagcctgcagttcccaaccttccggggaagatgggaggacagggcgacaaagggcacagtaggcttgcctggcagtaagtgtgaccgcagctatccaggcggaagagcagaggactgaaaccaccctccagcaagcgagtgtccgccgcgttgagaaccgcgcaccctacccatcggccacgtgaccagtcctttttaaaaaaaatttctttaccttaaaaacacaaacacaacaacaagggggggggagagactcccatttcccaaaagccctctggtaactcacgcagccgcagtcttgcgcaggt

SEQ ID NO: 335335 - DNA, 1402 bp, Homo sapiens
cgtcacgtggccagaagctggccaatccggtttgaatctcatttttttcctcttacccccccttctggagcggttgtgcgatcagatcgatctaagatggcgactgtcgaaccggaaaccacccctactcctaatcccccgactacagaagaggagaaaacggaatctaatcaggaggttgctaacccagaacactatattaaacatcccctacagaacagatgggcactctggttttttaaaaatgataaaagcaaaacttggcaagcaaacctgcggctgatctccaagtttgatactgttgaagacttttgggctctgtacaaccatatccagttgtctagtaatttaatgcctggctgtgactactcactttttaaggatggtattgagcctatgtgggaagatgagaaaaacaaacggggaggacgatggctaattacattgaacaaacagcagagacgaagtgacctcgatcgcttttggctagagacacttctgtgccttattggagaatcttttgatgactacagtgatgatgtatgtggcgctgttgttaatgttagagctaaaggtgataagatagcaatatggactactgaatgtgaaaacagagaagctgttacacatatagggagggtatacaaggaaaggttaggacttcctccaaagatagtgattggttatcagtcccacgcagacacagctactaagagcggctccaccactaaaaataggtttgttgtttaagaagacaccttctgagtattctcataggagactgcgtcaagcaatcgagatttgggagctgaaccaaagcctcttcaaaaagcagagtggactgcatttaaatttgatttccatcttaatgttactcagatataagagaagtctcattcgcctttgtcttgtacttctgtgttcattttttttttttttttttggctagagtttccactatcccaatcaaagaattacagtacacatccccagaatccataaatgtgttcctggcccactctgtaatagttcagtagaattaccattaattacatacagattttacctatccacaatagtcagaaaacaacttggcatttctatactttacaggaaaaaaaattctgttgttccattttatgcagaagcatattttgctggtttgaaagattatgatgcatacagttttctagcaattttctttgtttctttttacagcattgtctttgctgtactcttgctgatggctgctagattttaatttatttgtttccctacttgataatattagtgattctgatttcagtttttcatttgttttgcttttgtttttttcctcatgtaacattggtgaaggatccaggaatatgacacaaaggtggaataaacattaattttgtgc

SEQ ID NO: 335336 - DNA, 829 bp, Homo sapiens
  misc_feature (25)..(25): n is a, c, g, or t
  misc_feature (48)..(48): n is a, c, g, or t
gggagggccaggtcttgggattgangggttttggtctttttcccccgnaaatacgtgggtgagagggtatacaaggaaaggttaggacttcctccaaagatagtgattggttatcagtcccacgcagacacagctactaagagcggctccaccactaaaaataggtttgttgtttaagaagacaccttctgagtattctcataggagactgcgtcaagcaatcgagatttgggagctgaaccaaagcctcttcaaaaagcagagtggactgcatttaaatttgatttccatcttaatgttactcagatataagagaagtctcattcgcctttgtcttgtacttctgtgttcattttttttttttttttttggctagagtttccactatcccaatcaaagaattacagtacacatccccagaatccataaatgtgttcctggcccactctgtaatagttcagtagaattaccattaattacatacagattttacctatccacaatagtcagaaaacaacttggcatttctatactttacaggaaaaaaaattctgttgttccattttatgcagaagcatattttgctggtttgaaagattatgatgcatacagttttctagcaattttctttgtttctttttacagcattgtctttgctgtactcttgctgatggctgctagattttaatttatttgtttccctacttgataatattagtgattctgatttcagtttttcatttgttttgcttttgtttttttcctcatgtaacattggtgaaggatccaggaatatgacacaaaggtggaataaacattaattttgtgc

SEQ ID NO: 335337 - DNA, 754 bp, Homo sapiens
  misc_feature (754)..(754): n is a, c, g, or t
cgtcacgtggccagaagctggccaatccggtttgaatctcatttttttcctcttacccccccttctggagcggttgtgcgatcagatcgatctaagatggcgactgtcgaaccggaaaccacccctactcctaatcccccgactacagaagaggagaaaacggaatctaatcaggaggttgctaacccagaacactatattaaacatcccctacagaacagatgggcactctggttttttaaaaatgataaaagcaaaacttggcaagcaaacctgcggctgatctccaagtttgatactgttgaagacttttgggctctgtacaaccatatccagttgtctagtaatttaatgcctggctgtgactactcactttttaagaaggggggaaaatttgggggggcataaaacattttttggggggaaaagggggaccccccctttttttaaaacgtttttggtggggtttttttgggcggagaggaaggagaggagtgggccaaacacacacaacaagaacaccggggggggggggcgccaacaaacacaacaccacgttttttttttttgtgtggagcggggggacaaaccaaccaacaagagaggggggtggaggacacaacaaacagccacacgcacaaaagatgtcctgcacataccaaaagaactaagagaagaaatagaacatacaaaaaacaggagaagcgctataccgaagtgaagaggaaagataagaaccagcacacacagagan

SEQ ID NO: 335338 - DNA, 483 bp, Homo sapiens
aaaaaaaaaaagaattatcagcatatcagttcaggtttagttagaatattgctgtcatagatgtgttaagacatttaaaataatgttttatattattttccactaggaaaccacccctactcctaatcccccgactacagaagaggagaaaacggaatctaatcaggaggttgctaacccagaacactatattaaacatcccctacagaacagtaagctttctaacacctaggttttctgagttaggccacaaggtaaattgtgaatggggcaagtttgaagggaaagttagattatgagactagttttagatatgctaaggttgagggttctattttcacttggatgacccatgaccagcagacagttttatgtgtgagtcttgagttcaaaaggagctatgtgagagattagtttgaaaagtattggtcataatggaagccacattagtaaataagttcccttaaggagaagtgaacttga

SEQ ID NO: 335339 - DNA, 3323 bp, Homo sapiens
cgtcacgtggccagaagctggccaatccggtttgaatctcatttttttcctcttacccccccttctggagcggttgtgcgatcagatcgatctaagatggcgactgtcgaaccggaaaccacccctactcctaatcccccgactacagaagaggagaaaacggaatctaatcaggaggttgctaacccagaacactatattaaacatcccctacagaacagatgggcactctggttttttaaaaatgataaaagcaaaacttggcaagcaaacctgcggctgatctccaagtttgatactgttgaagacttttgggctctgtacaaccatatccagttgtctagtaatttaatgcctggctgtgactactcactttttaaggatggtattgagcctatgtgggaagatgagaaaaacaaacggggaggacgatggctaattacattgaacaaacagcagagacgaagtgacctcgatcgcttttggctagagacacttctgtgccttattggagaatcttttgatgactacagtgatgatgtatgtggcgctgttgttaatgttagagctaaaggtgataagatagcaatatggactactgaatgtgaaaacagagaagctgttacacatatagggagggtatacaaggaaaggttaggacttcctccaaagatagtgattggttatcagtcccacgcagacacagctactaagagcggctccaccactaaaaataggtttgttgtttaagaagacaccttctgagtattctcataggagactgcgtcaagcaatcgagatttgggagctgaaccaaagcctcttcaaaaagcagagtggactgcatttaaatttgatttccatcttaatgttactcagatataagagaagtctcattcgcctttgtcttgtacttctgtgttcattttttttttttttttttggctagagtttccactatcccaatcaaagaattacagtacacatccccagaatccataaatgtgttcctggcccactctgtaatagttcagtagaattaccattaattacatacagattttacctatccacaatagtcagaaaacaacttggcatttctatactttacaggaaaaaaaattctgttgttccattttatgcagaagcatattttgctggtttgaaagattatgatgcatacagttttctagcaattttctttgtttctttttacagcattgtctttgctgtactcttgctgatggctgctagattttaatttatttgtttccctacttgataatattagtgattctgatttcagtttttcatttgttttgcttttgtttttttcctcatgtaacattggtgaaggatccaggaatatgacacaaaggtggaataaacattaattttgtgcattctttggtaattttttttgttttttgtaactacaaagctttgctacaaatttatgcatttcattcaaatcagtgatctatgtttgtgtgatttcctaaacataattgtggattataaaaaatgtaacatcataattacattcctaactagaattagtatgtctgtttttgtatctttatgctgtattttaacactttgtattacttaggttattttgctttggttaaaaatggctcaagtagaaaagcagtcccattcatattaagacagtgtacaaaactgtaaataaaatgtgtacagtgaattgtcttttagacaactagatttgtccttttatttctccatctttatagaaggaatttgtacttcttattgcaaggcagtctctatattatgtcttcttttgtggtgtcttccatgtgaacagcataagtttggagcactagtttgattattatgtttattacaatttttaataaattgaataggtagtatcatatatatggaattaaattgatgtggctatctttgtttttttataaagtaaggcacagtcattcagtcttaggtaaataatgtactctcttaatatgttaatactcatgagaattgggatctgatgcatcaccatttgattggtagcaacagtggttgtaaaacttggttgctgaattgagttgtttctatgttaagtgtcaaaatgatagtgtagggaaagtacaggtggtggggacatatgcattaagaatcttgttagtgttgcaatctaaatagaatggaataaacaggtgttaagacatatttatagtggtaaattgttgtagtatggtattctgtaaacttgaaaacttgatctactctttgtaggtatcatttgaaagcaaacttgaaaatgttttgtacatagtacatacttgtatagtcctgtgagatgaagtatggctatcagaccaaaggataagccaaactgtaggtagcagaatggaaattattattttgagaggaaaatttgtctttgaatggtgattatgacttaatcattttaaaactgataaacttgacaaaaaccctgtatgaaataaacatgaaattaatagcactgatttcattgtaaaattttaaagcagtttaaagggtaccacaggttatcacagtactctcaatgccacaaacacctcttgttcagtattctagaaatactgaatcagaattctgtgtttattataatctcagcatactgtacataatatctgctagttaaacttgggtaattggttaaggtgacttactgtctatgtcaatatgtatagttttgagtacttcaagagtttacttaaaagtgatgatgttactggtatgttggcagtgggtgggactgaagtagtgtatctattataaattgatctattttcttaattctaagatgaagtccaattttaagcatcagcttttaggtgcaaaggaggaattaacacattaaatgtatacagttctaaatttttgaaataactgatgtgtagcatttgattattggtattaccattttagaatcatgatgttattttaaacctttttcctggggacaagaaaggataataaattacgctgaatcacttttggcagttgccacttaaatagtacagtgacttgcaacttttataactttatcagcatcttctctaaatacaaaattaggctatatgttattttccaacttactgttttctctctgtttagcaggatattataaatagattaaatagatatattttctttttttttttttttttttgagacggagtctcgctttgtctcccaggctggagtgcagtggcgtgatctcccagtagctgggactacaagcacctgccaccatgcccggctaattttttttgtatttttagtagagacggggtttc

SEQ ID NO: 335340 - DNA, 2469 bp, Homo sapiens
ggccacgcgcgcgtccccgaagagggggacggggagcgagcgcacgggggagatcgatctaagatggcgactgtcgaaccggaaaccacccctactcctaatcccccgactacagaagaggagaaaacggaatctaatcaggaggttgctaacccagaacactatattaaacatcccctacagaacagatgggcactctggttttttaaaaatgataaaagcaaaacttggcaagcaaacctgcggctgatctccaagtttgatactgttgaagacttttgggctctgtacaaccatatccagttgtctagtaatttaatgcctggctgtgactactcactttttaaggatggtattgagcctatgtgggaagatgagaaaaacaaacggggaggacgatggctaattacattgaacaaacagcagagacgaagtgacctcgatcgcttttggctagagacacttctgtgccttattggagaatcttttgatgactacagtgatgatgtatgtggcgctgttgttaatgttagagctaaaggtgataagatagcaatatggactactgaatgtgaaaacagagaagctgttacacatatagggagggtatacaaggaaaggttaggacttcctccaaagatagtgattggttatcagtcccacgcagacacagctactaagagcggctccaccactaaaaataggtttgttgtttaagaagacaccttctgagtattctcataggagactgcgtcaagcaatcgagatttgggagctgaaccaaagcctcttcaaaaagcagagtggactgcatttaaatttgatttccatcttaatgttactcagatataagagaagtctcattcgcctttgtcttgtacttctgtgttcattttttttttttttttttggctagagtttccactatcccaatcaaagaattacagtacacatccccagaatccataaatgtgttcctggcccactctgtaatagttcagtagaattaccattaattacatacagattttacctatccacaatagtcagaaaacaacttggcatttctatactttacaggaaaaaaaattctgttgttccattttatgcagaagcatattttgctggtttgaaagattatgatgcatacagttttctagcaattttctttgtttctttttacagcattgtctttgctgtactcttgctgatggctgctagattttaatttatttgtttccctacttgataatattagtgattctgatttcagtttttcatttgttttgcttttgtttttttcctcatgtaacattggtgaaggatccaggaatatgacacaaaggtggaataaacattaattttgtgcattctttggtaattttttttgttttttgtaactacaaagctttgctacaaatttatgcatttcattcaaatcagtgatctatgtttgtgtgatttcctaaacataattgtggattataaaaaatgtaacatcataattacattcctaactagaattagtatgtctgtttttgtatctttatgctgtattttaacactttgtattacttaggttattttgctttggttaaaaatggctcaagtagaaaagcagtcccattcatattaagacagtgtacaaaactgtaaataaaatgtgtacagtgaattgtcttttagacaactagatttgtccttttatttctccatctttatagaaggaatttgtacttcttattgcaaggcagtctctatattatgtcttcttttgtggtgtcttccatgtgaacagcataagtttggagcactagtttgattattatgtttattacaatttttaataaattgaataggtagtatcatatatatggaattaaattgatgtggctatctttgtttttttataaagtaaggcacagtcattcagtcttaggtaaataatgtactctcttaatatgttaatactcatgagaattgggatctgatgcatcaccatttgattggtagcaacagtggttgtaaaacttggttgctgaattgagttgtttctatgttaagtgtcaaaatgatagtgtagggaaagtacaggtggtggggacatatgcattaagaatcttgttagtgttgcaatctaaatagaatggaataaacaggtgttaagacatatttatagtggtaaattgttgtagtatggtattctgtaaacttgaaaacttgatctactctttgtaggtatcatttgaaagcaaacttgaaaatgttttgtacatagtacatacttgtatagtcctgtgagatgaagtatggctatcagaccaaaggataagccaaactgtaggtagcagaatggaaattattattttgagaggaaaatttgtctttgaatggtgattatgacttaatcattttaaaactgataaacttgacaaaaaccctgtatgaaataaacatgaaattaatagc

SEQ ID NO: 335341 - DNA, 2675 bp, Homo sapiens
ttgagggtgctgtgaggaaatgcatggtttgttgaaaagaactgaggactgacagccgcctcctccatgattaccctggctctctgtcccacccttctcatggcgcttgggggaccatggctgatcctgtcctgagacaaattaagactcctgtggtgaagcagttggtcgagaaaaagtgatgcatgaaaaagaagcaaaacaagaaggaaagaaaaaaaatgagagctgaagatggtgaaaatgatgccattaaaaagcaggcagaaagtctgcgagaatcccaggaaaccacccctactcctaatcccccgactacagaagaggagaaaacggaatctaatcaggaggttgctaacccagaacactatattaaacatcccctacagaacagatgggcactctggttttttaaaaatgataaaagcaaaacttggcaagcaaacctgcggctgatctccaagtttgatactgttgaagacttttgggctctgtacaaccatatccagttgtctagtaatttaatgcctggctgtgactactcactttttaaggatggtattgagcctatgtgggaagatgagaaaaacaaacggggaggacgatggctaattacattgaacaaacagcagagacgaagtgacctcgatcgcttttggctagagacacttctgtgccttattggagaatcttttgatgactacagtgatgatgtatgtggcgctgttgttaatgttagagctaaaggtgataagatagcaatatggactactgaatgtgaaaacagagaagctgttacacatatagggagggtatacaaggaaaggttaggacttcctccaaagatagtgattggttatcagtcccacgcagacacagctactaagagcggctccaccactaaaaataggtttgttgtttaagaagacaccttctgagtattctcataggagactgcgtcaagcaatcgagatttgggagctgaaccaaagcctcttcaaaaagcagagtggactgcatttaaatttgatttccatcttaatgttactcagatataagagaagtctcattcgcctttgtcttgtacttctgtgttcattttttttttttttttttggctagagtttccactatcccaatcaaagaattacagtacacatccccagaatccataaatgtgttcctggcccactctgtaatagttcagtagaattaccattaattacatacagattttacctatccacaatagtcagaaaacaacttggcatttctatactttacaggaaaaaaaattctgttgttccattttatgcagaagcatattttgctggtttgaaagattatgatgcatacagttttctagcaattttctttgtttctttttacagcattgtctttgctgtactcttgctgatggctgctagattttaatttatttgtttccctacttgataatattagtgattctgatttcagtttttcatttgttttgcttttgtttttttcctcatgtaacattggtgaaggatccaggaatatgacacaaaggtggaataaacattaattttgtgcattctttggtaattttttttgttttttgtaactacaaagctttgctacaaatttatgcatttcattcaaatcagtgatctatgtttgtgtgatttcctaaacataattgtggattataaaaaatgtaacatcataattacattcctaactagaattagtatgtctgtttttgtatctttatgctgtattttaacactttgtattacttaggttattttgctttggttaaaaatggctcaagtagaaaagcagtcccattcatattaagacagtgtacaaaactgtaaataaaatgtgtacagtgaattgtcttttagacaactagatttgtccttttatttctccatctttatagaaggaatttgtacttcttattgcaaggcagtctctatattatgtcttcttttgtggtgtcttccatgtgaacagcataagtttggagcactagtttgattattatgtttattacaatttttaataaattgaataggtagtatcatatatatggaattaaattgatgtggctatctttgtttttttataaagtaaggcacagtcattcagtcttaggtaaataatgtactctcttaatatgttaatactcatgagaattgggatctgatgcatcaccatttgattggtagcaacagtggttgtaaaacttggttgctgaattgagttgtttctatgttaagtgtcaaaatgatagtgtagggaaagtacaggtggtggggacatatgcattaagaatcttgttagtgttgcaatctaaatagaatggaataaacaggtgttaagacatatttatagtggtaaattgttgtagtatggtattctgtaaacttgaaaacttgatctactctttgtaggtatcatttgaaagcaaacttgaaaatgttttgtacatagtacatacttgtatagtcctgtgagatgaagtatggctatcagaccaaaggataagccaaactgtaggtagcagaatggaaattattattttgagaggaaaatttgtctttgaatggtgattatgacttaatcattttaaaactgataaacttgacaaaaaccctgtatgaaataaacatgaaattaatagc

SEQ ID NO: 335342 - DNA, 2424 bp, Homo sapiens
  misc_feature (34)..(34): n is a, c, g, or t
gagcagatcgcatctaggatggcgatggtcgaancggaaaccacccctactcctaatcccccgactacagaagaggagaaaacggaatctaatcaggaggttgctaacccagaacactatattaaacatcccctacagaacagatgggcactctggttttttaaaaatgataaaagcaaaacttggcaagcaaacctgcggctgatctccaagtttgatactgttgaagacttttgggctctgtacaaccatatccagttgtctagtaatttaatgcctggctgtgactactcactttttaaggatggtattgagcctatgtgggaagatgagaaaaacaaacggggaggacgatggctaattacattgaacaaacagcagagacgaagtgacctcgatcgcttttggctagagacacttctgtgccttattggagaatcttttgatgactacagtgatgatgtatgtggcgctgttgttaatgttagagctaaaggtgataagatagcaatatggactactgaatgtgaaaacagagaagctgttacacatatagggagggtatacaaggaaaggttaggacttcctccaaagatagtgattggttatcagtcccacgcagacacagctactaagagcggctccaccactaaaaataggtttgttgtttaagaagacaccttctgagtattctcataggagactgcgtcaagcaatcgagatttgggagctgaaccaaagcctcttcaaaaagcagagtggactgcatttaaatttgatttccatcttaatgttactcagatataagagaagtctcattcgcctttgtcttgtacttctgtgttcattttttttttttttttttggctagagtttccactatcccaatcaaagaattacagtacacatccccagaatccataaatgtgttcctggcccactctgtaatagttcagtagaattaccattaattacatacagattttacctatccacaatagtcagaaaacaacttggcatttctatactttacaggaaaaaaaattctgttgttccattttatgcagaagcatattttgctggtttgaaagattatgatgcatacagttttctagcaattttctttgtttctttttacagcattgtctttgctgtactcttgctgatggctgctagattttaatttatttgtttccctacttgataatattagtgattctgatttcagtttttcatttgttttgcttttgtttttttcctcatgtaacattggtgaaggatccaggaatatgacacaaaggtggaataaacattaattttgtgcattctttggtaattttttttgttttttgtaactacaaagctttgctacaaatttatgcatttcattcaaatcagtgatctatgtttgtgtgatttcctaaacataattgtggattataaaaaatgtaacatcataattacattcctaactagaattagtatgtctgtttttgtatctttatgctgtattttaacactttgtattacttaggttattttgctttggttaaaaatggctcaagtagaaaagcagtcccattcatattaagacagtgtacaaaactgtaaataaaatgtgtacagtgaattgtcttttagacaactagatttgtccttttatttctccatctttatagaaggaatttgtacttcttattgcaaggcagtctctatattatgtcttcttttgtggtgtcttccatgtgaacagcataagtttggagcactagtttgattattatgtttattacaatttttaataaattgaataggtagtatcatatatatggaattaaattgatgtggctatctttgtttttttataaagtaaggcacagtcattcagtcttaggtaaataatgtactctcttaatatgttaatactcatgagaattgggatctgatgcatcaccatttgattggtagcaacagtggttgtaaaacttggttgctgaattgagttgtttctatgttaagtgtcaaaatgatagtgtagggaaagtacaggtggtggggacatatgcattaagaatcttgttagtgttgcaatctaaatagaatggaataaacaggtgttaagacatatttatagtggtaaattgttgtagtatggtattctgtaaacttgaaaacttgatctactctttgtaggtatcatttgaaagcaaacttgaaaatgttttgtacatagtacatacttgtatagtcctgtgagatgaagtatggctatcagaccaaaggataagccaaactgtaggtagcagaatggaaattattattttgagaggaaaatttgtctttgaatggtgattatgacttaatcattttaaaactgataaacttgacaaaaaccctgtatgaaataaacatgaaattaatagc

SEQ ID NO: 335343 - DNA, 2539 bp, Homo sapiens
ggaatcatacagtatttgtcttttttggaggggggctggcttattcacttaatgtccttagcttcccctcatgttttatgaagtgttagaatttccttcatcagggctttttagtattccattgtgtgtatatatacatttttcattcatctgttgatggacaggtgggttgcttctaccttttgacttttgtgaataatgttgcttttaacatgggtatgcagctaccattttttgacactgattttttatttttagatgggcactctggttttttaaaaatgataaaagcaaaacttggcaagcaaacctgcggctgatctccaagtttgatactgttgaagacttttgggctctgtacaaccatatccagttgtctagtaatttaatgcctggctgtgactactcactttttaaggatggtattgagcctatgtgggaagatgagaaaaacaaacggggaggacgatggctaattacattgaacaaacagcagagacgaagtgacctcgatcgcttttggctagagacacttctgtgccttattggagaatcttttgatgactacagtgatgatgtatgtggcgctgttgttaatgttagagctaaaggtgataagatagcaatatggactactgaatgtgaaaacagagaagctgttacacatatagggagggtatacaaggaaaggttaggacttcctccaaagatagtgattggttatcagtcccacgcagacacagctactaagagcggctccaccactaaaaataggtttgttgtttaagaagacaccttctgagtattctcataggagactgcgtcaagcaatcgagatttgggagctgaaccaaagcctcttcaaaaagcagagtggactgcatttaaatttgatttccatcttaatgttactcagatataagagaagtctcattcgcctttgtcttgtacttctgtgttcattttttttttttttttttggctagagtttccactatcccaatcaaagaattacagtacacatccccagaatccataaatgtgttcctggcccactctgtaatagttcagtagaattaccattaattacatacagattttacctatccacaatagtcagaaaacaacttggcatttctatactttacaggaaaaaaaattctgttgttccattttatgcagaagcatattttgctggtttgaaagattatgatgcatacagttttctagcaattttctttgtttctttttacagcattgtctttgctgtactcttgctgatggctgctagattttaatttatttgtttccctacttgataatattagtgattctgatttcagtttttcatttgttttgcttttgtttttttcctcatgtaacattggtgaaggatccaggaatatgacacaaaggtggaataaacattaattttgtgcattctttggtaattttttttgttttttgtaactacaaagctttgctacaaatttatgcatttcattcaaatcagtgatctatgtttgtgtgatttcctaaacataattgtggattataaaaaatgtaacatcataattacattcctaactagaattagtatgtctgtttttgtatctttatgctgtattttaacactttgtattacttaggttattttgctttggttaaaaatggctcaagtagaaaagcagtcccattcatattaagacagtgtacaaaactgtaaataaaatgtgtacagtgaattgtcttttagacaactagatttgtccttttatttctccatctttatagaaggaatttgtacttcttattgcaaggcagtctctatattatgtcttcttttgtggtgtcttccatgtgaacagcataagtttggagcactagtttgattattatgtttattacaatttttaataaattgaataggtagtatcatatatatggaattaaattgatgtggctatctttgtttttttataaagtaaggcacagtcattcagtcttaggtaaataatgtactctcttaatatgttaatactcatgagaattgggatctgatgcatcaccatttgattggtagcaacagtggttgtaaaacttggttgctgaattgagttgtttctatgttaagtgtcaaaatgatagtgtagggaaagtacaggtggtggggacatatgcattaagaatcttgttagtgttgcaatctaaatagaatggaataaacaggtgttaagacatatttatagtggtaaattgttgtagtatggtattctgtaaacttgaaaacttgatctactctttgtaggtatcatttgaaagcaaacttgaaaatgttttgtacatagtacatacttgtatagtcctgtgagatgaagtatggctatcagaccaaaggataagccaaactgtaggtagcagaatggaaattattattttgagaggaaaatttgtctttgaatggtgattatgacttaatcattttaaaactgataaacttgacaaaaaccctgtatgaaataaacatgaaattaatagc

SEQ ID NO: 335344 - DNA, 2448 bp, Homo sapiens
cgtcacgtggccagaagctggccaatccggtttgaatctcatttttttcctcttacccccccttctggagcggttgtgcgatcagatcgatctaagatggcgactgtcgaaccggaaaccacccctactcctaatcccccgactacagaagaggagaaaacggaatctaatcaggaggttgctaacccagaacactatattaaacatcccctacagaacagatgggcactctggttttttaaaaatgataaaagcaaaacttggcaagcaaacctgcggctgatctccaagtttgatactgttgaagacttttgggctctgtacaaccatatccagttgtctagtaatttaatgcctggctgtgactactcactttttaaggatggtattgagcctatgtgggaagatgagagtgacctcgatcgcttttggctagagacacttctgtgccttattggagaatcttttgatgactacagtgatgatgtatgtggcgctgttgttaatgttagagctaaaggtgataagatagcaatatggactactgaatgtgaaaacagagaagctgttacacatatagggagggtatacaaggaaaggttaggacttcctccaaagatagtgattggttatcagtcccacgcagacacagctactaagagcggctccaccactaaaaataggtttgttgtttaagaagacaccttctgagtattctcataggagactgcgtcaagcaatcgagatttgggagctgaaccaaagcctcttcaaaaagcagagtggactgcatttaaatttgatttccatcttaatgttactcagatataagagaagtctcattcgcctttgtcttgtacttctgtgttcattttttttttttttttttggctagagtttccactatcccaatcaaagaattacagtacacatccccagaatccataaatgtgttcctggcccactctgtaatagttcagtagaattaccattaattacatacagattttacctatccacaatagtcagaaaacaacttggcatttctatactttacaggaaaaaaaattctgttgttccattttatgcagaagcatattttgctggtttgaaagattatgatgcatacagttttctagcaattttctttgtttctttttacagcattgtctttgctgtactcttgctgatggctgctagattttaatttatttgtttccctacttgataatattagtgattctgatttcagtttttcatttgttttgcttttgtttttttcctcatgtaacattggtgaaggatccaggaatatgacacaaaggtggaataaacattaattttgtgcattctttggtaattttttttgttttttgtaactacaaagctttgctacaaatttatgcatttcattcaaatcagtgatctatgtttgtgtgatttcctaaacataattgtggattataaaaaatgtaacatcataattacattcctaactagaattagtatgtctgtttttgtatctttatgctgtattttaacactttgtattacttaggttattttgctttggttaaaaatggctcaagtagaaaagcagtcccattcatattaagacagtgtacaaaactgtaaataaaatgtgtacagtgaattgtcttttagacaactagatttgtccttttatttctccatctttatagaaggaatttgtacttcttattgcaaggcagtctctatattatgtcttcttttgtggtgtcttccatgtgaacagcataagtttggagcactagtttgattattatgtttattacaatttttaataaattgaataggtagtatcatatatatggaattaaattgatgtggctatctttgtttttttataaagtaaggcacagtcattcagtcttaggtaaataatgtactctcttaatatgttaatactcatgagaattgggatctgatgcatcaccatttgattggtagcaacagtggttgtaaaacttggttgctgaattgagttgtttctatgttaagtgtcaaaatgatagtgtagggaaagtacaggtggtggggacatatgcattaagaatcttgttagtgttgcaatctaaatagaatggaataaacaggtgttaagacatatttatagtggtaaattgttgtagtatggtattctgtaaacttgaaaacttgatctactctttgtaggtatcatttgaaagcaaacttgaaaatgttttgtacatagtacatacttgtatagtcctgtgagatgaagtatggctatcagaccaaaggataagccaaactgtaggtagcagaatggaaattattattttgagaggaaaatttgtctttgaatggtgattatgacttaatcattttaaaactgataaacttgacaaaaaccctgtatgaaataaacatgaaattaatagc

SEQ ID NO: 335345 - DNA, 2415 bp, Homo sapiens
ggccacgcgcgcgtccccgaagagggggacggggagcgagcgcacgggggagatcgatctaagatggcgactgtcgaaccggaaaccacccctactcctaatcccccgactacagaagaggagaaaacggaatctaatcaggaggttgctaacccagaacactatattaaacatcccctacagaacagatgggcactctggttttttaaaaatgataaaagcaaaacttggcaagcaaacctgcggctgatctccaagtttgatactgttgaagacttttgggctctgtacaaccatatccagttgtctagtaatttaatgcctggctgtgactactcactttttaaggatggtattgagcctatgtgggaagatgagaaaaacaaacggggaggacgatggctaattacattgaacaaacagcagagacgaagtgacctcgatcgcttttggctagagacacttctgtgccttattggagaatcttttgatgactacagtgatgatgtatgtggcgctgttgttaatgttagagctaaaggtgataagatagcaatatggactactgaatgtgttcctccaaagatagtgattggttatcagtcccacgcagacacagctactaagagcggctccaccactaaaaataggtttgttgtttaagaagacaccttctgagtattctcataggagactgcgtcaagcaatcgagatttgggagctgaaccaaagcctcttcaaaaagcagagtggactgcatttaaatttgatttccatcttaatgttactcagatataagagaagtctcattcgcctttgtcttgtacttctgtgttcattttttttttttttttttggctagagtttccactatcccaatcaaagaattacagtacacatccccagaatccataaatgtgttcctggcccactctgtaatagttcagtagaattaccattaattacatacagattttacctatccacaatagtcagaaaacaacttggcatttctatactttacaggaaaaaaaattctgttgttccattttatgcagaagcatattttgctggtttgaaagattatgatgcatacagttttctagcaattttctttgtttctttttacagcattgtctttgctgtactcttgctgatggctgctagattttaatttatttgtttccctacttgataatattagtgattctgatttcagtttttcatttgttttgcttttgtttttttcctcatgtaacattggtgaaggatccaggaatatgacacaaaggtggaataaacattaattttgtgcattctttggtaattttttttgttttttgtaactacaaagctttgctacaaatttatgcatttcattcaaatcagtgatctatgtttgtgtgatttcctaaacataattgtggattataaaaaatgtaacatcataattacattcctaactagaattagtatgtctgtttttgtatctttatgctgtattttaacactttgtattacttaggttattttgctttggttaaaaatggctcaagtagaaaagcagtcccattcatattaagacagtgtacaaaactgtaaataaaatgtgtacagtgaattgtcttttagacaactagatttgtccttttatttctccatctttatagaaggaatttgtacttcttattgcaaggcagtctctatattatgtcttcttttgtggtgtcttccatgtgaacagcataagtttggagcactagtttgattattatgtttattacaatttttaataaattgaataggtagtatcatatatatggaattaaattgatgtggctatctttgtttttttataaagtaaggcacagtcattcagtcttaggtaaataatgtactctcttaatatgttaatactcatgagaattgggatctgatgcatcaccatttgattggtagcaacagtggttgtaaaacttggttgctgaattgagttgtttctatgttaagtgtcaaaatgatagtgtagggaaagtacaggtggtggggacatatgcattaagaatcttgttagtgttgcaatctaaatagaatggaataaacaggtgttaagacatatttatagtggtaaattgttgtagtatggtattctgtaaacttgaaaacttgatctactctttgtaggtatcatttgaaagcaaacttgaaaatgttttgtacatagtacatacttgtatagtcctgtgagatgaagtatggctatcagaccaaaggataagccaaactgtaggtagcagaatggaaattattattttgagaggaaaatttgtctttgaatggtgattatgacttaatcattttaaaactgataaacttgacaaaaaccctgtatgaaataaacatgaaattaatagc

SEQ ID NO: 335346 - DNA, 1735 bp, Homo sapiens
ctgggcagaatatgggcccccacgcactgacacttccaataatatggtttacacaggttcccggtcagggtcttttggtttaacacgtaacccgcgcaatgcgttttgggcctttaaaaaatggggttttataaaaaacctttgtacttctgtgttcattttttttttttttttttggctagagtttccactatcccaatcaaagaattacagtacacatccccagaatccataaatgtgttcctggcccactctgtaatagttcagtagaattaccattaattacatacagattttacctatccacaatagtcagaaaacaacttggcatttctatactttacaggaaaaaaaattctgttgttccattttatgcagaagcatattttgctggtttgaaagattatgatgcatacagttttctagcaattttctttgtttctttttacagcattgtctttgctgtactcttgctgatggctgctagattttaatttatttgtttccctacttgataatattagtgattctgatttcagtttttcatttgttttgcttttgtttttttcctcatgtaacattggtgaaggatccaggaatatgacacaaaggtggaataaacattaattttgtgcattctttggtaattttttttgttttttgtaactacaaagctttgctacaaatttatgcatttcattcaaatcagtgatctatgtttgtgtgatttcctaaacataattgtggattataaaaaatgtaacatcataattacattcctaactagaattagtatgtctgtttttgtatctttatgctgtattttaacactttgtattacttaggttattttgctttggttaaaaatggctcaagtagaaaagcagtcccattcatattaagacagtgtacaaaactgtaaataaaatgtgtacagtgaattgtcttttagacaactagatttgtccttttatttctccatctttatagaaggaatttgtacttcttattgcaaggcagtctctatattatgtcttcttttgtggtgtcttccatgtgaacagcataagtttggagcactagtttgattattatgtttattacaatttttaataaattgaataggtagtatcatatatatggaattaaattgatgtggctatctttgtttttttataaagtaaggcacagtcattcagtcttaggtaaataatgtactctcttaatatgttaatactcatgagaattgggatctgatgcatcaccatttgattggtagcaacagtggttgtaaaacttggttgctgaattgagttgtttctatgttaagtgtcaaaatgatagtgtagggaaagtacaggtggtggggacatatgcattaagaatcttgttagtgttgcaatctaaatagaatggaataaacaggtgttaagacatatttatagtggtaaattgttgtagtatggtattctgtaaacttgaaaacttgatctactctttgtaggtatcatttgaaagcaaacttgaaaatgttttgtacatagtacatacttgtatagtcctgtgagatgaagtatggctatcagaccaaaggataagccaaactgtaggtagcagaatggaaattattattttgagaggaaaatttgtctttgaatggtgattatgacttaatcattttaaaactgataaacttgacaaaaaccctgtatgaaataaacatgaaattaatagc

SEQ ID NO: 335347 - DNA, 322 bp, Homo sapiens
aaatggagtctcactgtgtcgcccaagctagagtacagtggcgcgatctcggctcactgcaacctccgcctcctgggttcaagtgattctcctgcttcagcctcctgagtagctgggactacaggaaaccacccctactcctaatcccccgactacagaagaggagaaaacggaatctaatcaggaggttgctaacccagaacactatattaaacatcccctacagaacagtaagctgctacagcattttttggactcctgccagctacccagtacaatactatgtatgtaatttaatgtataatgcatgtaatttatactg

SEQ ID NO: 335348 - DNA, 1915 bp, Homo sapiens
cgtcacgtggccagaagctggccaatccggtttgaatctcatttttttcctcttacccccccttctggagcggttgtgcgatcagatcgatctaagatggcgactgtcgaaccggaaaccacccctactcctaatcccccgactacagaagaggagaaaacggaatctaatcaggaggttgctaacccagaacactatattaaacatcccctacagaacagatgggcactctggttttttaaaaatgataaaagcaaaacttggcaagcaaacctgcggctgatctccaagtttgatactgttgaagacttttgggctctgtacaaccatatccagttgtctagtaatttaatgcctggctgtgactactcactttttaaggatggtattgagcctatgtgggaagatgagaaaaacaaacggggaggacgatggctaattacattgaacaaacagcagagacgaagtgacctcgatcgcttttggctagagacacttctgtgccttattggagaatcttttgatgactacagtgatgatgtatgtggcgctgttgttaatgttagagctaaaggtgataagatagcaatatggactactgaatgtgaaaacagagaagctgttacacatatagggagggtatacaaggaaaggttaggacttcctccaaagatagtgattggttatcagtcccacgcagacacagctactaagagcggctccaccactaaaaataggtttgttgtttaagaagacaccttctgagtattctcataggagactgcgtcaagcaatcgagatttgggagctgaaccaaagcctcttcaaaaagcagagtggactgcatttaaatttgatttccatcttaatgttactcagatataagagaagtctcattcgcctttgtcttgtacttctgtgttcattttttttttttttttttggctagagtttccactatcccaatcaaagaattacagtacacatccccagaatccataaatgtgttcctggcccactctgtaatagttcagtagaattaccattaattacatacagattttacctatccacaatagtcagaaaacaacttggcatttctatactttacaggaaaaaaaattctgttgttccattttatgcagaagcatattttgctggtttgaaagattatgatgcatacagttttctagcaattttctttgtttctttttacagcattgtctttgctgtactcttgctgatggctgctagattttaatttatttgtttccctacttgataatattagtgattctgatttcagtttttcatttgttttgcttttgtttttttcctcatgtaacattggtgaaggatccaggaatatgacacaaaggtggaataaacattaattttgtgcattctttggtaattttttttgttttttgtaactacaaagctttgctacaaatttatgcatttcattcaaatcagtgatctatgtttgtgtgatttcctaaacataattgtggattataaaaaatgtaacatcataattacattcctaactagaattagtatgtctgtttttgtatctttatgctgtattttaacactttgtattacttaggttattttgctttggttaaaaatggctcaagtagaaaagcagtcccattcatattaagacagtgtacaaaactgtaaataaaatgtgtacagtgaattgtcttttagacaactagatttgtccttttatttctccatctttatagaaggaatttgtacttcttattgcaaggcagtctctatattatgtcttcttttgtggtgtcttccatgtgaacagcataagtttggagcactagtttgattattatgtttattacaatttttaataaattgaataggtagtatcatatatatggaatta

SEQ ID NO: 335349 - DNA, 2502 bp, Homo sapiens
cgtcacgtggccagaagctggccaatccggtttgaatctcatttttttcctcttacccccccttctggagcggttgtgcgatcagatcgatctaagatggcgactgtcgaaccggaaaccacccctactcctaatcccccgactacagaagaggagaaaacggaatctaatcaggaggttgctaacccagaacactatattaaacatcccctacagaacagatgggcactctggttttttaaaaatgataaaagcaaaacttggcaagcaaacctgcggctgatctccaagtttgatactgttgaagacttttgggctctgtacaaccatatccagttgtctagtaatttaatgcctggctgtgactactcactttttaaggatggtattgagcctatgtgggaagatgagaaaaacaaacggggaggacgatggctaattacattgaacaaacagcagagacgaagtgacctcgatcgcttttggctagagacacttctgtgccttattggagaatcttttgatgactacagtgatgatgtatgtggcgctgttgttaatgttagagctaaaggtgataagatagcaatatggactactgaatgtgaaaacagagaagctgttacacatatagggagggtatacaaggaaaggttaggacttcctccaaagatagtgattggttatcagtcccacgcagacacagctactaagagcggctccaccactaaaaataggtttgttgtttaagaagacaccttctgagtattctcataggagactgcgtcaagcaatcgagatttgggagctgaaccaaagcctcttcaaaaagcagagtggactgcatttaaatttgatttccatcttaatgttactcagatataagagaagtctcattcgcctttgtcttgtacttctgtgttcattttttttttttttttttggctagagtttccactatcccaatcaaagaattacagtacacatccccagaatccataaatgtgttcctggcccactctgtaatagttcagtagaattaccattaattacatacagattttacctatccacaatagtcagaaaacaacttggcatttctatactttacaggaaaaaaaattctgttgttccattttatgcagaagcatattttgctggtttgaaagattatgatgcatacagttttctagcaattttctttgtttctttttacagcattgtctttgctgtactcttgctgatggctgctagattttaatttatttgtttccctacttgataatattagtgattctgatttcagtttttcatttgttttgcttttgtttttttcctcatgtaacattggtgaaggatccaggaatatgacacaaaggtggaataaacattaattttgtgcattctttggtaattttttttgttttttgtaactacaaagctttgctacaaatttatgcatttcattcaaatcagtgatctatgtttgtgtgatttcctaaacataattgtggattataaaaaatgtaacatcataattacattcctaactagaattagtatgtctgtttttgtatctttatgctgtattttaacactttgtattacttaggttattttgctttggttaaaaatggctcaagtagaaaagcagtcccattcatattaagacagtgtacaaaactgtaaataaaatgtgtacagtgaattgtcttttagacaactagatttgtccttttatttctccatctttatagaaggaatttgtacttcttattgcaaggcagtctctatattatgtcttcttttgtggtgtcttccatgtgaacagcataagtttggagcactagtttgattattatgtttattacaatttttaataaattgaataggtagtatcatatatatggaattaaattgatgtggctatctttgtttttttataaagtaaggcacagtcattcagtcttaggtaaataatgtactctcttaatatgttaatactcatgagaattgggatctgatgcatcaccatttgattggtagcaacagtggttgtaaaacttggttgctgaattgagttgtttctatgttaagtgtcaaaatgatagtgtagggaaagtacaggtggtggggacatatgcattaagaatcttgttagtgttgcaatctaaatagaatggaataaacaggtgttaagacatatttatagtggtaaattgttgtagtatggtattctgtaaacttgaaaacttgatctactctttgtaggtatcatttgaaagcaaacttgaaaatgttttgtacatagtacatacttgtatagtcctgtgagatgaagtatggctatcagaccaaaggataagccaaactgtaggtagcagaatggaaattattattttgagaggaaaatttgtctttgaatggtgattatgacttaatcattttaaaactgataaacttgacaaaaaccctgtatgaaataaacatgaaattaatagc

SEQ ID NO: 335350 - DNA, 1721 bp, Homo sapiens
cgtcacgtggccagaagctggccaatccggtttgaatctcatttttttcctcttacccccccttctggagcggttgtgcgatcagatcgatctaagatggcgactgtcgaaccggaaaccacccctactcctaatcccccgactacagaagaggagaaaacggaatctaatcaggaggttgctaacccagaacactatattaaacatcccctacagaacagatgggcactctggttttttaaaaatgataaaagcaaaacttggcaagcaaacctgcggctgatctccaagtttgatactgttgaagacttttgggctctgtacaaccatatccagttgtctagtaatttaatgcctggctgtgactactcactttttaaggatggtattgagcctatgtgggaagatgagaaaaacaaacggggaggacgatggctaattacattgaacaaacagcagagacgaagtgacctcgatcgcttttggctagagacacttctgtgccttattggagaatcttttgatgactacagtgatgatgtatgtggcgctgttgttaatgttagagctaaaggtgataagatagcaatatggactactgaatgtgaaaacagagaagctgttacacatatagggagggtatacaaggaaaggttaggacttcctccaaagatagtgattggttatcagtcccacgcagacacagctactaagagcggctccaccactaaaaataggtttgttgtttaagaagacaccttctgagtattctcataggagactgcgtcaagcaatcgagatttgggagctgaaccaaagcctcttcaaaaagcagagtggactgcatttaaatttgatttccatcttaatgttactcagatataagagaagtctcattcgcctttgtcttgtacttctgtgttcattttttttttttttttttggctagagtttccactatcccaatcaaagaattacagtacacatccccagaatccataaatgtgttcctggcccactctgtaatagttcagtagaattaccattaattacatacagattttacctatccacaatagtcagaaaacaacttggcatttctatactttacaggaaaaaaaattctgttgttccattttatgcagaagcatattttgctggtttgaaagattatgatgcatacagttttctagcaattttctttgtttctttttacagcattgtctttgctgtactcttgctgatggctgctagattttaatttatttgtttccctacttgataatattagtgattctgatttcagtttttcatttgttttgcttttgtttttttcctcatgtaacattggtgaaggatccaggaatatgacacaaaggtggaataaacattaattttgtgcattctttggtaattttttttgttttttgtaactacaaagctttgctacaaatttatgcatttcattcaaatcagtgatctatgtttgtgtgatttcctaaacataattgtggattataaaaaatgtaacatcataattacattcctaactagaattagtatgtctgtttttgtatctttatgctgtattttaacactttgtattacttaggttattttgctttggttaaaaatggctcaagtagaaaagcagtcccattcatattaagacagtgtacaaaactgtaaataaaatgtgtacagtgaattgtcttttagac

SEQ ID NO: 335351 - DNA, 898 bp, Homo sapiens
cgtcacgtggccagaagctggccaatccggtttgaatctcatttttttcctcttacccccccttctggagcggttgtgcgatcagatcgatctaagatggcgactgtcgaaccggaaaccacccctactcctaatcccccgactacagaagaggagaaaacggaatctaatcaggaggttgctaacccagaacactatattaaacatcccctacagaacagatgggcactctggttttttaaaaatgataaaagcaaaacttggcaagcaaacctgcggctgatctccaagtttgatactgttgaagacttttgggctctgtacaaccatatccagttgtctagtaatttaatgcctggctgtgactactcactttttaaggatggtattgagcctatgtgggaagatgagaaaaacaaacggggaggacgatggctaattacattgaacaaacagcagagacgaagtgacctcgatcgcttttggctagagacacttctgtgccttattggagaatcttttgatgactacagtgatgatgtatgtggcgctgttgttaatgttagagctaaaggtgataagatagcaatatggactactgaatgtgaaaacagagaagctgttacacatatagggagggtatacaaggaaaggttaggacttcctccaaagatagtgattggttatcagtcccacgcagacacagctactaagagcggctccaccactaaaaataggtttgttgtttaagaagacaccttctgagtatttctctatattatgtcttcttttgtggtgtcttccatgtgaacagcataagtttggagcactagtttgattattatgtttattacaatttttaataaattgaataggtagtatcatatatatggaatta

SEQ ID NO: 335352 - DNA, 2512 bp, Homo sapiens
aaatggagtctcactgtgtcgcccaagctagagtacagtggcgcgatctcggctcactgcaacctccgcctcctgggttcaagtgattctcctgcttcagcctcctgagtagctgggactacaggaaaccacccctactcctaatcccccgactacagaagaggagaaaacggaatctaatcaggaggttgctaacccagaacactatattaaacatcccctacagaacagatgggcactctggttttttaaaaatgataaaagcaaaacttggcaagcaaacctgcggctgatctccaagtttgatactgttgaagacttttgggctctgtacaaccatatccagttgtctagtaatttaatgcctggctgtgactactcactttttaaggatggtattgagcctatgtgggaagatgagaaaaacaaacggggaggacgatggctaattacattgaacaaacagcagagacgaagtgacctcgatcgcttttggctagagacacttctgtgccttattggagaatcttttgatgactacagtgatgatgtatgtggcgctgttgttaatgttagagctaaaggtgataagatagcaatatggactactgaatgtgaaaacagagaagctgttacacatatagggagggtatacaaggaaaggttaggacttcctccaaagatagtgattggttatcagtcccacgcagacacagctactaagagcggctccaccactaaaaataggtttgttgtttaagaagacaccttctgagtattctcataggagactgcgtcaagcaatcgagatttgggagctgaaccaaagcctcttcaaaaagcagagtggactgcatttaaatttgatttccatcttaatgttactcagatataagagaagtctcattcgcctttgtcttgtacttctgtgttcattttttttttttttttttggctagagtttccactatcccaatcaaagaattacagtacacatccccagaatccataaatgtgttcctggcccactctgtaatagttcagtagaattaccattaattacatacagattttacctatccacaatagtcagaaaacaacttggcatttctatactttacaggaaaaaaaattctgttgttccattttatgcagaagcatattttgctggtttgaaagattatgatgcatacagttttctagcaattttctttgtttctttttacagcattgtctttgctgtactcttgctgatggctgctagattttaatttatttgtttccctacttgataatattagtgattctgatttcagtttttcatttgttttgcttttgtttttttcctcatgtaacattggtgaaggatccaggaatatgacacaaaggtggaataaacattaattttgtgcattctttggtaattttttttgttttttgtaactacaaagctttgctacaaatttatgcatttcattcaaatcagtgatctatgtttgtgtgatttcctaaacataattgtggattataaaaaatgtaacatcataattacattcctaactagaattagtatgtctgtttttgtatctttatgctgtattttaacactttgtattacttaggttattttgctttggttaaaaatggctcaagtagaaaagcagtcccattcatattaagacagtgtacaaaactgtaaataaaatgtgtacagtgaattgtcttttagacaactagatttgtccttttatttctccatctttatagaaggaatttgtacttcttattgcaaggcagtctctatattatgtcttcttttgtggtgtcttccatgtgaacagcataagtttggagcactagtttgattattatgtttattacaatttttaataaattgaataggtagtatcatatatatggaattaaattgatgtggctatctttgtttttttataaagtaaggcacagtcattcagtcttaggtaaataatgtactctcttaatatgttaatactcatgagaattgggatctgatgcatcaccatttgattggtagcaacagtggttgtaaaacttggttgctgaattgagttgtttctatgttaagtgtcaaaatgatagtgtagggaaagtacaggtggtggggacatatgcattaagaatcttgttagtgttgcaatctaaatagaatggaataaacaggtgttaagacatatttatagtggtaaattgttgtagtatggtattctgtaaacttgaaaacttgatctactctttgtaggtatcatttgaaagcaaacttgaaaatgttttgtacatagtacatacttgtatagtcctgtgagatgaagtatggctatcagaccaaaggataagccaaactgtaggtagcagaatggaaattattattttgagaggaaaatttgtctttgaatggtgattatgacttaatcattttaaaactgataaacttgacaaaaaccctgtatgaaataaacatgaaattaatagc

SEQ ID NO: 335353 - DNA, 2395 bp, Homo sapiens
cgtcacgtggccagaagctggccaatccggtttgaatctcatttttttcctcttacccccccttctggagcggttgtgcgatcagatcgatctaagatggcgactgtcgaaccgatgggcactctggttttttaaaaatgataaaagcaaaacttggcaagcaaacctgcggctgatctccaagtttgatactgttgaagacttttgggctctgtacaaccatatccagttgtctagtaatttaatgcctggctgtgactactcactttttaaggatggtattgagcctatgtgggaagatgagaaaaacaaacggggaggacgatggctaattacattgaacaaacagcagagacgaagtgacctcgatcgcttttggctagagacacttctgtgccttattggagaatcttttgatgactacagtgatgatgtatgtggcgctgttgttaatgttagagctaaaggtgataagatagcaatatggactactgaatgtgaaaacagagaagctgttacacatatagggagggtatacaaggaaaggttaggacttcctccaaagatagtgattggttatcagtcccacgcagacacagctactaagagcggctccaccactaaaaataggtttgttgtttaagaagacaccttctgagtattctcataggagactgcgtcaagcaatcgagatttgggagctgaaccaaagcctcttcaaaaagcagagtggactgcatttaaatttgatttccatcttaatgttactcagatataagagaagtctcattcgcctttgtcttgtacttctgtgttcattttttttttttttttttggctagagtttccactatcccaatcaaagaattacagtacacatccccagaatccataaatgtgttcctggcccactctgtaatagttcagtagaattaccattaattacatacagattttacctatccacaatagtcagaaaacaacttggcatttctatactttacaggaaaaaaaattctgttgttccattttatgcagaagcatattttgctggtttgaaagattatgatgcatacagttttctagcaattttctttgtttctttttacagcattgtctttgctgtactcttgctgatggctgctagattttaatttatttgtttccctacttgataatattagtgattctgatttcagtttttcatttgttttgcttttgtttttttcctcatgtaacattggtgaaggatccaggaatatgacacaaaggtggaataaacattaattttgtgcattctttggtaattttttttgttttttgtaactacaaagctttgctacaaatttatgcatttcattcaaatcagtgatctatgtttgtgtgatttcctaaacataattgtggattataaaaaatgtaacatcataattacattcctaactagaattagtatgtctgtttttgtatctttatgctgtattttaacactttgtattacttaggttattttgctttggttaaaaatggctcaagtagaaaagcagtcccattcatattaagacagtgtacaaaactgtaaataaaatgtgtacagtgaattgtcttttagacaactagatttgtccttttatttctccatctttatagaaggaatttgtacttcttattgcaaggcagtctctatattatgtcttcttttgtggtgtcttccatgtgaacagcataagtttggagcactagtttgattattatgtttattacaatttttaataaattgaataggtagtatcatatatatggaattaaattgatgtggctatctttgtttttttataaagtaaggcacagtcattcagtcttaggtaaataatgtactctcttaatatgttaatactcatgagaattgggatctgatgcatcaccatttgattggtagcaacagtggttgtaaaacttggttgctgaattgagttgtttctatgttaagtgtcaaaatgatagtgtagggaaagtacaggtggtggggacatatgcattaagaatcttgttagtgttgcaatctaaatagaatggaataaacaggtgttaagacatatttatagtggtaaattgttgtagtatggtattctgtaaacttgaaaacttgatctactctttgtaggtatcatttgaaagcaaacttgaaaatgttttgtacatagtacatacttgtatagtcctgtgagatgaagtatggctatcagaccaaaggataagccaaactgtaggtagcagaatggaaattattattttgagaggaaaatttgtctttgaatggtgattatgacttaatcattttaaaactgataaacttgacaaaaaccctgtatgaaataaacatgaaattaatagc

SEQ ID NO: 335354 - DNA, 2437 bp, Homo sapiens
ttgtcttaagaaattgccacagccaccccaatcttcagcaaccactactctgatcagtcagcagcaaacaagggaagaccctccatcagcaagattaccactctttgtaggctcagatgatcgttagcatttttagcaatagaatttttaattaagatgggcactctggttttttaaaaatgataaaagcaaaacttggcaagcaaacctgcggctgatctccaagtttgatactgttgaagacttttgggctctgtacaaccatatccagttgtctagtaatttaatgcctggctgtgactactcactttttaaggatggtattgagcctatgtgggaagatgagaaaaacaaacggggaggacgatggctaattacattgaacaaacagcagagacgaagtgacctcgatcgcttttggctagagacacttctgtgccttattggagaatcttttgatgactacagtgatgatgtatgtggcgctgttgttaatgttagagctaaaggtgataagatagcaatatggactactgaatgtgaaaacagagaagctgttacacatatagggagggtatacaaggaaaggttaggacttcctccaaagatagtgattggttatcagtcccacgcagacacagctactaagagcggctccaccactaaaaataggtttgttgtttaagaagacaccttctgagtattctcataggagactgcgtcaagcaatcgagatttgggagctgaaccaaagcctcttcaaaaagcagagtggactgcatttaaatttgatttccatcttaatgttactcagatataagagaagtctcattcgcctttgtcttgtacttctgtgttcattttttttttttttttttggctagagtttccactatcccaatcaaagaattacagtacacatccccagaatccataaatgtgttcctggcccactctgtaatagttcagtagaattaccattaattacatacagattttacctatccacaatagtcagaaaacaacttggcatttctatactttacaggaaaaaaaattctgttgttccattttatgcagaagcatattttgctggtttgaaagattatgatgcatacagttttctagcaattttctttgtttctttttacagcattgtctttgctgtactcttgctgatggctgctagattttaatttatttgtttccctacttgataatattagtgattctgatttcagtttttcatttgttttgcttttgtttttttcctcatgtaacattggtgaaggatccaggaatatgacacaaaggtggaataaacattaattttgtgcattctttggtaattttttttgttttttgtaactacaaagctttgctacaaatttatgcatttcattcaaatcagtgatctatgtttgtgtgatttcctaaacataattgtggattataaaaaatgtaacatcataattacattcctaactagaattagtatgtctgtttttgtatctttatgctgtattttaacactttgtattacttaggttattttgctttggttaaaaatggctcaagtagaaaagcagtcccattcatattaagacagtgtacaaaactgtaaataaaatgtgtacagtgaattgtcttttagacaactagatttgtccttttatttctccatctttatagaaggaatttgtacttcttattgcaaggcagtctctatattatgtcttcttttgtggtgtcttccatgtgaacagcataagtttggagcactagtttgattattatgtttattacaatttttaataaattgaataggtagtatcatatatatggaattaaattgatgtggctatctttgtttttttataaagtaaggcacagtcattcagtcttaggtaaataatgtactctcttaatatgttaatactcatgagaattgggatctgatgcatcaccatttgattggtagcaacagtggttgtaaaacttggttgctgaattgagttgtttctatgttaagtgtcaaaatgatagtgtagggaaagtacaggtggtggggacatatgcattaagaatcttgttagtgttgcaatctaaatagaatggaataaacaggtgttaagacatatttatagtggtaaattgttgtagtatggtattctgtaaacttgaaaacttgatctactctttgtaggtatcatttgaaagcaaacttgaaaatgttttgtacatagtacatacttgtatagtcctgtgagatgaagtatggctatcagaccaaaggataagccaaactgtaggtagcagaatggaaattattattttgagaggaaaatttgtctttgaatggtgattatgacttaatcattttaaaactgataaacttgacaaaaaccctgtatgaaataaacatgaaattaatagc

SEQ ID NO: 335355 - DNA, 2595 bp, Homo sapiens
cgtcacgtggccagaagctggccaatccggtttgaatctcatttttttcctcttacccccccttctggagcggttgtgcgatcagatcgatctaagatggcgactgtcgaaccggaaaccacccctactcctaatcccccgactacagaagaggagaaaacggaatctaatcaggaggttgctaacccagaacactatattaaacatcccctacagaacagatgggcactctggttttttaaaaatgataaaagcaaaacttggcaagcaaacctgcggctgatctccaagtttgatactgttgaagacttttgggctctgtacaaccatatccagttgtctagtaatttaatgcctggctgtgactactcactttttaaggatggtattgagcctatgtgggaagatgagaaaaacaaacggggaggacgatggctaattacattgaacaaacagcagagacgaagtgacctcgatcgcttttggctagagacaagatgggatcttgctatgttgcccaggttggtctcaaacttctggcctcaagtgatcctcccacttcagcctcccaaagtgctggaattacagcttctgtgccttattggagaatcttttgatgactacagtgatgatgtatgtggcgctgttgttaatgttagagctaaaggtgataagatagcaatatggactactgaatgtgaaaacagagaagctgttacacatatagggagggtatacaaggaaaggttaggacttcctccaaagatagtgattggttatcagtcccacgcagacacagctactaagagcggctccaccactaaaaataggtttgttgtttaagaagacaccttctgagtattctcataggagactgcgtcaagcaatcgagatttgggagctgaaccaaagcctcttcaaaaagcagagtggactgcatttaaatttgatttccatcttaatgttactcagatataagagaagtctcattcgcctttgtcttgtacttctgtgttcattttttttttttttttttggctagagtttccactatcccaatcaaagaattacagtacacatccccagaatccataaatgtgttcctggcccactctgtaatagttcagtagaattaccattaattacatacagattttacctatccacaatagtcagaaaacaacttggcatttctatactttacaggaaaaaaaattctgttgttccattttatgcagaagcatattttgctggtttgaaagattatgatgcatacagttttctagcaattttctttgtttctttttacagcattgtctttgctgtactcttgctgatggctgctagattttaatttatttgtttccctacttgataatattagtgattctgatttcagtttttcatttgttttgcttttgtttttttcctcatgtaacattggtgaaggatccaggaatatgacacaaaggtggaataaacattaattttgtgcattctttggtaattttttttgttttttgtaactacaaagctttgctacaaatttatgcatttcattcaaatcagtgatctatgtttgtgtgatttcctaaacataattgtggattataaaaaatgtaacatcataattacattcctaactagaattagtatgtctgtttttgtatctttatgctgtattttaacactttgtattacttaggttattttgctttggttaaaaatggctcaagtagaaaagcagtcccattcatattaagacagtgtacaaaactgtaaataaaatgtgtacagtgaattgtcttttagacaactagatttgtccttttatttctccatctttatagaaggaatttgtacttcttattgcaaggcagtctctatattatgtcttcttttgtggtgtcttccatgtgaacagcataagtttggagcactagtttgattattatgtttattacaatttttaataaattgaataggtagtatcatatatatggaattaaattgatgtggctatctttgtttttttataaagtaaggcacagtcattcagtcttaggtaaataatgtactctcttaatatgttaatactcatgagaattgggatctgatgcatcaccatttgattggtagcaacagtggttgtaaaacttggttgctgaattgagttgtttctatgttaagtgtcaaaatgatagtgtagggaaagtacaggtggtggggacatatgcattaagaatcttgttagtgttgcaatctaaatagaatggaataaacaggtgttaagacatatttatagtggtaaattgttgtagtatggtattctgtaaacttgaaaacttgatctactctttgtaggtatcatttgaaagcaaacttgaaaatgttttgtacatagtacatacttgtatagtcctgtgagatgaagtatggctatcagaccaaaggataagccaaactgtaggtagcagaatggaaattattattttgagaggaaaatttgtctttgaatggtgattatgacttaatcattttaaaactgataaacttgacaaaaaccctgtatgaaataaacatgaaattaatagc

SEQ ID NO: 335356 - DNA, 2284 bp, Homo sapiens
  misc_feature (34)..(34): n is a, c, g, or t
gagcagatcgcatctaggatggcgatggtcgaancggaaaccacccctactcctaatcccccgactacagaagaggagaaaacggaatctaatcaggaggttgctaacccagaacactatattaaacatcccctacagaacagatgggcactctggttttttaaaaatgataaaagcaaaacttggcaagcaaacctgcggctgatctccaagtttgatactgttgaagacttttgggctctgtacaaccatatccagttgtctagtaatttaatgcctggctgtgactactcactttttaaggatggtattgagcctatgtgggaagatgagaaaaacaaacggggaggacgatggctaattacattgaacaaacagcagagacgaagtgacctcgatcgcttttggctagagacagagggtatacaaggaaaggttaggacttcctccaaagatagtgattggttatcagtcccacgcagacacagctactaagagcggctccaccactaaaaataggtttgttgtttaagaagacaccttctgagtattctcataggagactgcgtcaagcaatcgagatttgggagctgaaccaaagcctcttcaaaaagcagagtggactgcatttaaatttgatttccatcttaatgttactcagatataagagaagtctcattcgcctttgtcttgtacttctgtgttcattttttttttttttttttggctagagtttccactatcccaatcaaagaattacagtacacatccccagaatccataaatgtgttcctggcccactctgtaatagttcagtagaattaccattaattacatacagattttacctatccacaatagtcagaaaacaacttggcatttctatactttacaggaaaaaaaattctgttgttccattttatgcagaagcatattttgctggtttgaaagattatgatgcatacagttttctagcaattttctttgtttctttttacagcattgtctttgctgtactcttgctgatggctgctagattttaatttatttgtttccctacttgataatattagtgattctgatttcagtttttcatttgttttgcttttgtttttttcctcatgtaacattggtgaaggatccaggaatatgacacaaaggtggaataaacattaattttgtgcattctttggtaattttttttgttttttgtaactacaaagctttgctacaaatttatgcatttcattcaaatcagtgatctatgtttgtgtgatttcctaaacataattgtggattataaaaaatgtaacatcataattacattcctaactagaattagtatgtctgtttttgtatctttatgctgtattttaacactttgtattacttaggttattttgctttggttaaaaatggctcaagtagaaaagcagtcccattcatattaagacagtgtacaaaactgtaaataaaatgtgtacagtgaattgtcttttagacaactagatttgtccttttatttctccatctttatagaaggaatttgtacttcttattgcaaggcagtctctatattatgtcttcttttgtggtgtcttccatgtgaacagcataagtttggagcactagtttgattattatgtttattacaatttttaataaattgaataggtagtatcatatatatggaattaaattgatgtggctatctttgtttttttataaagtaaggcacagtcattcagtcttaggtaaataatgtactctcttaatatgttaatactcatgagaattgggatctgatgcatcaccatttgattggtagcaacagtggttgtaaaacttggttgctgaattgagttgtttctatgttaagtgtcaaaatgatagtgtagggaaagtacaggtggtggggacatatgcattaagaatcttgttagtgttgcaatctaaatagaatggaataaacaggtgttaagacatatttatagtggtaaattgttgtagtatggtattctgtaaacttgaaaacttgatctactctttgtaggtatcatttgaaagcaaacttgaaaatgttttgtacatagtacatacttgtatagtcctgtgagatgaagtatggctatcagaccaaaggataagccaaactgtaggtagcagaatggaaattattattttgagaggaaaatttgtctttgaatggtgattatgacttaatcattttaaaactgataaacttgacaaaaaccctgtatgaaataaacatgaaattaatagc

SEQ ID NO: 335357 - DNA, 2050 bp, Homo sapiens
gcgccgcgcgcccgcccggggccgcagacagcgcgcagcgcagcccagccgagcgtcgcggggccgccccccgccctgccggccgcctcgccgagcctcctggggcgcccgggcccgcgacccccgcacccagctccgcaggaccggcgggcgcgcgcgggctctggaggccacgggcatgatgcttcgggtcctggtgggggctgtcctccctgccatgctactggctgccccaccacccatcaacaagctggcactgttcccagataagagtgcctggtgcgaagccaagaacatcacccagatcgtgggccacagcggctgtgaggccaagtccatccagaacagggcgtgcctaggacagtgcttcagctacagcgtccccaacaccttcccacagtccacagagtccctggttcactgtgactcctgcatgccagcccagtccatgtgggagattgtgacgctggagtgcccgggccacgaggaggtgcccagggtggacaagctggtggagaagatcctgcactgtagctgccaggcctgcggcaaggagcctagtcacgaggggctgagcgtctatgtgcagggcgaggacgggccgggatcccagcccggcacccaccctcacccccatccccacccccatcctggcgggcagacccctgagcccgaggacccccctggggccccccacacagaggaagagggggctgaggactgaggcccccccaactcttcctcccctctcatccccctgtggaatgttgggtctcactctctggggaagtcaggggagaagctgaagcccccctttggcactggatggacttggcttcagactcggacttgaatgctgcccggttgccatggagatctgaaggggcggggttagagccaagctgcacaatttaatatattcaagagtggggggaggaagcagaggtcttcagggctctttttttggggggggggtggtctcttcctgtctggcttctagagatgtgcctgtgggagggggaggaagttggctgagccattgagtgctgggggaggccatccaagatggcatgaatcgggctaaggtccctgggggtgcagatggtactgctgaggtcccgggcttagtgtgagcatcttgccagcctcaggcttgagggagggctgggctagaaagaccactggcagaaacaggaggctccggccccacaggtttccccaaggcctctcaccccacttcccatctccagggaagcgtcgccccagtggcactgaagtggccctccctcagcggaggggtttgggagtcaggcctgggcaggaccctgctgactcgtggcgcgggagctgggagccaggctctccgggcctttctctggcttccttggcttgcctggtgggggaaggggaggaggggaagaaggaaagggaagagtcttccaaggccagaaggagggggacaaccccccaagaccatccctgaagacgagcatccccctcctctccctgttagaaatgttagtgccccgcactgtgccccaagttctaggccccccagaaagctgtcagagccggccgccttctcccctctcccagggatgctctttgtaaatatcggatgggtgtgggagtgaggggttacctccctcgccccaaggttccagaggccctaggcgggatgggctcgctgaacctcgaggaactccaggacgaggaggacatgggacttgcgtggacagtcagggttcacttgggctctctctagctccccaattctgcctgcctcctccctcccagctgcactttaaccctagaaggtggggacctggggggagggacagggcaggcgggcccatgaagaaagcccctcgttgcccagcactgtctgcgtctgctcttctgtgcccagggtggctgccagcccactgcctcctgcctggggtggcctggccctcctggctgttgcgacgcgggcttctggagcttgtcaccattggacagtctccctgatggaccctcagtcttctcatgaataaattccttcaacgcc

SEQ ID NO: 335358 - DNA, 2086 bp, Homo sapiens
  misc_feature (2069)..(2069): n is a, c, g, or t
  misc_feature (2072)..(2072): n is a, c, g, or t
  misc_feature (2083)..(2083): n is a, c, g, or t
  misc_feature (2085)..(2085): n is a, c, g, or t
ggagggtgcgagtaggctggagtacaccagggagttcccagcaggccactaggagccacccaggatgcccggcaacctcatgagtcagacaagcagggctgtgtctatctggaagtttccagccaagctaggtaaaacacatggacacagggctctggaggccacgggcatgatgcttcgggtcctggtgggggctgtcctccctgccatgctactggctgccccaccacccatcaacaagctggcactgttcccagataagagtgcctggtgcgaagccaagaacatcacccagatcgtgggccacagcggctgtgaggccaagtccatccagaacagggcgtgcctaggacagtgcttcagctacagcgtccccaacaccttcccacagtccacagagtccctggttcactgtgactcctgcatgccagcccagtccatgtgggagattgtgacgctggagtgcccgggccacgaggaggtgcccagggtggacaagctggtggagaagatcctgcactgtagctgccaggcctgcggcaaggagcctagtcacgaggggctgagcgtctatgtgcagggcgaggacgggccgggatcccagcccggcacccaccctcacccccatccccacccccatcctggcgggcagacccctgagcccgaggacccccctggggccccccacacagaggaagagggggctgaggactgaggcccccccaactcttcctcccctctcatccccctgtggaatgttgggtctcactctctggggaagtcaggggagaagctgaagcccccctttggcactggatggacttggcttcagactcggacttgaatgctgcccggttgccatggagatctgaaggggcggggttagagccaagctgcacaatttaatatattcaagagtggggggaggaagcagaggtcttcagggctctttttttggggggggggtggtctcttcctgtctggcttctagagatgtgcctgtgggagggggaggaagttggctgagccattgagtgctgggggaggccatccaagatggcatgaatcgggctaaggtccctgggggtgcagatggtactgctgaggtcccgggcttagtgtgagcatcttgccagcctcaggcttgagggagggctgggctagaaagaccactggcagaaacaggaggctccggccccacaggtttccccaaggcctctcaccccacttcccatctccagggaagcgtcgccccagtggcactgaagtggccctccctcagcggaggggtttgggagtcaggcctgggcaggaccctgctgactcgtggcgcgggagctgggagccaggctctccgggcctttctctggcttccttggcttgcctggtgggggaaggggaggaggggaagaaggaaagggaagagtcttccaaggccagaaggagggggacaaccccccaagaccatccctgaagacgagcatccccctcctctccctgttagaaatgttagtgccccgcactgtgccccaagttctaggccccccagaaagctgtcagagccggccgccttctcccctctcccagggatgctctttgtaaatatcggatgggtgtgggagtgaggggttacctccctcgccccaaggttccagaggccctaggcgggatgggctcgctgaacctcgaggaactccaggacgaggaggacatgggacttgcgtggacagtcagggttcacttgggctctctctagctccccaattctgcctgcctcctccctcccagctgcactttaaccctagaaggtggggacctggggggagggacagggcaggcgggcccatgaagaaagcccctcgttgcccagcactgtctgcgtctgctcttctgtgcccagggtggctgccagcccactgcctcctgcctggggtggcctggccctcctggctgttgcgacgcgggcttctggagcttgtcaccattggacagtctccctgatggaccctcagtcttctcatgaataaattccttcaacgccaaaaaaaaaaaacctgcagcccgggggnccnctagttttagngng

SEQ ID NO: 335359 - DNA, 2034 bp, Homo sapiens
  misc_feature (2017)..(2017): n is a, c, g, or t
  misc_feature (2020)..(2020): n is a, c, g, or t
  misc_feature (2031)..(2031): n is a, c, g, or t
  misc_feature (2033)..(2033): n is a, c, g, or t
gcgccgcgcgcccgcccggggccgcagacagcgcgcagcgcagcccagccgagcgtcgcggggccgccccccgccctgccggccgcctcgccgagcctcctggggcgcccgggcccgcgacccccgcacccagctccgcaggaccggcgggcgcgcgcgggctctggaggccacgggcatgatgcttcgggtcctggtgggggctgtcctccctgccatgctactggctgccccaccacccatcaacaagctggcactgttcccagataagagtgcctggtgcgaagccaagaacatcacccagatcgtgggccacagcggctgtgaggccaagtccatccagaacagggcgtgcctaggacagtgcttcagctacagcgtccccaacaccttcccacagtccacagagtccctggttcactgtgactcctgcatgccagcccagtccatgtgggagattgtgacgctggagtgcccgggccacgaggaggtgcccagggtggacaagctggtggagaagatcctgcactgtagctgccaggcctgcggcaaggagcctagtcacgaggggctgagcgtctatgtgcagggcgaggacgggccgggatcccagcccggcacccaccctcacccccatccccacccccatcctggcgggcagacccctgagcccgaggacccccctggggccccccacacagaggaagagggggctgaggactgaggcccccccaactcttcctcccctctcatccccctgtggaatgttgggtctcactctctggggaagtcaggggagaagctgaagcccccctttggcactggatggacttggcttcagactcggacttgaatgctgcccggttgccatggagatctgaaggggcggggttagagccaagctgcacaatttaatatattcaagagtggggggaggaccccctggggccccccacacagaggaagttggctgagccattgagtgctgggggaggccatccaagatggcatgaatcgggctaaggtccctgggggtgcagatggtactgctgaggtcccgggcttagtgtgagcatcttgccagcctcaggcttgagggagggctgggctagaaagaccactggcagaaacaggaggctccggccccacaggtttccccaaggcctctcaccccacttcccatctccagggaagcgtcgccccagtggcactgaagtggccctccctcagcggaggggtttgggagtcaggcctgggcaggaccctgctgactcgtggcgcgggagctgggagccaggctctccgggcctttctctggcttccttggcttgcctggtgggggaaggggaggaggggaagaaggaaagggaagagtcttccaaggccagaaggagggggacaaccccccaagaccatccctgaagacgagcatccccctcctctccctgttagaaatgttagtgccccgcactgtgccccaagttctaggccccccagaaagctgtcagagccggccgccttctcccctctcccagggatgctctttgtaaatatcggatgggtgtgggagtgaggggttacctccctcgccccaaggttccagaggccctaggcgggatgggctcgctgaacctcgaggaactccaggacgaggaggacatgggacttgcgtggacagtcagggttcacttgggctctctctagctccccaattctgcctgcctcctccctcccagctgcactttaaccctagaaggtggggacctggggggagggacagggcaggcgggcccatgaagaaagcccctcgttgcccagcactgtctgcgtctgctcttctgtgcccagggtggctgccagcccactgcctcctgcctggggtggcctggccctcctggctgttgcgacgcgggcttctggagcttgtcaccattggacagtctccctgatggaccctcagtcttctcatgaataaattccttcaacgccaaaaaaaaaaaacctgcagcccgggggnccnctagttttagngng

SEQ ID NO: 335360 - DNA, 2245 bp, Homo sapiens
  misc_feature (2228)..(2228): n is a, c, g, or t
  misc_feature (2231)..(2231): n is a, c, g, or t
  misc_feature (2242)..(2242): n is a, c, g, or t
  misc_feature (2244)..(2244): n is a, c, g, or t
gcgccgcgcgcccgcccggggccgcagacagcgcgcagcgcagcccagccgagcgtcgcggggccgccccccgccctgccggccgcctcgccgagcctcctggggcgcccgggcccgcgacccccgcacccagctccgcaggaccggcgggcgcgcgcgggctctggaggccacgggcatgatgcttcgggtcctggtgggggctgtcctccctgccatgctactggctgccccaccacccatcaacaagctggcactgttcccagataagagtgcctggtgcgaagccaagaacatcacccagatcgtgggccacagcggctgtgaggccaagtccatccagaacagggcgtgcctaggacagtgcttcagctacagcgtccccaacaccttcccacagtccacagagtccctggttcactgtgactcctgcatgccagcccagtccatgtgggagattgtgacgctggagtgcccgggccacgaggaggtgcccagggtggacaagctggtggagaagatcctgcactgtagctgccaggcctgcggcaaggagcctagtcacgaggggctgagcgtctatgtgcagggcgaggacgggccgggatcccagcccggcacccaccctcacccccatccccacccccatcctggcgggcagacccctgagcccgaggacccccctggggccccccacacagaggaagagggggctgaggactgaggcccccccaactcttcctcccctctcatccccctgtggaatgttgggtctcactctctggggaagtcaggggagaagctgaagcccccctttggcactggatggacttggcttcagactcggacttgaatgctgcccggttgccatggagatctgaaggggcggggttagagccaagctgcacaatttaatatattcaagagtggggggaggaagcagaggtcttcagggctctttttttggggggggggtggtctcttcctgtctggcttctagagatgtgcctgtgggagggggaggaagttggctgagccattgagtgctgggggaggccatccaagatggcatgaatcgggctaaggtccctgggggtgcagatggtactgctgaggtcccgggcttagtgtgagcatcttgccagcctcaggcttgagggagggctgggctagaaagaccactggcagaaacaggaggctccggccccacaggtttccccaaggcctctcaccccacttcccatctccagggaactgttagaaatgttagtgccccgcatgttgccccaagttctaggccccccagaaagctgtcagagccggccgccttctcccctctcccagggatgctctttgtaaatatcggatgggtgtgggagtgaggggttacctccctcgccccaagcttccagaggccctaggcgggatgggctcgctgaacctcgaggaactccaggacgaggaggacatgggacctgctgactcgtggcgcgggagctgggagccaggctctccgggcctttctctggcttccttggcttgcctggtgggggaaggggaggaggggaagaaggaaagggaagagtcttccaaggccagaaggagggggacaaccccccaagaccatccctgaagacgagcatccccctcctctccctgttagaaatgttagtgccccgcactgtgccccaagttctaggccccccagaaagctgtcagagccggccgccttctcccctctcccagggatgctctttgtaaatatcggatgggtgtgggagtgaggggttacctccctcgccccaaggttccagaggccctaggcgggatgggctcgctgaacctcgaggaactccaggacgaggaggacatgggacttgcgtggacagtcagggttcacttgggctctctctagctccccaattctgcctgcctcctccctcccagctgcactttaaccctagaaggtggggacctggggggagggacagggcaggcgggcccatgaagaaagcccctcgttgcccagcactgtctgcgtctgctcttctgtgcccagggtggctgccagcccactgcctcctgcctggggtggcctggccctcctggctgttgcgacgcgggcttctggagcttgtcaccattggacagtctccctgatggaccctcagtcttctcatgaataaattccttcaacgccaaaaaaaaaaaacctgcagcccgggggnccnctagttttagngng

SEQ ID NO: 335361 - DNA, 2412 bp, Homo sapiens
gcgccgcgcgcccgcccggggccgcagacagcgcgcagcgcagcccagccgagcgtcgcggggccgccccccgccctgccggccgcctcgccgagcctcctggggcgcccgggcccgcgacccccgcacccagctccgcaggaccggcgggcgcgcgcgggctctggaggccacgggcatgatgcttcgggtcctggtgggggctgtcctccctgccatgctactggctgccccaccacccatcaacaagctggcactgttcccagataagagtgcctggtgcgaagccaagaacatcacccagatcgtgggccacagcggctgtgaggccaagtccatccagaacagggcgtgcctaggacagtgcttcagctacagcgtccccaacaccttcccacagtccacagagtccctggttcactgtgactcctgcatgccagcccagtccatgtgggagattgtgacgctggagtgcccgggccacgaggaggtgcccagggtggacaagctggtggagaagatcctgcactgtagctgccaggcctgcggcaaggagcctagtcacgaggggctgagcgtctatgtgcagggcgaggacgggccgggatcccagcccggcacccaccctcacccccatccccacccccatcctggcgggcagacccctgagcccgaggacccccctggggccccccacacagaggaagagggggctgaggactgaggcccccccaactcttcctcccctctcatccccctgtggaatgttgggtctcactctctggggaagtcaggggagaagctgaagcccccctttggcactggatggacttggcttcagactcggacttgaatgctgcccggttgccatggagatctgaaggggcggggttagagccaagctgcacaatttaatatattcaagagtggggggaggaagcagaggtcttcagggctctttttttggggggggggtggtctcttcctgtctggcttctagagatgtgcctgtgggagggggaggaagttggctgagccattgagtgctgggggaggccatccaagatggcatgaatcgggctaaggtccctgggggtgcagatggtactgctgaggtcccgggcttagtgtgagcatcttgccagcctcaggcttgagggagggctgggctagaaagaccactggcagaaacaggaggctccggccccacaggtttccccaaggcctctcaccccacttcccatctccagggaagcgtcgccccagtggcactgaagtggccctccctcagcggaggggtttgggagtcaggcctgggcaggaccctgctgactcgtggcgcgggagctgggagccaggctctccgggcctttctctggcttccttggcttgcctggtgggggaaggggaggaggggaagaaggaaagggaagagtcttccaaggccagaaggagggggacaaccccccaagaccatccctgaagacgagcatccccctcctctccctgttagaaatgttagtgccccgcactgtgccccaagttctaggccccccagaaagctgtcagagccggccgccttctcccctctcccagggatgctctttgtaaatatcggatgggtgtgggagtgaggggttacctccctcgccccaaggttccagaggccctaggcgggatgggctcgctgaacctcgaggaactccaggacgaggaggacatgggacttgcgtggacagtcagggttcacttgggctctctctagctccccaattctgcctgcctcctccctcccagctgcactttaaccctagaaggtggggacctggggggagggacagggcaggcgggcccatgaagaaagcccctcgttgcccagcactgtctgcgtctgctcttctgtgcccagggtggctgccagcccactgcctcctgcctggggtggcctggccctcctggctgttgcgacgcgggcttctggagcttgtcaccattggacagtctccctgatggaccctcagtcttctcatgaataaattccttcaacgccaaaagaaaacacaaaggagagaaaagagagagagacagacaaagcacaacgagagaaagaagggagaggagaagagcaaagaaaagaggccaggaagcaaaggacgaacaacacagaagggggggcgccacatatggaaaaaccccaccaagggcggcaccaaaaacaagccgcacaccaagtaagtggagaaccaaagagggcggccacacaaaaagagagacagcgctcgatcaaacaaacacgacaagaacgggagcacgcgccgcgcaaaacagaaggggtacgagagcgggagggacaacaaacagacagagcgagcgagcaacggtgcgagagagaaaccacaaaaaaagagaggg

SEQ ID NO: 335362 - DNA, 1468 bp, Homo sapiens
  misc_feature (1451)..(1451): n is a, c, g, or t
  misc_feature (1454)..(1454): n is a, c, g, or t
  misc_feature (1465)..(1465): n is a, c, g, or t
  misc_feature (1467)..(1467): n is a, c, g, or t
gcgccgcgcgcccgcccggggccgcagacagcgcgcagcgcagcccagccgagcgtcgcggggccgccccccgccctgccggccgcctcgccgagcctcctggggcgcccgggcccgcgacccccgcacccagctccgcaggaccggcgggcgcgcgcgggctctggaggccacgggcatgatgcttcgggtcctggtgggggctgtcctccctgccatgctactggctgccccaccacccatcaacaagctggcactgttcccagataagagtgcctggtgcgaagccaagaacatcacccagatcgtgggccacagcggctgtgaggccaagtccatccagaacagggcgtgcctaggacagtgcttcagctacagcgtccccaacaccttcccacagtccacagagtccctggttcactgtgactcctgcatgccagcccagtccatgtgggagattccctgggggtgcagatggtactgctgaggtcccgggcttagtgtgagcatcttgccagcctcaggcttgagggagggctgggctagaaagaccactggcagaaacaggaggctccggccccacaggtttccccaaggcctctcaccccacttcccatctccagggaagcgtcgccccagtggcactgaagtggccctccctcagcggaggggtttgggagtcaggcctgggcaggaccctgctgactcgtggcgcgggagctgggagccaggctctccgggcctttctctggcttccttggcttgcctggtgggggaaggggaggaggggaagaaggaaagggaagagtcttccaaggccagaaggagggggacaaccccccaagaccatccctgaagacgagcatccccctcctctccctgttagaaatgttagtgccccgcactgtgccccaagttctaggccccccagaaagctgtcagagccggccgccttctcccctctcccagggatgctctttgtaaatatcggatgggtgtgggagtgaggggttacctccctcgccccaaggttccagaggccctaggcgggatgggctcgctgaacctcgaggaactccaggacgaggaggacatgggacttgcgtggacagtcagggttcacttgggctctctctagctccccaattctgcctgcctcctccctcccagctgcactttaaccctagaaggtggggacctggggggagggacagggcaggcgggcccatgaagaaagcccctcgttgcccagcactgtctgcgtctgctcttctgtgcccagggtggctgccagcccactgcctcctgcctggggtggcctggccctcctggctgttgcgacgcgggcttctggagcttgtcaccattggacagtctccctgatggaccctcagtcttctcatgaataaattccttcaacgccaaaaaaaaaaaacctgcagcccgggggnccnctagttttagngng

SEQ ID NO: 335363 - DNA, 1800 bp, Homo sapiens
  misc_feature (1783)..(1783): n is a, c, g, or t
  misc_feature (1786)..(1786): n is a, c, g, or t
  misc_feature (1797)..(1797): n is a, c, g, or t
  misc_feature (1799)..(1799): n is a, c, g, or t
gcgccgcgcgcccgcccggggccgcagacagcgcgcagcgcagcccagccgagcgtcgcggggccgccccccgccctgccggccgcctcgccgagcctcctggggcgcccgggcccgcgacccccgcacccagctccgcaggaccggcgggcgcgcgcgggctctggaggccacgggcatgatgcttcgggtcctggtgggggctgtcctccctgccatgctactggctgccccaccacccatcaacaagctggcactgttcccagataagagtgcctggtgcgaagccaagaacatcacccagatcgtgggccacagcggctgtgaggccaagtccatccagaacagggcgtgcctaggacagtgcttcagctacagcgtccccaacaccttcccacagtccacagagtccctggttcactgtgactcctgcatgccagcccagtccatgtgggagattgtgacgctggagtgcccgggccacgaggaggtgcccagggtggacaagctggtggagaagatcctgcactgtagctgccaggcctgcggcaaggagcctagtcacgaggggctgagcgtctatgtgcagggcgaggacgggccgggatcccagcccggcacccaccctcacccccatccccacccccatcctggcgggcagacccctgagcccgaggacccccctggggccccccacacagaggaagagggggctgaggactgaggcccccccaactcttcctcccctctcatccccctgtggaatgttgggtctcactctctggggaagtcaggggagaagctgaagcccccctttggcactggatggacttggcttcagactcggacttgaatgctgcccggttgccatggagatctgaaggggcggggttagagccaagctgcacaatttaatatattcaagagtggggggaggaagcagaggtcttcagggctctttttttggggggggggtggtctcttcctgtctggcttctagagatgtgcctgtgggagggggaggaagttggctgagccattgagtgctgggggaggccatccaagatggcatgaatcgggctaaggtccctgggggtgcagatggtactgctgaggtcccgggcttagtgtgagcatcttgccagcctcaggcttgagggagggctgggctagaaagaccatccctgaagacgagcatccccctcctctccctgttagaaatgttagtgccccgcactgtgccccaagttctaggccccccagaaagctgtcagagccggccgccttctcccctctcccagggatgctctttgtaaatatcggatgggtgtgggagtgaggggttacctccctcgccccaaggttccagaggccctaggcgggatgggctcgctgaacctcgaggaactccaggacgaggaggacatgggacttgcgtggacagtcagggttcacttgggctctctctagctccccaattctgcctgcctcctccctcccagctgcactttaaccctagaaggtggggacctggggggagggacagggcaggcgggcccatgaagaaagcccctcgttgcccagcactgtctgcgtctgctcttctgtgcccagggtggctgccagcccactgcctcctgcctggggtggcctggccctcctggctgttgcgacgcgggcttctggagcttgtcaccattggacagtctccctgatggaccctcagtcttctcatgaataaattccttcaacgccaaaaaaaaaaaacctgcagcccgggggnccnctagttttagngng

SEQ ID NO: 335364 - DNA, 927 bp, Homo sapiens
  misc_feature (910)..(910): n is a, c, g, or t
  misc_feature (913)..(913): n is a, c, g, or t
  misc_feature (924)..(924): n is a, c, g, or t
  misc_feature (926)..(926): n is a, c, g, or t
cggtccacgagttcggagttgagactgcagtaaaccgagattgtgccactgcactcagcgtgggctggaccagtgagaccctgtctcagctcagtgagaccagtaagaccctgtctcaatcaatcaatcaatgcagtgagttagagagcatctattgagcatctacggtttgcgggtcacttccagcaccattttgagatgcggaaactggctgaagttgggtgattgattgaccaagttcctttgggaaattaataaagtcacactgaagcaataaactaccctcctcccaaacacccccaagaccatccctgaagacgagcatccccctcctctccctgttagaaatgttagtgccccgcactgtgccccaagttctaggccccccagaaagctgtcagagccggccgccttctcccctctcccagggatgctctttgtaaatatcggatgggtgtgggagtgaggggttacctccctcgccccaaggttccagaggccctaggcgggatgggctcgctgaacctcgaggaactccaggacgaggaggacatgggacttgcgtggacagtcagggttcacttgggctctctctagctccccaattctgcctgcctcctccctcccagctgcactttaaccctagaaggtggggacctggggggagggacagggcaggcgggcccatgaagaaagcccctcgttgcccagcactgtctgcgtctgctcttctgtgcccagggtggctgccagcccactgcctcctgcctggggtggcctggccctcctggctgttgcgacgcgggcttctggagcttgtcaccattggacagtctccctgatggaccctcagtcttctcatgaataaattccttcaacgccaaaaaaaaaaaacctgcagcccgggggnccnctagttttagngng

SEQ ID NO: 335365 - DNA, 1654 bp, Homo sapiens
gcgccgcgcgcccgcccggggccgcagacagcgcgcagcgcagcccagccgagcgtcgcggggccgccccccgccctgccggccgcctcgccgagcctcctggggcgcccgggcccgcgacccccgcacccagctccgcaggaccggcgggcgcgcgcgggctctggaggccacgggcatgatgcttcgggtcctggtgggggctgtcctccctgccatgctactggctgccccaccacccatcaacaagctggcactgttcccagataagagtgcctggtgcgaagccaagaacatcacccagatcgtgggccacagcggctgtgaggccaagtccatccagaacagggcgtgcctaggacagtgcttcagctacagcgtccccaacaccttcccacagtccacagagtccctggttcactgtgactcctgcatgccagcccagtccatgtgggagattgtgacgctggagtgcccgggccacgaggaggtgcccagggtggacaagctggtggagaagatcctgcactgtagctgccaggcctgcggcaaggagcctagtcacgaggggctgagcgtctatgtgcagggcgaggacgggccgggatcccagcccggcacccaccctcacccccatccccacccccatcctggcgggcagacccctgagcccgaggacccccctggggccccccacacagaggaagagggggctgaggactgaggcccccccaactcttcctcccctctcatccccctgtggaatgttgggtctcactctctggggaagtcaggggagaagctgaagcccccctttggcactggatggacttggcttcagactcggacttgaatgctgcccggttgccatggagatctgaaggggcggggttagagccaagctgcacaatttaatatattcaagagtggggggaggaagcagaggtcttcagggctctttttttggggggggggtggtctcttcctgtctggcttctagagatgtgcctgtgggagggggaggaagttggctgagccattgagtgctgggggaggccatccaagatggcatgaatcgggctaaggtccctgggggtgcagatggtactgctgaggtcccgggcttagtgtgagcatcttgccagcctcaggcttgagggagggctgggctagaaagaccactggcagaaacaggaggctccggccccacaggtttccccaaggcctctcaccccacttcccatctccagggaagcgtcgccccagtggcactgaagtggccctccctcagcggaggggtttgggagtcaggcctgggcaggaccctgctgactcgtggcgcgggagctgggagccaggctctccgggcctttctctggcttccttggcttgcctggtgggggaaggggaggaggggaagaaggaaagggaagagtcttccaaggccagaaggagggggacaaccccccaagaccatccctgaagacgagcatccccctcctctccctgttagaaatgttagtgccccgcactgtgccccaagttctaggccccccagaaagctgtcagagccggccgcgctagggtcctggaactagggcgaagtcacacattccatgtcaggacaggacccagtggaagactggctcgcgag

SEQ ID NO: 335366 - DNA, 1393 bp, Homo sapiens
gcgccgcgcgcccgcccggggccgcagacagcgcgcagcgcagcccagccgagcgtcgcggggccgccccccgccctgccggccgcctcgccgagcctcctggggcgcccgggcccgcgacccccgcacccagctccgcaggaccggcgggcgcgcgcgggctctggaggccacgggcatgatgcttcgggtcctggtgggggctgtcctccctgccatgctactggctgccccaccacccatcaacaagctggcactgttcccagataagagtgcctggtgcgaagccaagaacatcacccagatcgtgggccacagcggctgtgaggccaagtccatccagaacagggcgtgcctaggacagtgcttcagctacagcgtccccaacaccttcccacagtccacagagtccctggttcactgtgactcctgcatgccagcccagtccatgtgggagattgtgacgctggagtgcccgggccacgaggaggtgcccagggtggacaagctggtggagaagatcctgcactgtagctgccaggcctgcggcaaggagcctagtcacgaggggctgagcgtctatgtgcagggcgaggacgggccgggatcccagcccggcacccaccctcacccccatccccacccccatcctggcgggcagacccctgagcccgaggacccccctggggccccccacacagaggaagagggggctgaggactgaggcccccccaactcttcctcccctctcatccccctgtggaatgttgggtctcactctctggggaagtcaggggagaagctgaagcccccctttggcactggatggacttggcttcagactcggacttgaatgctgcccggttgccatggagatctgaaggggcggggttagagccaagctgcacaatttaatatattcaagagtggggggaggaagcagaggtcttcagggctctttttttggggggggggtggtctcttcctgtctggcttctagagatgtgcctgtgggagggggaggaagttggctgagccattgagtgctgggggaggccatccaagatggcatgaatcgggctaaggtccctgggggtgcagatggtactgctgaggtcccgggcttagtgtgagcatcttgccagcctcaggcttgagggagggctgggctagaaagaccactggcagaaacaggaggctccggccccacaggtttccccaaggcctctcaccccacttcccatctccagggaatggctgccagcccactgcctcctgcctggggtggcctggccctcctggctgttgcgacgcgggcttctggagcttgtcaccattggacagtctccctgatggaccctcagtcttctcatgaataaattccttcaacgcc

SEQ ID NO: 335367 - DNA, 662 bp, Homo sapiens
gcgccgcgcgcccgcccggggccgcagacagcgcgcagcgcagcccagccgagcgtcgcggggccgccccccgccctgccggccgcctcgccgagcctcctggggcgcccgggcccgcgacccccgcacccagctccgcaggaccggcgggcgcgcgcgggctctggaggccacgggcatgatgcttcgggtcctggtgggggctgtcctccctgccatgctactggctgccccaccacccatcaacaagctggcactgttcccagataagagtgcctggtgcgaagccaagaacatcacccagatcgtgggccacagcggctgtgaggccaagtccatccagaacagggcgtgcctaggacagtgcttcagctacagcgtccccaacaccttcccacagtccacagagtccctggttcactgtgactcctgcatgccagcccagtccatgtgggagattgtgacgctggagtgcccgggccacgaggaggtgcccagggtggacaagctggtggagaagatctggctgccagcccactgcctcctgcctggggtggcctggccctcctggctgttgcgacgcgggcttctggagcttgtcaccattggacagtctccctgatggaccctcagtcttctcatgaataaattccttcaacgcc

SEQ ID NO: 335368 - DNA, 2095 bp, Homo sapiens
  misc_feature (2078)..(2078): n is a, c, g, or t
  misc_feature (2081)..(2081): n is a, c, g, or t
  misc_feature (2092)..(2092): n is a, c, g, or t
  misc_feature (2094)..(2094): n is a, c, g, or t
gcgccgcgcgcccgcccggggccgcagacagcgcgcagcgcagcccagccgagcgtcgcggggccgccccccgccctgccggccgcctcgccgagcctcctggggcgcccgggcccgcgacccccgcacccagctccgcaggaccggcgggcgcgcgcgggctctggaggccacgggcatgatgcttcgggtcctggtgggggctgtcctccctgccatgctactggctgccccaccacccatcaacaagctggcactgttcccagataagagtgcctggtgcgaagccaagaacatcacccagatcgtgggccacagcggctgtgaggccaagtccatccagaacagggcgtgcctaggacagtgcttcagctacagcgtccccaacaccttcccacagtccacagagtccctggttcactgtgactcctgcatgccagcccagtccatgtgggagattgtgacgctggagtgcccgggccacgaggaggtgcccagggtggacaagctggtggagaagatcctgcactgtagctgccaggcctgcggcaaggagcctagtcacgaggggctgagcgtctatgtgcagggcgaggacgggccgggatcccagcccggcacccaccctcacccccatccccacccccatcctggcgggcagacccctgagcccgaggacccccctggggccccccacacagaggaagagggggctgaggactgaggcccccccaactcttcctcccctctcatccccctgtggaatgttgggtctcactctctggggaagtcaggggagaagctgaagcccccctttggcactggatggacttggcttcagactcggacttgaatgctgcccggttgccatggagatctgaaggggcggggttagagccaagctgcacaatttaatatattcaagagtggggggaggaagcagaggtcttcagggctctttttttggggggggggtggtctcttcctgtctggcttctagagatgtgcctgtgggagggggaggaagttggctgagccattgagtgctgggggaggccatccaagatggcatgaatcgggctaaggtccctgggggtgcagatggtactgctgaggtcccgggcttagtgtgagcatcttgccagcctcaggcttgagggagggctgggctagaaagaccactggcagaaacaggaggctccggccccacaggtttccccaaggcctctcaccccacttcccatctccagggaagcgtcgccccagtggcactgaagtggccctccctcagcggaggggtttgggagtcaggcctgggcaggaccctgctgactcgtggcgcgggagctgggagccaggctctccgggcctttctctggcttccttggcttgcctggtgggggaaggggaggaggggaagaaggaaagggaagagtcttccaaggccagaaggagggggacaaccccccaagaccatccctgaagacgagcatccccctcctctccctgttagaaatgttagtgccccgcactgtgccccaagttctaggccccccagaaagctgtcagagccggccgccttctcccctctcccagggatgctctttgtaaatatcggatgggtgtgggagtgaggggttacctccctcgccccaaggttccagaggccctaggcgggatgggctcgctgaacctcgaggaactccaggacgaggaggacatgggacttgcgtggacagtcagggttcacttgggctctctctagctccccaattctgcctgcctcctccctcccagctgcactttaaccctagaaggtggggacctggggggagggacagggcaggcgggcccatgaagaaagcccctcgttgcccagcactgtctgcgtctgctcttctgtgcccagggtggctgccagcccactgcctcctgcctggggtggcctggccctcctggctgttgcgacgcgggcttctggagcttgtcaccattggacagtctccctgatggaccctcagtcttctcatgaataaattccttcaacgccaaaaaaaaaaaacctgcagcccgggggnccnctagttttagngng

SEQ ID NO: 335369 - DNA, 1955 bp, Homo sapiens
  misc_feature (1938)..(1938): n is a, c, g, or t
  misc_feature (1941)..(1941): n is a, c, g, or t
  misc_feature (1952)..(1952): n is a, c, g, or t
  misc_feature (1954)..(1954): n is a, c, g, or t
gcgccgcgcgcccgcccggggccgcagacagcgcgcagcgcagcccagccgagcgtcgcggggccgccccccgccctgccggccgcctcgccgagcctcctggggcgcccgggcccgcgacccccgcacccagctccgcaggaccggcgggcgcgcgcgggctctggaggccacgggcatgatgcttcgggtcctggtgggggctgtcctccctgccatgctactggctgccccaccacccatcaacaagctggcactgttcccagataagagtgcctggtgcgaagccaagaacatcacccagatcgtgggccacagcggctgtgaggccaagtccatccagaacagggcgtgcctaggacagtgcttcagctacagcgtccccaacaccttcccacagtccacagagtccctggttcactgtgactcctgcatgccagcccagtccatgtgggagattgtgacgctggagtgcccgggccacgaggaggtgcccagggtggacaagctggtggagaagatcctgcactgtagctgccaggcctgcggcaaggagcctagtcacgaggggctgagcgtctatgtgcagggcgaggacgggccgggatcccagcccggcacccaccctcacccccatccccacccccatcctggcgggcagacccctgagcccgaggacccccctggggccccccacacagaggaagagggggctgaggactgaggcccccccaactcttcctcccctctcatccccctgtggaatgttgggtctcactctctggggaagtcaggggagaagctgaagcccccctttggcactggatggacttggcttcagactcggacttgaatgctgcccggttgccatggagatctgaaggggcggggttagagccaagctgcacaatttaatatattcaagagtggggggaggaagcagaggtcttcagggctctttttttggggggggggtggtctcttcctgtctggcttctagagatgtgcctgtgggagggggaggaagttggctgagccattgagtgctgggggaggccatccaagatggcatgaatcgggctaaggtccctgggggtgcagatggtactgctgaggtcccgggcttagtgtgagcatcttgccagcctcagcggaggggtttgggagtcaggcctgggcaggaccctgctgactcgtggcgcgggagctgggagccaggctctccgggcctttctctggcttccttggcttgcctggtgggggaaggggaggaggggaagaaggaaagggaagagtcttccaaggccagaaggagggggacaaccccccaagaccatccctgaagacgagcatccccctcctctccctgttagaaatgttagtgccccgcactgtgccccaagttctaggccccccagaaagctgtcagagccggccgccttctcccctctcccagggatgctctttgtaaatatcggatgggtgtgggagtgaggggttacctccctcgccccaaggttccagaggccctaggcgggatgggctcgctgaacctcgaggaactccaggacgaggaggacatgggacttgcgtggacagtcagggttcacttgggctctctctagctccccaattctgcctgcctcctccctcccagctgcactttaaccctagaaggtggggacctggggggagggacagggcaggcgggcccatgaagaaagcccctcgttgcccagcactgtctgcgtctgctcttctgtgcccagggtggctgccagcccactgcctcctgcctggggtggcctggccctcctggctgttgcgacgcgggcttctggagcttgtcaccattggacagtctccctgatggaccctcagtcttctcatgaataaattccttcaacgccaaaaaaaaaaaacctgcagcccgggggnccnctagttttagngng

SEQ ID NO: 335370 - DNA, 2510 bp, Homo sapiens
gcgccgcgcgcccgcccggggccgcagacagcgcgcagcgcagcccagccgagcgtcgcggggccgccccccgccctgccggccgcctcgccgagcctcctggggcgcccgggcccgcgacccccgcacccagctccgcaggaccggcgggcgcgcgcgggctctggaggccacgggcatgatgcttcgggtcctggtgggggctgtcctccctgccatgctactggctgccccaccacccatcaacaagctggcactgttcccagataagagtgcctggtgcgaagccaagaacatcacccagatcgtgggccacagcggctgtgaggccaagtccatccagaacagggcgtgcctaggacagtgcttcagctacagcgtccccaacaccttcccacagtccacagagtccctggttcactgtgactcctgcatgccagcccagtccatgtgggagattgtgacgctggagtgcccgggccacgaggaggtgcccagggtggacaagctggtggagaagatcctgcactgtagctgccaggcctgcggcaaggagcctagtcacgaggggctgagcgtctatgtgcagggcgaggacgggccgggatcccagcccggcacccaccctcacccccatccccacccccatcctggcgggcagacccctgagcccgaggacccccctggggccccccacacagaggaagagggggctgaggactgaggcccccccaactcttcctcccctctcatccccctgtggaatgttgggtctcactctctggggaagtcaggggagaagctgaagcccccctttggcactggatggacttggcttcagactcggacttgaatgctgcccggttgccatggagatctgaaggggcggggttagagccaagctgcacaatttaatatattcaagagtggggggaggaagcagaggtcttcagggctctttttttggggggggggtggtctcttcctgtctggcttctagagatgtgcctgtgggagggggaggaagttggctgagccattgagtgctgggggaggccatccaagatggcatgaatcgggctaaggtccctgggggtgcagatggtactgctgaggtcccgggcttagtgtgagcatcttgccagcctcaggcttgagggagggctgggctagaaagaccactggcagaaacaggaggctccggccccacaggtttccccaaggcctctcaccccacttcccatctccagggaagcgtcgccccagtggcactgaagtggccctccctcagcggaggggtttgggagtcaggcctgggcaggaccctgctgactcgtggcgcgggagctgggagccaggctctccgggcctttctctggcttccttggcttgcctggtgggggaaggggaggaggggaagaaggaaagggaagagtcttccaaggccagaaggagggggacaaccccccaagaccatccctgaagacgagcatccccctcctctccctgttagaaatgttagtgccccgcactgtgccccaagttctaggccccccagaaagctgtcagagccggccgccttctcccctctcccagggatgctctttgtaaatatcggatgggtgtgggagtgaggggttacctccctcgccccaaggttccagaggccctaggcgggatgggctcgctgaacctcgaggaactccaggacgaggaggacatgggacttgcgtggacagtcagggttcacttgggctctctctagctccccaattctgcctgcctcctccctcccagctgcactttaaccctagaaggtggggacctggggggagggacagggcaggcgggcccatgaagaaagcccctcgttgcccagcactgtctgcgtctgctcttctgtgcccagggtggctgccagcccactgcctcctgcctggggtggcctggccctcctggctgttgcgacgcgggcttctggagcttgtcaccattggacagtctccctgatggaccctcagtcttctcatgaataaattccttcaacgccaaaaaaaaaaaaaaaaaaaaaaaaaaaaaaaaaaaaaaaaaaaaaaaaaaaaaaaaaaaaaaaaaaccacaacaaaaaaaaacaaaaaaaacaccaacacaactaaatcaaacacgcccccccccccaacaacagaaatcacaccacgacaaaggagagaaccatagaagaaacgcgagggcgtgcgtccacatcatctgtgctatcacacgaaacccagctcgccgccacacccaacaattaacaagccaccgcatcataataaccacacctaacacaaactacgcgacgatctcactcccacaacacaccaaactccaacacgtttaatacgccaaccatcaccacccgacaccacacgtcaccatacctcaaataacaaactaaacacgttacatatcaactaaacaccgcaccctcacattctataacgcaacaacactacccccagccacaaaag

SEQ ID NO: 335371 - DNA, 2355 bp, Homo sapiens
gcgccgcgcgcccgcccggggccgcagacagcgcgcagcgcagcccagccgagcgtcgcggggccgccccccgccctgccggccgcctcgccgagcctcctggggcgcccgggcccgcgacccccgcacccagctccgcaggaccggcgggcgcgcgcgggctctggaggccacgggcatgatgcttcgggtcctggtgggggctgtcctccctgccatgctactggctgccccaccacccatcaacaagctggcactgttcccagataagagtgcctggtgcgaagccaagaacatcacccagatcgtgggccacagcggctgtgaggccaagtccatccagaacagggcgtgcctaggacagtgcttcagctacagcgtccccaacaccttcccacagtccacagagtccctggttcactgtgactcctgcatgccagcccagtccatgtgggagattgtgacgctggagtgcccgggccacgaggaggtgcccagggtggacaagctggtggagaagatcctgcactgtagctgccaggcctgcggcaaggagcctagtcacgaggggctgagcgtctatgtgcagggcgaggacgggccgggatcccagcccggcacccaccctcacccccatccccacccccatcctggcgggcagacccctgagcccgaggacccccctggggccccccacacagaggaagagggggctgaggactgaggcccccccaactcttcctcccctctcatccccctgtggaatgttgggtctcactctctggggaagtcaggggagaagctgaagcccccctttggcactggatggacttggcttcagactcggacttgaatgctgcccggttgccatggagatctgaaggggcggggttagagccaagctgcacaatttaatatattcaagagtggggggaggaagcagaggtcttcagggctctttttttggggggggggtggtctcttcctgtctggcttctagagatgtgcctgtgggagggggaggaagttggctgagccattgagtgctgggggaggccatccaagatggcatgaatcgggctaaggtccctgggggtgcagatggtactgctgaggtcccgggcttagtgtgagcatcttgccagcctcaggcttgagggagggctgggctagaaagaccactggcagaaacaggaggctccggccccacaggtttccccaaggcctctcaccccacttcccatctccagggaagcgtcgccccagtggcactgaagtggccctccctcagcggaggggtttgggagtcaggcctgggcaggaccctgctgactcgtggcgcgggagctgggagccaggctctccgggcctttctctggcttccttggcttgcctggtgggggaaggggaggaggggaagaaggaaagggaagagtcttccaaggccagaaggagggggacaaccccccaagaccatccctgaagacgagcatccccctcctctccctgttagaaatgttagtgccccgcactgtgccccaagttctaggccccccagaaagctgtcagagccggccgccttctcccctctcccagggatgctctttgtaaatatcggatgggtgtgggagtgaggggttacctccctcgccccaaggttccagaggccctaggcgggatgggctcgctgaacctcgaggaactccaggacgaggaggacatgggacttgcgtggacagtcagggttcacttgggctctctctagctccccaattctgcctgcctcctccctcccagctgcactttaaccctagaaggtggggacctggggggagggacagggcaggcgggcccatgaagaaagcccctcgttgcccagcactgtctgcgtctgctcttctgtgcccagggtggctgccagcccactgcctcctgcctggggtggcctggccctcctggctgttgcgacgcgggcttctggagcttgtcaccattggacagtctccctgatggaccctcagtcttctcatgaataaattccttcaacgccaaaacaaacaacagcccacacaaacacccacaaagccaaccacacaacgaaaaaaaaaaaagggcgcgggggcgccaactaaagacacccagcgagagggggcacaagaaaaaggagcaccagaagacactacaagagagaaggggcggccaaaaaaagagggcgactacaggaagaaaggagcgcaccagcgcggaggaaacgaggcggcgcggggcgagcaccaacaagcgagaggaagatattaggcgagggacaccaccacaccaggagcaccgacacaagcggcacacacccccgcgcgg

SEQ ID NO: 335372 - DNA, 2019 bp, Homo sapiens
gcgccgcgcgcccgcccggggccgcagacagcgcgcagcgcagcccagccgagcgtcgcggggccgccccccgccctgccggccgcctcgccgagcctcctggggcgcccgggcccgcgacccccgcacccagctccgcaggaccggcgggcgcgcgcgggctctggaggccacgggcatgatgcttcgggtcctggtgggggctgtcctccctgccatgctactggctgccccaccacccatcaacaagctggcactgttcccagataagagtgcctggtgcgaagccaagaacatcacccagatcgtgggccacagcggctgtgaggccaagtccatccagaacagggcgtgcctaggacagtgcttcagctacagcgtccccaacaccttcccacagtccacagagtccctggttcactgtgactcctgcatgccagcccagtccatgtgggagattgtgacgctggagtgcccgggccacgaggaggtgcccagggtggacaagctggtggagaagatcctgcactgtagctgccaggcctgcggcaaggagcctagtcacgaggggctgagcgtctatgtgcagggcgaggacgggccgggatcccagcccggcacccaccctcacccccatccccacccccatcctggcgggcagacccctgagcccgaggacccccctggggccccccacacagaggaagagggggctgaggactgaggcccccccaactcttcctcccctctcatccccctgtggaatgttgggtctcactctctggggaagtcaggggagaagctgaagcccccctttggcactggatggacttggcttcagactcggacttgaatgctgcccggttgccatggagatctgaaggggcggggttagagccaagctgcacaatttaatatattcaagagtggggggaggaagcagaggtcttcagggctctttttttggggggggggtggtctcttcctgtctggcttctagagatgtgcctgtgggagggggaggaagttggctgagccattgagtgctgggggaggccatccaagatggcatgaatcgggctaaggtccctgggggtgcagatggtactgctgaggtcccgggcttagtgtgagcatcttgccagcctcaggcttgagggagggctgggctagaaagaccactggcagaaacaggaggctccggccccacaggtttccccaaggcctctcaccccacttcccatctccagggaagcgtcgccccagtggcactgaagtggccctccctcagcggaggggtttgggagtcaggcctgggcaggaccctgctgactcgtggcgcgggagctgggagccaggctctccgggcctttctctggcttccttggcttgcctggtgggggaaggggaggaggggaagaaggaaagggaagagtcttccaaggccagaaggagggggacaaccccccaagaccatccctgaagacgagcatccccctcctctccctgttagaaatgttagtgccccgcactgtgccccaagttctaggccccccagaaagctgtcagagccggccgccttctcccctctcccagggatgctctttgtaaatatcggatgggtgtgggagtgaggggttacctccctcgccccaaggttccagaggccctaggcgggatgggctcgctgaacctcgaggaactccaggacgaggaggacatgggacttgcgtggacagtcagggttcacttgggctctctctagctccccaattctgcctgcctcctccctcccagctgcactttaaccctagaaggtggggacctggggggagggacagggcaggcgggcccatgaagaaagcccctcgttgcccagcactgtctgcgtctgctcttctgtgcccagggtggcctggccctcctggctgttgcgacgcgggcttctggagcttgtcaccattggacagtctccctgatggaccctcagtcttctcatgaataaattccttcaacgcc

SEQ ID NO: 335373 - DNA, 1540 bp, Homo sapiens
gcgccgcgcgcccgcccggggccgcagacagcgcgcagcgcagcccagccgagcgtcgcggggccgccccccgccctgccggccgcctcgccgagcctcctggggcgcccgggcccgcgacccccgcacccagctccgcaggaccggcgggcgcgcgcgggctctggaggccacgggcatgatgcttcgggtcctggtgggggctgtcctccctgccatgctactggctgccccaccacccatcaacaagctggcactgttcccagataagagtgcctggtgcgaagccaagaacatcacccagatcgtgggccacagcggctgtgaggccaagtccatccagaacagggcgtgcctaggacagtgcttcagctacagcgtccccaacaccttcccacagtccacagagtccctggttcactgtgactcctgcatgccagcccagtccatgtgggagattgtgacgctggagtgcccgggccacgaggaggtgcccagggtggacaagctggtggagaagatcctgcactgtagctgccaggcctgcggcaaggagcctagtcacgaggggctgagcgtctatgtgcagggcgaggacgggccgggatcccagcccggcacccaccctcacccccatccccacccccatcctggcgggcagacccctgagcccgaggacccccctggggccccccacacagaggaagagggggctgaggactgaggcccccccaactcttcctcccctctcatccccctgtggaatgttgggtctcactctctggggaagtcaggggagaagctgaagcccccctttggcactggatggacttggcttcagactcggacttgaatgctgcccggttgccatggagatctgaaggggcggggttagagccaagctgcacaatttaatatattcaagagtggggggaggaagcagaggtcttcagggctctttttttggggggggggtggtctcttcctgtctggcttctagagatgtgcctgtgggagggggaggaagttggctgagccattgagtgctgggggaggccatccaagatggcatgaatcgggctaaggtccctgggggtgcagatggtactgctgaggtcccgggcttagtgtgagcatcttgccagcctcaggcttgagggagggctgggctagaaagaccactggcagaaacaggaggctccggccccacaggtttccccaaggcctctcaccccacttcccatctccagggaagcgtcgccccagtggcactgaagtggccctccctcagcggaggggtttgggagtcaggcctgggcaggaccctgctgactcgtggcgcgggagctgggagccaggctctccgggcctttctctggcttccttggcttgcctggtgggggaaggggaggaggggaagaaggaaagggaagagtcttccaaggccagaaggagggggacaacccccctagacaagacgtgcagtacgaatatgtcacagcgctgggcctttgagtcaagtaatccctcgaggactgac

SEQ ID NO: 335374 - DNA, 1364 bp, Homo sapiens
gcgccgcgcgcccgcccggggccgcagacagcgcgcagcgcagcccagccgagcgtcgcggggccgccccccgccctgccggccgcctcgccgagcctcctggggcgcccgggcccgcgacccccgcacccagctccgcaggaccggcgggcgcgcgcgggctctggaggccacgggcatgatgcttcgggtcctggtgggggctgtcctccctgccatgctactggctgccccaccacccatcaacaagctggcactgttcccagataagagtgcctggtgcgaagccaagaacatcacccagatcgtgggccacagcggctgtgaggccaagtccatccagaacagggcgtgcctaggacagtgcttcagctacagcgtccccaacaccttcccacagtccacagagtccctggttcactgtgactcctgcatgccagcccagtccatgtgggagattgtgacgctggagtgcccgggccacgaggaggtgcccagggtggacaagctggtggagaagatcctgcactgtagctgccaggcctgcggcaaggagcctagtcacgaggggctgagcgtctatgtgcagggcgaggacgggccgggatcccagcccggcacccaccctcacccccatccccacccccatcctggcgggcagacccctgagcccgaggacccccctggggccccccacacagaggaagagggggctgaggactgaggcccccccaactcttcctcccctctcatccccctgtggaatgttgggtctcactctctggggaagtcaggggagaagctgaagcccccctttggcactggatggacttggcttcagactcggacttgaatgctgcccggttgccatggagatctgaaggggcggggttagagccaagctgcacaatttaatatattcaagagtggggggaggaagcagaggtcttcagggctctttttttggggggggggtggtctcttcctgtctggcttctagagatgtgcctgtgggagggggaggaagttggctgagccattgagtgctgggggaggccatccaagatggcatgaatcgggctaaggtccctgggggtgcagatggtactgctgaggtcccgggcttagtgtgagcatcttgccagcctcaggcttgagggagggctgggctagaaagaccactggcagaaacaggaggctccggccccacaggtttccccaaggcctctcaccccacttcccatctccagggaagctacaggtgaatttaatcctctggttgacgattgagtccttgagtttgtctaaagacctgggattggtagaaaggggttgttcaggttaaaataaagattatggagacc

SEQ ID NO: 335375 - DNA, 848 bp, Homo sapiens
gcgccgcgcgcccgcccggggccgcagacagcgcgcagcgcagcccagccgagcgtcgcggggccgccccccgccctgccggccgcctcgccgagcctcctggggcgcccgggcccgcgacccccgcacccagctccgcaggaccggcgggcgcgcgcgggctctggaggccacgggcatgatgcttcgggtcctggtgggggctgtcctccctgccatgctactggctgccccaccacccatcaacaagctggcactgttcccagataagagtgcctggtgcgaagccaagaacatcacccagatcgtgggccacagcggctgtgaggccaagtccatccagaacagggcgtgcctaggacagtgcttcagctacagcgtccccaacaccttcccacagtccacagagtccctggttcactgtgactcctgcatgccagcccagtccatgtgggagattgtgacgctggagtgcccgggccacgaggaggtgcccagggtggacaagctggtggagaagatcctgcactgtagctgccaggcctgcggcaaggagcctagtcacgaggggctgagcgtctatgtgcagggcgaggacgggccgggatcccagcccggcacccaccctcagcacgggattggtggatacaggactgactggagtgccacagcatgtccccgtgcgccttgtcactgtggacggcggcgggggccttggtggaggtgacacgagcatgtcggcctgcagagtctgacaatcaacaggtcctgcaaggtgtctgacagcctgtgatgacgtgtacgtggctggcaaggcagagccagaggagcccggggtggtgcgagtg

SEQ ID NO: 335376 - DNA, 651 bp, Homo sapiens
aaagaagtgggaggacggactcatggtgagtcttgtggggacatgtttgctggaggctaaccagcctgatcatgacatcttcatcttaaatttgaaaattgtcatcaggttacggtgaaatcctaccggatcaacatctgagaccaggcttatggaagtgagcttccaacctgaatgcttgaggctgagggggtgttggcggcctcgataacaacctgaacaacagctggcagcagggagtgcctgggccatgtgtccccagagcactgacctgggtggtccagtctcctgtctcgagctccagccatgagcttacacggccttcacactccccccaaaaccagccattctcaaccagcgaggcctctgtgtctgcaaggccagttttatttcttctttgatatttctgcttctgtgtcctttccccgctgcccaaaagctgcctcccgtctgcccatgcagagctgtattacccaacaacacccagctcgactcggacagcacccagctcaactcggacaggccccgggaaagtaagagcttggggggagacccacaggcccacacggcagcactgcgaggctagaccgtaaacatgggtcaattgaatatttataaacaggatacttaaaggttcttgggatattgaac

SEQ ID NO: 335377 - DNA, 198 bp, Homo sapiens
gccaggtgccctggcactcccaagcaattaaggccagctggcatcatagccttcccatccacccctactcactgaccccgtccccccgtcccacccaccgcagtggacagctgcctgaatccactaatctggggctgggtgggtgtttcctgcatgtttgagattttaggaggaaatcaaaataaagaaacaaagcct

SEQ ID NO: 335378 - DNA, 439 bp, Homo sapiens
cgctgtgttagacatccgtgagctagctgggaactacagatgcccaccaccacgtcagctaatgttactatttttagtagagacagggtttcaccgtgttgcccaggctggtctcaaactcctgaactcaggtaatccaccctccttggcctcccaaagtctgggattacaggtgcccaccaccacacctggctggtttttgtatttttaatagagacggggtttcaccctgttgttcaggctagtctcgaactcctgaccttaaatgatctgcctaccttggcctcccaaagtgctgggattacaggtctgagccactgtccccagctgaaaatcagatttttaaatgtttagcttcactgtccttataccaacagagctgttaaaggttttcagacgacccctcagaacttataaattatgttaaacaatgaacccc

SEQ ID NO: 335379 - DNA, 180 bp, Homo sapiens
ctgttttactgactcggctttgccttaagattttctttggaaaatgattctatccttcaaacaacaacatcaacaacaaagacaacggttttgaaaaccactgccccatacctgtgactagaagagttgtttaattccccctcccacccagccctgccccatggcgggtgtggggtatgg

SEQ ID NO: 335380 - DNA, 271 bp, Homo sapiens
tctgcttcccctctaatctgcctcacaccttcttctacacagccaaatagtcctttgaaagtgtaaatcggggctgggtgcggtgggtcacgcctgtaatcccagcactttgggaggccgaggagggtggatcacgaggtcaggagattgaggccatcctggctaacacagtgaaaccccgtctctactaaaactacaaaaaattaggcgggtgtggtggtgggcacctgtagtcccagctactcgggaggctgaggcaggagaatggtgg

SEQ ID NO: 335381 - DNA, 1092 bp, Homo sapiens
  misc_feature (716)..(716): n is a, c, g, or t
  misc_feature (721)..(721): n is a, c, g, or t
  misc_feature (747)..(747): n is a, c, g, or t
  misc_feature (751)..(751): n is a, c, g, or t
  misc_feature (779)..(779): n is a, c, g, or t
  misc_feature (982)..(982): n is a, c, g, or t
  misc_feature (1064)..(1064): n is a, c, g, or t
  misc_feature (1092)..(1092): n is a, c, g, or t
ctcaggtatgccacgtgttgcaagctcatccctcggacctgtgaaaaaactccaacaattggattccggccctcaaaccccacacaggacttaattaaccttgccttcaaggtgtacaataatagagaagaggcagccaagtgacaaggcatctctgagttacagctactcgcctctgctgtaagacaacccacaaccacgtctccagcacacaaaaacttcagaacatccaagccacagttcccaggggctccttcaaaacctcctcgtggacctggcttcaaatgccaaaagcctggccactgggcctgagaatgcccacagctcgggattcctcctaggccgtgccctgtctgtgtgggcccccactggaggttggactgtccgactcacatcgccaccattcctaaagctcctggagctcaaacccaacgttccttggctgactccttcccacatctgctcggcttagcagctgaagaccgacactgcccaatcgccttggaagccccctggaccatcacagacgcgcgtgacagtccccagcactgcagagatctgagatccaataacagtctgcagaggtctactcacaccatagccactgctctgggattcccattccatttaggcctcctgattgccccatgtgtccttacaataaacaactggcctcgttggcctcagcggtggagctctgggccagttccttttangaggnctacccatgatctcgctactgactgntggnttggtcgtcgctgcgcgagcgactcacntcctacaacgcgtatactgttatcccaaatcagcgcatattagcaacacctctgacaacagccctatacgcaggatcgttaagcccggtgctgggtctcatagtccccccgtaattccaaattagccatgaagcggacacaagactaagacacgttacctgactctcagctattgccgctcctcgaaattcgtttcctggagnggcttatacgccagttcggggaaggtttcacctggcgattatccaatgctcccatattacccacacaatgcgccacccgatnacgccgcgccctgtatctatcagacccn

SEQ ID NO: 335382 - DNA, 1210 bp, Homo sapiens
  misc_feature (834)..(834): n is a, c, g, or t
  misc_feature (839)..(839): n is a, c, g, or t
  misc_feature (865)..(865): n is a, c, g, or t
  misc_feature (869)..(869): n is a, c, g, or t
  misc_feature (897)..(897): n is a, c, g, or t
  misc_feature (1100)..(1100): n is a, c, g, or t
  misc_feature (1182)..(1182): n is a, c, g, or t
  misc_feature (1210)..(1210): n is a, c, g, or t
cacagacgtgcatggcatttggtgctgaagacccgggacaggaggactccttcgggaggcgggtcccctgtcctcgccctaactctgtgaggagatccacctacaacctcgggtcctcagaccaaccagcccaaggaacatctcaccaatttcaaattgggaaaaaactccaacaattggattccggccctcaaaccccacacaggacttaattaaccttgccttcaaggtgtacaataatagagaagaggcagccaagtgacaaggcatctctgagttacagctactcgcctctgctgtaagacaacccacaaccacgtctccagcacacaaaaacttcagaacatccaagccacagttcccaggggctccttcaaaacctcctcgtggacctggcttcaaatgccaaaagcctggccactgggcctgagaatgcccacagctcgggattcctcctaggccgtgccctgtctgtgtgggcccccactggaggttggactgtccgactcacatcgccaccattcctaaagctcctggagctcaaacccaacgttccttggctgactccttcccacatctgctcggcttagcagctgaagaccgacactgcccaatcgccttggaagccccctggaccatcacagacgcgcgtgacagtccccagcactgcagagatctgagatccaataacagtctgcagaggtctactcacaccatagccactgctctgggattcccattccatttaggcctcctgattgccccatgtgtccttacaataaacaactggcctcgttggcctcagcggtggagctctgggccagttccttttangaggnctacccatgatctcgctactgactgntggnttggtcgtcgctgcgcgagcgactcacntcctacaacgcgtatactgttatcccaaatcagcgcatattagcaacacctctgacaacagccctatacgcaggatcgttaagcccggtgctgggtctcatagtccccccgtaattccaaattagccatgaagcggacacaagactaagacacgttacctgactctcagctattgccgctcctcgaaattcgtttcctggagnggcttatacgccagttcggggaaggtttcacctggcgattatccaatgctcccatattacccacacaatgcgccacccgatnacgccgcgccctgtatctatcagacccn

SEQ ID NO: 335383 - DNA, 643 bp, Homo sapiens
tgtggtggctatttgagaggctgaggcaggagaatcatttgaacccaggaggtgaaggttgcagtgagccaagatcacaccattgcactccagtctgggtgacaagagcgaaactctatctcaaaaaaaagaaaaaagaaacaagatcttcaagcttaaggaaacaaaaacaaaactcagctgtgttaaatctgtttttagttgctatacatttctgctcagcttcatgtgatgcacattcatgtaattgtatcctaaattcctttgtactttttattttcttccttggtcttcaattatcttaagactaccaagaaaacaaaaattttaaaaatcttcttcagccggtcaggcgcagtggctcacggctgtaatcccagcacttggggaggctgaggcgggtggatcacgaggtcaggagttcaacaccagcctggccaacatggtgaaacgtcgtctctactaaaaatacaaaaattagctgggcattgtggcgcgttcttgtaatcccagctgctcaggaggctgaggcaggagaattgcttgaaccaggacccgggaggtgtaggttgcggtgagcggagatcgcgccactgcactccagcctgggctatagagtgagactccatttcaaaaaaaaaaa

SEQ ID NO: 335384 - DNA, 534 bp, Homo sapiens
agtttacacaacgctaaaaaagagaaattgtttcctaccattcaagtgtctcactggagggggtgggaggggagaagatattgtggtcagtgttatccaactaaagccaagttgtcaacatgcaatgggccaggattcacacgtgactgggccatgtgttaatgttacagggacaatttccaaactgctgtttggggtagccatctggttgagatgaagcactctggcaacttcctgtcattagagcctagtctcccttagacctgggccctctgcccaccaagggtgctgtgtggctgccctcagaccacaaaccaccagccctatgacacccaaaccatgaaatatatctcaggaggtaatagagtttagtgactagaaacagcactgaggttagattcaacgtctgacttaggagtgaacagctacaaaaacaaagaacaatctcagacaatatatcacagagaccatggcaactttggattttcctctctgggcctctacattgattttttgtttttttttcttttcttt

SEQ ID NO: 335385 - DNA, 134 bp, Homo sapiens
tgaggcagtatatggagaaacaccgagcaatgtacctggcacaggtgaggtgctcagtgaggatctgtggaaagattgaacaactctgtgctgacactgtatgctagcattgctagtcagcaccttcccttccc

SEQ ID NO: 335386 - DNA, 171 bp, Homo sapiens
cacgagggtccgcggcttcattcttgaagtcagcgagaccaagaacccatcagaaggaaccgatcagggacacagtttcttctggaggctgtcagggaagaatccatttccttgcctttcccagctttcagaggctgcgtatcttctttggcctgtggcgtcattctctat

SEQ ID NO: 335387 - DNA, 406 bp, Homo sapiens
tcacttttcacagcctctttaaaaccaattttaggatttatctctttcagacgtaaatcccaagacctggttttattataaataccttacctaatttatggtgatagaatgaattcatacttgtgactcaaaattcctttatggcaagaccttggtaataaaaataaaatcatgtttgtaccttctaaacaaaaatatgcttagtatcaaaaccttaacacgtttataggaattttatttttttccaaaggaaaaaaatcttaacaatattctgcaggaaatttctcatgcagtttgatttctttcagtgagataataagataatcacaaatgaaagtttatatctccccagcaacataccgcactaggagtctggaaggtagagtaggaagaacattccaatggg

SEQ ID NO: 335388 - DNA, 620 bp, Homo sapiens
agcggggagaaaagaagggagaagggaggagaaggaagatggaggaagaggaaggagagggagaaagaggaggaagaggagaaggaagaggaaagagaagagggagagggagagggagaggagggagagaaggagaggcgagcaggaagaagaggaggagtgagaagagaaagaagcatgggaggaagagaaggaatgagggtactcaccaggcagccttcccagcaggccccatgccctgcctaagaggcaggcgggagccgtcctcagcatctcccaatggccgagtacaggggtgcttctgcctcatcatgatgggcctggtctgagggctccagtcctgcctgggctgcaaggctgcatggctgcatgggctatgagccaagttcctgcctggcaggccgcactcgagagacccaccccactcccctgcaggggcagaggggctgggagaagaagatgtttaggtcctgccaggaaggtcctctcaccacaaattccacctttatgggaaaatcaatgttattacctcctccatcttcccacacttgctgctggtctaaagcaatcacctcatgggcactgagccagaactgagccagcgctctggggtcactggc

SEQ ID NO: 335389 - DNA, 1439 bp, Homo sapiens
aaggagcgccgcgtcacgatccggtagagttagagcccgtgcggaggcggtgcggagcatttcggctctgagcggctgggcgaccggcgcgtcgtgcggggctgcggcggagcctccttaaggaaggtgcaagaggttggcagcttcgattgaagcacatcgaccggcgacagcagccaggagtcatgagcgacagcggcgagcagaactacggcgagcgggaatcccgttctgcttccagaagtggaagtgctcacggatcggggaaatctgcaaggcatacccctgcaaggtctcgctccaaggaagattccaggcgttccagatcaaagtccaggtcccgatctgaatctaggtctagatccagaagaagctcccgaaggcattatacccggtcacggtctcgctcccgctcccatagacgatcacgtagcaggtcttacagtcgagattatcgtagacggcacagccacagccattctcccatgtctactcgcaggcgtcatgttgggaatcgggcaaatcctgatcctaactgttgtcttggagtatttgggctgagcttgtacaccacagaaagagatctaagagaagtgttctctaaatatggtcccattgccgatgtgtctattgtatatgaccagcagtctaggcgttcaagaggatttgcctttgtatattttgaaaatgtagatgatgccaaggaagctaaagaacgtgccaatggaatggagcttgatgggcgtaggatcagagttgatttctctataacaaaaagaccacatacgccaacaccaggaatttacatggggagacctacctatggcagctctcgccgtcgggattactatgacagaggatatgatcggggctatgatgatcgggactactatagcagatcatacagaggaggaggtggaggaggaggaggatggagagctgcccaagacagggatcagatttatagaaggcggtcaccttctccttactatagtcgtggaggatacagatcacgttccagatctcgatcatactcacctcgtcgctattaaagcatgaagactttctgaaacctgccctagagctgggatattgtttgtgggcaatattttttattgtctcttgtttaaaaagtgaacagtgcctagtgaagttaggtgacttttacaccttttacgatgactacttttggtggagttgaaatgctgttttcattctgcatttgtgtagtttggtgctttgttccaagttaagtgttttcagaaaagtatgttttgcatgtatttttttacagtctaaattttgactgctgagaagtttctattgtacaaaacttcatttaaaaggtttttctactgaatccagggtattctgaagatcgaagcctgtgtaaaatgctaccaaatggcaaaaagcaacaataaacagtttgattttta

SEQ ID NO: 335390 - DNA, 1147 bp, Homo sapiens
acaaatgaattgtccgtgctttcctttcatgcacttatgtattaatgtgtcactttttgactagaggtgtgcttttgacacttaacctattttctattgaatataataagaagtgtgaaatgtaactaatagttcttaaaatgttaaatgaacagtaaatgttcagtggcgcacttcacattcaacttaagcatgataagtctatttggagtagagaaatgagattaccatatattctagaaccagcagaaaactatgtagttttcagttttttgagctgcatattctagtttcttttttttttttttttaatccaaatcaacaaagggattttttttttctagtttcagttttggcactggattttatcctggagttttaaaatattcttcatcctgttctttttctattaaggttaatgttgaagaaggaaaatgcggaagtcgtcatttgacaagttttataaatgagtatttgaagctcaggaataagtgaagctgaaatttgaaaaaataaaagaaagaatgcatgctaattatcagaccagaagtcccacttgtagaatattgagcaatttgtgtgaagtggggaagatgaaagaagtcagaatttgaaacggaagaatgaagaaaagaaataaaaatgaagttaagataagaagtaatctggaatcagaaagcactacgctaagtaattactagtctgtttatgtgtccctgtatattttgctaaacatgcatgcattatttgtttaatagaggaaaatatatacagggtaaagaagtgccttccaggggaaacgtttaaattaggtaattctgattttaactgcttagttaaatgattgaaatgcaatttttaaaaaatatttagtagtcaagcaccaggcagcagtgagctctccagcatgggtaacagtgggcttcatgttgtcctctctagataaactttacctgtctaatgttgctggtcctggggcatgagcgaatacctccagggttggaactggtggtctttgccacctccctggactcttagattgcactgtcccctttccttcagtactgagcaatgtatagtagaatattttctgttaaaccattttcaaaggaatgtcaccaggatggttatggaaccaaacccccaa

SEQ ID NO: 335391 - DNA, 778 bp, Homo sapiens
aggtataaagtataggtgtcatagttaataaggttccgcctcaccctagtctttatggagtaacattctgaaacacagtccttggacagttcccttaactgcttgactttggcacccctttctgaaggaagtggggtcaaataactcttatccctgctccaaaaaggtggaagaaaggacaagttaattgacttatgtcatttggagcaatgaaactattaacaccaggtatattcagttcctgcccttacctatattttcttatcttggaaggggattgctgtccctcaccatttatctcacagcagcttatttgtttttaaagttgcccagaaagtgtgcaaattaaacttttaacatctacgtgtaggaatcccgttctgcttccagaagtggaagtgctcacggatcggggaaatctgcaaggcatacccctgcaaggtctcgctccaaggaagattccaggcgttccagatcaaagtccaggtcccgatctgaatctaggtaagaaagactgtcttgagatttatggtgagggacagcaatccccttccaagataagaaaatataggtaagggcaggaactgaatatacctggtgtaaatagtttgattgctccaaatgacataagtcaattaacttgtaccaaacttccacctttttggagcagggataagagttatttgaccccacttccttcaagaaaggggttgcaaagtcaagcagttaagggaactgtccaagggactgtgttccagaatgttactccatacagact

SEQ ID NO: 335392 - DNA, 318 bp, Homo sapiens
agacagagtcactctatctttcagcctatgagtgcagcctcttgatcttggctcactgcaacctctgtctgctgggattataggcgttgagccaccgcacccagccaggaattttcttttacaaaactctcttaacatagttcacaaaatttaaaaagtaagtagattaaaatatagcaaggattatttgaccttaaagttattaagagtgcttatttgacacttgggcctgataatgtgcttcattctcaagatttaaacagaccttgaaggttcatgcagctttccttttttggggaactgatgaaagggcagtat

SEQ ID NO: 335393 - DNA, 2043 bp, Homo sapiens
aaggagcgccgcgtcacgatccggtagagttagagcccgtgcggaggcggtgcggagcatttcggctctgagcggctgggcgaccggcgcgtcgtgcggggctgcggcggagcctccttaaggaaggtgcaagaggttggcagcttcgattgaagcacatcgaccggcgacagcagccaggagtcatgagcgacagcggcgagcagaactacggcgagcgggaatcccgttctgcttccagaagtggaagtgctcacggatcggggaaatctgcaaggcatacccctgcaaggtctcgctccaaggaagattccaggcgttccagatcaaagtccaggtcccgatctgaatctaggtctagatccagaagaagctcccgaaggcattatacccggtcacggtctcgctcccgctcccatagacgatcacgtagcaggtcttacagtcgagattatcgtagacggcacagccacagccattctcccatgtctactcgcaggcgtcatgttgggaatcgggcaaatcctgatcctaactgttgtcttggagtatttgggctgagcttgtacaccacagaaagagatctaagagaagtgttctctaaatatggtcccattgccgatgtgtctattgtatatgaccagcagtctaggcgttcaagaggatttgcctttgtatattttgaaaatgtagatgatgccaaggaagctaaagaacgtgccaatggaatggagcttgatgggcgtaggatcagagttgatttctctataacaaaaagaccacatacgccaacaccaggaatttacatggggagacctacctatggcagctctcgccgtcgggattactatgacagaggatatgatcggggctatgatgatcgggactactatagcagatcatacagaggaggaggtggaggaggaggaggatggagagctgcccaagacagggatcagatttatagaaggcggtcaccttctccttactatagtcgtggaggatacagatcacgttccagatctcgatcatactcacctcgtcgctattaaagcatgaagactttctgaaacctgccctagagctgggatattgtttgtgggcaatattttttattgtctcttgtttaaaaagtgaacagtgcctagtgaagttaggtgacttttacaccttttacgatgactacttttggtggagttgaaatgctgttttcattctgcatttgtgtagtttggtgctttgttccaagttaagtgttttcagaaaagtatgttttgcatgtatttttttacagtctaaattttgactgctgagaagtttctattgtacaaaacttcatttaaaaggtttttctactgaatccagggtattctgaagatcgaagcctgtgtaaaatgctaccaaatggcaaaaagcaacaataaacagtttgatttttacttttctttctaacatatcaatgcttagcagaactattcagattgtcagtagtaaatttaaagacaaatgcccgttttcctccagtccatgaaacataccatacttatatacctgcaactaagtgtttaaaattatgctctgtaactctgtactgctagtattagaactaaaaatcttaaaatacagccagtgcttaatgcttatatcaatgtggatttgtcggcttttatgtaatctgtaatatgtatagcaggaaatacgaagagttacacagtgtatgccttaaaaggctgtttcttaaaggtgttacaaggggataatggtatttcaactagttatcagcaagtgacaatacattccaccacaaatacactcttgttcttctagcttttagactatatgaaaaaaccgggtgcttcaaagtacatgataagggaacactatacctgtcatggatgaactgaagactttgcctgttcattttttaaatattattttcaggtcctttgcttaccaaaggaggcccaatttcactcaaatgttttgagaactgtgtttaaataaacgcaaatgaaaagaaaaatgttggtgcagctgttcaca

SEQ ID NO: 335394 - DNA, 2299 bp, Homo sapiens
aaggagcgccgcgtcacgatccggtagagttagagcccgtgcggaggcggtgcggagcatttcggctctgagcggctgggcgaccggcgcgtcgtgcggggctgcggcggagcctccttaaggaaggtgcaagaggttggcagcttcgattgaagcacatcgaccggcgacagcagccaggagtcatgagcgacagcggcgagcagaactacggcgagcgggttaatgttgaagaaggaaaatgcggaagtcgtcatttgacaagttttataaatgagtatttgaagctcaggaataagtgaagctgaaatttgaaaaaataaaagaaagaatgcatgctaattatcagaccagaagtcccacttgtagaatattgagcaatttgtgtgaagtggggaagatgaaagaagtcagaatttgaaacggaagaatgaagaaaagaaataaaaatgaagttaagataagaagtaatctggaatcagaaagcactacgctaagaatcccgttctgcttccagaagtggaagtgctcacggatcggggaaatctgcaaggcatacccctgcaaggtctcgctccaaggaagattccaggcgttccagatcaaagtccaggtcccgatctgaatctaggtctagatccagaagaagctcccgaaggcattatacccggtcacggtctcgctcccgctcccatagacgatcacgtagcaggtcttacagtcgagattatcgtagacggcacagccacagccattctcccatgtctactcgcaggcgtcatgttgggaatcgggcaaatcctgatcctaactgttgtcttggagtatttgggctgagcttgtacaccacagaaagagatctaagagaagtgttctctaaatatggtcccattgccgatgtgtctattgtatatgaccagcagtctaggcgttcaagaggatttgcctttgtatattttgaaaatgtagatgatgccaaggaagctaaagaacgtgccaatggaatggagcttgatgggcgtaggatcagagttgatttctctataacaaaaagaccacatacgccaacaccaggaatttacatggggagacctacctatggcagctctcgccgtcgggattactatgacagaggatatgatcggggctatgatgatcgggactactatagcagatcatacagaggaggaggtggaggaggaggaggatggagagctgcccaagacagggatcagatttatagaaggcggtcaccttctccttactatagtcgtggaggatacagatcacgttccagatctcgatcatactcacctcgtcgctattaaagcatgaagactttctgaaacctgccctagagctgggatattgtttgtgggcaatattttttattgtctcttgtttaaaaagtgaacagtgcctagtgaagttaggtgacttttacaccttttacgatgactacttttggtggagttgaaatgctgttttcattctgcatttgtgtagtttggtgctttgttccaagttaagtgttttcagaaaagtatgttttgcatgtatttttttacagtctaaattttgactgctgagaagtttctattgtacaaaacttcatttaaaaggtttttctactgaatccagggtattctgaagatcgaagcctgtgtaaaatgctaccaaatggcaaaaagcaacaataaacagtttgatttttacttttctttctaacatatcaatgcttagcagaactattcagattgtcagtagtaaatttaaagacaaatgcccgttttcctccagtccatgaaacataccatacttatatacctgcaactaagtgtttaaaattatgctctgtaactctgtactgctagtattagaactaaaaatcttaaaatacagccagtgcttaatgcttatatcaatgtggatttgtcggcttttatgtaatctgtaatatgtatagcaggaaatacgaagagttacacagtgtatgccttaaaaggctgtttcttaaaggtgttacaaggggataatggtatttcaactagttatcagcaagtgacaatacattccaccacaaatacactcttgttcttctagcttttagactatatgaaaaaaccgggtgcttcaaagtacatgataagggaacactatacctgtcatggatgaactgaagactttgcctgttcattttttaaatattattttcaggtcctttgcttaccaaaggaggcccaatttcactcaaatgttttgagaactgtgtttaaataaacgcaaatgaaaagaaaaa

SEQ ID NO: 335395 - DNA, 1963 bp, Homo sapiens
aaggagcgccgcgtcacgatccggtagagttagagcccgtgcggaggcggtgcggagcatttcggctctgagcggctgggcgaccggcgcgtcgtgcggggctgcggcggagcctccttaaggaaggtgcaagaggttggcagcttcgattgaagcacatcgaccggcgacagcagccaggagtcatgagcgacagcggcgagcagaactacggcgagcgggaatcccgttctgcttccagaagtggaagtgctcacggatcggggaaatctgcaaggcatacccctgcaaggtctcgctccaaggaagattccaggcgttccagatcaaagtccaggtcccgatctgaatctaggtctagatccagaagaagctcccgaaggcattatacccggtcacggtctcgctcccgctcccatagacgatcacgtagcaggtcttacagtcgagattatcgtagacggcacagccacagccattctcccatgtctactcgcaggcgtcatgttgggaatcgggcaaatcctgatcctaactgttgtcttggagtatttgggctgagcttgtacaccacagaaagagatctaagagaagtgttctctaaatatggtcccattgccgatgtgtctattgtatatgaccagcagtctaggcgttcaagaggatttgcctttgtatattttgaaaatgtagatgatgccaaggaagctaaagaacgtgccaatggaatggagcttgatgggcgtaggatcagagttgatttctctataacaaaaagaccacatacgccaacaccaggaatttacatggggagacctacctatggcagctctcgccgtcgggattactatgacagaggatatgatcggggctatgatgatcgggactactatagcagatcatacagaaggcggtcaccttctccttactatagtcgtggaggatacagatcacgttccagatctcgatcatactcacctcgtcgctattaaagcatgaagactttctgaaacctgccctagagctgggatattgtttgtgggcaatattttttattgtctcttgtttaaaaagtgaacagtgcctagtgaagttaggtgacttttacaccttttacgatgactacttttggtggagttgaaatgctgttttcattctgcatttgtgtagtttggtgctttgttccaagttaagtgttttcagaaaagtatgttttgcatgtatttttttacagtctaaattttgactgctgagaagtttctattgtacaaaacttcatttaaaaggtttttctactgaatccagggtattctgaagatcgaagcctgtgtaaaatgctaccaaatggcaaaaagcaacaataaacagtttgatttttacttttctttctaacatatcaatgcttagcagaactattcagattgtcagtagtaaatttaaagacaaatgcccgttttcctccagtccatgaaacataccatacttatatacctgcaactaagtgtttaaaattatgctctgtaactctgtactgctagtattagaactaaaaatcttaaaatacagccagtgcttaatgcttatatcaatgtggatttgtcggcttttatgtaatctgtaatatgtatagcaggaaatacgaagagttacacagtgtatgccttaaaaggctgtttcttaaaggtgttacaaggggataatggtatttcaactagttatcagcaagtgacaatacattccaccacaaatacactcttgttcttctagcttttagactatatgaaaaaaccgggtgcttcaaagtacatgataagggaacactatacctgtcatggatgaactgaagactttgcctgttcattttttaaatattattttcaggtcctttgcttaccaaaggaggcccaatttcactcaaatgttttgagaactgtgtttaaataaacgcaaatgaaaagaaaaa

SEQ ID NO: 335396 - DNA, 2492 bp, Homo sapiens
acaaatgaattgtccgtgctttcctttcatgcacttatgtattaatgtgtcactttttgactagaggtgtgcttttgacacttaacctattttctattgaatataataagaagtgtgaaatgtaactaatagttcttaaaatgttaaatgaacagtaaatgttcagtggcgcacttcacattcaacttaagcatgataagtctatttggagtagagaaatgagattaccatatattctagaaccagcagaaaactatgtagttttcagttttttgagctgcatattctagtttcttttttttttttttttaatccaaatcaacaaagggattttttttttctagtttcagttttggcactggattttatcctggagttttaaaatattcttcatcctgttctttttctattaaggttaatgttgaagaaggaaaatgcggaagtcgtcatttgacaagttttataaatgagtatttgaagctcaggaataagtgaagctgaaatttgaaaaaataaaagaaagaatgcatgctaattatcagaccagaagtcccacttgtagaatattgagcaatttgtgtgaagtggggaagatgaaagaagtcagaatttgaaacggaagaatgaagaaaagaaataaaaatgaagttaagataagaagtaatctggaatcagaaagcactacgctaagaatcccgttctgcttccagaagtggaagtgctcacggatcggggaaatctgcaaggcatacccctgcaaggtctcgctccaaggaagattccaggcgttccagatcaaagtccaggtcccgatctgaatctaggtctagatccagaagaagctcccgaaggcattatacccggtcacggtctcgctcccgctcccatagacgatcacgtagcaggtcttacagtcgagattatcgtagacggcacagccacagccattctcccatgtctactcgcaggcgtcatgttgggaatcgggcaaatcctgatcctaactgttgtcttggagtatttgggctgagcttgtacaccacagaaagagatctaagagaagtgttctctaaatatggtcccattgccgatgtgtctattgtatatgaccagcagtctaggcgttcaagaggatttgcctttgtatattttgaaaatgtagatgatgccaaggaagctaaagaacgtgccaatggaatggagcttgatgggcgtaggatcagagttgatttctctataacaaaaagaccacatacgccaacaccaggaatttacatggggagacctacctatggcagctctcgccgtcgggattactatgacagaggatatgatcggggctatgatgatcgggactactatagcagatcatacagaggaggaggtggaggaggaggaggatggagagctgcccaagacagggatcagatttatagaaggcggtcaccttctccttactatagtcgtggaggatacagatcacgttccagatctcgatcatactcacctcgtcgctattaaagcatgaagactttctgaaacctgccctagagctgggatattgtttgtgggcaatattttttattgtctcttgtttaaaaagtgaacagtgcctagtgaagttaggtgacttttacaccttttacgatgactacttttggtggagttgaaatgctgttttcattctgcatttgtgtagtttggtgctttgttccaagttaagtgttttcagaaaagtatgttttgcatgtatttttttacagtctaaattttgactgctgagaagtttctattgtacaaaacttcatttaaaaggtttttctactgaatccagggtattctgaagatcgaagcctgtgtaaaatgctaccaaatggcaaaaagcaacaataaacagtttgatttttacttttctttctaacatatcaatgcttagcagaactattcagattgtcagtagtaaatttaaagacaaatgcccgttttcctccagtccatgaaacataccatacttatatacctgcaactaagtgtttaaaattatgctctgtaactctgtactgctagtattagaactaaaaatcttaaaatacagccagtgcttaatgcttatatcaatgtggatttgtcggcttttatgtaatctgtaatatgtatagcaggaaatacgaagagttacacagtgtatgccttaaaaggctgtttcttaaaggtgttacaaggggataatggtatttcaactagttatcagcaagtgacaatacattccaccacaaatacactcttgttcttctagcttttagactatatgaaaaaaccgggtgcttcaaagtacatgataagggaacactatacctgtcatggatgaactgaagactttgcctgttcattttttaaatattattttcaggtcctttgcttaccaaaggaggcccaatttcactcaaatgttttgagaactgtgtttaaataaacgcaaatgaaaagaaaaa

SEQ ID NO: 335397 - DNA, 2172 bp, Homo sapiens
aggtataaagtataggtgtcatagttaataaggttccgcctcaccctagtctttatggagtaacattctgaaacacagtccttggacagttcccttaactgcttgactttggcacccctttctgaaggaagtggggtcaaataactcttatccctgctccaaaaaggtggaagaaaggacaagttaattgacttatgtcatttggagcaatgaaactattaacaccaggtatattcagttcctgcccttacctatattttcttatcttggaaggggattgctgtccctcaccatttatctcacagcagcttatttgtttttaaagttgcccagaaagtgtgcaaattaaacttttaacatctacgtgtaggaatcccgttctgcttccagaagtggaagtgctcacggatcggggaaatctgcaaggcatacccctgcaaggtctcgctccaaggaagattccaggcgttccagatcaaagtccaggtcccgatctgaatctaggtctagatccagaagaagctcccgaaggcattatacccggtcacggtctcgctcccgctcccatagacgatcacgtagcaggtcttacagtcgagattatcgtagacggcacagccacagccattctcccatgtctactcgcaggcgtcatgttgggaatcgggcaaatcctgatcctaactgttgtcttggagtatttgggctgagcttgtacaccacagaaagagatctaagagaagtgttctctaaatatggtcccattgccgatgtgtctattgtatatgaccagcagtctaggcgttcaagaggatttgcctttgtatattttgaaaatgtagatgatgccaaggaagctaaagaacgtgccaatggaatggagcttgatgggcgtaggatcagagttgatttctctataacaaaaagaccacatacgccaacaccaggaatttacatggggagacctacctatggcagctctcgccgtcgggattactatgacagaggatatgatcggggctatgatgatcgggactactatagcagatcatacagaggaggaggtggaggaggaggaggatggagagctgcccaagacagggatcagatttatagaaggcggtcaccttctccttactatagtcgtggaggatacagatcacgttccagatctcgatcatactcacctcgtcgctattaaagcatgaagactttctgaaacctgccctagagctgggatattgtttgtgggcaatattttttattgtctcttgtttaaaaagtgaacagtgcctagtgaagttaggtgacttttacaccttttacgatgactacttttggtggagttgaaatgctgttttcattctgcatttgtgtagtttggtgctttgttccaagttaagtgttttcagaaaagtatgttttgcatgtatttttttacagtctaaattttgactgctgagaagtttctattgtacaaaacttcatttaaaaggtttttctactgaatccagggtattctgaagatcgaagcctgtgtaaaatgctaccaaatggcaaaaagcaacaataaacagtttgatttttacttttctttctaacatatcaatgcttagcagaactattcagattgtcagtagtaaatttaaagacaaatgcccgttttcctccagtccatgaaacataccatacttatatacctgcaactaagtgtttaaaattatgctctgtaactctgtactgctagtattagaactaaaaatcttaaaatacagccagtgcttaatgcttatatcaatgtggatttgtcggcttttatgtaatctgtaatatgtatagcaggaaatacgaagagttacacagtgtatgccttaaaaggctgtttcttaaaggtgttacaaggggataatggtatttcaactagttatcagcaagtgacaatacattccaccacaaatacactcttgttcttctagcttttagactatatgaaaaaaccgggtgcttcaaagtacatgataagggaacactatacctgtcatggatgaactgaagactttgcctgttcattttttaaatattattttcaggtcctttgcttaccaaaggaggcccaatttcactcaaatgttttgagaactgtgtttaaataaacgcaaatgaaaagaaaaa

SEQ ID NO: 335398 - DNA, 1903 bp, Homo sapiens
aaggagcgccgcgtcacgatccggtagagttagagcccgtgcggaggcggtgcggagcatttcggctctgagcggctgggcgaccggcgcgtcgtgcggggctgcggcggagcctccttaaggaaggtgcaagaggttggcagcttcgattgaagcacatcgaccggcgacagcagccaggagtcatgagcgacagcggcgagcagaactacggcgagcgggaatcccgttctgcttccagaagtggaagtgctcacggatcggggaaatctgcaaggcatacccctgcaaggtctcgctccaaggaagattccaggcgttccagatcaaagtccaggtcccgatctgaatctaggtctagatccagaagaagctcccgaaggcattatacccggtcacggtctcgctcccgctcccatagacgatcacgtagcaggtcttacagtcgagattatcgtagacggcacagccacagccattctcccatgtctactcgcaggcgtcatgttgggaatcgggcaaatcctgatcctaactgttgtcttggagtatttgggctgagcttgtacaccacagaaagagatctaagagaagtgttctctaaatatggtcccattgccgatgtgtctattgtatatgaccagcagtctaggcgttcaagaggatttgcctttgtatattttgaaaatgtagatgatgccaaggaagctaaagaacgtgccaatggaatggagcttgatgggcgtaggatcagagttgatttctctataacaaaaagaccacatacgccaacaccaggaatttacatggggagacctacctatggcagctctcgccgtcgggattaaaggcggtcaccttctccttactatagtcgtggaggatacagatcacgttccagatctcgatcatactcacctcgtcgctattaaagcatgaagactttctgaaacctgccctagagctgggatattgtttgtgggcaatattttttattgtctcttgtttaaaaagtgaacagtgcctagtgaagttaggtgacttttacaccttttacgatgactacttttggtggagttgaaatgctgttttcattctgcatttgtgtagtttggtgctttgttccaagttaagtgttttcagaaaagtatgttttgcatgtatttttttacagtctaaattttgactgctgagaagtttctattgtacaaaacttcatttaaaaggtttttctactgaatccagggtattctgaagatcgaagcctgtgtaaaatgctaccaaatggcaaaaagcaacaataaacagtttgatttttacttttctttctaacatatcaatgcttagcagaactattcagattgtcagtagtaaatttaaagacaaatgcccgttttcctccagtccatgaaacataccatacttatatacctgcaactaagtgtttaaaattatgctctgtaactctgtactgctagtattagaactaaaaatcttaaaatacagccagtgcttaatgcttatatcaatgtggatttgtcggcttttatgtaatctgtaatatgtatagcaggaaatacgaagagttacacagtgtatgccttaaaaggctgtttcttaaaggtgttacaaggggataatggtatttcaactagttatcagcaagtgacaatacattccaccacaaatacactcttgttcttctagcttttagactatatgaaaaaaccgggtgcttcaaagtacatgataagggaacactatacctgtcatggatgaactgaagactttgcctgttcattttttaaatattattttcaggtcctttgcttaccaaaggaggcccaatttcactcaaatgttttgagaactgtgtttaaataaacgcaaatgaaaagaaaaa

SEQ ID NO: 335399 - DNA, 1889 bp, Homo sapiens
aaggagcgccgcgtcacgatccggtagagttagagcccgtgcggaggcggtgcggagcatttcggctctgagcggctgggcgaccggcgcgtcgtgcggggctgcggcggagcctccttaaggaaggtgcaagaggttggcagcttcgattgaagcacatcgaccggcgacagcagccaggagtcatgagcgacagcggcgagcagaactacggcgagcgggtctagatccagaagaagctcccgaaggcattatacccggtcacggtctcgctcccgctcccatagacgatcacgtagcaggtcttacagtcgagattatcgtagacggcacagccacagccattctcccatgtctactcgcaggcgtcatgttgggaatcgggcaaatcctgatcctaactgttgtcttggagtatttgggctgagcttgtacaccacagaaagagatctaagagaagtgttctctaaatatggtcccattgccgatgtgtctattgtatatgaccagcagtctaggcgttcaagaggatttgcctttgtatattttgaaaatgtagatgatgccaaggaagctaaagaacgtgccaatggaatggagcttgatgggcgtaggatcagagttgatttctctataacaaaaagaccacatacgccaacaccaggaatttacatggggagacctacctatggcagctctcgccgtcgggattactatgacagaggatatgatcggggctatgatgatcgggactactatagcagatcatacagaggaggaggtggaggaggaggaggatggagagctgcccaagacagggatcagatttatagaaggcggtcaccttctccttactatagtcgtggaggatacagatcacgttccagatctcgatcatactcacctcgtcgctattaaagcatgaagactttctgaaacctgccctagagctgggatattgtttgtgggcaatattttttattgtctcttgtttaaaaagtgaacagtgcctagtgaagttaggtgacttttacaccttttacgatgactacttttggtggagttgaaatgctgttttcattctgcatttgtgtagtttggtgctttgttccaagttaagtgttttcagaaaagtatgttttgcatgtatttttttacagtctaaattttgactgctgagaagtttctattgtacaaaacttcatttaaaaggtttttctactgaatccagggtattctgaagatcgaagcctgtgtaaaatgctaccaaatggcaaaaagcaacaataaacagtttgatttttacttttctttctaacatatcaatgcttagcagaactattcagattgtcagtagtaaatttaaagacaaatgcccgttttcctccagtccatgaaacataccatacttatatacctgcaactaagtgtttaaaattatgctctgtaactctgtactgctagtattagaactaaaaatcttaaaatacagccagtgcttaatgcttatatcaatgtggatttgtcggcttttatgtaatctgtaatatgtatagcaggaaatacgaagagttacacagtgtatgccttaaaaggctgtttcttaaaggtgttacaaggggataatggtatttcaactagttatcagcaagtgacaatacattccaccacaaatacactcttgttcttctagcttttagactatatgaaaaaaccgggtgcttcaaagtacatgataagggaacactatacctgtcatggatgaactgaagactttgcctgttcattttttaaatattattttcaggtcctttgcttaccaaaggaggcccaatttcactcaaatgttttgagaactgtgtttaaataaacgcaaatgaaaagaaaaa

SEQ ID NO: 335400 - DNA, 2355 bp, Homo sapiens
ctttcctcttgtcatctttttttgagacagggcctcactctgtcgcccagtctggagtgcagtggtgcaatctcagcttactgcagcttctaccttgcaggcttaagcgatccgcccacctcagcctcctgagtagctaggactagaggcatgccaccacacccagtaatttgttatatttttgtagagacatggggtctcactgtgttgcccaggctagtctcaaaactcctgagcttcaagcagtccaccagccttggcctcccagagtgtttggattacaagcatgagccactgcgcctggccaactcttgtttcttacgattgcaagctgtttatgacctgtaaaatggtttggtacgcatcccctcaggcttcgtttatgtacttacttgtgtattgtgtttctgaaaaaatcgaaccatacatgctcatctttttggcaattcagagcattctattgaatggaaggtgtgtcaacattacaattttttctagctgatagacacagtgtggttccagttatccttgtatgtcatgttatgaatatgtgaatttttcttagaataaattcatagaaggaaagatgccaagttgcttttcgccagcacgagtgcttgtttacctacttaattctaaggttgaaattttttcttttgcattctttcctacccattcccaaaaatacttgtagtacttgctgtaattttgtaatttctaagcagtgtttggtctaatcattatgtacttttcttgttagtgacattttggctagtatacagctccctttttaaacaactttgattttatgacaacttttccaaagtttaaaacttttttttttccctaggcaaatcctgatcctaactgttgtcttggagtatttgggctgagcttgtacaccacagaaagagatctaagagaagtgttctctaaatatggtcccattgccgatgtgtctattgtatatgaccagcagtctaggcgttcaagaggatttgcctttgtatattttgaaaatgtagatgatgccaaggaagctaaagaacgtgccaatggaatggagcttgatgggcgtaggatcagagttgatttctctataacaaaaagaccacatacgccaacaccaggaatttacatggggagacctacctatggcagctctcgccgtcgggattactatgacagaggatatgatcggggctatgatgatcgggactactatagcagatcatacagaggaggaggtggaggaggaggaggatggagagctgcccaagacagggatcagatttatagaaggcggtcaccttctccttactatagtcgtggaggatacagatcacgttccagatctcgatcatactcacctcgtcgctattaaagcatgaagactttctgaaacctgccctagagctgggatattgtttgtgggcaatattttttattgtctcttgtttaaaaagtgaacagtgcctagtgaagttaggtgacttttacaccttttacgatgactacttttggtggagttgaaatgctgttttcattctgcatttgtgtagtttggtgctttgttccaagttaagtgttttcagaaaagtatgttttgcatgtatttttttacagtctaaattttgactgctgagaagtttctattgtacaaaacttcatttaaaaggtttttctactgaatccagggtattctgaagatcgaagcctgtgtaaaatgctaccaaatggcaaaaagcaacaataaacagtttgatttttacttttctttctaacatatcaatgcttagcagaactattcagattgtcagtagtaaatttaaagacaaatgcccgttttcctccagtccatgaaacataccatacttatatacctgcaactaagtgtttaaaattatgctctgtaactctgtactgctagtattagaactaaaaatcttaaaatacagccagtgcttaatgcttatatcaatgtggatttgtcggcttttatgtaatctgtaatatgtatagcaggaaatacgaagagttacacagtgtatgccttaaaaggctgtttcttaaaggtgttacaaggggataatggtatttcaactagttatcagcaagtgacaatacattccaccacaaatacactcttgttcttctagcttttagactatatgaaaaaaccgggtgcttcaaagtacatgataagggaacactatacctgtcatggatgaactgaagactttgcctgttcattttttaaatattattttcaggtcctttgcttaccaaaggaggcccaatttcactcaaatgttttgagaactgtgtttaaataaacgcaaatgaaaagaaaaa

SEQ ID NO: 335401 - DNA, 1913 bp, Homo sapiens
aaggagcgccgcgtcacgatccggtagagttagagcccgtgcggaggcggtgcggagcatttcggctctgagcggctgggcgaccggcgcgtcgtgcggggctgcggcggagcctccttaaggaaggtgcaagaggttggcagcttcgattgaagcacatcgaccggcgacagcagccaggagtcatgagcgacagcggcgagcagaactacggcgagcgggtctagatccagaagaagctcccgaaggcattatacccggtcacggtctcgctcccgctcccatagacgatcacgtagcaggtcttacagtcgagattatcgtagacggcacagccacagccattctcccatgtctactcgcaggcgtcatgttgggaatcggtttaaaacttttttttttccctaggcaaatcctgatcctaactgttgtcttggagtatttgggctgagcttgtacaccacagaaagagatctaagagaagtgttctctaaatatggtcccattgccgatgtgtctattgtatatgaccagcagtctaggcgttcaagaggatttgcctttgtatattttgaaaatgtagatgatgccaaggaagctaaagaacgtgccaatggaatggagcttgatgggcgtaggatcagagttgatttctctataacaaaaagaccacatacgccaacaccaggaatttacatggggagacctacctatggcagctctcgccgtcgggattactatgacagaggatatgatcggggctatgatgatcgggactactatagcagatcatacagaggaggaggtggaggaggaggaggatggagagctgcccaagacagggatcagatttatagaaggcggtcaccttctccttactatagtcgtggaggatacagatcacgttccagatctcgatcatactcacctcgtcgctattaaagcatgaagactttctgaaacctgccctagagctgggatattgtttgtgggcaatattttttattgtctcttgtttaaaaagtgaacagtgcctagtgaagttaggtgacttttacaccttttacgatgactacttttggtggagttgaaatgctgttttcattctgcatttgtgtagtttggtgctttgttccaagttaagtgttttcagaaaagtatgttttgcatgtatttttttacagtctaaattttgactgctgagaagtttctattgtacaaaacttcatttaaaaggtttttctactgaatccagggtattctgaagatcgaagcctgtgtaaaatgctaccaaatggcaaaaagcaacaataaacagtttgatttttacttttctttctaacatatcaatgcttagcagaactattcagattgtcagtagtaaatttaaagacaaatgcccgttttcctccagtccatgaaacataccatacttatatacctgcaactaagtgtttaaaattatgctctgtaactctgtactgctagtattagaactaaaaatcttaaaatacagccagtgcttaatgcttatatcaatgtggatttgtcggcttttatgtaatctgtaatatgtatagcaggaaatacgaagagttacacagtgtatgccttaaaaggctgtttcttaaaggtgttacaaggggataatggtatttcaactagttatcagcaagtgacaatacattccaccacaaatacactcttgttcttctagcttttagactatatgaaaaaaccgggtgcttcaaagtacatgataagggaacactatacctgtcatggatgaactgaagactttgcctgttcattttttaaatattattttcaggtcctttgcttaccaaaggaggcccaatttcactcaaatgttttgagaactgtgtttaaataaacgcaaatgaaaagaaaaa

SEQ ID NO: 335402 - DNA, 1597 bp, Homo sapiens
aaggagcgccgcgtcacgatccggtagagttagagcccgtgcggaggcggtgcggagcatttcggctctgagcggctgggcgaccggcgcgtcgtgcggggctgcggcggagcctccttaaggaaggtgcaagaggttggcagcttcgattgaagcacatcgaccggcgacagcagccaggagtcatgagcgacagcggcgagcagaactacggcgagcgggaatcccgttctgcttccagaagtggaagtgctcacggatcggggaaatctgcaaggcatacccctgcaaggtctcgctccaaggaagattccaggcgttccagatcaaagtccaggtcccgatctgaatctaggtctagatccagaagaagctcccgaaggcattatacccggtcacggtctcgctcccgctcccatagacgatcacgtagcaggtcttacagtcgagattatcgtagacggcacagccacagccattctcccatgtctactcgcaggcgtcatgttgggaatcgggcaaatcctgatcctaactgttgtcttggagtatttgggctgagcttgtacaccacagaaagagatctaagagaagtgttctctaaatatggtcccattgccgatgtgtctattgtatatgaccagcagtctaggcgttcaagaggatttgcctttgtatattttgaaaatgtagatgatgccaaggaagctaaagaacgtgccaatggaatggagcttgatgggcgtaggatcagagttgatttctctataacaaaaagaccacatacgccaacaccaggaatttacatggggagacctacctatggcagctctcgccgtcgggattactatgacagaggatatgatcggggctatgatgatcgggactactatagcagatcatacagaggaggaggtggaggaggaggaggatggagagctgcccaagacagggatcagatttataggaatcaggaatttaataagaaggggggtcaaccttcttctttaactaatagggtcggtggagggactacccagaatctaaggtatccagaatctttcggaatcaatatattcaaactcggtccgggtatttaaaaaggcatgagaagagactttcttgagaaaactggggcgcctaagaagggtggggggaaatacttcggggtggcggggggggcaacttattttttttaattgtggtggttccttcgtggtgtttccaaaccacacggtggagaccacggggtggtcgcttaatggtggaggacggtgtaaggggtggagctttttttaacaaaccacttttttttttaaccacgcagtgctacgccttaacacctctttctgtggggggtggcggaccagctttggcagcaccacttggacggttggtgcttctccaaactttttcctgggcgacatccttggtcgcgttaccgcccaccagcggcggagggcgctactcggggcgcccccacagcagctttctaaacaagcggcgggcgtgtttccccacagaaccaacacagcgctactaggtctcctccggcgcacttgtgtatctttttgttaacagaccggggctcacaaac

SEQ ID NO: 335403 - DNA, 1340 bp, Homo sapiens
aaggagcgccgcgtcacgatccggtagagttagagcccgtgcggaggcggtgcggagcatttcggctctgagcggctgggcgaccggcgcgtcgtgcggggctgcggcggagcctccttaaggaaggtgcaagaggttggcagcttcgattgaagcacatcgaccggcgacagcagccaggagtcatgagcgacagcggcgagcagaactacggcgagcgggaatcccgttctgcttccagaagtggaagtgctcacggatcggggaaatctgcaaggcatacccctgcaaggtctcgctccaaggaagattccaggcgttccagatcaaagtccaggtcccgatctgaatctaggtctagatccagaagaagctcccgaaggcattatacccggtcacggtctcgctcccgctcccatagacgatcacgtagcaggtcttacagtcgagattatcgtagacggcacagccacagccattctcccatgtctactcgcaggcgtcatgttgggaatcgggcaaatcctgatcctaactgttgtcttggagtatttgggctgagcttgtacaccacagaaagagatctaagagaagtgttctctaaatatggtcccattgccgatgtgtctattgtatatgaccagcagtctaggcgttcaagaggatttgcctttgtatattttgaaaatgtagatgatgccaaggaagctaaagaacgtgccaatggaatggagcttgatgggcgtaggatcagagttgatttctctataacaaaaagaccacatacgccaacaccaggaatttacatggggagacctacctatggcagctctcgccgtcgggattactatgacagaggatatgatcggggctatgatgatcgggactactatagcagatcatacagaggaggcaggctgcgacgcacggagcgcagcgactggcacgcagctgcccaagacagggcatcagatccatagcacagcgcgcgtcacccttcttcctttactatacgtcgtggagcgactacacgatcaccgctccccagatcctccgatcatactcacctctgtcgctattaacaggcactgaagactttctgaaacctgtccctagaagctggcgaataattgttctgtgggccacatactttcacatatgtctcctcgtctcaaccacgtgacacagctgcctcgatggacgctcaggatgcactcacacacacccctctccaccgaactgacctacattcaggccgcgacgtcgatacatgctgctatacatacatgccattttgtgtaactttggtgccgagttccaagtttagtgattccatacca

SEQ ID NO: 335404 - DNA, 1586 bp, Homo sapiens
agtatggcttgctctgatgacagtgtattccctttatcagataatggattggtttcaggtagtttcatacctaatgattctccacacatcctgaacattttttggttcaagaaagtttgtggaaacaacccttagaatcctattattttttaagaaggaaaaattggacagcctcctgagccagagtaggctcggagactcctgttgtttctaactgaaatagtaaataatgtatttccaccatttacccagagtaggctcagagactcctgttgtttctaattgaaacagtaaataatgtatttccaccatttagtagcttttcaagagtccttaaaaatttttggacagcacagaaacatggattacttagccctttagttctcagattgagttatatacttcccagcaatttctgttatttaagattgctatctcatttctggtgtaatacttacatggaagtctttctctatttgggggtggtggggttctggcacataggaatttcttaatggcagaatattctgaaattctcggcattaaagtatacttgataattagttcacttaatattaaagcatgttcattcttttcttcccaggtcgctattaaagcatgaagactttctgaaacctgccctagagctgggatattgtttgtgggcaatattttttattgtctcttgtttaaaaagtgaacagtgcctagtgaagttaggtgacttttacaccttttacgatgactacttttggtggagttgaaatgctgttttcattctgcatttgtgtagtttggtgctttgttccaagttaagtgttttcagaaaagtatgttttgcatgtatttttttacagtctaaattttgactgctgagaagtttctattgtacaaaacttcatttaaaaggtttttctactgaatccagggtattctgaagatcgaagcctgtgtaaaatgctaccaaatggcaaaaagcaacaataaacagtttgatttttacttttctttctaacatatcaatgcttagcagaactattcagattgtcagtagtaaatttaaagacaaatgcccgttttcctccagtccatgaaacataccatacttatatacctgcaactaagtgtttaaaattatgctctgtaactctgtactgctagtattagaactaaaaatcttaaaatacagccagtgcttaatgcttatatcaatgtggatttgtcggcttttatgtaatctgtaatatgtatagcaggaaatacgaagagttacacagtgtatgccttaaaaggctgtttcttaaaggtgttacaaggggataatggtatttcaactagttatcagcaagtgacaatacattccaccacaaatacactcttgttcttctagcttttagactatatgaaaaaaccgggtgcttcaaagtacatgataagggaacactatacctgtcatggatgaactgaagactttgcctgttcattttttaaatattattttcaggtcctttgcttaccaaaggaggcccaatttcactcaaatgttttgagaactgtgtttaaataaacgcaaatgaaaagaaaaa

SEQ ID NO: 335405 - DNA, 770 bp, Homo sapiens
aaggagcgccgcgtcacgatccggtagagttagagcccgtgcggaggcggtgcggagcatttcggctctgagcggctgggcgaccggcgcgtcgtgcggggctgcggcggagcctccttaaggaaggtgcaagaggttggcagcttcgattgaagcacatcgaccggcgacagcagccaggagtcatgagcgacagcggcgagcagaactacggcgagcgggaatcccgttctgcttccagaagtggaagtgctcacggatcggggaaatctgcaaggcatacccctgcaaggtctcgctccaaggaagattccaggcgttccagatcaaagtccaggtcccgatctgaatctaggtctagatccagaagaagctcccgaaggcattatacccggtcacggtctcgctcccgctcccatagacgatcacgtagcaggtcttacagtcgagattatcgtagacggcacagccacagccattctcccatgtctactcgcaggcgtcatgttgggaatcgggcaaatcctgatcctaactgttgtcttggagtatttgggctgagcttgtacaccacagaaagagatctaagagaagtgttctctaaatatggtcccattgccgatgtgtctattgtatatgaccagcagtctaggcgttcaagaggatttgccaagaagtaaaggccattacgaaactaaatagcagtaagtcagcatcccgtcatcgttggcccacagagaattatgaccatgtacggaaggtacgactat

SEQ ID NO: 335406 - DNA, 1067 bp, Homo sapiens
aaggagcgccgcgtcacgatccggtagagttagagcccgtgcggaggcggtgcggagcatttcggctctgagcggctgggcgaccggcgcgtcgtgcggggctgcggcggagcctccttaaggaaggtgcaagaggttggcagcttcgattgaagcacatcgaccggcgacagcagccaggagtcatgagcgacagcggcgagcagaactacggcgagcgggttaatgttgaagaaggaaaatgcggaagtcgtcatttgacaagttttataaatgagtatttgaagctcaggaataagtgaagctgaaatttgaaaaaataaaagaaagaatgcatgctaattatcagaccagaagtcccacttgtagaatattgagcaatttgtgtgaagtggggaagatgaaagaagtcagaatttgaaacggaagaatgaagaaaagaaataaaaatgaagttaagataagaagtaatctggaatcagaaagcactacgctaagaatcccgttctgcttccagaagtggaagtgctcacggatcggggaaatctgcaaggcatacccctgcaaggtctcgctccaaggaagattccaggcgttccagatcaaagtccaggtcccgatctgaatctaggtctagatccagaagaagctcccgaaggcattatacccggtcacggtctcgctcccgctcccatagacgatcacgtagcaggtcttacagtcgagattatcgtagacggcacagccacagccattctcccatgtctactcgcaggcgtcatgttgggaatcgggtaagatgaaaaactggttttgaagcagtcaactgcctaaatttactttttcttaaagttagagctgattttgacaatagagctttagcagttggtgcgtgagtgaaatcttcagaggcttttttagtgttttgagagagtcttttaagttaatcttccatgacggggtctgcatttgggctgcctgtcaattaagcataatactgacacaatggtgtaactccttagcccatcaaaaaaaaaaacttccgactgcattactatactgtagta

SEQ ID NO: 335407 - DNA, 1002 bp, Homo sapiens
agtatggcttgctctgatgacagtgtattccctttatcagataatggattggtttcaggtagtttcatacctaatgattctccacacatcctgaacattttttggttcaagaaagtttgtggaaacaacccttagaatcctattattttttaagaaggaaaaattggacagcctcctgagccagagtaggctcggagactcctgttgtttctaactgaaatagtaaataatgtatttccaccatttacccagagtaggctcagagactcctgttgtttctaattgaaacagtaaataatgtatttccaccatttagtagcttttcaagagtccttaaaaatttttggacagcacagaaacatggattacttagccctttagttctcagattgagttatatacttcccagcaatttctgttatttaagattgctatctcatttctggtgtaatacttacatggaagtctttctctatttgggggtggtggggttctggcacataggaatttcttaatggcagaatattctgaaattctcggcattaaagtatacttgataattagttcacttaatattaaagcatgttcattcttttcttcccaggtcgctattaaagcatgaagactttctgaaacctgccctagagctgggatattgtttgtgggcaatattttttattgtctcttgtttaaaaagtgaacagtgcctagtgaagttaggtgacttttacaccttttacgatgactacttttggtggagttgaaatgctgttttcattctgcatttgtgtagtttggtgctttgttccaagttaagtgttttcagaaaagtatgttttgcatgtatttttttacagtctaaattttgactgctgagaagtttctattgtacaaaacttcatttaaaaggtttttctactgaatccagggtattctgaagatcgaagcctgtgtaaaatgctaccaaatggcaaaaagcaacaataaacagtttgattttta

SEQ ID NO: 335408 - DNA, 954 bp, Homo sapiens
aaggagcgccgcgtcacgatccggtagagttagagcccgtgcggaggcggtgcggagcatttcggctctgagcggctgggcgaccggcgcgtcgtgcggggctgcggcggagcctccttaaggaaggtgcaagaggttggcagcttcgattgaagcacatcgaccggcgacagcagccaggagtcatgagcgacagcggcgagcagaactacggcgagcgggttaatgttgaagaaggaaaatgcggaagtcgtcatttgacaagttttataaatgagtatttgaagctcaggaataagtgaagctgaaatttgaaaaaataaaagaaagaatgcatgctaattatcagaccagaagtcccacttgtagaatattgagcaatttgtgtgaagtggggaagatgaaagaagtcagaatttgaaacggaagaatgaagaaaagaaataaaaatgaagttaagataagaagtaatctggaatcagaaagcactacgctaagtaattactagtctgtttatgtgtccctgtatattttgctaaacatgcatgcattatttgtttaatagaggaaaatatatacagggtaaagaagtgccttccaggggaaacgtttaaattaggtaattctgattttaactgcttagttaaatgattgaaatgcaatttttaaaaaatatttagtagtcaagcaccaggcagcagtgagctctccagcatgggtaacagtgggcttcatgttgtcctctctagataaactttacctgtctaatgttgctggtcctggggcatgagcgaatacctccagggttggaactggtggtctttgccacctccctggactcttagattgcactgtcccctttccttcagtactgagcaatgtatagtagaatattttctgttaaaccattttcaaaggaatgtcaccaggatggttatggaaccaaacccccaa

SEQ ID NO: 335409 - DNA, 568 bp, Homo sapiens
agttgaaatgactaaataattagagaagaaaagtattgatcctactaaattggtaaccatgttagcatattcctggattgttccctcttttggagtttaactttagaacagagtaataaagaagacaatatttgttttcagtcataaccttaggaggtctttgtcttgcaggtctagatccagaagaagctcccgaaggcattatacccggtcacggtctcgctcccgctcccatagacgatcacgtagcaggtcttacagtcgagattatcgtagacggcacagccacagccattctcccatgtctactcgcaggcgtcatgttgggaatcgggtaagatgaaaaactggttttgaagcagtcaactgcctaaatttactttttcttaaagttagagctgattttgacaatagagctttagcagttggtgcgtgagtgaaatcttcagaggcttttttagtgttttgagagagtcttttaagttaatcttccatgacggggtctgcatttgggctgcctgtcaattaagcataatactgacacaatggtgtaactccttagcccatc

SEQ ID NO: 335410 - DNA, 561 bp, Homo sapiens
ctcctgccttggcctcccaaagtgctgggattataggcgttgagccaccgcacccagccaggaattttcttttacaaaactctcttaacatagttcacaaaatttaaaaagtaagtagattaaaatatagcaaggattatttgaccttaaagttattaagagtgcttatttgacacttgggcctgataatgtgcttcattctcaagatttaaacagaccttgaaggttcatgcagctttccttttttggggaactgatgaaagggcagtatatatagtcataaatttatatgtttggtctaattgtgatctattgagacttagacaatcttgacatttgtttataaaggcggtcaccttctccttactatagtcgtggaggatacagatcacgttccagatctcgatcatactcacctcgtaagtttttatcttaatatgattgtttatattgtagtatggcttgctctgatgacagtgtattccctttatcagataatggattggtttcaggtagtttcatacctaatgattctccacacatcctgaacattttttggtt

SEQ ID NO: 335411 - DNA, 2023 bp, Homo sapiens
aaggagcgccgcgtcacgatccggtagagttagagcccgtgcggaggcggtgcggagcatttcggctctgagcggctgggcgaccggcgcgtcgtgcggggctgcggcggagcctccttaaggaaggtgcaagaggttggcagcttcgattgaagcacatcgaccggcgacagcagccaggagtcatgagcgacagcggcgagcagaactacggcgagcgggaatcccgttctgcttccagaagtggaagtgctcacggatcggggaaatctgcaaggcatacccctgcaaggtctcgctccaaggaagattccaggcgttccagatcaaagtccaggtcccgatctgaatctaggtctagatccagaagaagctcccgaaggcattatacccggtcacggtctcgctcccgctcccatagacgatcacgtagcaggtcttacagtcgagattatcgtagacggcacagccacagccattctcccatgtctactcgcaggcgtcatgttgggaatcgggcaaatcctgatcctaactgttgtcttggagtatttgggctgagcttgtacaccacagaaagagatctaagagaagtgttctctaaatatggtcccattgccgatgtgtctattgtatatgaccagcagtctaggcgttcaagaggatttgcctttgtatattttgaaaatgtagatgatgccaaggaagctaaagaacgtgccaatggaatggagcttgatgggcgtaggatcagagttgatttctctataacaaaaagaccacatacgccaacaccaggaatttacatggggagacctacctatggcagctctcgccgtcgggattactatgacagaggatatgatcggggctatgatgatcgggactactatagcagatcatacagaggaggaggtggaggaggaggaggatggagagctgcccaagacagggatcagatttatagaaggcggtcaccttctccttactatagtcgtggaggatacagatcacgttccagatctcgatcatactcacctcgtcgctattaaagcatgaagactttctgaaacctgccctagagctgggatattgtttgtgggcaatattttttattgtctcttgtttaaaaagtgaacagtgcctagtgaagttaggtgacttttacaccttttacgatgactacttttggtggagttgaaatgctgttttcattctgcatttgtgtagtttggtgctttgttccaagttaagtgttttcagaaaagtatgttttgcatgtatttttttacagtctaaattttgactgctgagaagtttctattgtacaaaacttcatttaaaaggtttttctactgaatccagggtattctgaagatcgaagcctgtgtaaaatgctaccaaatggcaaaaagcaacaataaacagtttgatttttacttttctttctaacatatcaatgcttagcagaactattcagattgtcagtagtaaatttaaagacaaatgcccgttttcctccagtccatgaaacataccatacttatatacctgcaactaagtgtttaaaattatgctctgtaactctgtactgctagtattagaactaaaaatcttaaaatacagccagtgcttaatgcttatatcaatgtggatttgtcggcttttatgtaatctgtaatatgtatagcaggaaatacgaagagttacacagtgtatgccttaaaaggctgtttcttaaaggtgttacaaggggataatggtatttcaactagttatcagcaagtgacaatacattccaccacaaatacactcttgttcttctagcttttagactatatgaaaaaaccgggtgcttcaaagtacatgataagggaacactatacctgtcatggatgaactgaagactttgcctgttcattttttaaatattattttcaggtcctttgcttaccaaaggaggcccaatttcactcaaatgttttgagaactgtgtttaaataaacgcaaatgaaaagaaaaa

SEQ ID NO: 335412 - DNA, 2065 bp, Homo sapiens
aaggagcgccgcgtcacgatccggtagagttagagcccgtgcggaggcggtgcggagcatttcggctctgagcggctgggcgaccggcgcgtcgtgcggggctgcggcggagcctccttaaggaaggtgcaagaggttggcagcttcgattgaagcacatcgaccggcgacagcagccaggagtcatgagcgacagcggcgagcagaactacggcgagcgggaatcccgttctgcttccagaagtggaagtgctcacggatcggggaaatctgcaaggcatacccctgcaaggtctcgctccaaggaagattccaggcgttccagatcaaagtccaggtcccgatctgaatctaggtctagatccagaagaagctcccgaaggcattatacccggtcacggtctcgctcccgctcccatagacgatcacgtagcaggtcttacagtcgagattatcgtagacggcacagccacagccattctcccatgtctactcgcaggcgtcatgttgggaatcgggcaaatcctgatcctaactgttgtcttggagtatttgggctgagcttgtacaccacagaaagagatctaagagaagtgttctctaaatatggtcccattgccgatgtgtctattgtatatgaccagcagtctaggcgttcaagaggatttgcctttgtatattttgaaaatgtagatgatgccaaggaagctaaagaacgtgccaatggaatggagcttgatgggcgtaggatcagagttgatttctctataacaaaaagaccacatacgccaacaccaggaatttacatggggagacctacctatggcagctctcgccgtcgggattactatgacagaggatatgatcggggctatgatgatcgggactactatagcagatcatacagaggaggaggtggaggaggaggaggatggagagctgcccaagacagggatcagatttatagaaggcggtcaccttctccttactatagtcgtggaggatacagatcacgttccagatctcgatcatactcacctcgtcgctattaaagcatgaagactttctgaaacctgccctagagctgggatattgtttgtgggcaatattttttattgtctcttgtttaaaaagtgaacagtgcctagtgaagttaggtgacttttacaccttttacgatgactacttttggtggagttgaaatgctgttttcattctgcatttgtgtagtttggtgctttgttccaagttaagtgttttcagaaaagtatgttttgcatgtatttttttacagtctaaattttgactgctgagaagtttctattgtacaaaacttcatttaaaaggtttttctactgaatccagggtattctgaagatcgaagcctgtgtaaaatgctaccaaatggcaaaaagcaacaataaacagtttgatttttacttttctttctaacatatcaatgcttagcagaactattcagattgtcagtagtaaatttaaagacaaatgcccgttttcctccagtccatgaaacataccatacttatatacctgcaactaagtgtttaaaattatgctctgtaactctgtactgctagtattagaactaaaaatcttaaaatacagccagtgcttaatgcttatatcaatgtggatttgtcggcttttatgtaatctgtaatatgtatagcaggaaatacgaagagttacacagtgtatgccttaaaaggctgtttcttaaaggtgttacaaggggataatggtatttcaactagttatcagcaagtgacaatacattccaccacaaatacactcttgttcttctagcttttagactatatgaaaaaaccgggtgcttcaaagtacatgataagggaacactatacctgtcatggatgaactgaagactttgcctgttcattttttaaatattattttcaggtcctttgcttaccaaaggaggcccaatttcactcaaatgttttgagaactgtgtttaaataaacgcaaatgaaaagaaaaaaaaaaaaaaaaaaaaaaaaaaaaaacaaaaaaaaaaaaacaa

SEQ ID NO: 335413 - DNA, 2023 bp, Homo sapiens
  misc_feature (1503)..(1503): n is a, c, g, or t
  misc_feature (1531)..(1531): n is a, c, g, or t
  misc_feature (1540)..(1540): n is a, c, g, or t
  misc_feature (1548)..(1548): n is a, c, g, or t
  misc_feature (1562)..(1562): n is a, c, g, or t
  misc_feature (1564)..(1565): n is a, c, g, or t
  misc_feature (1569)..(1569): n is a, c, g, or t
  misc_feature (1571)..(1571): n is a, c, g, or t
  misc_feature (1574)..(1574): n is a, c, g, or t
aaggagcgccgcgtcacgatccggtagagttagagcccgtgcggaggcggtgcggagcatttcggctctgagcggctgggcgaccggcgcgtcgtgcggggctgcggcggagcctccttaaggaaggtgcaagaggttggcagcttcgattgaagcacatcgaccggcgacagcagccaggagtcatgagcgacagcggcgagcagaactacggcgagcgggaatcccgttctgcttccagaagtggaagtgctcacggatcggggaaatctgcaaggcatacccctgcaaggtctcgctccaaggaagattccaggcgttccagatcaaagtccaggtcccgatctgaatctaggtctagatccagaagaagctcccgaaggcattatacccggtcacggtctcgctcccgctcccatagacgatcacgtagcaggtcttacagtcgagattatcgtagacggcacagccacagccattctcccatgtctactcgcaggcgtcatgttgggaatcgggcaaatcctgatcctaactgttgtcttggagtatttgggctgagcttgtacaccacagaaagagatctaagagaagtgttctctaaatatggtcccattgccgatgtgtctattgtatatgaccagcagtctaggcgttcaagaggatttgcctttgtatattttgaaaatgtagatgatgccaaggaagctaaagaacgtgccaatggaatggagcttgatgggcgtaggatcagagttgatttctctataacaaaaagaccacatacgccaacaccaggaatttacatggggagacctacctatggcagctctcgccgtcgggattactatgacagaggatatgatcggggctatgatgatcgggactactatagcagatcatacagaggaggaggtggaggaggaggaggatggagagctgcccaagacagggatcagatttatagaaggcggtcaccttctccttactatagtcgtggaggatacagatcacgttccagatctcgatcatactcacctcgtcgctattaaagcatgaagactttctgaaacctgccctagagctgggatattgtttgtgggcaatattttttattgtctcttgtttaaaaagtgaacagtgcctagtgaagttaggtgacttttacaccttttacgatgactacttttggtggagttgaaatgctgttttcattctgcatttgtgtagtttggtgctttgttccaagttaagtgttttcagaaaagtatgttttgcatgtatttttttacagtctaaattttgactgctgagaagtttctattgtacaaaacttcatttaaaaggtttttctactgaatccagggtattctgaagatcgaagcctgtgtaaaatgctaccaaatggcaaaaagcaacaataaacagtttgatttttacttttctttctaacatatcaatgcttagcagaactattcagattgtcagtagtaaacccaaacncaaccccccccccccccccccccccccnccccccccncccccccncccccccaactaantnnccananccnccctctgtaactctgtactgctagtattagaactaaaaatcttaaaatacagccagtgcttaatgcttatatcaatgtggatttgtcggcttttatgtaatctgtaatatgtatagcaggaaatacgaagagttacacagtgtatgccttaaaaggctgtttcttaaaggtgttacaaggggataatggtatttcaactagttatcagcaagtgacaatacattccaccacaaatacactcttgttcttctagcttttagactatatgaaaaaaccgggtgcttcaaagtacatgataagggaacactatacctgtcatggatgaactgaagactttgcctgttcattttttaaatattattttcaggtcctttgcttaccaaaggaggcccaatttcactcaaatgttttgagaactgtgtttaaataaacgcaaatgaaaagaaaaa

SEQ ID NO: 335414 - DNA, 3172 bp, Homo sapiens
tttggggcctcttaagatggaaactaatccaaggccgactaagttctgggcccgttaggtggaggggattgcgtgagggctttgtgtttggcctaaatgaagcgcttttctctgatgccgaaagggcttcccaggcaaaaatctgtatcagtattctattaggacagaccacaaagtcgttaagatgattttgtggacatcgcatttccacgggattgtgaaggagaaattggcgggcaaccatttacggcgccgttatttcctttgttttgaggcgttctaatacttagaaccacagcgtgtgttggctacagttttctttcccttaagtttccacctcttaaaggtgttcagtgagggttgattgaattgcgggaacaagacagttctagggtttaaacagcatacgtagctggtctgtggggctctgggtattggattcggaaagcattgaatgatgcgaacatacgaggcttgctagaattaagaggaatctgttagaagggtgatagaaaagcaccatagaaattgatttttgaggctgtgggaataatttgtgcttttttaaaaaaaaaaaacaatttgttacctaagtttccccttgttggtaaagctaccttaagatctgaatatgatttatcaggtaaataagactattaaatgtcttagcaaacttttgattaagattttatatgattcctcagagtattttaggaagaaattttcagtgatgaagcgtgagtttcctgcgtaattttggagcccaaactgcttaatttggtttgaactaatcaagccttgcgtttacatactcggatgagcatagagtttttagtttttgatgtttttcccgaagccgattgactccaatgtcacgagtgttttagatttttttttaagttcttgctttcttgggtaagaaagttgggattgagctcaaaagttgttaaaaagtcgtgacttctgatcattggcagttgaatctgttataacagtcattggtgtttggactgcaaaaatgctttaatattgtggatattgtctggaactagaacgtgacattttcaagctgacattacaggtgattttataaggttaatgttgaagaaggaaaatgcggaagtcgtcatttgacaagttttataaatgagtatttgaagctcaggaataagtgaagctgaaatttgaaaaaataaaagaaagaatgcatgctaattatcagaccagaagtcccacttgtagaatattgagcaatttgtgtgaagtggggaagatgaaagaagtcagaatttgaaacggaagaatgaagaaaagaaataaaaatgaagttaagataagaagtaatctggaatcagaaagcactacgctaagaatcccgttctgcttccagaagtggaagtgctcacggatcggggaaatctgcaaggcatacccctgcaaggtctcgctccaaggaagattccaggcgttccagatcaaagtccaggtcccgatctgaatctaggtctagatccagaagaagctcccgaaggcattatacccggtcacggtctcgctcccgctcccatagacgatcacgtagcaggtcttacagtcgagattatcgtagacggcacagccacagccattctcccatgtctactcgcaggcgtcatgttgggaatcgggcaaatcctgatcctaactgttgtcttggagtatttgggctgagcttgtacaccacagaaagagatctaagagaagtgttctctaaatatggtcccattgccgatgtgtctattgtatatgaccagcagtctaggcgttcaagaggatttgcctttgtatattttgaaaatgtagatgatgccaaggaagctaaagaacgtgccaatggaatggagcttgatgggcgtaggatcagagttgatttctctataacaaaaagaccacatacgccaacaccaggaatttacatggggagacctacctatggcagctctcgccgtcgggattactatgacagaggatatgatcggggctatgatgatcgggactactatagcagatcatacagaggaggaggtggaggaggaggaggatggagagctgcccaagacagggatcagatttatagaaggcggtcaccttctccttactatagtcgtggaggatacagatcacgttccagatctcgatcatactcacctcgtcgctattaaagcatgaagactttctgaaacctgccctagagctgggatattgtttgtgggcaatattttttattgtctcttgtttaaaaagtgaacagtgcctagtgaagttaggtgacttttacaccttttacgatgactacttttggtggagttgaaatgctgttttcattctgcatttgtgtagtttggtgctttgttccaagttaagtgttttcagaaaagtatgttttgcatgtatttttttacagtctaaattttgactgctgagaagtttctattgtacaaaacttcatttaaaaggtttttctactgaatccagggtattctgaagatcgaagcctgtgtaaaatgctaccaaatggcaaaaagcaacaataaacagtttgatttttacttttctttctaacatatcaatgcttagcagaactattcagattgtcagtagtaaatttaaagacaaatgcccgttttcctccagtccatgaaacataccatacttatatacctgcaactaagtgtttaaaattatgctctgtaactctgtactgctagtattagaactaaaaatcttaaaatacagccagtgcttaatgcttatatcaatgtggatttgtcggcttttatgtaatctgtaatatgtatagcaggaaatacgaagagttacacagtgtatgccttaaaaggctgtttcttaaaggtgttacaaggggataatggtatttcaactagttatcagcaagtgacaatacattccaccacaaatacactcttgttcttctagcttttagactatatgaaaaaaccgggtgcttcaaagtacatgataagggaacactatacctgtcatggatgaactgaagactttgcctgttcattttttaaatattattttcaggtcctttgcttaccaaaggaggcccaatttcactcaaatgttttgagaactgtgtttaaataaacgcaaatgaaaagaaaaa

SEQ ID NO: 335415 - DNA, 2246 bp, Homo sapiens
taggaggaaattgttttgtattgtgagtctggttaggtttatcagtctcttgaaacccggttgaaatatttttttcttggttttaaacaagaatgctttaatattgtggatattgtctggaactagaacgtgacattttcaagctgacattacaggtgattttataaggttaatgttgaagaaggaaaatgcggaagtcgtcatttgacaagttttataaatgagtatttgaagctcaggaataagtgaagctgaaatttgaaaaaataaaagaaagaatgcatgctaattatcagaccagaagtcccacttgtagaatattgagcaatttgtgtgaagtggggaagatgaaagaagtcagaatttgaaacggaagaatgaagaaaagaaataaaaatgaagttaagataagaagtaatctggaatcagaaagcactacgctaagaatcccgttctgcttccagaagtggaagtgctcacggatcggggaaatctgcaaggcatacccctgcaaggtctcgctccaaggaagattccaggcgttccagatcaaagtccaggtcccgatctgaatctaggtctagatccagaagaagctcccgaaggcattatacccggtcacggtctcgctcccgctcccatagacgatcacgtagcaggtcttacagtcgagattatcgtagacggcacagccacagccattctcccatgtctactcgcaggcgtcatgttgggaatcgggcaaatcctgatcctaactgttgtcttggagtatttgggctgagcttgtacaccacagaaagagatctaagagaagtgttctctaaatatggtcccattgccgatgtgtctattgtatatgaccagcagtctaggcgttcaagaggatttgcctttgtatattttgaaaatgtagatgatgccaaggaagctaaagaacgtgccaatggaatggagcttgatgggcgtaggatcagagttgatttctctataacaaaaagaccacatacgccaacaccaggaatttacatggggagacctacctatggcagctctcgccgtcgggattactatgacagaggatatgatcggggctatgatgatcgggactactatagcagatcatacagaggaggaggtggaggaggaggaggatggagagctgcccaagacagggatcagatttatagaaggcggtcaccttctccttactatagtcgtggaggatacagatcacgttccagatctcgatcatactcacctcgtcgctattaaagcatgaagactttctgaaacctgccctagagctgggatattgtttgtgggcaatattttttattgtctcttgtttaaaaagtgaacagtgcctagtgaagttaggtgacttttacaccttttacgatgactacttttggtggagttgaaatgctgttttcattctgcatttgtgtagtttggtgctttgttccaagttaagtgttttcagaaaagtatgttttgcatgtatttttttacagtctaaattttgactgctgagaagtttctattgtacaaaacttcatttaaaaggtttttctactgaatccagggtattctgaagatcgaagcctgtgtaaaatgctaccaaatggcaaaaagcaacaataaacagtttgatttttacttttctttctaacatatcaatgcttagcagaactattcagattgtcagtagtaaatttaaagacaaatgcccgttttcctccagtccatgaaacataccatacttatatacctgcaactaagtgtttaaaattatgctctgtaactctgtactgctagtattagaactaaaaatcttaaaatacagccagtgcttaatgcttatatcaatgtggatttgtcggcttttatgtaatctgtaatatgtatagcaggaaatacgaagagttacacagtgtatgccttaaaaggctgtttcttaaaggtgttacaaggggataatggtatttcaactagttatcagcaagtgacaatacattccaccacaaatacactcttgttcttctagcttttagactatatgaaaaaaccgggtgcttcaaagtacatgataagggaacactatacctgtcatggatgaactgaagactttgcctgttcattttttaaatattattttcaggtcctttgcttaccaaaggaggcccaatttcactcaaatgttttgagaactgtgtttaaataaacgcaaatgaaaagaaaaa

SEQ ID NO: 335416 - DNA, 1481 bp, Homo sapiens
aaggagcgccgcgtcacgatccggtagagttagagcccgtgcggaggcggtgcggagcatttcggctctgagcggctgggcgaccggcgcgtcgtgcggggctgcggcggagcctccttaaggaaggtgcaagaggttggcagcttcgattgaagcacatcgaccggcgacagcagccaggagtcatgagcgacagcggcgagcagaactacggcgagcgggaatcccgttctgcttccagaagtggaagtgctcacggatcggggaaatctgcaaggcatacccctgcaaggtctcgctccaaggaagattccaggcgttccagatcaaagtccaggtcccgatctgaatctaggtctagatccagaagaagctcccgaaggcattatacccggtcacggtctcgctcccgctcccatagacgatcacgtagcaggtcttacagtcgagattatcgtagacggcacagccacagccattctcccatgtctactcgcaggcgtcatgttgggaatcgggcaaatcctgatcctaactgttgtcttggagtatttgggctgagcttgtacaccacagaaagagatctaagagaagtgttctctaaatatggtcccattgccgatgtgtctattgtatatgaccagcagtctaggcgttcaagaggatttgcctttgtatattttgaaaatgtagatgatgccaaggaagctaaagaacgtgccaatggaatggagcttgatgggcgtaggatcagagttgatttctctataacaaaaagaccacatacgccaacaccaggaatttacatggggagacctacctatggcagctctcgccgtcgggattactatgacagaggatatgatcggggctatgatgatcgggactactatagcagatcatacagaggaggaggtggaggaggaggaggatggagagctgcccaagacagggatcagatttatagaaggcggtcaccttctccttactatagtcgtggaggatacagatcacgttccagatctcgatcatactcacctcgtcgctattaaagcatgaagactttctgaaacctgccctagagctgggatattgtttgtgggcaatattttttattgtctcttgtttaaaaagtgaacagtgcctagtgaagttaggtgacttttacaccttttacgatgactacttttggtggagttgaaatgctgttttcattctgcatttgtgtagtttggtgctttgttccaagttaagtgttttcagaaaagtatgttttgcatgtatttttttacagtctaaattttgactgctgagaagtttctattgtacaaaacttcatttaaaaggtttttctactgaatccagggtattctgaagatcgaagcctgtgtaaaatgctaccaaatggcaaaaagcaacaataaacagtttgatttttaaaaaaaaaaaaaaaaaaaaaaaaaacaaaaaaaaaaaaacaa

SEQ ID NO: 335417 - DNA, 1689 bp, Homo sapiens
ctgacatacgctctagacggggtctagatccagaagaagctcccgaaggcattatacccggtcacggtctcgctcccgctcccatagacgatcacgtagcaggtcttacagtcgagattatcgtagacggcacagccacagccattctcccatgtctactcgcaggcgtcatgttgggaatcgggcaaatcctgatcctaactgttgtcttggagtatttgggctgagcttgtacaccacagaaagagatctaagagaagtgttctctaaatatggtcccattgccgatgtgtctattgtatatgaccagcagtctaggcgttcaagaggatttgcctttgtatattttgaaaatgtagatgatgccaaggaagctaaagaacgtgccaatggaatggagcttgatgggcgtaggatcagagttgatttctctataacaaaaagaccacatacgccaacaccaggaatttacatggggagacctacctatggcagctctcgccgtcgggattactatgacagaggatatgatcggggctatgatgatcgggactactatagcagatcatacagaggaggaggtggaggaggaggaggatggagagctgcccaagacagggatcagatttatagaaggcggtcaccttctccttactatagtcgtggaggatacagatcacgttccagatctcgatcatactcacctcgtcgctattaaagcatgaagactttctgaaacctgccctagagctgggatattgtttgtgggcaatattttttattgtctcttgtttaaaaagtgaacagtgcctagtgaagttaggtgacttttacaccttttacgatgactacttttggtggagttgaaatgctgttttcattctgcatttgtgtagtttggtgctttgttccaagttaagtgttttcagaaaagtatgttttgcatgtatttttttacagtctaaattttgactgctgagaagtttctattgtacaaaacttcatttaaaaggtttttctactgaatccagggtattctgaagatcgaagcctgtgtaaaatgctaccaaatggcaaaaagcaacaataaacagtttgatttttacttttctttctaacatatcaatgcttagcagaactattcagattgtcagtagtaaatttaaagacaaatgcccgttttcctccagtccatgaaacataccatacttatatacctgcaactaagtgtttaaaattatgctctgtaactctgtactgctagtattagaactaaaaatcttaaaatacagccagtgcttaatgcttatatcaatgtggatttgtcggcttttatgtaatctgtaatatgtatagcaggaaatacgaagagttacacagtgtatgccttaaaaggctgtttcttaaaggtgttacaaggggataatggtatttcaactagttatcagcaagtgacaatacattccaccacaaatacactcttgttcttctagcttttagactatatgaaaaaaccgggtgcttcaaagtacatgataagggaacactatacctgtcatggatgaactgaagactttgcctgttcattttttaaatattattttcaggtcctttgcttaccaaaggaggcccaatttcactcaaatgttttgagaactgtgtttaaataaacgcaaatgaaaagaaaaa

SEQ ID NO: 335418 - DNA, 1376 bp, Homo sapiens
gaggacttatccccggatctgggtacaagcaagttcgtctctgctcagcctcctgagcaggctaaagaacgtgccaatggaatggagcttgatgggcgtaggatcagagttgatttctctataacaaaaagaccacatacgccaacaccaggaatttacatggggagacctacctatggcagctctcgccgtcgggattactatgacagaggatatgatcggggctatgatgatcgggactactatagcagatcatacagaggaggaggtggaggaggaggaggatggagagctgcccaagacagggatcagatttatagaaggcggtcaccttctccttactatagtcgtggaggatacagatcacgttccagatctcgatcatactcacctcgtcgctattaaagcatgaagactttctgaaacctgccctagagctgggatattgtttgtgggcaatattttttattgtctcttgtttaaaaagtgaacagtgcctagtgaagttaggtgacttttacaccttttacgatgactacttttggtggagttgaaatgctgttttcattctgcatttgtgtagtttggtgctttgttccaagttaagtgttttcagaaaagtatgttttgcatgtatttttttacagtctaaattttgactgctgagaagtttctattgtacaaaacttcatttaaaaggtttttctactgaatccagggtattctgaagatcgaagcctgtgtaaaatgctaccaaatggcaaaaagcaacaataaacagtttgatttttacttttctttctaacatatcaatgcttagcagaactattcagattgtcagtagtaaatttaaagacaaatgcccgttttcctccagtccatgaaacataccatacttatatacctgcaactaagtgtttaaaattatgctctgtaactctgtactgctagtattagaactaaaaatcttaaaatacagccagtgcttaatgcttatatcaatgtggatttgtcggcttttatgtaatctgtaatatgtatagcaggaaatacgaagagttacacagtgtatgccttaaaaggctgtttcttaaaggtgttacaaggggataatggtatttcaactagttatcagcaagtgacaatacattccaccacaaatacactcttgttcttctagcttttagactatatgaaaaaaccgggtgcttcaaagtacatgataagggaacactatacctgtcatggatgaactgaagactttgcctgttcattttttaaatattattttcaggtcctttgcttaccaaaggaggcccaatttcactcaaatgttttgagaactgtgtttaaataaacgcaaatgaaaagaaaaa

SEQ ID NO: 335419 - DNA, 1301 bp, Homo sapiens
aaggagcgccgcgtcacgatccggtagagttagagcccgtgcggaggcggtgcggagcatttcggctctgagcggctgggcgaccggcgcgtcgtgcggggctgcggcggagcctccttaaggaaggtgcaagaggttggcagcttcgattgaagcacatcgaccggcgacagcagccaggagtcatgagcgacagcggcgagcagaactacggcgagcgggaatcccgttctgcttccagaagtggaagtgctcacggatcggggaaatctgcaaggcatacccctgcaaggtctcgctccaaggaagattccaggcgttccagatcaaagtccaggtcccgatctgaatctaggtctagatccagaagaagctcccgaaggcattatacccggtcacggtctcgctcccgctcccatagacgatcacgtagcaggtcttacagtcgagattatcgtagacggcacagccacagccattctcccatgtctactcgcaggcgtcatgttgggaatcgggcaaatcctgatcctaactgttgtcttggagtatttgggctgagcttgtacaccacagaaagagatctaagagaagtgttctctaaatatggtcccattgccgatgtgtctattgtatatgaccagcagtctaggcgttcaagaggatttgcctttgtatattttgaaaatgtagatgatgccaaggaagctaaagaacgtgccaatggaatggagcttgatgggcgtaggatcagagttgatttctctataacaaaaagaccacatacgccaacaccaggaatttacatggggagacctacctatggcagctctcgccgtcgggattactatgacagaggatatgatcggggctatgatgatcgggactactatagcagatcatacagaggaggaggtggaggacgatgagtataggcgactaacctaccgagcctggcgatatctgggtgtccaacatagaatcttaattcaactttaaatttgcccacagaaccctctaaataccgttgtaaatttaactgctagttcaaagaggaacagctctttggacactaagatataaccttgtttagagagttaaaaatttaacacccatattatgcctaaaagcgggcaccgatttataaagcgttcaagctcaacacccacttatttaaaaaaccccatacatttaaatgaacaacttaaaccaaataggccaagcgatcaccctaatttaagaaccagtggtagtgtttagtcacatggcattattattcagcttattcttgctttgattct

SEQ ID NO: 335420 - DNA, 791 bp, Homo sapiens
aaggagcgccgcgtcacgatccggtagagttagagcccgtgcggaggcggtgcggagcatttcggctctgagcggctgggcgaccggcgcgtcgtgcggggctgcggcggagcctccttaaggaaggtgcaagaggttggcagcttcgattgaagcacatcgaccggcgacagcagccaggagtcatgagcgacagcggcgagcagaactacggcgagcgggaatcccgttctgcttccagaagtggaagtgctcacggatcggggaaatctgcaaggcatacccctgcaaggtctcgctccaaggaagattccaggcgttccagatcaaagtccaggtcccgatctgaatctaggtctagatccagaagaagctcccgaaggcattatacccggtcacggtctcgctcccgctcccatagacgatcacgtagcaggtcttacagtcgagattatcgtagacggcacagccacagccattctcccatgtctactcgcaggcgtcatgttgggaatcgggtaagatgaaaaactggttttgaagcagtcaactgcctaaatttactttttcttaaagttagagctgattttgacaatagagctttagcagttggtgcgtgagtgaaatcttcagaggcttttttagtgttttgagagagtcttttaagttaatcttccatgacggggtctgcatttgggctgcctgtcaattaagcataatactgacacaatggtgtaactccttagcccatcaaaaaaaaaaacttccgactgcattactatactgtagta

SEQ ID NO: 335421 - DNA, 353 bp, Homo sapiens
tggggtgcgggaggctggagaagaatgacgactggggtgcgggaggctggagaagaatgacgactggggtgcgggaggctggagaagaatgacgactggggctgcgggaggctggagaaaaacgacgactgggctgcgggaggcaagagggcggaggaatcaagcatgactgtcaggtttctggcttgtgtaagtggcagacggtgccatgtatgaaaaatggggaaaacctgggaaaaatatatttgggggaatcaagagttttataatagaaatgatacccttgaaatgcttactcaagtggaaatatcaagtaggctattgaatttacaaatctagagctcagaggacag

SEQ ID NO: 335422 - DNA, 258 bp, Homo sapiens
caaaggtagtataggccttggttgaattctaattagtataaaattagatgacactaattatcatctaataaattaggtttattagatgatatctaatagatgatatctaggctgggtattcttagatgatatcaaggaattattgtttaatttgttaggtgtgataatggcattgtggattttaaaacaagttattggccgggcgtggtagctcatgcctgtaatcctaacactttgggagaccgaagcgggcagatc

SEQ ID NO: 335423 - DNA, 662 bp, Homo sapiens
cactccgattcgcctcagaactgctggtgctggcccaggccaggctttgggcactgtgtgagggaggggtttgagaaaagcccattctggtgcaggaatagcactcaaagacttctggtgaaccctccgagactcccaggagcctggacatgttcccagcccagcatgactagtggcatgagtaagtgtggatacctggtggatacctggcttgggtgccaacgcctggaaaggggctggcaggtccatccctgagggctggggccacggccacctgctagccctgggacacagagtattaatacatcactcacactgagcctcagtttccccctctgtaaggtgagctctagcatctacctcctaggtgtgaagactaaatgagatgcctcctctgtctgcactccgctgtaaccctagttcctagaataccaccttgccccagcaggatctcccgaaatatgtgtgaaaggcacctgcataaagcacccagtgcagggccagaaacccagtgacctctcagccgggtgtccactggaggcacactgactgcattgtgctgctgcagtttccactgtctccacctttccaacatcatctgaccactctgcccctctgagagctctggaaacacacttatggcatccagtgacccctcaacc

SEQ ID NO: 335424 - DNA, 153 bp, Homo sapiens
gttttccaggtgagcttctcaagcaggataaattcctgcagaagcacagaaatctcaggagtcccaaggttcctagcaaattagaatcttgaggtaggagaggagccaggccccaccccagaagcccagtaggaactggcaccaagagaaaat

SEQ ID NO: 335425 - DNA, 184 bp, Homo sapiens
ttttttttttaaattccactgacaataatatttcactattacaaatatttcactgtaacaaaaaaatatattttgggtgagattttccttactttcaactaattcatattttagcagagacttgacatccctcagaaattacatgtgtatgtgcagtgtctatgtctgtgtgtatgtgtgtttg

SEQ ID NO: 335426 - DNA, 446 bp, Homo sapiens
ttttgctcagtcgttcaggctggagtgcagtggcgcgatctcggctcactgcaacctccgcctcccgggttcaagcgactctcccgcctcagcctcccaagtagctgggattataggtgcccgccaccacgcccaactactttttttgtatttttagtagaggcagggtttcaccatgttgatcaggctggtctcgaactcctgacctcaggtaatccacccgcttctgcttcccaaagtgctgagattacaggtgtgagccaccgcgcccggccctcttccgtttattctttgcctactcagtaatcttttctacactcgcctataactgctgaggacccctcgatatgtatcaccagaccagatcgtctggaagtccctcagtattttcagctaatgaacactttcacctgtgtatagggcagacacttcaaatcccacgtgtc

SEQ ID NO: 335427 - DNA, 606 bp, Homo sapiens
ccagatcattcattcgcttttgtaaaactcttcagcggtttccaattgcactttgaatcaatctgtaccccttaccctgcaaactgccacctgctgtggtccctgcccacttacccacctccactggatgcccctcgatacccagctcactgtgcctcggtcatgacgaccttctttttcttccttggatgcaccaaaaccagggggcctgaggacctttgcatgtgctgtttgtcccctttgcctggaatgctattctccaagatctttgcatagctggaaattttgtagctctaaacacggggttcttccatttcataagactataaagctagcaacctctggtatctggttaacagttcactttgtgcaggttattccagatgcagatagcatgggtttaggttttcatttagagaaccacctgacctctccgtagaaactcaccacattctctcccccagtgactttctaacacattacagtgttttaattttcttcatgtactcagcactacttgaagttttctcatgtatttgttgacagtttatctccacccactagaaggtaactctggccagggttacagcactagttctaaccagt

SEQ ID NO: 335428 - DNA, 688 bp, Homo sapiens
tgaaaaatgctcactctttaaaatatgcatagaattgcctgggtcatccagagagctcttccataataagacttcagagaggatgctgcatactgctggcttgagagtcctgacttgagggcatataaacatctagtaagccttccttacacagcttcttctccacttaactggccttaaatttttttaacctcttggatttaacataaatttgaaaacttaggctttactattcctagtcatgaaatagaaggtgggaaagaatgtccaggaaaggctctgattaacactggacaagctaatccagccgctcgtggttttattcatcattaaaaggatttaaactccgtaacctaggtgtttggtcaataattaaaggacagaccttcttactcacttcctcaagtgatagcaggagggcaagattttctagagaataaaacaaaatgtatgcaatagttttctttaagcccatgaaaatactagaggagtttataaacccatgaaatactgaaacatatttaagatgtgacttttggatctgtgactcttcttgactgactgataacatattttttctattttatttctttttttttcctgagctgctcctcccctcaactttcctaaatatgctcctgtctcatcttttggtcactttcaattcttttgccttttaggtatgaga

SEQ ID NO: 335429 - DNA, 513 bp, Homo sapiens
cttaaattatgagacctctttcactgagcatagagttagaaccatgagagcatattattcctagtcatgaaatagaaggtgggaaagaatgtccaggaaaggctctgattaacactggacaagctaatccagccgctcgtggttttattcatcattaaaaggatttaaactccgtaacctaggtgtttggtcaataattaaaggacagaccttcttactcacttcctcaagtgatagcaggagggcaagattttctagagaataaaacaaaatgtatgcaatagttttctttaagcccatgaaaatactagaggagtttataaacccatgaaatactgaaacatatttaagatgtgacttttggatctgtgactcttcttgactgactgataacatattttttctattttatttctttttttttcctgagctgctcctcccctcaactttcctaaatatgctcctgtctcatcttttggtcactttcaattcttttgccttttaggtatgaga

SEQ ID NO: 335430 - DNA, 376 bp, Homo sapiens
ctggggaggaagagaacagatgcaatagaaggactagatcagagctgccagatactttcccagcagcacaaacgtcaacttacctagagttgtaaaactgacattttgcccaaaattcttaactttcagggtatttgggagctgttaggattggcaattcagattcaattcaaattatttttttctatagtcctagaagcctatgccccatcatgcagtaaatatgatgtaaatatttgtagaaagaaagcaaaatgcctctgaaggtatcttctccagtatctcctactcaccagaatctcactacagcttaggtagcctccccaccaacccttttcttgcctttttctttgctgcttccctccaacctttgcct

SEQ ID NO: 335431 - DNA, 550 bp, Homo sapiens
cgtgggtcgatttcagggaaagatcaatattttgattgatcccacttggggagtcagactgtcagtacaacaacaaataatcaccatggggtgatttcaggaaggggtcaatatttcaaaagagcaggggatgtgacagagtaggtgagacaggggctagacacagaggccaaggatgatcttgtatacgaggtgacatctgagctaagacctgctcaggaagacaggggaagtcaggaagagggcattctgggcagtgggcacaggccactatgtcctagtcccaccccagtctactctgggtccctagcagtactcgtgcaaaggtcctggggcaagggtgagcttggcctgtttgagaaagagagaagtatcttcatctggaaaaaatatggctaacaaaagtattcatgcccttgggttgttctgaggactagatgagctgagtgtacggagaccttagtggagtgtccggcagtaaatgctggctatgtattatggttccaaaggttgttgctagagggcacaccccaccctaaatgggtcccta

SEQ ID NO: 335432 - DNA, 504 bp, Homo sapiens
ctaggatctacacattaagaaacatagacatgaacgtctccatggaaagactgggaaaatggattgcaggttctagcaggatgtcataataaatggtgcatatccagagtgcaagatgattcagtctcaccaagaacactgaaagtcacatggctaccagcattattgtgataagaactactgttttgggagatagtttagcaaaggtgccatgtagaaattgattaagtcagaggtatctttaacttgccaccacagagaagagattaatttcatatacttccattgagaagagagataagaatacaaaaccaagctgatttgcaggagtaaacttgatattcaaatactatttcctgaatgacattttctgagacatgctaattgtaattactttcagcttcaaaacataataaatttatctcatagtaagcatatagatggaataaataaaatgtgaacttaggtaaattataaattaataaagtatatttttaaaatttc

SEQ ID NO: 335433 - DNA, 501 bp, Homo sapiens
ccatgtaatgcatggcatacagagtgggttctttcctgtctaggcaccctcttttgaaaccaagtgtccatatagtttgagtattttcactgtggtttatcataagtacttagtatttcttgcttaactaatgccttataattattttttagagacagtcttgctctgtcaaccaggctggagtgcagtggcacaatcatagttcactataatcttggactcctgggctcaagcagtcctcccacgtcagtctcctgagtagctaagactataggtgcttgccaccacacccagttaattttaaaaattttgtgtagaggtgaggtctgtgttgcccaggctagttttgaactcctagtctcaagtgatcctcctgcctcagcttcccaagtagctgggtctacacgtatgtgccaccatgcctgtatttttaacatagcgatatggggtcttgccatcttgtccaggctggtcttgaactcctgttctcaagcagtcctc

SEQ ID NO: 335434 - DNA, 555 bp, Homo sapiens
gtggctgtctgaggggatgagagccctgcttagtggtggagagtccagaacattgacgccttccatgcagaagcattattcagcttttggctctgacatcctaagtgtcctatgttgtccaatttcagaagtaactgtatgatcattttatgaacctgaatttgaccagggctggtctttcatgggggccaagttggcagtcacctgcatggaaaatgatctgaagagcaactaaatcatctccctggatggttcacataagtctcagatctttcttttggggcactgcatatatctaaaggttcctttctgaaataaaaatgtctcacctggaagaagcaatatatgaacacattagtgcctattaatttgcgatagtttatcccataagcacctgcaggaatcaaatggtgaaatggtgtttgtgttcctattaccaagggattacatagtggtatcaaagctgattcctcaaggaaaacttctaggaagctgaatgtccaaattgttgaaagtttagaatcatgaatgctggatacttattcagtggatgag

SEQ ID NO: 335435 - DNA, 475 bp, Homo sapiens
cagtgaatgaagttggatccttgccttatgccacatataaaaataactcaaaatggataaaatagctgaatgtaagacctgaaaactataaaatttctggaaggaaacaggagaaaagcttaatgacattggatttgcaaaaatttatttgatatgacatgcaaaacacaggcagcaaagcaaaaatagacaaatgggactacatcaaacttaaaaactcctacacagcaaaggaaactgtcaagattgaaaaagcaacctatgaaatggaagaaaatatatgcaaaccatacatcagataaatggttaatatctagaatatataagaacttctacaacttaacaacaacaacacaaacaaattgcctgatttaaaaacatgggcaaaagacttgaatagatatttcttcaaagaagatatacaaatggccaagaagtatatgaaaagatgcttggtatcactaattatcaggaa

SEQ ID NO: 335436 - DNA, 544 bp, Homo sapiens
ggtaaatcacagtgcccacagctcctcacactggcagcacttcctcacccctgtgccattgcacctgctgttttctttttctagaataccccttggtctcctgccaagctcatccctattccttctgcaacacccagctcagaagtgacttccaggaagccttccaaatgtcccctcactggcaaaggtgagcctcttctaggctgccattagcattctctgtaacatttctccagctgcattttagctgcctgtttaccagtccactgttcctaagagactataaaccacttggaaaaggaattgtttattcatcttgaattcctagtgcctggtacagggtctgggacatagaaagtgcctgataaatgtttgttgaatgaatgatttaattaacaggataaaggagagaataatcaactgtgtcttttagcatttgggtcccctggtttttgtccatgctgctaggtttctgaagcacagccctccctaaaccttgcttgtgcctacatcagaacttctgaccttatcccttgttgatgag

SEQ ID NO: 335437 - DNA, 512 bp, Homo sapiens
gaggccaggttccctcacctcccctgttccaggctggaagtggcccagagggtaggaggctctttaaaaacagggatttggaccaggtgcagtggttcatgcctgtaatcccacactttgagaggatgaggtggggtggatcacctgaggtcaggagtttgagaccagcctggccaacatggtgaaaccctgtctctactaaaaatacaaaaattagccgggcgtggtggcacacacctgtaatcccagctacttgggaggctgaggcaggagaattgcttgaacccgggaggtggaggttacagtaagccaagatcacaccactgcactccagcctgagcaacagagcgagactccgtctcaaaaagtaaaataaaataacataaagtaaaataacagggatctgctatggcctcagatttaagggggaaacattcaccttattggcaacatagcctttgctttgagtaatcgtggcaacctgggaatagctttgtgaatttatgaagtgg

SEQ ID NO: 335438 - DNA, 417 bp, Homo sapiens
gaggccaggttccctcacctcccctgttccaggctggaagtggcccagagggtaggaggctctttaaaaacagggatttggaccaggtgcagtggttcatgcctgtaatcccacactttgagaggatgaggtggggtggatcacctgagcctcccaaagtgctgggattataggtgtgagccactgcgcctggcccaaggaaggtcatttgattaggacggggcagctgcatccattttgagcccagtccaagaggtgcctgggagcctctttggctctatgtgggccagcatcccatttgtacagggtgtgatggggagagaaacttgagaacttgaagagggtggctgaaggctcttcatggagctgatgacacttttcagaaccccagaagcaccaggctgaaactgccttgtc

SEQ ID NO: 335439 - DNA, 330 bp, Homo sapiens
gtttcgccatgttggccaggctggtctcgaactcctgacctcaggtgatccacccacctcagcctcccaaagtgctgggattataggtgtgagccactgcgcctggcccaaggaaggtcatttgattaggacggggcagctgcatccattttgagcccagtccaagaggtgcctgggagcctctttggctctatgtgggccagcatcccatttgtacagggtgtgatggggagagaaacttgagaacttgaagagggtggctgaaggctcttcatggagctgatgacacttttcagaaccccagaagcaccaggctgaaactgccttgtc

SEQ ID NO: 335440 - DNA, 326 bp, Homo sapiens
attcttctttgggaataatgtctggaatatgtcagtttcttcctattatcagtgttttcatttagcttcttagcctcacacctagactactgcttcctaattgactttcccacctccaggttcttctcactctaattcatctatgcagatacttccagatcagtattcccaaatcatcgttcttgttttatatttttttgagacagagtctcgctttgtcacccagggtggagtccagtggcgcgatctcagctcactgcaacctccgcctccctggctcaagcaattttcctgcctcagcctcccaggtagctgggattagaggc

SEQ ID NO: 335441 - DNA, 709 bp, Homo sapiens
gaccactctgtcatcttaactagcttggtaagcagatcctgggtttctgtattaaagctggtcctttgaatgaatgagagcactaatattttcagctggaggaaaacaacatgaataaaagtaaaaatggaagagtgtagggcctttttagggaaagtagacaatccactttggcaggagtgcagggtgtatacatggaaagatggggtgtgagttgagattggaaagatacgaaagtgttcacctgtagactaggttctaggagagtgtgttgtttttctattttcctattgttttccagataatatatttcttttgaagtcttttgaccataatcaagcctataatctatgaagaatgaattgccatatgtatgtagaaggtatcatttgagtcaaggagtgtgagaatgatatgtaagaggatgttcttatgtaatatgtaagagaagcaataaggacttaatgtgagacaaaagtgaatataatgaagatgaagttttggcatgacttaggaagtgtttgggtgaaacaacaacaaaaaaggaagcagaagggttaaagacaactgacattttgtgcctgagtaaatggaaaaatggtgtcgagttaacagattaggtaaagctaagaggttttcctagaactctggaaatttattaaatattttttcttaacgaaaagtgtaaactggcccataatgtaagcaa

SEQ ID NO: 335442 - DNA, 794 bp, Homo sapiens
gcctgagccaccgtgccccagtgagttggcattttaaacacaggttttagaactttcctggaggctgagtgaatatttttaaagattaagtgtctccttaagctttatcatgaataatatgcaacacttgggtttggctagaaatcactagggatttaatggtcctaaaaagggaaatactactctggcccataaatcaaggttaaacttctagggtccacacagagataaaatattagataggactgcaaatatgactgtcagaacgcctttcttatcttcatgaacaagttttttttctctctctgtacacagccatacattcatgtctgtaaatacctggcttttttaggctcagtttcacaaaatgttgcagaatgcttttaattctttctcattcttctcatcacaattaactgttgaacatagtttgcactagttttcaaatgtcaaccatgagagtttctatctcagggaaaaaaggagagattataaaagaattccactaatccgtaaatgagaaagggtatcttgatgtttattactgtttaattttccttccaacactaacagaggtacatatacagctactatgaataatggtgagtactctgtgaatactcttaggtactagtgcacatgatgttagttttacaaaacagttgagtcctatttctgttaaatttttatcccctagtataaaaacacaatttatgataaatcaggtaaaaatgaaaaatcaaagtcttagtttctttttttttttaattaagacaccatggaaaggtcaaact

SEQ ID NO: 335443 - DNA, 440 bp, Homo sapiens
tggtctgtatagaagatgaaaccagctacaacattctcttaagccaaagcctaatgcagagcaaggccctaactctcttcacgtctgtgaatgctaagagaggtgaggaagctgcagaagagtttgaggcttacagaggttggttataaagtttaaagaaggaagctgtctccaaaacataaaggtgacaggtgaagcagtaagtgctgatgtagaaattgcagcaagtgatccagaagatctagctaaggtaattgttgaaggtggctacactaaacaacagattttcagtgtagatgaaacaggtttctactggaagaagatgccatctcatagctaaagagaagtcaatgcttggctttcaaggacaggctgactcttgttgggggctgatagagctgatgattttaagttgaagctagttctcatttactgttctg

SEQ ID NO: 335444 - DNA, 334 bp, Homo sapiens
atgagctgcattaaactcgggcaagtcacttaactactctgtgcctcagtttctccactgggaaaaagggtattactagtacctaccggcatagggttattactaatgcagattaaataattatttgtaaaacacttagcacagtgccaggcagaggaggtgtcattaaatcagatggagtcgagtggtgggagagttactcccttcacttctcttaatccttatgtgtaatcagggagcaaggcagcctgctgaaccctggagctccacactcacccagcaggggctgtcgctcgcccacgcgcagctggtggtggaactgcttgctgatcat

SEQ ID NO: 335445 - DNA, 151 bp, Homo sapiens
aattatttgtccattgacgatcattttttatatggttctgatagccaccctttgaggtagatagtagttattttctactttcagaggaagctaaactgaagcccagaggagttaggggaagggaacacacccagtgttaccacaggcaatg

SEQ ID NO: 335446 - DNA, 326 bp, Homo sapiens
gatctagtgtgatataggggagaagcactgagccaagggaaaggaaacatgaaatctctggtatttgtaagctctgtgactttaggcaaattaagtaacctctctggtcctgagttctctcatctataatctgaagttaagcctcctcagcttggagactggatcagatggttttctggggctccatttccactctaagatgttcggcctcagtaattttctgcattcaagtatgttctcactttaaccagaggaatgcttaaactgatcctactggcagaaatcatgcttacaacactagatgaggaatcatgcagggcatgtgg

SEQ ID NO: 335447 - DNA, 405 bp, Homo sapiens
tctctccccttgaccgcagctggcttggctcggaacttggcacagagtggggcatcggatgcgtcagaattctttctcctcatgacagaccttccttcccttctccaccccatcactggcagcactcccatatcctcccacctgcaacactacttgcccttcacacacctgaatctgtctttgtttgttgagggttactaagaacactgggctgcgtgcatgttccctccttctccacttgacaatccattggcagtttcactttgagtcattcactgactgttctctccttgttggctgctgtggctttaggagccctgggttccctccctatacctctaacttgttttcttccggaagcctcttccacttgctccattcttctctgtattcttttttttttta

SEQ ID NO: 335448 - DNA, 393 bp, Homo sapiens
agctgttgggtcttgcctaacaccaatggggcccacaagtatatttctgttttgttttgggttttttccttgacaaaatgaagcatcccagacaatgaattaaaacagaaattttaaagagcttgggaagcaatagaaaagtcattttaaaaggccaaaaccaatatggatttaggtaataagagaatcccagggagactagaacagtcagtaaacactgtgcaagagcaaggcttagatgattacatattgaacctgattttgattaaatatcaaaatctttttttttgtatacgtgagatggggatgatcaggctttataataaaaatctccctctaaaacacatctgttatttaaaaagccaatgacacaacccctagataaagggagca

SEQ ID NO: 335449 - DNA, 333 bp, Homo sapiens
tgtaaatattcccaccatggcaattttcaagttaccaacgtgctgttgtcaaatgtggagttaggaagagatgcacagtagccaccactatgtagtttttctaccatataaatataacagaaacaaatgaagtgggaaagaattcaggaaacatttttaacctgttagtaaaagccaggtgtgatctggaagaactctagatctctgggagccacagatgtaaaaggagtttgtactcactcactggctgccttcttcggaccttcacaggtgctcatgagaaagaaaaggggcggggcaaagagggaagttgaggaaaccttcctgggagta

SEQ ID NO: 335450 - DNA, 697 bp, Homo sapiens
tagtatagagaaattctggtaagagtatttgttatcagatattttatcaatttgagtcaagtgttggaaactgagcagtttccaggtactttttaacttgagaatgccatctggtggtggtgccgagagaattatctggcttttactctagcctgtggccttacttttaattatgaaagttcctaagttgaaagtgcataatccagaggcactactgtaatgttactttttgtgttcttacctctccagggtaaaaaactgatttgtttttaaacacagaggcctcacattttttgtttaatgctaaaactcatatcttatgtcatgtttttaaagttgtaggtcatgacttgacacattagtggattacattagtggattctgaattcactctagtggttgaaacacctctaagtttatggctcaaagattcatatctttcatctgtgtttttcaaactatggattataatttgttaatgaattgtgaagtgagttgctgccaacatttaaaaaatagaatagaaattaacaagaaaatatcagtggttctcatggagcaaggttaattaaaacttttattttaattaactttttatttaattaaaacttttattttgtatatgtgtatgtaaatgtggtgggtcacaattgtgaatatttcttttttttttttttgagacggagtctcgctctgt

SEQ ID NO: 335451 - DNA, 928 bp, Homo sapiens
tctgtccccggaacccgtggttccttggcggctgggtctcttttcggcgcctctagaggcagagggaggggatccctgtcgtgacaagagcgcctgtctgcgacccaatggatctgcgaggcccttgcggggatctagtccctgggctctcaggagaagggggtgtctgcttgtgtgctggcgtttcttggagagatacggtggctgtcaccctcttctccaggcacacacagacacattcccactccctctgctcctcatgcccggttcctccggtgtgtcccaagacaggactagaaccgcgaaccgaagggcaaccagccaggtggtctccaggagctccgccccctctgggttcccaggactctgattggtcggcgagccagcccttccctcaccacgccccccgagagagtagttaagccttcagagcagttccaggagtccatttacgggaggggggagatgagcgctgctgaggcttgggggctcaggtcccgcaccattccccctccgcgacaatctgagagagctccagtggttacttttatctacctgtccgttcaccctaaactgtcactcgtcagtctcactctgagaagagacagtaacttgaaacgttgttctaaactcctaggcccgtcccccaaacacccttttgactgggacccccgcccctgcatgggacctcgcgcagaggggggtgtgtatgtgtgtgagtgtagaggaaggcttggcctaaggcctctccttctccctccccttgcctctggggtgggggtggggtgttgtggctgtgtgtgtggctgtggctccgtcccgggggttctgtcacccggctgtgtccagcctcctctccaccccccatacctaagagtcaccaacccggggtgtgattcaccacccgctggaaccgtgcaacctttcc

SEQ ID NO: 335452 - DNA, 445 bp, Homo sapiens
ggactctctgaggactggccttcctgagagtttatttgggagactaatatatcagactcctggtggtgtggcccctggacagtttctgccctaaaaccttctttgtgaacatcacattgactacaatgagagcagcgttcatccagctgtagcacctacacctgttgtgggatgctttactgatacaatctttgcaccactgtgaggtgggtgccatcatccctgtcttaaagatgaggaaactgaggctcagagaggttacttgaaccacaagtaaggaagtatgtgagtgagaatgggaacctcagtttctgactttttcctgttggtacatggcatgtggcttattctccaaaaagaaaaaggatcccgtcggtttcatttacttcttttttaagagagtaatttggaagaggctactggtgatcgttgggttgaatgttaa

SEQ ID NO: 335453 - DNA, 5663 bp, Homo sapiens
gccccgcccccgcacgcctatgggcgcgaggtgcgggccctgacgtcactcttgtcagggccgcggcacatgggcggccggatgcgctgagcccggcgctgcggggccgcggagcgctggggagcagcggccgccggcgcggggaggggggtggggtgggacggcgcaccgcctccggtgctggcactaggggctggggtcggcgcggtgtcttctgcccttctgcagccgtcgacatttttttttctttctttttttcaattttgaacattttgcaaaacgaggggttcgaggcaggtgagagcatcctgcacgtcgccggggagcccgcgggcacttggcgcgctctcctgggaccgtctgcactggaaacccgaaagttttttttttaatatatatttttatgcagatgtatttataaagatataagtaatttttttcttcccttttctccaccgccttgagagcgagtacttttggcaaaggacggaggaaaagctcagcaacattttagggggcggttgtttctttctttcttatttctttttttaaggggaaaaaatttgagtgcatcgcgatggagaaaatgtcccgaccgctccccctgaatcccacctttatcccgcctccctacggcgtgctcaggtccctgctggagaacccgctgaagctcccccttcaccacgaagacgcatttagtaaagataaagacaaggaaaagaagctggatgatgagagtaacagcccgacggtcccccagtcggcattcctggggcctaccttatgggacaaaacccttccctatgacggagatactttccagttggaatacatggacctggaggagtttttgtcagaaaatggcattccccccagcccatctcagcatgaccacagccctcaccctcctgggctgcagccagcttcctcggctgccccctcggtcatggacctcagcagccgggcctctgcaccccttcaccctggcatcccatctccgaactgtatgcagagccccatcagaccaggtcagctgttgccagcaaaccgcaatacaccaagtcccattgatcctgacaccatccaggtcccagtgggttatgagccagacccagcagatcttgccctttccagcatccctggccaggaaatgtttgaccctcgcaaacgcaagttctctgaggaagaactgaagccacagcccatgatcaagaaagctcgcaaagtcttcatccctgatgacctgaaggatgacaagtactgggcaaggcgcagaaagaacaacatggcagccaagcgctcccgcgacgcccggaggctgaaagagaaccagatcgccatccgggcctcgttcctggagaaggagaactcggccctccgccaggaggtggctgacttgaggaaggagctgggcaaatgcaagaacatacttgccaagtatgaggccaggcacgggcccctgtaggatggcatttttgcaggctggctttggaatagatggacagtttgtttcctgtctgatagcaccacacgcaaaccaacctttctgacatcagcactttaccagaggcataaacacaactgactcccattttggtgtgcatctgtgtgtgtgtgcgtgtatatgtgcttgtgctcatgtgtgtggtcagcggtatgtgcgtgtgcgtgttcctttgctcttgccattttaaggtagccctctcatcgtcttttagttccaacaaagaaaggtgccatgtctttactagactgaggagccctctcgcgggtctcccatcccctccctccttcactcctgcctcctcagctttgcttcatgttcgagcttacctactcttccaggactctctgcttggattcactaaaaagggccctggtaaaatagtggatctcagtttttaagagtacaagctcttgtttctgtttagtccgtaagttaccatgctaatgaggtgcacacaataacttagcactactccgcagctctagtcctttataagttgctttcctcttactttcagttttggtgataatcgtcttcaaattaaagtgctgtttagatttattagatcccatatttacttactgctatctactaagtttccttttaattctaccaaccccagataagtaagagtactattaatagaacacagagtgtgtttttgcactgtctgtacctaaagcaataatcctattgtacgctagagcatgctgcctgagtattactagtggacgtaggatattttccctacctaagaatttcactgtcttttaaaaaacaaaaagtaaagtaatgcatttgagcatggccagactattccctaggacaaggaagcagagggaaatgggaggtctaaggatgaggggttaatttatcagtacatgagccaaaaactgcgtcttggattagcctttgacattgatgtgttcggttttgttgttccccttccctcacaccctgcctcgcccccacttttctagttaactttttccatatccctcttgacattcaaaacagttacttaagattcagttttcccactttttggtaatatatatatttttgtgaattatactttgttgtttttaaaaagaaaatcagttgattaagttaataagttgatgttttctaaggccctttttcctagtggtgtcatttttgaatgcctcataaattaatgattctgaagcttatgtttcttattctctgtttgcttttgaacgtatgtgctcttataaagtggacttctgaaaaatgaatgtaaaagacactggtgtatctcagaaggggatggtgttgtcacaaactgtggttaatccaatcaatttaaatgtttactatagaccaaaaggagagattattaaatcgtttaatgtttatacagagtaattataggaagttcttttttgtacagtatttttcagatataaatactgacaatgtattttggaagacatatattatatatagaaaagaggagaggaaaactattccatgttttaaaattatatagcaaagatatatattcaccaatgttgtacagagaagaagtgcttgggggtttttgaagtctttaatattttaagccctatcactgacacatcagcatgttttctgctttaaattaaaattttatgacagtatcgaggcttgtgatgacgaatcctgctctaaaatacacaaggagctttcttgtttcttattaggcctcagaaagaagtcagttaacgtcacccaaaagcacaaaatggattttagtcaaatatttattggatgatacagtgttttttaggaaaagcatctgccacaaaaatgttcacttcgaaattctgagttcctggaatggcacgttgctgccagtgccccagacagttcttttctaccctgcgggcccgcacgttttatgaggttgatatcggtgctatgtgtttggtttataatttgatagatgtttgactttaaagatgattgttcttttgtttcattaagttgtaaaatgtcaagaaattctgctgttacgacaaagaaacattttacgctagattaaaatatcctttcatcaatgggattttctagtttcctgccttcagagtatctaatcctttaatgatctggtggtctcctcgtcaatccatcagcaatgcttctctcatagtgtcatagacttgggaaacccaaccagtaggatatttctacaaggtgttcattttgtcacaagctgtagataacagcaagagatgggggtgtattggaattgcaatacattgttcaggtgaataataaaatcaaaaacttttgcaatcttaagcagagataaataaaagatagcaatatgagacacaggtggacgtagagttggcctttttacaggcaaagaggcgaattgtagaattgttagatggcaatagtcattaaaaacatagaaaaatgatgtctttaagtggagaattgtggaaggattgtaacatggaccatccaaatttatggccgtatcaaatggtagctgaaaaaactatatttgagcactggtctctcttggaattagatgtttatatcaaatgagcatctcaaatgttttctgcagaaaaaaataaaaagattctaataaaatgtattctcttgtgtgccaggagaggtttcagaaacctacctcgtcttacaaatttaaacactttggagtctgtacaggtgccttatatgtaggtcattgtcacgatacacacacacgaacactccctctggactggctgcctctccatccagggcagttaactagcaaacaaggcagatctgcttcatggagcgggaggccatggcttgactctgagtgatttgggtcaaccggagtcagacgcatgtctgcacgctgcagctattatgagagtccctttgtcatttttcaccttttcatcctaagcatctttcagagattaattatttggccattaacaatgaatccaaatcatatcatactgacatcatctagacatgatttggaaggaacagcttaggacctcctgatgaggtcacattgttgtttcttttaactagacttggcaaagaaaggcaaaaattgaccagcctatctttctgctggtgctgccttaaggaggtagtttgttgaggggagggctgtagatcattacttctttctcttcaggaagtggccactttgaaccattcaaataccacattaggcaagactgtgataggccttttgtcttcaaatacaacaggcctccactgacccatccctcaaagcagaaggaccctttgaggagagtacagatgggattccacagtggggtgggtggaatggaaacctgtactagaccacccagaggttccttctaacccactggtttggtggggaactcacagtaattccaaatgtacaatcagatgtctagggtctgttttcggaagaagcaagaattatcagtggcaccctccccactgcccccagtgtaaaacaatagacattctgtgaaatgcaaagctattctttggtttttctagtagtttatctcattttaccctattcttcctttaaggaaaactcaatctttatcacagtcaattagagcgatcccaaggcatgggaccaggcctgcttgcctatgtgtgatggcaattggagatctggatttagcactggggtctcagcaccctgcaggtgtctgagactaagtgatctgccctccaggtggcgatcaccttctgctcctaggtacccccactggcaaggccaaggtctcctccacgttttttctgcaattaataatgtcatttaaaaaatgagcaaagccttatccgaatcggatatagcaactaaagtcaatacattttgcaggaggctaagtgtaagagtgtgtgtgtgtgtgtgtgtgcgtgcatgtgtgtgtgtgtgtatgtgtgtgaataagtcgacataaagtctttaattttgagcaccttaccaaacataacaataatccattatccttttggcaacaccacaaagatcgcatctgttaaacaggtacaagttgacatgaggttagtttaattgtacaccatgatattggtggtatttatgctgttaagtccaaacctttatctgtctgttattcttaatgttgaataaactttgaattttttcctttcaaaaaaaaat

SEQ ID NO: 335454 - DNA, 5556 bp, Homo sapiens
gccccgcccccgcacgcctatgggcgcgaggtgcgggccctgacgtcactcttgtcagggccgcggcacatgggcggccggatgcgctgagcccggcgctgcggggccgcggagcgctggggagcagcggccgccggcgcggggaggggggtggggtgggacggcgcaccgcctccggtgctggcactaggggctggggtcggcgcggtgtcttctgcccttctgcagccgtcgacatttttttttctttctttttttcaattttgaacattttgcaaaacgaggggttcgaggcaggtgagagcatcctgcacgtcgccggggagcccgcgggcacttggcgcgctctcctgggaccgtctgcactggaaacccgaaagttttttttttaatatatatttttatgcagatgtatttataaagatataagtaatttttttcttcccttttctccaccgccttgagagcgagtacttttggcaaaggacggaggaaaagctcagcaacattttagggggcggttgtttctttctttcttatttctttttttaaggggaaaaaatttgagtgcatcgcgatggagaaaatgtcccgaccgctccccctgaatcccacctttatcccgcctccctacggcgtgctcaggtccctgctggagaacccgctgaagctcccccttcaccacgaagacgcatttagtaaagataaagacaaggaaaagaagctggatgatgagagtaacagcccgacggtcccccagtcggcattcctggggcctaccttatgggacaaaacccttccctatgacggagatactttccagttggaatacatggacctggaggagtttttgtcagaaaatggcattccccccagcccatctcagcatgaccacagccctcaccctcctgggctgcagccagcttcctcggctgccccctcggtcatggacctcagcagccgggcctctgcaccccttcaccctggcatcccatctccgaactgtatgcagagccccatcagaccaggtcagctgttgccagcaaaccgcaatacaccaagtcccattgatcctgacaccatccaggtcccagtgggttatgagccagacccagcagatcttgccctttccagcatccctggccaggaaatgtttgaccctcgcaaacgcaagttctctgaggaagaactgaagccacagcccatgatcaagaaagctcgcaaagtcttcatccctgatgacctgaaggatgacaagtactgggcaaggcgcagaaagaacaacatggcagccaagcgctcccgcgacgcccggaggctgaaagagaaccagatcgccatccgggcctcgttcctggagaaggagaactcggccctccgccaggaggtggctgacttgaggaaggagctgggcaaatgcaagaacatacttgccaagtatgaggccaggcacgggcccctgtaggatggcatttttgcaggctggctttggaatagatggacagtttgtttcctgtctgatagcaccacacgcaaaccaacctttctgacatcagcactttaccagaggcataaacacaactgactcccattttggtgtgcatctgtgtgtgtgtgcgtgtatatgtgcttgtgctcatgtgtgtggtcagcggtatgtgcgtgtgcgtgttcctttgctcttgccattttaaggtagccctctcatcgtcttttagttccaacaaagaaaggtgccatgtctttactagactgaggagccctctcgcgggtctcccatcccctccctccttcactcctgcctcctcagctttgcttcatgttcgagcttacctactcttccaggactctctgcttggattcactaaaaagggccctggtaaaatagtggatctcagtttttaagagtacaagctcttgtttctgtttagtccgtaagttaccatgctaatgaggtgcacacaataacttagcactactccgcagctctagtcctttataagttgctttcctcttactttcagttttggtgataatcgtcttcaaattaaagtgctgtttagatttattagatcccatatttacttactgctatctactaagtttccttttaattctaccaaccccagataagtaagagtactattaatagaacacagagtgtgtttttgcactgtctgtacctaaagcaataatcctattgtacgctagagcatgctgcctgagtattactagtggacgtaggatattttccctacctaagaatttcactgtcttttaaaaaacaaaaagtaaagtaatgcatttgagcatggccagactattccctaggacaaggaagcagagggaaatgggaggtctaaggatgaggggttaatttatcagtacatgagccaaaaactgcgtcttggattagcctttgacattgatgtgttcggttttgttgttccccttccctcacaccctgcctcgcccccacttttctagttaactttttccatatccctcttgacattcaaaacagttacttaagattcagttttcccactttttggtaatatatatatttttgtgaattatactttgttgtttttaaaaagaaaatcagttgattaagttaataagttgatgttttctaaggccctttttcctagtggtgtcatttttgaatgcctcataaattaatgattctgaagcttatgtttcttattctctgtttgcttttgaacgtatgtgctcttataaagtggacttctgaaaaatgaatgtaaaagacactggtgtatctcagaaggggatggtgttgtcacaaactgtggttaatccaatcaatttaaatgtttactatagaccaaaaggagagattattaaatcgtttaatgtttatacagagtaattataggaagttcttttttgtacagtatttttcagatataaatactgacaatgtattttggaagacatatattatatatagaaaagaggagaggaaaactattccatgttttaaaattatatagcaaagatatatattcaccaatgttgtacagagaagaagtgcttgggggtttttgaagtctttaatattttaagccctatcactgacacatcagcatgttttctgctttaaattaaaattttatgacagtatcgaggcttgtgatgacgaatcctgctctaaaatacacaaggagctttcttgtttcttattaggcctcagaaagaagtcagttaacgtcacccaaaagcacaaaatggattttagtcaaatatttattggatgatacagtgttttttaggaaaagcatctgccacaaaaatgttcacttcgaaattctgagttcctggaatggcacgttgctgccagtgccccagacagttcttttctaccctgcgggcccgcacgttttatgaggttgatatcggtgctatgtgtttggtttataatttgatagatgtttgactttaaagatgattgttcttttgtttcattaagttgtaaaatgtcaagaaattctgctgttacgacaaagaaacattttacgctagattaaaatatcctttcatcaatgggattttctagtttcctgccttcagagtatctaatcctttaatgatctggtggtctcctcgtcaatccatcagcaatgcttctctcatagtgtcatagacttgggaaacccaaccagtaggatatttctacaaggtgttcattttgtcacaagctgtagataacagcaagagatgggggtgtattggaattgcaatacattgttcaggtgaataataaaatcaaaaacttttgcaatcttaagcagagataaataaaagatagcaatatgagacacaggtggacgtagagttggcctttttacaggcaaagaggcgaattgtagaattgttagatggcaatagtcattaaaaacatagaaaaatgatgtctttaagtggagaattgtggaaggattgtaacatggaccatccaaatttatggccgtatcaaatggtagctgaaaaaactatatttgagcactggtctctcttggaattagatgtttatatcaaatgagcatctcaaatgttttctgcagaaaaaaataaaaagattctaataaaatgtattctcttgtgtgccaggagaggtttcagaaacctacctcgtcttacaaatttaaacactttggagtctgtacaggtgccttatatgtaggtcattgtcacgatacacacacacgaacactccctctggactggctgcctctccatccagggcagttaactagcaaacaaggcagatctgcttcatggagcgggaggccatggcttgactctgagtgatttgggtcaaccggagtcagacgcatgtctgcacgctgcagctattatgagagtccctttgtcatttttcaccttttcatcctaagcatctttcagagattaattatttggccattaacaatgaatccaaatcatatcatactgacatcatctagacatgatttggaaggaacagcttaggacctcctgatgaggtcacattgttgtttcttttaactagacttggcaaagaaaggcaaaaattgaccagcctatctttctgctggtgctgccttaaggaggtagtttgttgaggggagggctgtagatcattacttctttctcttcaggaagtggccactttgaaccattcaaataccacattaggcaagactgtgataggccttttgtcttcaaatacaacaggcctccactaacccactggtttggtggggaactcacagtaattccaaatgtacaatcagatgtctagggtctgttttcggaagaagcaagaattatcagtggcaccctccccactgcccccagtgtaaaacaatagacattctgtgaaatgcaaagctattctttggtttttctagtagtttatctcattttaccctattcttcctttaaggaaaactcaatctttatcacagtcaattagagcgatcccaaggcatgggaccaggcctgcttgcctatgtgtgatggcaattggagatctggatttagcactggggtctcagcaccctgcaggtgtctgagactaagtgatctgccctccaggtggcgatcaccttctgctcctaggtacccccactggcaaggccaaggtctcctccacgttttttctgcaattaataatgtcatttaaaaaatgagcaaagccttatccgaatcggatatagcaactaaagtcaatacattttgcaggaggctaagtgtaagagtgtgtgtgtgtgtgtgtgtgcgtgcatgtgtgtgtgtgtgtatgtgtgtgaataagtcgacataaagtctttaattttgagcaccttaccaaacataacaataatccattatccttttggcaacaccacaaagatcgcatctgttaaacaggtacaagttgacatgaggttagtttaattgtacaccatgatattggtggtatttatgctgttaagtccaaacctttatctgtctgttattcttaatgttgaataaactttgaattttttcctttcaaaaaaaaat

SEQ ID NO: 335455 - DNA, 252 bp, Homo sapiens
ccaggtagacctaacccaggtagacctaacccaggtagacctaacccaggtagaccaaacataacaataatccattatccttttggcaacaccacaaagatcgcatctgttaaacaggtacaagttgacatgaggttagtttaattgtacaccatgatattggtggtatttatgctgttaagtccaaacctttatctgtctgttattcttaatgttgaataaactttgaattttttcctttcaaaaaaaaat

SEQ ID NO: 335456 - DNA, 848 bp, Homo sapiens
atttgtgtatttctgtgctttcttactttcttccttctactgattttcggttgttttggtttttcttttttatattcttgagatgtaacagtaacttatctatttgatatctttttggatgtaggtatttattgctataaacttccctcttggaactgctttttcttcattctttaaattctgatgtggttttatagtattcatctcataagacttaccttttacagttaaaatgttctaatttaagctgatagtaccttaattttattacctcatgaagactcttcatttgtttcatattttatatgttctgctgttgaagggaaaattctattatctggtaggtatatctagtctaaagtgttgttctaattcactaattcaatagaactgttggttctattgaaatgtcccattgttactaaatggaagttcgtagaatctttccaatctattacatcgttatatatataggtatgctgatgaagggagtgtgcatttttacaattggtacagaattttaattaactgaccctattatcataataatattcccccacgctctttacaggttttgactggaagcctttttttctgatatgagcatagcaacatctcctcttttgcttggaatagctttttaatcagcttttttaaaaaatagttttttaaacatttaattttaatgttgattccaagcaaatcaacatttgcttggaatagcttttttaatctctttactctcagtctctgtgtgttgttaagtctaatgtgagtgtctcgttagtggcgccatattgtttaatattttttgttcttttttttttaatctaacttgaatttctgtg

SEQ ID NO: 335457 - DNA, 394 bp, Homo sapiens
tctcatatacataatacagatattaccaacaaagtaggctatagtatagtcccattagaaaaaaatctttgtgttatatgttaagtacatgtataggcatgtgtgcacatgtatgtgcatgtatacatacacacaccataacactcctaaaagaggaatgagttaaatgacaatgaatacatattcattgggactacaaacaatatttgcacgtggaacagcaaatggctccattcttttaaatctagatgatgagctgggtgcggtggtacatgcttgtaatcccagcactttggaggggctgaggtgggccgaccgattgaggccaggagtttgagaccagtgatccatctgcctcggactcccaacgtgctggggattacaggcatgagcc

SEQ ID NO: 335458 - DNA, 195 bp, Homo sapiens
aacacataataatagctagaattggaggtagaggcagattacttataatgccagtcttttaaaatcctccttaattggcaagagtctgaagaagcttgtttggatttagaatttgtgaattcgtgtgaatgccatgaattctctaatatggagggggaaagagaaggaaattattgaacaactgctgtgtgcctg

SEQ ID NO: 335459 - DNA, 535 bp, Homo sapiens
caggaacaggctatgacctaatgcttgcttggaccagtgtaagcatgctagggcaaatacttaggctaaattgtgggagctaagaacataaggtacattgatttccttattaccgctagcagatatttaagaatgttaacacagttctttgaataaattttgcgtctaaggaataaatactatttattcctaattagatggggaggaaagtctttgaagaggaacctttactttactttttacaccgccatagctataattgagatcctcaggatcttctttccagactgcctccattcttcacctcttggaacccgtcgttttgacttgtcactagtgggctcaatctcaaaacacagagctaaccgtgcaacctctctgcttaatacctagggtggctcctagtcacccggccaagctgaacatagaacacaagatcttcattatctggcttctgcctattcctgggaccttacttcctgccattcttcaccttgcactttgagctctggtttcctgcatgtcatagctgttt

SEQ ID NO: 335460 - DNA, 477 bp, Homo sapiens
catattatgttcacagaacccgatttgagaaatactgatgcataggaaaaaatctgcatttaagcatgaacccattgcgctctccctccattgtttacttttttcagcattactttttattattctacaggaacttcctgctccctttaaatttattaatttcctcacaagcatatctgttcattttactgcctttgtgactgcttagataactttgcagtgttacaatagtggaaagccaaatggctttgggttcaactatgagctcccccacaatctgggagaaatatttagctctgtaagtcatgctttctttgaaaaaataaggctgaggtaagggatgataaacacctacccatagagggtagtaagagacactggtgaaggctcccagcacagtgtctggcacaaggaagacatcataaacaagtagtttttgaatcattctcaactctacctgtaccttaaagcccagca

SEQ ID NO: 335461 - DNA, 321 bp, Homo sapiens
gtggtaatcttgtgtatagaaaacaaggaatccactaaaaaactactaaaactaattaattttaggacatttctccttccccctcccctttgcatttaaattcaaaatggaatatttcttctgataataaatgtagtatatactttactggattataagtttccaagattcttgtctgttttgtagaaccctgtgtaagtaccacctgtacaaatgtctagtacatagaaggcactctttacatacttgaatgaatgcttattatagaaaaaaagtggaagatgtaaaaaaggtagaaaggaaaaaaaagagaaatgtgct

SEQ ID NO: 335462 - DNA, 288 bp, Homo sapiens
cctgatttatgtatcatttgcataccatgacattcagtgaacaggcacaagtctgtaaatccatatatgggaagctgctgggaccaaggattaaggaggggagaagcctgagtcactgaggggcatttgtgagatttaagagctagaaattaatgctataactgctcagaacagtgatagtagagaatatattgtgatcctaaggtgaaggaagtggcagtttgtcttgaacttctttctagtcagtgtactggccaagcatcgccacagagcatttcccaacctccc

SEQ ID NO: 335463 - DNA, 692 bp, Homo sapiens
aaggagggtgggaaggagggcaggggacaatggcatagtaacagtcttgctgttcctgagtccgggaaggaggattatgagtgcgacctgcatctggtaggcaacaaagaagcaaggatgggttttcagcagataaactgtcatacccatagactggactgagaaggtgggtgatggtgggcagcagagatgaagtggaggggacagagcaaaggcattgctgccctgtggtatctgccagaagtgcaaacccagaacttgatcacgatgaaatatccaaaaaactaaaacaaagccaaggccgggcacagtggctcacgcctgtaatgccagcactttgggaggtcgaggcttgtggatagcttgagctcaggagtttgagaccagcctgggaaacacagaaaccccatctctaccaaaaatacaaaaaattaaaaaaaaaaaaaaaagggaaaacaaagctaagctgaggaacaccctacaaaataactgattggtgattttatttttttggttttttggtttttgagatggagtctagctctgtcgccaggctggagtgcagtggcgtgatctcggctcattccaaccactgccttctgggttcaaacgattctcctgcctcagcttcccgagtagctgggactacaggtgcgtgccaccatgcccagctaattttttttttttttttt

SEQ ID NO: 335464 - DNA, 475 bp, Homo sapiens
ttccacagggctaggaaggaatcagggaacttataatcatggtggaaagggaaacaagcatgtccttcttcacgtggtggcaagaagaagaatgagagcagagcgaagggggaagccccttataaaaccatcagatctcatgagaacttactatcatgcgaatagcgtggaggaaatccctgattacctcccactgggtccctcccacaacatgtggagattatgggtactacaattcaatatgagattcgggtggggacatagccaaacaacatcaaccggaatcttgtattgcaagtttttattgaattttaaatcatgaagctaaacacttctttgataaacatctagaaggtgagaagtagctcaactctggagtaaggctaaactgggtctgaatatgttttatattctctggactttgaaatatgtctcttgataataaactagttagtctccctgtgaaaagtcaacc

SEQ ID NO: 335465 - DNA, 685 bp, Homo sapiens
agggaaggaatctgtgatgaattcagtgggagtccacacccataagtagaaatccaggctctagtattggtgtaagaagttaatatcatcttcttacattcttctttggttttcttttgcacacctacctttataatcttgttaataaattctagcagatcatgataaccaggacatggcaggaaataatgattaactaatctgtgtttatcctgtcaactgtactgtatctgggaacataagtcctcatggaaaaatttggcctttgtttatttaaatctgctcccacaaaggaaaggtaacgcatgagttttgccaaggctgcagggctttttattctttccctgccccacctcccccacccttccaatagaaatctaagggctgcaggtttattgctctttattctattcaatgcaaaatgagttgtccttgttgtccttcagccttgttttgccaagttttcatttggactaatagatggtgtatttcaaaaaatagtgctcaaaatgtaatatggcaccattagctttggactaccacagagagtttggagaatttcctggggcctatgtgttaatttaaagttgcaggaaagaacatgggaaggaacaacaatagctgtggttatactctatcctagagctgccaagcaggttaatattaatggtaatggcctcatgca

SEQ ID NO: 335466 - DNA, 303 bp, Homo sapiens
acaataccttgtaccataataaagtccaatttacctatacttgacactaattctcaacgaataaaaatgtaaacaattactgaggttgaagcttaacttggaagaaaagtttcctgtagaaatttgtaagattgcaaggagtaccagctgacataaagtttagccttgagagaatattaatgaagttagtttcctatctcattacaatgaaacttccaaatagtttctagcaggtaacattttgttagccttgatttcacatttgaaagaaaaatgtatgtttcaaattcgtaactcaatttt

SEQ ID NO: 335467 - DNA, 111 bp, Homo sapiens
tgttgacctcttctgcacacacacttttagaaaatgggctagaggactcatattttgcatgcatacacagaccacactcccctgcccctaccagccaaagcaggtggcaaa

SEQ ID NO: 335468 - DNA, 944 bp, Homo sapiens
tgcactccagtttgggtgacagagagagacctttctttaaaagtaataattacaatggaaatgaagtattgatttgaccatgggacaagtgggtggatgggtgtagggtttggcagtttaagaattaaaaacattggaggataatatctggactgaaaagatacagaaataaaacatgttgtgtagaaatgtggagataaagagcaggtggaaggcctgatagctgtggaagcacagtctctgcagagcaggctccacttgggtggaagctgtccttctcgtgtgagctctagccttgtactgtgtggcttctcaaactgtgtgcttggagtcacttgacaaaaattaaaattaagagaatggaaacttgccatcttgcataagtttttttgtcatttaatttgtcaacttttagtaggtctccttgtatggagactagtacactgttgatttagaaatacctgcaggttgatactagtttagtgcagtatcttgaagaaaccaagagcatagactttagagtcagttgtttacttgggtataaatgatgagctactgcatgctaggggctgttcccagataacagtggttaggaaaatacatgaggcctctccccttgacgaagtcacattctagtgatgggagatggacactgcagatgaatgagcaaggtcgtttcagattgcttgagagagataaaacctggaatgggttggaggagaaggccttccacggaatgcccctttgagcagagtcctgagggtgagaccaccacacttgcttgggaacagcaggggaaggcttcgagttctgggagttcattagaattcaggacagtcatcctcaacaagagaggacagttggccttgaggtgagacagaccctggcttgtgacatcaagggtggtgctggactggagggatgctggagtgtggcaggggctg

SEQ ID NO: 335469 - DNA, 133 bp, Homo sapiens
tcatttttctctttgaataccatcttccagttgcattttcctttgattacctcactactaattatctcattactgtacagtatctcaaagataatctggttaggtgatcacctgatacaaaagtaaataattc

SEQ ID NO: 335470 - DNA, 449 bp, Homo sapiens
gacacagggctgtggagtgacagtgaggagttgggcttttgtcctggggaacacaggaagcccatggagggttccctgccagggactgacatgatctgctttagatttagctgtgacatcctcagaacggggacattttcaccgagtcacgctgagaaggtctgagatgagtgaaaagatgtaacggaattcttacatggtggcctggaagggataaaggaaagggttggccttatcaaaactatccttgaaaattagagaagcctctttcacatacctgggataaaaaaacttcctttgcaagttctgatgccactgattcccaacatttaattcttcctcacaagaaaattacagtaacatttataaaatgcagatgtacaaagacacagctagttaccttcaaaacagggaggctgagtgcggtggctcactccttcacccaagca

SEQ ID NO: 335471 - DNA, 783 bp, Homo sapiens
agagagaaagggagagaaagagaaagaaacaacagagagaaagatgaagattatgtgcttactctcaggatcatccatgtccatacagaatgtcttttacactgtttataaacctcctcactataggccctgcaggccccttattcaactttttgattaaattggataaaaaaggaacagggcaaaaggaaacttcttgttattgtcttgtcacccttagtagcaggcacatacttaggaaagtcagatttcctgtgtatgagacatactagagtggaccaagggaagaaaaccctatgcagagcaacaagcgagtagcagtggacagggagcagtggggccctcggggaaaaaacagagctaatggccctggcagggttcctcacacccagagctctaccaccatgtgaagctaacactgcaagcccacacccatcatcacattgtatggggcagtttcttgaccctgtgtgagagcagagaagacacctataatggcaaaaacaaggcactcatgaagggattttagtgtcaggaaatgagatgaggtcaaggggatttgtatatagaaactgcagctgaatttgaaataaagtaaaccaccaaatgcttagtttgtgcttcattcaattgtaaagaactaaacatcgtttgtgagtaattcaaaccggaaagtgaagtgtaggatgtcatattggtgttggacgatacatatatatatttaaattctgtagcactgccaagtctgaattcaaatcagtaccctggaatggagctatcagt

SEQ ID NO: 335472 - DNA, 134 bp, Homo sapiens
ctcagtcctgggtgctttgtaaatgctcgagaaacaaagcctgttctgtttgtaagacgtagccagtattggaggagtggtggctccgtaagccccgggacctacccgtgaaaagggagaagagggtgatggga

SEQ ID NO: 335473 - DNA, 397 bp, Homo sapiens
ggaccgggagaccgactgagaggaagaaggtggttcagaagagctaaggcaaagtgtggggtttggggtttgcttgtttgtttgccaggggaaacaagtacacataccagagggaaatttagaaaggtaaagtttaggaagtcaaccacatgttatttacagactggaggctcaagttaccaaacaacagggtacggcaagactgcaccaaacttccttctccaagttacaaaggacaagctggaaatgtgtgcggaatgggaaacatgggctgattattgggacctacttatctagtcttcaaatctttttttttttttttttttgagacggagtctggctctgtcacccaggctggagtgcagtggcaccatcttggctcactgcaagctctgcc

SEQ ID NO: 335474 - DNA, 960 bp, Homo sapiens
ttctgagcttcgcgcgcggctgcagggattcgccgggactcgcgcgggggaccgcgcccggggatcctgcaggggcgggaagggggctcgggctccttgcttccgccgcagtggggcgctgccgggctccccggcactagcgctgctggcggccccggcggccgggcgtgctgcctgcaagatgtccgtgcgccgcggccggcggccggcgcggccggggacccgcctctcctggctgctgtgctgcagcgccctgctgtccccggccgcgggctacgtgatcgtgagctccgtgtcttgggccgtcaccaacgaggtggacgaggagctggacagcgcctccactgaggaggctatgcccgcgctgctagaggattcgggcagcatctggcagcaaagcttccccgcctctgcccacaaggaggacgcgcacctgcggccccgggcgggcgccgcccgggccaggccgccccccgcgccacccgggatgttctcctaccggcgcgagggcggccagacggccagtgcgcccccgggccctagactgcgcgccgccaccgcccgctccctggcccatgccagcgtctggggctgctggccaccgtgtccacccacaagaagatccaaggactgccatttgggaactgcctgcccgtcagtgatggccccttcaacaatagcactgggattcctttcttctacaatgacagccaaggaccccgtggtggctgatctgatgaagaaccccatggcctcgctgatgctgccagaatcagaaggggagttctgcagaacaaacatcgttgatccggaagatccccgatgtgtccagttaaccgctcactgggcagatgattcgcagtgtctccagacagaagtagaatttggcaagcagccatcgtttcaaggcaccagggtgaggaatggcctctcatattgatgggtcctcatgacatgagg

SEQ ID NO: 335475 - DNA, 830 bp, Homo sapiens
ttctgagcttcgcgcgcggctgcagggattcgccgggactcgcgcgggggaccgcgcccggggatcctgcaggggcgggaagggggctcgggctccttgcttccgccgcagtggggcgctgccgggctccccggcactagcgctgctggcggccccggcggccgggcgtgctgcctgcaagatgtccgtgcgccgcggccggcggccggcgcggccggggacccgcctctcctggctgctgtgctgcagcgccctgctgtccccggccgcgggctacgtgatcgtgagctccgtgtcttgggccgtcaccaacgaggtggacgaggagctggacagcgcctccactgaggaggctatgcccgcgctgctagaggattcgggcagcatctggcagcaaagcttccccgcctctgcccacaaggaggacgcgcacctgcggccccgggcgggcgccgcccgggccaggccgccccccgcgccacccgggatgttctcctaccggcgcgagggcggccagacggccagtgcgcccccgggccctagactgcgcgccgccaccgcccgctccctggcccatgccagcgtctggggctgctggccaccgtgtccacccacaagaagtccttggtgtttgcacttaaatgaaaaccttttcagtgatgcagccagacagctattgaccactgtctctttgttcgaagggttcatagcagccctgcattccctgcagcagcaatgacaccagggtgaacagggaaactctatgctagacttgagattacccgtggtcatttgccggatctccaactcagacagatacttcacgtaga

SEQ ID NO: 335476 - DNA, 949 bp, Homo sapiens
ttctgagcttcgcgcgcggctgcagggattcgccgggactcgcgcgggggaccgcgcccggggatcctgcaggggcgggaagggggctcgggctccttgcttccgccgcagtggggcgctgccgggctccccggcactagcgctgctggcggccccggcggccgggcgtgctgcctgcaagatgtccgtgcgccgcggccggcggccggcgcggccggggacccgcctctcctggctgctgtgctgcagcgccctgctgtccccggccgcgggctacgtgatcgtgagctccgtgtcttgggccgtcaccaacgaggtggacgaggagctggacagcgcctccactgaggaggctatgcccgcgctgctagaggattcgggcagcatctggcagcaaagcttccccgcctctgcccacaaggaggacgcgcacctgcggccccgggcgggcgccgcccgggccaggccgccccccgcgccacccgggatgttctcctaccggcgcgagggcggccagacggccagtgcgcccccgggccctagactgcgcgccgccaccgcccgctccctggcccatgccagcgtctggggctgctggccaccgtgtccacccacaagaagatccaaggactgccatttgggaactgcctgcccgtcagtgatggccccttcaacaatagcactgggattcctttcttctacaatgacagccaaggaccccgtggtggctgatctgatgaagaaccccatggcctcgctgatgctgccagaatcagaaggggagttctgcaggtagacgacggtttgccctcactcacacgggtcctgggaagtttttgacagagagttgggggtgggtttctctctgggtcacatgactttaacagaactctgagatgcacattgatgttcacccttgaaatcagataaattagaattccaccactca

SEQ ID NO: 335477 - DNA, 1170 bp, Homo sapiens
ttgtgcaacactggcaggagtccagacagctcctgttgttatggaaaagggcgagggtgggagtgagggttggtaaaggaagagccagtagttgatctccccagcacggaggcgtgcaacacagagtctatatattgtctttccaatttatttctatcctgtccccagagatatgtgcaataaggagccagcattttttaattcactttttcaaaagctctctgaaagaaaacacttctaaagacatttaagcactaacagaacattgatgcaggcccctttatctgaattcaaaatgcaaagcctgaactcgcatcctccccgggaaatgtctgcatggagctggtgtgggagctgcatgtgagatcccctcgtccttcccagaggagcagcaaatgcccaggatggcctggggtgagccctttaacctccaggaccttagtcactccacctaaatgtagtgatgctttagaaaatcaacaggcctcatcccatctgtgaaattctattattctttatgcacagcacggaaaacataataaccaaacaatgtattagttcttacagaggctaatcaaagcaactatacaatgcaagatgcatcctggataagccattgtttcccctcagccacgacagaccacatggagacacttcagctgaccctgttccccaccaggttacagcaagaagccaggaaaagaaacatttcctttctcatggaatattctccctgttcttggtcagtcaagcttactgttactagaagtacatttccaggatacctttcttttcttttcttactctttttttttttttttcgagatagagtttcgctcttgtttcccagactggagtgcagtggcgcaatctcggttcactgcaaccgtgaacctctgcctcccaggttcaagcaattctccctgcctcagcctcccaagtagctgggattacaggtgtccaccaccacgcctggctaatttttgtatttttagtagagacagggttttgccatgttgaccaggctggtctcaaactcctgacctcaggtgatccacctgcctcggccttccaatccaggatacctttctaagcttcccaggctttcctcattcaggtatcctgaaagcagtcgtgctggagcatgtggctcccagaacccagagcaca

SEQ ID NO: 335478 - DNA, 1794 bp, Homo sapiens
ttctgagcttcgcgcgcggctgcagggattcgccgggactcgcgcgggggaccgcgcccggggatcctgcaggggcgggaagggggctcgggctccttgcttccgccgcagtggggcgctgccgggctccccggcactagcgctgctggcggccccggcggccgggcgtgctgcctgcaagatgtccgtgcgccgcggccggcggccggcgcggccggggacccgcctctcctggctgctgtgctgcagcgccctgctgtccccggccgcgggctacgtgatcgtgagctccgtgtcttgggccgtcaccaacgaggtggacgaggagctggacagcgcctccactgaggaggctatgcccgcgctgctagaggattcgggcagcatctggcagcaaagcttccccgcctctgcccacaaggaggacgcgcacctgcggccccgggcgggcgccgcccgggccaggccgccccccgcgccacccgggatgttctcctaccggcgcgagggcggccagacggccagtgcgcccccgggccctagactgcgcgccgccaccgcccgctccctggcccatgccagcgtctggggctgctggccaccgtgtccacccacaagaagatccaaggactgccatttgggaactgcctgcccgtcagtgatggccccttcaacaatagcactgggattcctttcttctacaatgacagccaaggaccccgtggtggctgatctgatgaagaaccccatggcctcgctgatgctgccagaatcagaaggggagttctgcagagatatgtgcaataaggagccagcattttttaattcactttttcaaaagctctctgaaagaaaacacttctaaagacatttaagcactaacagaacattgatgcaggcccctttatctgaattcaaaatgcaaagcctgaactcgcatcctccccgggaaatgtctgcatggagctggtgtgggagctgcatgtgagatcccctcgtccttcccagaggagcagcaaatgcccaggatggcctggggtgagccctttaacctccaggaccttagtcactccacctaaatgtagtgatgctttagaaaatcaacaggcctcatcccatctgtgaaattctattattctttatgcacagcacggaaaacataataaccaaacaatgtattagttcttacagaggctaatcaaagcaactatacaatgcaagatgcatcctggataagccattgtttcccctcagccacgacagaccacatggagacacttcagctgaccctgttccccaccaggttacagcaagaagccaggaaaagaaacatttcctttctcatggaatattctccctgttcttggtcagtcaagcttactgttactagaagtacatttccaggatacctttcttttcttttcttactctttttttttttttttcgagatagagtttcgctcttgtttcccagactggagtgcagtggcgcaatctcggttcactgcaaccgtgaacctctgcctcccaggttcaagcaattctccctgcctcagcctcccaagtagctgggattacaggtgtccaccaccacgcctggctaatttttgtatttttagtagagacagggttttgccatgttgaccaggctggtctcaaactcctgacctcaggtgatccacctgcctcggccttccaatccaggatacctttctaagcttcccaggctttcctcattcaggtatcctgaaagcagtcgtgctggagcatgtggctcccagaacccagagcaca

SEQ ID NO: 335479 - DNA, 1404 bp, Homo sapiens
ttctgagcttcgcgcgcggctgcagggattcgccgggactcgcgcgggggaccgcgcccggggatcctgcaggggcgggaagggggctcgggctccttgcttccgccgcagtggggcgctgccgggctccccggcactagcgctgctggcggccccggcggccgggcgtgctgcctgcaagatgtccgtgcgccgcggccggcggccggcgcggccggggacccgcctctcctggctgctgtgctgcagcgccctgctgtccccggccgcgggctacgtgatcgtgagctccgtgtcttgggccgtcaccaacgaggtggacgaggagctggacagcgcctccactgaggaggctatgcccgcgctgctagaggattcgggcagcatctggcagcaaagcttccccgcctctgcccacaaggaggacgcgcacctgcggccccgggcgggcgccgcccgggccaggccgccccccgcgccacccgggatgttctcctaccggcgcgagggcggccagacggccagtgcgcccccgggccctagactgcgcgccgccaccgcccgctccctggcccatgccagcgtctggggctgctggccaccgtgtccacccacaagaagatccaaggactgccatttgggaactgcctgcccgtcagtgatggccccttcaacaatagcactgggattcctttcttctacaatgacagccaaggaccccgtggtggctgatctgatgaagaaccccatggcctcgctgatgctgccagaatcagaaggggagttctgcagttcttacagaggctaatcaaagcaactatacaatgcaagatgcatcctggataagccattgtttcccctcagccacgacagaccacatggagacacttcagctgaccctgttccccaccaggttacagcaagaagccaggaaaagaaacatttcctttctcatggaatattctccctgttcttggtcagtcaagcttactgttactagaagtacatttccaggatacctttcttttcttttcttactctttttttttttttttcgagatagagtttcgctcttgtttcccagactggagtgcagtggcgcaatctcggttcactgcaaccgtgaacctctgcctcccaggttcaagcaattctccctgcctcagcctcccaagtagctgggattacaggtgtccaccaccacgcctggctaatttttgtatttttagtagagacagggttttgccatgttgaccaggctggtctcaaactcctgacctcaggtgatccacctgcctcggccttccaatccaggatacctttctaagcttcccaggctttcctcattcaggtatcctgaaagcagtcgtgctggagcatgtggctcccagaacccagagcaca

SEQ ID NO: 335480 - DNA, 93 bp, Homo sapiens
cagaaccttccctgccacactggtgctccccactgagataggggtacatggagctcatctgttcccccaggagaccctcgggcaccacctctg

SEQ ID NO: 335481 - DNA, 2547 bp, Homo sapiens
agccgactccggagcccgagcccggggcgggtggacgcggactcgaacgcagttgcttcgggacccaggaccccctcgggcccgacccgccaggaaagactgaggccgcggcctgccccgcccggctccctgcgccgccgccgcctcccgggacagaagatgtgctccagggtccctctgctgctgccgctgctcctgctactggccctggggcctggggtgcagggctgcccatccggctgccagtgcagccagccacagacagtcttctgcactgcccgccaggggaccacggtgccccgagacgtgccacccgacacggtggggctgtacgtctttgagaacggcatcaccatgctcgacgcaggcagctttgccggcctgccgggcctgcagctcctggacctgtcacagaaccagatcgccagcctgcccagcggggtcttccagccactcgccaacctcagcaacctggacctgacggccaacaggctgcatgaaatcaccaatgagaccttccgtggcctgcggcgcctcgagcgcctctacctgggcaagaaccgcatccgccacatccagcctggtgccttcgacacgctcgaccgcctcctggagctcaagctgcaggacaacgagctgcgggcactgcccccgctgcgcctgccccgcctgctgctgctggacctcagccacaacagcctcctggccctggagcccggcatcctggacactgccaacgtggaggcgctgcggctggctggtctggggctgcagcagctggacgaggggctcttcagccgcttgcgcaacctccacgacctggatgtgtccgacaaccagctggagcgagtgccacctgtgatccgaggcctccggggcctgacgcgcctgcggctggccggcaacacccgcattgcccagctgcggcccgaggacctggccggcctggctgccctgcaggagctggatgtgagcaacctaagcctgcaggccctgcctggcgacctctcgggcctcttcccccgcctgcggctgctggcagctgcccgcaaccccttcaactgcgtgtgccccctgagctggtttggcccctgggtgcgcgagagccacgtcacactggccagccctgaggagacgcgctgccacttcccgcccaagaacgctggccggctgctcctggagcttgactacgccgactttggctgcccagccaccaccaccacagccacagtgcccaccacgaggcccgtggtgcgggagcccacagccttgtcttctagcttggctcctacctggcttagccccacagcgccggccactgaggcccccagcccgccctccactgccccaccgactgtagggcctgtcccccagccccaggactgcccaccgtccacctgcctcaatgggggcacatgccacctggggacacggcaccacctggcgtgcttgtgccccgaaggcttcacgggcctgtactgtgagagccagatggggcaggggacacggcccagccctacaccagtcacgccgaggccaccacggtccctgaccctgggcatcgagccggtgagccccacctccctgcgcgtggggctgcagcgctacctccaggggagctccgtgcagctcaggagcctccagtcacccctccacgcaaagccctacatctaagccagagagagacagggcagctggggccgggctctcagccagtgagatggccagccccctcctgctgccacaccacgtaagttctcagtcccaacctcggggatgtgtgcagacagggctgtgtgaccacagctgggccctgttccctctggacctcggtctcctcatctgtgagatgctgtggcccagctgacgagccctaacgtccccagaaccgagtgcctatgaggacagtgtccgccctgccctccgcaacgtgcagtccctgggcacggcgggccctgccatgtgctggtaacgcatgcctgggccctgctgggctctcccactccaggcggaccctgggggccagtgaaggaagctcccggaaagagcagagggagagcgggtaggcggctgtgtgactctagtcttggccccaggaagcgaaggaacaaaagaaactggaaaggaagatgctttaggaacatgttttgcttttttaaaatatatatatatttataagagatcctttcccatttattctgggaagatgtttttcaaactcagagacaaggactttggtttttgtaagacaaacgatgatatgaaggccttttgtaagaaaaaataaaagatgaagtgtgtttcttgggctcagccccagggtagaagggctgggtggagggagatgaagaaggagtggccctcgctctggggagccagggcccctcagcagcccctgggcttgggcagccctcccaggtgtcctgacctgggtgccatccaccctaggcttgaatgaggtgaggctgggcccaggtgggacaggccccgtggcgcgggtgttgatgtcagtgccgagtcaggcccagccacgcgaggctctggatt

SEQ ID NO: 335482 - DNA, 1839 bp, Homo sapiens
agccgactccggagcccgagcccggggcgggtggacgcggactcgaacgcagttgcttcgggacccaggaccccctcgggcccgacccgccaggaaagactgaggccgcggcctgccccgcccggctccctgcgccgccgccgcctcccgggacagaagatgtgctccagggtccctctgctgctgccgctgctcctgctactggccctggggcctggggtgcagggctgcccatccggctgccagtgcagccagccacagacagtcttctgcactgcccgccaggggaccacggtgccccgagacgtgccacccgacacggtggggctgtacgtctttgagaacggcatcaccatgctcgacgcaggcagctttgccggcctgccgggcctgcagctcctggacctgtcacagaaccagatcgccagcctgcccagcggggtcttccagccactcgccaacctcagcaacctggacctgacggccaacaggctgcatgaaatcaccaatgagaccttccgtggcctgcggcgcctcgagcgcctctacctgggcaagaaccgcatccgccacatccagcctggtgccttcgacacgctcgaccgcctcctggagctcaagctgcaggacaacgagctgcgggcactgcccccgctgcgcctgccccgcctgctgctgctggacctcagccacaacagcctcctggccctggagcccggcatcctggacactgccaacgtggaggcgctgcggctggctggtctggggctgcagcagctggacgaggggctcttcagccgcttgcgcaacctccacgacctggatgtgtccgacaaccagctggagcgagtgccacctgtgatccgaggcctccggggcctgacgcgcctgcggctggccggcaacacccgcattgcccagctgcggcccgaggacctggccggcctggctgccctgcaggagctggatgtgagcaacctaagcctgcaggccctgcctggcgacctctcgggcctcttcccccgcctgcggctgctggcagctgcccgcaaccccttcaactgcgtgtgccccctgagctggtttggcccctgggtgcgcgagagccacgtcacactggccagccctgaggagacgcgctgccacttcccgcccaagaacgctggccggctgctcctggagcttgactacgccgactttggctgcccagccaccaccaccacagccacagtgcccaccacgaggcccgtggtgcgggagcccacagccttgtcttctagcttggctcctacctggcttagccccacagcgccggccatgaaggaagctcccggaaagagcagagggagagcgggtaggcggctgtgtgactctagtcttggccccaggaagcgaaggaacaaaagaaactggaaaggaagatgctttaggaacatgttttgcttttttaaaatatatatatatttataagagatcctttcccatttattctgggaagatgtttttcaaactcagagacaaggactttggtttttgtaagacaaacgatgatatgaaggccttttgtaagaaaaaataaaagatgaagtgtgtttcttgggctcagccccagggtagaagggctgggtggagggagatgaagaaggagtggccctcgctctggggagccagggcccctcagcagcccctgggcttgggcagccctcccaggtgtcctgacctgggtgccatccaccctaggcttgaatgaggtgaggctgggcccaggtgggacaggccccgtggcgcgggtgttgatgtcagtgccgagtcaggcccagccacgcgaggctctggatt

SEQ ID NO: 335483 - DNA, 3054 bp, Homo sapiens
agccgactccggagcccgagcccggggcgggtggacgcggactcgaacgcagttgcttcgggacccaggaccccctcgggcccgacccgccaggaaagactgaggccgcggcctgccccgcccggctccctgcgccgccgccgcctcccgggacagaagatgtgctccagggtccctctgctgctgccgctgctcctgctactggccctggggcctggggtgcagggctgcccatccggctgccagtgcagccagccacagacagtcttctgcactgcccgccaggggaccacggtgccccgagacgtgccacccgacacggtggggctgtacgtctttgagaacggcatcaccatgctcgacgcaggcagctttgccggcctgccgggcctgcagctcctggacctgtcacagaaccagatcgccagcctgcccagcggggtcttccagccactcgccaacctcagcaacctggacctgacggccaacaggctgcatgaaatcaccaatgagaccttccgtggcctgcggcgcctcgagcgcctctacctgggcaagaaccgcatccgccacatccagcctggtgccttcgacacgctcgaccgcctcctggagctcaagctgcaggacaacgagctgcgggcactgcccccgctgcgcctgccccgcctgctgctgctggacctcagccacaacagcctcctggccctggagcccggcatcctggacactgccaacgtggaggcgctgcggctggctggtctggggctgcagcagctggacgaggggctcttcagccgcttgcgcaacctccacgacctggatgtgtccgacaaccagctggagcgagtgccacctgtgatccgaggcctccggggcctgacgcgcctgcggctggccggcaacacccgcattgcccagctgcggcccgaggacctggccggcctggctgccctgcaggagctggatgtgagcaacctaagcctgcaggccctgcctggcgacctctcgggcctcttcccccgcctgcggctgctggcagctgcccgcaaccccttcaactgcgtgtgccccctgagctggtttggcccctgggtgcgcgagagccacgtcacactggccagccctgaggagacgcgctgccacttcccgcccaagaacgctggccggctgctcctggagcttgactacgccgactttggctgcccagccaccaccaccacagccacagtgcccaccacgaggcccgtggtgcgggagcccacagccttgtcttctagcttggctcctacctggcttagccccacagcgccggccactgaggcccccagcccgccctccactgccccaccgactgtagggcctgtcccccagccccaggactgcccaccgtccacctgcctcaatgggggcacatgccacctggggacacggcaccacctggcgtgcttgtgccccgaaggcttcacgggcctgtactgtgagagccagatggggcaggggacacggcccagccctacaccagtcacgccgaggccaccacggtccctgaccctgggcatcgagccggtgagccccacctccctgcgcgtggggctgcagcgctacctccaggggagctccgtgcagctcaggagcctccgtctcacctatcgcaacctatcgggccctgataagcggctggtgacgctgcgactgcctgcctcgctcgctgagtacacggtcacccagctgcggcccaacgccacttactccgtctgtgtcatgcctttggggcccgggcgggtgccggagggcgaggaggcctgcggggaggcccatacacccccagccgtccactccaaccacgccccagtcacccaggcccgcgagggcaacctgccgctcctcattgcgcccgccctggccgcggtgctcctggccgcgctggctgcggtgggggcagcctactgtgtgcggcgggggcgggccatggcagcagcggctcaggacaaagggcaggtggggccaggggctgggcccctggaactggagggagtgaaggtccccttggagccaggcccgaaggcaacagagggcggtggagaggccctgcccagcgggtctgagtgtgaggtgccactcatgggcttcccagggcctggcctccagtcacccctccacgcaaagccctacatctaagccagagagagacagggcagctggggccgggctctcagccagtgagatggccagccccctcctgctgccacaccacgtaagttctcagtcccaacctcggggatgtgtgcagacagggctgtgtgaccacagctgggccctgttccctctggacctcggtctcctcatctgtgagatgctgtggcccagctgacgagccctaacgtccccagaaccgagtgcctatgaggacagtgtccgccctgccctccgcaacgtgcagtccctgggcacggcgggccctgccatgtgctggtaacgcatgcctgggccctgctgggctctcccactccaggcggaccctgggggccagtgaaggaagctcccggaaagagcagagggagagcgggtaggcggctgtgtgactctagtcttggccccaggaagcgaaggaacaaaagaaactggaaaggaagatgctttaggaacatgttttgcttttttaaaatatatatatatttataagagatcctttcccatttattctgggaagatgtttttcaaactcagagacaaggactttggtttttgtaagacaaacgatgatatgaaggccttttgtaagaaaaaataaaagatgaagtgtgtttcttgggctcagccccagggtagaagggctgggtggagggagatgaagaaggagtggccctcgctctggggagccagggcccctcagcagcccctgggcttgggcagccctcccaggtgtcctgacctgggtgccatccaccctaggcttgaatgaggtgaggctgggcccaggtgggacaggccccgtggcgcgggtgttgatgtcagtgccgagtcaggcccagccacgcgaggctctggatt

SEQ ID NO: 335484 - DNA, 3158 bp, Homo sapiens
agccgactccggagcccgagcccggggcgggtggacgcggactcgaacgcagttgcttcgggacccaggaccccctcgggcccgacccgccaggaaagactgaggccgcggcctgccccgcccggctccctgcgccgccgccgcctcccgggacagaagatgtgctccagggtccctctgctgctgccgctgctcctgctactggccctggggcctggggtgcagggctgcccatccggctgccagtgcagccagccacagacagtcttctgcactgcccgccaggggaccacggtgccccgagacgtgccacccgacacggtggggctgtacgtctttgagaacggcatcaccatgctcgacgcaggcagctttgccggcctgccgggcctgcagctcctggacctgtcacagaaccagatcgccagcctgcccagcggggtcttccagccactcgccaacctcagcaacctggacctgacggccaacaggctgcatgaaatcaccaatgagaccttccgtggcctgcggcgcctcgagcgcctctacctgggcaagaaccgcatccgccacatccagcctggtgccttcgacacgctcgaccgcctcctggagctcaagctgcaggacaacgagctgcgggcactgcccccgctgcgcctgccccgcctgctgctgctggacctcagccacaacagcctcctggccctggagcccggcatcctggacactgccaacgtggaggcgctgcggctggctggtctggggctgcagcagctggacgaggggctcttcagccgcttgcgcaacctccacgacctggatgtgtccgacaaccagctggagcgagtgccacctgtgatccgaggcctccggggcctgacgcgcctgcggctggccggcaacacccgcattgcccagctgcggcccgaggacctggccggcctggctgccctgcaggagctggatgtgagcaacctaagcctgcaggccctgcctggcgacctctcgggcctcttcccccgcctgcggctgctggcagctgcccgcaaccccttcaactgcgtgtgccccctgagctggtttggcccctgggtgcgcgagagccacgtcacactggccagccctgaggagacgcgctgccacttcccgcccaagaacgctggccggctgctcctggagcttgactacgccgactttggctgcccagccaccaccaccacagccacagtgcccaccacgaggcccgtggtgcgggagcccacagccttgtcttctagcttggctcctacctggcttagccccacagcgccggccactgaggcccccagcccgccctccactgccccaccgactgtagggcctgtcccccagccccaggactgcccaccgtccacctgcctcaatgggggcacatgccacctggggacacggcaccacctggcgtgcttgtgccccgaaggcttcacgggcctgtactgtgagagccagatggggcaggggacacggcccagccctacaccagtcacgccgaggccaccacggtccctgaccctgggcatcgagccggtgagccccacctccctgcgcgtggggctgcagcgctacctccaggggagctccgtgcagctcaggagcctccgtctcacctatcgcaacctatcgggccctgataagcggctggtgacgctgcgactgcctgcctcgctcgctgagtacacggtcacccagctgcggcccaacgccacttactccgtctgtgtcatgcctttggggcccgggcgggtgccggagggcgaggaggcctgcggggaggcccatacacccccagccgtccactccaaccacgccccagtcacccaggcccgcgagggcaacctgccgctcctcattgcgcccgccctggccgcggtgctcctggccgcgctggctgcggtgggggcagcctactgtgtgcggcgggggcgggccatggcagcagcggctcaggacaaagggcaggtggggccaggggctgggcccctggaactggagggagtgaaggtccccttggagccaggcccgaaggcaacagagggcggtggagaggccctgcccagcgggtctgagtgtgaggtgccactcatgggcttcccagggcctggcctccagtcacccctccacgcaaagccctacatctaagccagagagagacagggcagctggggccgggctctcagccagtgagatggccagccccctcctgctgccacaccacgtaagttctcagtcccaacctcggggatgtgtgcagacagggctgtgtgaccacagctgggccctgttccctctggacctcggtctcctcatctgtgagatgctgtggcccagctgacgagccctaacgtccccagaaccgagtgcctatgaggacagtgtccgccctgccctccgcaacgtgcagtccctgggcacggcgggccctgccatgtgctggtaacgcatgcctgggccctgctgggctctcccactccaggcggaccctgggggccagtgaaggaagctcccggaaagagcagagggagagcgggtaggcggctgtgtgactctagtcttggccccaggaagcgaaggaacaaaagaaactggaaaggaagatgctttaggaacatgttttgcttttttaaaatatatatatatttatagaaaaaaaaaaaaaaaaaaaaaaaaaaaaaaaaaaaaaaaaaaaaaaaaaaaaaaaagggggggggggggaaaaaatttcccccggggggggcgcaatttttcgggggtcccgggtttttttgttaaaggggggggcccaaataggggggggtattaaaacgagaggggcgggggcgcgcggctttggacagcagcgcgcgtgaccggggggcggacacacacgcggtgttccgcggggggccctctctgtgggggggagcggcgccccacatctctcgcgggtcgcgggccgcgccccattggctgcggcaccccacctccctccgcggaggttatttaggccggcccctgagggggcgacatatacaccatctggggcggcgcttttagttgtgtgtacccccggcggtatttattgctgcggccgtagagcaattctggcccacgcggtgttttgcggcacatttttgcga

SEQ ID NO: 335485 - DNA, 244 bp, Homo sapiens
ctgttcttgaatttaatcttttcggactgaattgattgccccattttgcagataagggagttgaggcctaggatttgttgatgtatcccattccctgctctacaagcaacaataataagggccaccatatgtaacacacttactatgtatgttcaccttttgctttcactatctgctttaatcttttaacagatctacgaggggagagatagtgactccattttacagatgaggaaactgaggc

SEQ ID NO: 335486 - DNA, 795 bp, Homo sapiens
atctaaaaatcactgtgctgaaggatactgtacatctaaaatgcaagcaatagtgatcacactaaggacagatcctgactttcaggctctagggtgcttgctcttgggccactcctttaagctgatcaggcctttgcacttctgcttatggggtttatcatgcaaggggacttggattaggctggcctctgtgcttaaccttgtagttattattttatgcaattactaccatagccttggcatgcccccattttgcagatgtggatatggaggccttgaaaagttaaaaaatacttgtaaaacatcacacagctaggaaggggcagagatggcctttcaagccattcctttcagattctaaaacttgtccctcgcaggcaccctggagtctgatccaaggatgtcattttcatgtacaggggaaagtgctttatgttagtgattgcaacagatgttctttagagttttttaaacttctgcagctgaaagtggagtatttcttaggtgactccctcagttttgctttaatgacttggaacccatcttaaaatgcaggaagaatgggccgggcactgtggctcacacctgtaatcccagcactttgggaggccgaggcgggcggatcatgaggtcaggagatccagaccatcctggctaacatgatgaaatcccgtctctactaaaagtacaaaatagccggggtggggggggccgagccaattaccggagggggcgaaaagggggaccccgggggggtgcgggccagaacggccgccaccgggggagaaaaccgcc

SEQ ID NO: 335487 - DNA, 328 bp, Homo sapiens
gcctgcaactatgtttgaggtccattcaagcctggagaggttttaaccagcccacaaaaatctcaccagcctttctgtgtcaccgagattgatgcgtccgatgcattggaccatcagttcctttaaaaattcagttagttaggctgacacttttgcatacctgtagctgagttctccgagatacaaggtcctttgaggatttccttggacactgcatatgacatcgctaaaaatcaaatgcaaactaatgtccacagcttaagggtaagtctatgtgtggtttctgttaccttcctatcttctattccccaagctggttttatccctg

SEQ ID NO: 335488 - DNA, 427 bp, Homo sapiens
actgaatcccatcacttcactatttgtcaactgagtgaccttagctaagttacaaaatgtctcagaggctgtttcctgacttccaaaatggggattaaatgaggtaatatatgcaaagcgcttagcacagggcctgacataataacaagcagcaagcaggggatatccttaaagctattcggatttgggagctgaaggagactttgttcattagttgtggctgaagaaaatgagactctcagagatgaagtgatgtgcccagttgggactagaaggcttggaccccactttgctgaccagggcaccttccacctcctcctccctcccagaagtccctacttcctatggaactgtcaggcacacaccagcaaccttggctttggaaagcaccagccaggcaccatgaccaatgaacctcttcccaggt

SEQ ID NO: 335489 - DNA, 412 bp, Homo sapiens
atttctcgtgcttcagcctccctagtagatgggactacaggcacgtgctacaacacccggctagtttttgcatttttaattgagatggggtttcaccatgatggccaggctggcgtcgaactccggacctcaagctgtctgcctgccctggcttcccaaagagtggggatcacaggcatgcaccaccatgcctagccttttgtttgtttgttttacaattcagtggatttaaaaaattgtggtaaaatatacacaacgtaagatttaccattgttaagtgtaaagttgagtgacgttaacttcattcatattgtcatgcaatcatcatcaccatccatcaccagagagtcttcatcttcccaaacagaaattctgcacccattaaacagtagctctccattccccagcccac

SEQ ID NO: 335490 - DNA, 296 bp, Homo sapiens
attaatacccactggggtcaccaccagaagaaaccagagaatgaaaacagcacctactaatgccaggaaggcagagcccaaataagaaaacactccatgtggagtgaaagctgcaggatgctctttttacctcccatctatgtgatttggtcagccttacaaccacacgtgcagtaagcagcagacaagatggtgcccggacaagtggaaagctcatttgcataatacaattatgaaagtaactctgagacttgtggttaccaagaagatagtcaatgtggggagaacggcaaagc

SEQ ID NO: 335491 - DNA, 310 bp, Homo sapiens
gtgtccatcaccaaactccttttgtaaccttctgaagaccttttgattggatcatttatgtgcattattggtggggagagaaaggagattttttgcaaaaagaagagattaactacgtgctagaaatccgcggactacctcaaaaaatccaaatgttctcagaatcaatgccttgacggatgtgccccaaactctgtcactttccaatatcaaaaattaagaagtattaagagcatatattaaacaataaagcgagtgcggcctagcgttttcttcttttcttttacataatataacgattaataaccaa

SEQ ID NO: 335492 - DNA, 3558 bp, Homo sapiens
ggaggcaggctgtggtcagtccacatttccggcactcgcaggttttggggcttgtagacggttgctcttggcaaaggcttcttcctccccagggctagagcctgaccattttccgggcgggcagctgccccgaccacaccaggaagggctgctcaggcggagccacctcgcaatccaggggtgacctgggggctccccgggacgcgaatgtcccgctcccccgccgccccgccccgtccggattctccctcgcctcttctggcgcggccgactgcgctgcgagtgaagaactccccgtttcctagatgccagctcctgagctcacgagcacgtccagagcggaggacactcgggacaccggggtccagctccggaaacggaaaattccacaagcccgtcactctaggaagcggcagcgaacgttctcggtaggtttaaccctcttcttcctctgaccgagcgagggctccccgtctgcggcgcggtcaggaccccgcactttcggcccggctcggggttctcggagtccgtcccaaggccgggccgcaccaccgctggggggcagcgaagcgagcctagaggagaaaaggcggtccccgccgagtgcacgccgggggcggggcacggcacgaaggctccgtggtcggacttctgggctgttcggaggccccggcccacctggagggccctggaagagtttccagcgcttcccgaggtaggcgtgagaagctcgacgcggaccacatctccctcgtcggccgcgtcgggagcttctagccccgcccccgcgtcgggccccgccccctccgctgtgtcgtcgtctagtcctacgccgccagtgcgcctgcgcaagacgctggacttggcgctcagcatcctagccgattgctgtacggaaggggcgtgccggaccgaagtgcgcagactcggaggcatactccctttggtgaccattcttcagtgcatgaagacagacagcatccagaaccgaacggcccgtgccctggggaacttagccatggaacctgagagctgtggggacatccactgtgctggtgctgttcccctgcttgtggagagcctgacagcctgccaggactcgcagtgcctacagagcgtggtgcgtgccctccgtaacctggcagactcaccccagcaccgcctggccttggcacagcagggagcagtgcgtccgctggccgagctcctggccactgccccagatgctgcactgaccttagccctcgtccgtgccctcctggaactcagccgaggctgctcccgggcctgtgctgagcagctaagtctgggtgggggattgggcccactcgtcagcctggcttcccaccccaagcgggcagtacgcgagggaaccattctgatcctcgccaacctgtgtgcccagggcctgattcggcctgcactgggcaatgctggtggcgtggaggtgctggtagatgagctccggcagcgccgggatcctaatggagctagcccaacctcccagcagcccctggtgcgggctgtgtgcctcctatgtcgtgaggccatcaaccgggcccgactgcgggatgctggtggcttggatctactgatgggcctgctgcgggaccctcgtgcaagcgcatggcaccctcgtattgtggctgcccttgtggggtttctgtatgacactggggccctgggccggctgcaggctctgggacttgtgcctctcctggctgggcagctgtgtggtgaggctggtgaggaggaagaagagggaagagaagctgcttcctgggactttcctgaggagaggacccctgagcgggcacagggtggaagcttccggagcctcaggtcgtggctgatctccgagggctatgccacaggccctgatgacatctcccccgactggtctcctgagcagtgtccgccggagcccatggagccggccagccccgccccgaccccgacctcgctgcgggcaccacgcacccaacgcactccgggccgcagccccgccgccgccatcgaggagccttggggacgcgaagggccagccctgctgctgctgtcgcgcttttcccaggcccctgacccaagtggggcacttgtgaccggcccggcgctgtacggcctgctgacctatgtgaccggcgcaccgggcccgcccagcccacgtgcactgcgcattctgtcacgcctcacctgcaaccctgcctgcctcgaggccttcgtgcgcagctatggcgcggcgctgctgcgggcctggctggtgctgggggtggcgcctgacgattggccggcaccacgtgcccggcccactctccacagccggcaccgagagctgggggagaggctactgcagaacctgacggttcaggctgagtcgccctttggggttggggccctgacgcacctgctgctctctgggagccctgaggaccgagtggcctgcgcgctgaccctgcccttcatctgccggaagccctctctgtggcgccggctgcttctggagcagggtggtctccggctcctccttgcggcgctgacccggccggccccacacccgctcttcctcttctttgccgcggactccctttcctgcctccaagacctggtgtctcccactgtgagcccagctgtcccacaggcagtccccatggacctagactcaccttccccttgcctctatgaacctctgctgggcccagcccctgtcccagctcccgacctgcacttcctgctggactcaggcctccagctccctgcccagcgagcggcctcagccaccgcctcccctttcttccgggccctgctgtcaggcagctttgcagaagcccagatggacctggtgcccctgcgaggtctgtcgcctggtgcagcctggcctgtcctgcatcatttgcatggttgtcgggggtgtggggctgccctggggcccgtgcccccaccaggccagcccctgctgggttcagaggccgaggaggcactggaggctgctggccgtttcctactgcctgggctggaggaggagctggaagaggccgtgggccgcatccacctgggaccccagggtggcccggagtcagtgggtgaggtgttccgcctgggccggccccggctggctgcccactgtgcccgctggacactggggtcagagcagtgcccgaggaagcggggtctggccctggtggggcttgtggaggcagcaggtgaagaggcagggcccctgacggaggctttgctggctgtggtgatggggattgagttgggggcaagggtccctgcctagactgttgacgtcccctgggaaggggacccaaggatgaattggctgtgaaggatcctccctgagactggcaagggaggaggctgagcagaaggagtcatcatggaggagcggtgagaacatggaaccggactccaagatgacgatctaaagacccgggagcgagaagccaaggccaggttctgggtgtagggcccagagaagcagaacagcccagagccccaggtgcctggcctggcctagacctctggaattgagattaaacaatttggagttggata

SEQ ID NO: 335493 - DNA, 4159 bp, Homo sapiens
ggaggcaggctgtggtcagtccacatttccggcactcgcaggttttggggcttgtagacggttgctcttggcaaaggcttcttcctccccagggctagagcctgaccattttccgggcgggcagctgccccgaccacaccaggaagggctgctcaggcggagccacctcgcaatccaggggtgacctgggggctccccgggacgcgaatgtcccgctcccccgccgccccgccccgtccggattctccctcgcctcttctggcgcggccgactgcgctgcgagtgaagaactccccgtttcctagatgccagctcctgagctcacgagcacgtccagagcggaggacactcgggacaccggggtccagctccggaaacggaaaattccacaagcccgtcactctaggaagcggcagcgaacgttctcggtaggtttaaccctcttcttcctctgaccgagcgagggctccccgtctgcggcgcggtcaggaccccgcactttcggcccggctcggggttctcggagtccgtcccaaggccgggccgcaccaccgctggggggcagcgaagcgagcctagaggagaaaaggcggtccccgccgagtgcacgccgggggcggggcacggcacgaaggctccgtggtcggacttctgggctgttcggaggccccggcccacctggagggccctggaagagtttccagcgcttcccgaggtaggcgtgagaagctcgacgcggaccacatctccctcatgcaccgcccgcacgtcccaggatgcgctgcgattaaggtactgccgcgcctcgtgtgcaaggacagacttccggggtcgagaactacaacttccgacttgcatcactgcggtggcgctaaacagcgtcagcgaggcggtgcccgacgatttccctgtcttccagttccgctccctgggatcagcggcgagaagcggggcgggagtctgaggcccgagccaagatggcggctgcgaagccaaccctcacggactcgctctcgttctgcctcgcgcagctcgcggcggcggccggggaggctctgggtggggaaaaggacccagcgaccaacgagacacccctgagccgcgcgctcctagccctccgcacgcgccacatcaaggcagcggggggaatcgagcgcttccgggcacgcggcgggctccgccccctactcgcgctgctacggcgagcggctgcagcgggttccgccccgtcccaggcaggccccggctccgccccctcgtcggccgcgtcgggagcttctagccccgcccccgcgtcgggccccgccccctccgctgtgtcgtcgtctagtcctacgccgccagtgcgcctgcgcaagacgctggacttggcgctcagcatcctagccgattgctgtacggaaggggcgtgccggaccgaagtgcgcagactcggaggcatactccctttggtgaccattcttcagtgcatgaagacagacagcatccagaaccgaacggcccgtgccctggggaacttagccatggaacctgagagctgtggggacatccactgtgctggtgctgttcccctgcttgtggagagcctgacagcctgccaggactcgcagtgcctacagagcgtggtgcgtgccctccgtaacctggcagactcaccccagcaccgcctggccttggcacagcagggagcagtgcgtccgctggccgagctcctggccactgccccagatgctgcactgaccttagccctcgtccgtgccctcctggaactcagccgaggctgctcccgggcctgtgctgagcagctaagtctgggtgggggattgggcccactcgtcagcctggcttcccaccccaagcgggcagtacgcgagggaaccattctgatcctcgccaacctgtgtgcccagggcctgattcggcctgcactgggcaatgctggtggcgtggaggtgctggtagatgagctccggcagcgccgggatcctaatggagctagcccaacctcccagcagcccctggtgcgggctgtgtgcctcctatgtcgtgaggccatcaaccgggcccgactgcgggatgctggtggcttggatctactgatgggcctgctgcgggaccctcgtgcaagcgcatggcaccctcgtattgtggctgcccttgtggggtttctgtatgacactggggccctgggccggctgcaggctctgggacttgtgcctctcctggctgggcagctgtgtggtgaggctggtgaggaggaagaagagggaagagaagctgcttcctgggactttcctgaggagaggacccctgagcgggcacagggtggaagcttccggagcctcaggtcgtggctgatctccgagggctatgccacaggccctgatgacatctcccccgactggtctcctgagcagtgtccgccggagcccatggagccggccagccccgccccgaccccgacctcgctgcgggcaccacgcacccaacgcactccgggccgcagccccgccgccgccatcgaggagccttggggacgcgaagggccagccctgctgctgctgtcgcgcttttcccaggcccctgacccaagtggggcacttgtgaccggcccggcgctgtacggcctgctgacctatgtgaccggcgcaccgggcccgcccagcccacgtgcactgcgcattctgtcacgcctcacctgcaaccctgcctgcctcgaggccttcgtgcgcagctatggcgcggcgctgctgcgggcctggctggtgctgggggtggcgcctgacgattggccggcaccacgtgcccggcccactctccacagccggcaccgagagctgggggagaggctactgcagaacctgacggttcaggctgagtcgccctttggggttggggccctgacgcacctgctgctctctgggagccctgaggaccgagtggcctgcgcgctgaccctgcccttcatctgccggtgagtgggaagtgggtgccttgcggggttgggggaggagtgctgtgtttcccaggcccgttgcccaccttttgaaaggccctctcttccctgtaggaagccctctctgtggcgccggctgcttctggagcagggtggtctccggctcctccttgcggcgctgacccggccggccccacacccgctcttcctcttctttgccgcggactccctttcctgcctccaagacctggtgtctcccactgtgagcccagctgtcccacaggcagtccccatggacctagactcaccttccccttgcctctatgaacctctgctgggcccagcccctgtcccagctcccgacctgcacttcctgctggactcaggcctccagctccctgcccagcgagcggcctcagccaccgcctcccctttcttccgggccctgctgtcaggcagctttgcagaagcccagatggacctggtgcccctgcgaggtctgtcgcctggtgcagcctggcctgtcctgcatcatttgcatggttgtcgggggtgtggggctgccctggggcccgtgcccccaccaggccagcccctgctgggttcagaggccgaggaggcactggaggctgctggccgtttcctactgcctgggctggaggaggagctggaagaggccgtgggccgcatccacctgggaccccagggtggcccggagtcagtgggtgaggtgttccgcctgggccggccccggctggctgcccactgtgcccgctggacactggggtcagagcagtgcccgaggaagcggggtctggccctggtggggcttgtggaggcagcaggtgaagaggcagggcccctgacggaggctttgctggctgtggtgatggggattgagttgggggcaagggtccctgcctagactgttgacgtcccctgggaaggggacccaaggatgaattggctgtgaaggatcctccctgagactggcaagggaggaggctgagcagaaggagtcatcatggaggagcggtgagaacatggaaccggactccaagatgacgatctaaagacccgggagcgagaagccaaggccaggttctgggtgtagggcccagagaagcagaacagcccagagccccaggtgcctggcctggcctagacctctggaattgagattaaacaatttggagttggata

SEQ ID NO: 335494 - DNA, 4081 bp, Homo sapiens
ggaggcaggctgtggtcagtccacatttccggcactcgcaggttttggggcttgtagacggttgctcttggcaaaggcttcttcctccccagggctagagcctgaccattttccgggcgggcagctgccccgaccacaccaggaagggctgctcaggcggagccacctcgcaatccaggggtgacctgggggctccccgggacgcgaatgtcccgctcccccgccgccccgccccgtccggattctccctcgcctcttctggcgcggccgactgcgctgcgagtgaagaactccccgtttcctagatgccagctcctgagctcacgagcacgtccagagcggaggacactcgggacaccggggtccagctccggaaacggaaaattccacaagcccgtcactctaggaagcggcagcgaacgttctcggtaggtttaaccctcttcttcctctgaccgagcgagggctccccgtctgcggcgcggtcaggaccccgcactttcggcccggctcggggttctcggagtccgtcccaaggccgggccgcaccaccgctggggggcagcgaagcgagcctagaggagaaaaggcggtccccgccgagtgcacgccgggggcggggcacggcacgaaggctccgtggtcggacttctgggctgttcggaggccccggcccacctggagggccctggaagagtttccagcgcttcccgaggtaggcgtgagaagctcgacgcggaccacatctccctcatgcaccgcccgcacgtcccaggatgcgctgcgattaaggtactgccgcgcctcgtgtgcaaggacagacttccggggtcgagaactacaacttccgacttgcatcactgcggtggcgctaaacagcgtcagcgaggcggtgcccgacgatttccctgtcttccagttccgctccctgggatcagcggcgagaagcggggcgggagtctgaggcccgagccaagatggcggctgcgaagccaaccctcacggactcgctctcgttctgcctcgcgcagctcgcggcggcggccggggaggctctgggtggggaaaaggacccagcgaccaacgagacacccctgagccgcgcgctcctagccctccgcacgcgccacatcaaggcagcggggggaatcgagcgcttccgggcacgcggcgggctccgccccctactcgcgctgctacggcgagcggctgcagcgggttccgccccgtcccaggcaggccccggctccgccccctcgtcggccgcgtcgggagcttctagccccgcccccgcgtcgggccccgccccctccgctgtgtcgtcgtctagtcctacgccgccagtgcgcctgcgcaagacgctggacttggcgctcagcatcctagccgattgctgtacggaaggggcgtgccggaccgaagtgcgcagactcggaggcatactccctttggtgaccattcttcagtgcatgaagacagacagcatccagaaccgaacggcccgtgccctggggaacttagccatggaacctgagagctgtggggacatccactgtgctggtgctgttcccctgcttgtggagagcctgacagcctgccaggactcgcagtgcctacagagcgtggtgcgtgccctccgtaacctggcagactcaccccagcaccgcctggccttggcacagcagggagcagtgcgtccgctggccgagctcctggccactgccccagatgctgcactgaccttagccctcgtccgtgccctcctggaactcagccgaggctgctcccgggcctgtgctgagcagctaagtctgggtgggggattgggcccactcgtcagcctggcttcccaccccaagcgggcagtacgcgagggaaccattctgatcctcgccaacctgtgtgcccagggcctgattcggcctgcactgggcaatgctggtggcgtggaggtgctggtagatgagctccggcagcgccgggatcctaatggagctagcccaacctcccagcagcccctggtgcgggctgtgtgcctcctatgtcgtgaggccatcaaccgggcccgactgcgggatgctggtggcttggatctactgatgggcctgctgcgggaccctcgtgcaagcgcatggcaccctcgtattgtggctgcccttgtggggtttctgtatgacactggggccctgggccggctgcaggctctgggacttgtgcctctcctggctgggcagctgtgtggtgaggctggtgaggaggaagaagagggaagagaagctgcttcctgggactttcctgaggagaggacccctgagcgggcacagggtggaagcttccggagcctcaggtcgtggctgatctccgagggctatgccacaggccctgatgacatctcccccgactggtctcctgagcagtgtccgccggagcccatggagccggccagccccgccccgaccccgacctcgctgcgggcaccacgcacccaacgcactccgggccgcagccccgccgccgccatcgaggagccttggggacgcgaagggccagccctgctgctgctgtcgcgcttttcccaggcccctgacccaagtggggcacttgtgaccggcccggcgctgtacggcctgctgacctatgtgaccggcgcaccgggcccgcccagcccacgtgcactgcgcattctgtcacgcctcacctgcaaccctgcctgcctcgaggccttcgtgcgcagctatggcgcggcgctgctgcgggcctggctggtgctgggggtggcgcctgacgattggccggcaccacgtgcccggcccactctccacagccggcaccgagagctgggggagaggctactgcagaacctgacggttcaggctgagtcgccctttggggttggggccctgacgcacctgctgctctctgggagccctgaggaccgagtggcctgcgcgctgaccctgcccttcatctgccggccctctcttccctgtaggaagccctctctgtggcgccggctgcttctggagcagggtggtctccggctcctccttgcggcgctgacccggccggccccacacccgctcttcctcttctttgccgcggactccctttcctgcctccaagacctggtgtctcccactgtgagcccagctgtcccacaggcagtccccatggacctagactcaccttccccttgcctctatgaacctctgctgggcccagcccctgtcccagctcccgacctgcacttcctgctggactcaggcctccagctccctgcccagcgagcggcctcagccaccgcctcccctttcttccgggccctgctgtcaggcagctttgcagaagcccagatggacctggtgcccctgcgaggtctgtcgcctggtgcagcctggcctgtcctgcatcatttgcatggttgtcgggggtgtggggctgccctggggcccgtgcccccaccaggccagcccctgctgggttcagaggccgaggaggcactggaggctgctggccgtttcctactgcctgggctggaggaggagctggaagaggccgtgggccgcatccacctgggaccccagggtggcccggagtcagtgggtgaggtgttccgcctgggccggccccggctggctgcccactgtgcccgctggacactggggtcagagcagtgcccgaggaagcggggtctggccctggtggggcttgtggaggcagcaggtgaagaggcagggcccctgacggaggctttgctggctgtggtgatggggattgagttgggggcaagggtccctgcctagactgttgacgtcccctgggaaggggacccaaggatgaattggctgtgaaggatcctccctgagactggcaagggaggaggctgagcagaaggagtcatcatggaggagcggtgagaacatggaaccggactccaagatgacgatctaaagacccgggagcgagaagccaaggccaggttctgggtgtagggcccagagaagcagaacagcccagagccccaggtgcctggcctggcctagacctctggaattgagattaaacaatttggagttggata

SEQ ID NO: 335495 - DNA, 5121 bp, Homo sapiens
ggaggcaggctgtggtcagtccacatttccggcactcgcaggttttggggcttgtagacggttgctcttggcaaaggcttcttcctccccagggctagagcctgaccattttccgggcgggcagctgccccgaccacaccaggaagggctgctcaggcggagccacctcgcaatccaggggtgacctgggggctccccgggacgcgaatgtcccgctcccccgccgccccgccccgtccggattctccctcgcctcttctggcgcggccgactgcgctgcgagtgaagaactccccgtttcctagatgccagctcctgagctcacgagcacgtccagagcggaggacactcgggacaccggggtccagctccggaaacggaaaattccacaagcccgtcactctaggaagcggcagcgaacgttctcggtaggtttaaccctcttcttcctctgaccgagcgagggctccccgtctgcggcgcggtcaggaccccgcactttcggcccggctcggggttctcggagtccgtcccaaggccgggccgcaccaccgctggggggcagcgaagcgagcctagaggagaaaaggcggtccccgccgagtgcacgccgggggcggggcacggcacgaaggctccgtggtcggacttctgggctgttcggaggccccggcccacctggagggccctggaagagtttccagcgcttcccgaggtaggcgtgagaagctcgacgcggaccacatctccctcatgcaccgcccgcacgtcccaggatgcgctgcgattaaggtactgccgcgcctcgtgtgcaaggacagacttccggggtcgagaactacaacttccgacttgcatcactgcggtggcgctaaacagcgtcagcgaggcggtgcccgacgatttccctgtcttccagttccgctccctgggatcagcggcgagaagcggggcgggagtctgaggcccgagccaagatggcggctgcgaagccaaccctcacggactcgctctcgttctgcctcgcgcagctcgcggcggcggccggggaggctctgggtggggaaaaggacccagcgaccaacgagacacccctgagccgcgcgctcctagccctccgcacgcgccacatcaaggcagcggggggaatcgagcgcttccgggcacgcggcgggctccgccccctactcgcgctgctacggcgagcggctgcagcgggttccgccccgtcccaggcaggccccggctccgccccctcgtcggccgcgtcgggagcttctagccccgcccccgcgtcgggccccgccccctccgctgtgtcgtcgtctagtcctacgccgccagtgcgcctgcgcaagacgctggacttggcgctcagcatcctagccgattgctgtacggaaggggcgtgccggaccgaagtgcgcagactcggaggcatactccctttggtgaccattcttcagtgcatgaagacagacagcatccagaaccgaacggcccgtgccctggggaacttagccatggaacctgagagctgtggggacatccactgtgctggtgctgttcccctgcttgtggagagcctgacagcctgccaggactcgcagtgcctacagagcgtggtgcgtgccctccgtaacctggcagactcaccccagcaccgcctggccttggcacagcagggagcagtgcgtccgctggccgagctcctggccactgccccagatgctgcactgaccttagccctcgtccgtgccctcctggaactcagccgaggctgctcccgggcctgtgctgagcagctaagtctgggtgggggattgggcccactcgtcagcctggcttcccaccccaagcgggcagtacgcgagggaaccattctgatcctcgccaacctgtgtgcccagggcctgattcggcctgcactgggcaatgctggtggcgtggaggtgctggtagatgagctccggcagcgccgggatcctaatggagctagcccaacctcccagcagcccctggtgcgggctgtgtgcctcctatgtcgtgaggccatcaaccgggcccgactgcgggatgctggtggcttggatctactgatgggcctgctgcgggaccctcgtgcaagcgcatggcaccctcgtattgtggctgcccttgtggggtttctgtatgacactggggccctgggccggctgcaggctctgggacttgtgcctctcctggctgggcagctgtgtggtgaggctggtgaggaggaagaagagggaagagaagctgcttcctgggactttcctgaggagaggacccctgagcgggcacagggtggaagcttccggagcctcaggtcgtggctgatctccgagggctatgccacaggccctgatgacatctcccccgactggtctcctgagcagtgtccgccggagcccatggagccggccagccccgccccgaccccgacctcgctgcgggcaccacgcacccaacgcactccgggccgcagccccgccgccgccatcgaggagccttggggacgcgaagggccagccctgctgctgctgtcgcgcttttcccaggcccctgacccaagtggggcacttgtgaccggcccggcgctgtacggcctgctgacctatgtgaccggcgcaccgggcccgcccagcccacgtgcactgcgcattctgtcacgcctcacctgcaaccctgcctgcctcgaggccttcgtgcgcagctatggcgcggcgctgctgcgggcctggctggtgctgggggtggcgcctgacgattggccggcaccacgtgcccggcccactctccacagccggcaccgagagctgggtgagttcccatacccacccgtctccttgcccccatgtgagtccccatcctcccccatggcttccatgggcccagaacctcaccttcccactcacctgtcctccccagcccgtcctccagacaacctgtcaccagagtggggtggggagcagggcgttccagtccctccatgggcccacaggcagagttctgctgtgtcctctgccctagccctgggacccagataccctaactctagatgcagccccgcgcccaggatctgggctggtctgtgcttctttcctggctctgccattggttcagcactgtcctgactgctccccaccagcacgctgacctgtgaaccccagcctcaccatcacccccagcactgccagggactgccctgtctgctgtgccctgaccacaggctgcttcatggcgttactgctagaccaaggagcccttctgctggccctgtccgggcataacagaaggctcgcactcttgtcttctggtcacacctcactatgtcccctcagctcctatctctgtatggcctggtttttcccaggttatgattatagagcgaggattattacaatattgggataaagagtaattactacaaactaatgattaatgatattcatatatctctaagatctatatctggtataactattcttgttttatattgtattatactggaacagctcgtgtcctccgtctcttgcctcggcgcctgggtggcttgccgcccacacttcaggggcccagacttacaccctgactgtcccaccttctgtccttgtcctggacctcaggttcccagcgtcccgagcccagcactgtctcttcagtgccctgatttctcacccagaggtttcaccctccttcatctcacgggcccagagccctgtctcactcaccccacctgtcttagaccccagttcccagcctgacaagctttccactcacaggggagaggctactgcagaacctgacggttcaggctgagtcgccctttggggttggggccctgacgcacctgctgctctctgggagccctgaggaccgagtggcctgcgcgctgaccctgcccttcatctgccggtgagtgggaagtgggtgccttgcggggttgggggaggagtgctgtgtttcccaggcccgttgcccaccttttgaaaggccctctcttccctgtaggaagccctctctgtggcgccggctgcttctggagcagggtggtctccggctcctccttgcggcgctgacccggccggccccacacccgctcttcctcttctttgccgcggactccctttcctgcctccaagacctggtgtctcccactgtgagcccagctgtcccacaggcagtccccatggacctagactcaccttccccttgcctctatgaacctctgctgggcccagcccctgtcccagctcccgacctgcacttcctgctggactcaggcctccagctccctgcccagcgagcggcctcagccaccgcctcccctttcttccgggccctgctgtcaggcagctttgcagaagcccagatggacctggtgcccctgcgaggtctgtcgcctggtgcagcctggcctgtcctgcatcatttgcatggttgtcgggggtgtggggctgccctggggcccgtgcccccaccaggccagcccctgctgggttcagaggccgaggaggcactggaggctgctggccgtttcctactgcctgggctggaggaggagctggaagaggccgtgggccgcatccacctgggaccccagggtggcccggagtcagtgggtgaggtgttccgcctgggccggccccggctggctgcccactgtgcccgctggacactggggtcagagcagtgcccgaggaagcggggtctggccctggtggggcttgtggaggcagcaggtgaagaggcagggcccctgacggaggctttgctggctgtggtgatggggattgagttgggggcaagggtccctgcctagactgttgacgtcccctgggaaggggacccaaggatgaattggctgtgaaggatcctccctgagactggcaagggaggaggctgagcagaaggagtcatcatggaggagcggtgagaacatggaaccggactccaagatgacgatctaaagacccgggagcgagaagccaaggccaggttctgggtgtagggcccagagaagcagaacagcccagagccccaggtgcctggcctggcctagacctctggaattgagattaaacaatttggagttggata

SEQ ID NO: 335496 - DNA, 5025 bp, Homo sapiens
ggaggcaggctgtggtcagtccacatttccggcactcgcaggttttggggcttgtagacggttgctcttggcaaaggcttcttcctccccagggctagagcctgaccattttccgggcgggcagctgccccgaccacaccaggaagggctgctcaggcggagccacctcgcaatccaggggtgacctgggggctccccgggacgcgaatgtcccgctcccccgccgccccgccccgtccggattctccctcgcctcttctggcgcggccgactgcgctgcgagtgaagaactccccgtttcctagatgccagctcctgagctcacgagcacgtccagagcggaggacactcgggacaccggggtccagctccggaaacggaaaattccacaagcccgtcactctaggaagcggcagcgaacgttctcggtaggtttaaccctcttcttcctctgaccgagcgagggctccccgtctgcggcgcggtcaggaccccgcactttcggcccggctcggggttctcggagtccgtcccaaggccgggccgcaccaccgctggggggcagcgaagcgagcctagaggagaaaaggcggtccccgccgagtgcacgccgggggcggggcacggcacgaaggctccgtggtcggacttctgggctgttcggaggccccggcccacctggagggccctggaagagtttccagcgcttcccgaggtaggcgtgagaagctcgacgcggaccacatctccctcatgcaccgcccgcacgtcccaggatgcgctgcgattaaggtactgccgcgcctcgtgtgcaaggacagacttccggggtcgagaactacaacttccgacttgcatcactgcggtggcgctaaacagcgtcagcgaggcggtgcccgacgatttccctgtcttccagttccgctccctgggatcagcggcgagaagcggggcgggagtctgaggcccgagccaagatggcggctgcgaagccaaccctcacggactcgctctcgttctgcctcgcgcagctcgcggcggcggccggggaggctctgggtggggaaaaggacccagcgaccaacgagacacccctgagccgcgcgctcctagccctccgcacgcgccacatcaaggcagcggggggaatcgagcgcttccgggcacgcggcgggctccgccccctactcgcgctgctacggcgagcggctgcagcgggttccgccccgtcccaggcaggccccggctccgccccctcgtcggccgcgtcgggagcttctagccccgcccccgcgtcgggccccgccccctccgctgtgtcgtcgtctagtcctacgccgccagtgcgcctgcgcaagacgctggacttggcgctcagcatcctagccgattgctgtacggaaggggcgtgccggaccgaagtgcgcagactcggaggcatactccctttggtgaccattcttcagtgcatgaagacagacagcatccagaaccgaacggcccgtgccctggggaacttagccatggaacctgagagctgtggggacatccactgtgctggtgctgttcccctgcttgtggagagcctgacagcctgccaggactcgcagtgcctacagagcgtggtgcgtgccctccgtaacctggcagactcaccccagcaccgcctggccttggcacagcagggagcagtgcgtccgctggccgagctcctggccactgccccagatgctgcactgaccttagccctcgtccgtgccctcctggaactcagccgaggctgctcccgggcctgtgctgagcagctaagtctgggtgggggattgggcccactcgtcagcctggcttcccaccccaagcgggcagtacgcgagggaaccattctgatcctcgccaacctgtgtgcccagggcctgattcggcctgcactgggcaatgctggtggcgtggaggtgctggtagatgagctccggcagcgccgggatcctaatggagctagcccaacctcccagcagcccctggtgcgggctgtgtgcctcctatgtcgtgaggccatcaaccgggcccgactgcgggatgctggtggcttggatctactgatgggcctgctgcgggaccctcgtgcaagcgcatggcaccctcgtattgtggctgcccttgtggggtttctgtatgacactggggccctgggccggctgcaggctctgggacttgtgcctctcctggctgggcagctgtgtggtgaggctggtgaggaggaagaagagggaagagaagctgcttcctgggactttcctgaggagaggacccctgagcgggcacagggtggaagcttccggagcctcaggtcgtggctgatctccgagggctatgccacaggccctgatgacatctcccccgactggtctcctgagcagtgtccgccggagcccatggagccggccagccccgccccgaccccgacctcgctgcgggcaccacgcacccaacgcactccgggccgcagccccgccgccgccatcgaggagccttggggacgcgaagggccagccctgctgctgctgtcgcgcttttcccaggcccctgacccaagtggggcacttgtgaccggcccggcgctgtacggcctgctgacctatgtgaccggcgcaccgggcccgcccagcccacgtgcactgcgcattctgtcacgcctcacctgcaaccctgcctgcctcgaggccttcgtgcgcagctatggcgcggcgctgctgcgggcctggctggtgctgggggtggcgcctgacgattggccggcaccacgtgcccggcccactctccacagccggcaccgagagctgggtgagttcccatacccacccgtctccttgcccccatgtgagtccccatcctcccccatggcttccatgggcccagaacctcaccttcccactcacctgtcctccccagcccgtcctccagacaacctgtcaccagagtggggtggggagcagggcgttccagtccctccatgggcccacaggcagagttctgctgtgtcctctgccctagccctgggacccagataccctaactctagatgcagccccgcgcccaggatctgggctggtctgtgcttctttcctggctctgccattggttcagcactgtcctgactgctccccaccagcacgctgacctgtgaaccccagcctcaccatcacccccagcactgccagggactgccctgtctgctgtgccctgaccacaggctgcttcatggcgttactgctagaccaaggagcccttctgctggccctgtccgggcataacagaaggctcgcactcttgtcttctggtcacacctcactatgtcccctcagctcctatctctgtatggcctggtttttcccaggttatgattatagagcgaggattattacaatattgggataaagagtaattactacaaactaatgattaatgatattcatatatctctaagatctatatctggtataactattcttgttttatattgtattatactggaacagctcgtgtcctccgtctcttgcctcggcgcctgggtggcttgccgcccacacttcaggggcccagacttacaccctgactgtcccaccttctgtccttgtcctggacctcaggttcccagcgtcccgagcccagcactgtctcttcagtgccctgatttctcacccagaggtttcaccctccttcatctcacgggcccagagccctgtctcactcaccccacctgtcttagaccccagttcccagcctgacaagctttccactcacaggggagaggctactgcagaacctgacggttcaggctgagtcgccctttggggttggggccctgacgcacctgctgctctctgggagccctgaggaccgagtggcctgcgcgctgaccctgcccttcatctgccggaagccctctctgtggcgccggctgcttctggagcagggtggtctccggctcctccttgcggcgctgacccggccggccccacacccgctcttcctcttctttgccgcggactccctttcctgcctccaagacctggtgtctcccactgtgagcccagctgtcccacaggcagtccccatggacctagactcaccttccccttgcctctatgaacctctgctgggcccagcccctgtcccagctcccgacctgcacttcctgctggactcaggcctccagctccctgcccagcgagcggcctcagccaccgcctcccctttcttccgggccctgctgtcaggcagctttgcagaagcccagatggacctggtgcccctgcgaggtctgtcgcctggtgcagcctggcctgtcctgcatcatttgcatggttgtcgggggtgtggggctgccctggggcccgtgcccccaccaggccagcccctgctgggttcagaggccgaggaggcactggaggctgctggccgtttcctactgcctgggctggaggaggagctggaagaggccgtgggccgcatccacctgggaccccagggtggcccggagtcagtgggtgaggtgttccgcctgggccggccccggctggctgcccactgtgcccgctggacactggggtcagagcagtgcccgaggaagcggggtctggccctggtggggcttgtggaggcagcaggtgaagaggcagggcccctgacggaggctttgctggctgtggtgatggggattgagttgggggcaagggtccctgcctagactgttgacgtcccctgggaaggggacccaaggatgaattggctgtgaaggatcctccctgagactggcaagggaggaggctgagcagaaggagtcatcatggaggagcggtgagaacatggaaccggactccaagatgacgatctaaagacccgggagcgagaagccaaggccaggttctgggtgtagggcccagagaagcagaacagcccagagccccaggtgcctggcctggcctagacctctggaattgagattaaacaatttggagttggata

SEQ ID NO: 335497 - DNA, 656 bp, Homo sapiens
  misc_feature (22)..(22): n is a, c, g, or t
tctagaggacccccaagcagtnaaacagactcagctaattttgtatttttaatagaggcaggtttctccatgttggtcaggctggtctctaactcctgactcaggtgatccacctgccttggcctcccaaagtgctgggattacaggtgtgagccaccgcacctggcagcctgtttttcttaatctgtgtctcatctgaattttggatctaatcgtgcttcaaattgcaaagtccatgtggcaaaaccaacaattgcctgaaaggatttagtagatctagaaatgaaactaggaagattctaagtaaatttcattttagtttcactaatggaatttacttcccttgcctcccactgctggttgggatataatgataaatgtacatgacaagcctacctgaggattagaaaaatagaatctgtattgtatatgtcagaaatgcattcagctctaaatacaagatgctgaaacagatgggagtagatttatcttatacaaatagaaagttggggtgagcagtctaggccagtgcatcaggctgttccatgtttctgctccatcatcttagcacgtagacccttcttctcaggcttgttgtctcatgatcacaagatggctgccacacttccagatcttaagtctgtattccagtcagg

SEQ ID NO: 335498 - DNA, 253 bp, Homo sapiens
atctagataaagctcctctaatgttcgttcgaagttaaagacctcctttggcacctgctgaagactgcagtgggagtaatctaaaactgagatgatttcttcttcacctcggaaacatcggcatggcaccagacggccgatgattttccgtttggtggtcatctccaggcactgcactagagaaacgcagaaacaaaacaaaacaaaacagcttatccagtgcccttggaaggcattcttgtaatatttaaag

SEQ ID NO: 335499 - DNA, 113 bp, Homo sapiens
ttttgtatattttcttttcaaaaaactcttagcagttgtatgatagacctgctaggttgattctgtttctcatttcttctctcctagtttttgtcctgttgtgtttttacagt

SEQ ID NO: 335500 - DNA, 450 bp, Homo sapiens
attttgcctttgctgaagtaaacatatagtaatggctgaaaaccactgcgttatgtaaatacacttcctatgacttatttgtagtccttttgtatctagcaatttctacagaccctctctgtgggcttcggaagccagaatgggcagggccaggtgtgaggtgtcctaggacactgagggtagagcacagctcccagctcagggggacccatttctgaggctaaggcacccacctggggctcagcctatcttcagagggaaaatcacacctcagaacaccagacacccaaaagaaagctccagttcggcagatacctgccaatagaccctggagtggctgccccagggaaaactgccattgcactgtcagctccctccagccctctctcaggtcccagcaggagcagatttctgactaagctcagaggtctcaacaaatggcaggttgaa

SEQ ID NO: 335501 - DNA, 377 bp, Homo sapiens
atcggagtgtgtcaattgagtaatgaaaaacatgaatggcgttgaactttttcttgtcattgggaaattatttatacctgaggatggttggcaccaacagatatacattttacataggaaagagtaaatatttttctacaaaagagttgagcaaaagttgtcagttagctgaatatggtgctacagggaactataggatgttttctgtaaagaaatggtaatttggagaacaacatctgtctgttcacagccaaatcccctcgcctgccactgtgccttgagtgtaggtgatgttcagtgtgtctgttaaatggatgaccacgggagagcattggcagcacaaccgttggtttatttgtaatcaactctaacttatt

SEQ ID NO: 335502 - DNA, 158 bp, Homo sapiens
gtgtggcacggggaagggaaaggggtttagaactgtgtccaagctatttaggagagaaaggggagagtcccggggctgtgaaaggggcgaggaggagagagcagctgggccagggcgagcgtttgaccacacccactagccactccctcccagctgcc

SEQ ID NO: 335503 - DNA, 279 bp, Homo sapiens
catttattccaatgaaactagttgtgctaagattacctataactcccattcttcccagcaactttagagaaaatgttctttttaaaaaaatggaaactctgtgcttctagattctgcacaacacagtttcctctcctagtgttctttctgcctctcttttgttggaagaggaaatgttggggatcttacctgggctttctttttctcttctattgagaggcagtttggtgcagtgcctcaatctggaatcagactgagttgttatcatctggttattag

SEQ ID NO: 335504 - DNA, 172 bp, Homo sapiens
gtctgattttagagccatttagctttctggcagcaattgactctgtctgttaaatggtggctcttggaaaccagaacgagaggaggtggtagctgttggaaaagctgtcaaagctgttgtgagaaactgaagcagtgtggggaatccaggccccctgtttgtcactaaatgt

SEQ ID NO: 335505 - DNA, 536 bp, Homo sapiens
ggtgtgagcaataaggctgtttattttaactgggtgcaggcgggctgagtccgaaaagagagtcagcaaagggagataggggtggggctgttttataggatttggatgggtagcggaaaattacaaagggggtttttctcttacgggcaggggcgggggtcacaaggtgctcagtgggggaggttctgagccaggagaaggaatttcacaaggttaatcactcagttaaggtggggcaggaacaaatcacaatggtggaatgtcatcagttaaggcaggaaccggccaatttcccttcttttgtgattcttcacttgcttcaggccatctggatgtacacgtgcaggcttgggctcagaggcctgacagtcggccactagttaccaaagctggtggcaggctggagtctccagggaagctattgcattgattgattgactgattgacagggtcttggtctgtcacccaggctggagtgcagtgacgcgatcacagctcactgcagcctcaacctcccatgctcaagggatcctccc

SEQ ID NO: 335506 - DNA, 230 bp, Homo sapiens
ggctgcacagacaggaagagagaacaatggaaggaagacagcatattgtagcagtcagaagattaaactaaattctgactcttatttccaaattccaagctatcatttactagctgtgtgattttaaacaacttacttaaccattctgtgctttaatttcctcgagtataaaatggcaacaatgatagtaatttccttataggagttcatgagaagtgagattatctatc

SEQ ID NO: 335507 - DNA, 392 bp, Homo sapiens
cactgaggtggcactctgtgacttccttccctttgcaaacacatcagaggctggcagccacaccaggccctgctctggaggacaccagctggacctaacctgcccttggccatgctggtgctatggctagagatgtacaaatctccccctctcctgagccccaggggtagggggatctgtggcagcttggaggctcctaggcagggcacagcacagcttagtggtgctggagagtatccttcctaaatgatggctttgggtgtgaaatctctcctcagtcaaaggaaaggctttcttgtggctgctcccctttctgcttttgttcaggctgctgctgggtgagaaggagtttagggctagtgggaatacagcctcattaactggctagagca

SEQ ID NO: 335508 - DNA, 3945 bp, Homo sapiens
  misc_feature (3940)..(3945): n is a, c, g, or t
ccccgtgcgcctcttgcccgcagaccctgaggacacggccatgccgggccgggcggaggcgggggaggccgaggaggaggccggggccggctcggggtctgaggcggaggaggacgcgctgtgggagcgaatcgagggcgtccggcatcggctggctcgcgccctgaacccggccaagctcacgccgtatctgcgccagtgccgggtcatcgacgagcaggacgaggaggaggtgctgagcacctaccgcttcccgtgccgcgtcaaccgcaccgggcgcctgatggacatcttgcgctgccgtggcaagaggggctatgaggccttcctggaagccctggagttctactaccccgaacacttcacgctgctcacgggccaggaacccgcccagcgctgctccatgatcctcgatgaggaggggcctgagggcctgacccaattcttgatgacagaggtgcgacggctgcgggaagctcgcaagagccagctgcagcgggagcagcaactgcaggcccggggccgggtgctcgaggaggagcgggcagggctggagcagcggctgcgggaccagcagcaggctcaggagcgctgtcaacggctgcgggaggactgggaggcgggcagcctggagctgctgcggctcaaggatgagaactacatgatcgccatgcgcctggcacagctcagtgaggagaagaactcggctgtacttcgcagccgtgacctgcagctggcggtggatcagctcaagctcaaagtgagtcggctggaggaagagtgtgcactgcttcgaagggccaggggcccgccccctggggcagaggagaaggagaaggagaaggagaaggagaaggagccagacaatgtggaccttgtctctgagctgcgtgctgagaaccagcggctgacggcgtcactgcgggagttgcaggagggcctgcagcaggaggcgagccggccgggggccccgggctccgagcgcatcctgctggacatcctagagcatgactggcgggaggcgcaggacagcaggcaggagctgtgccagaagctgcatgccgtgcagggggagctgcagtgggccgaggagctgcgcgaccagtacctgcaggagatggaagacctgcggctcaagcaccgcacgctgcagaaggactgtgacctgtacaagcaccgcatggccactgtcctggcccaactggaggagattgagaaggagcgagaccaggccatccagagccgtgaccggatccagttgcagtactcacagagcctcatcgagaaggaccagtaccgcaagcaggtgcggggcctggaggcggagcgggatgagctgctgacaacgctcaccagcctggagggcaccaaggctctgctggaggttcagctgcagcgggcccagggtggcacctgcctcaaggcctgtgcctcctcccattccctgtgctccaacctcagcagcacttggagcctgagcgagttcccctcccctctgggaggcccagaagcaactggggaggcagctgtcatggggggacctgagcctcacaactcggaggaagccacagacagtgaaaaggagatcaatcggctctccatcctgcccttcccccccagtgccggctccatcctccgccggcagcgtgaggaagaccccgcaccccctaagagatccttcagcagcatgtcagacatcacagggagtgtgacacttaagccctggtcccctggcctctcttcgtcctcatcctctgacagcgtgtggcctttgggaaagccggaaggcctcctggctcggggctgtggcctggacttcctcaacaggtctctggctattcgggtgtctggccggagccccccagggggcccagagccgcaggacaagggaccagatggactgtcgttttatggggacagatggtctggggctgtggtgcgcagggtgctgtctgggcctgggtccgccaggatggaaccaagagagcaaagggtggaagctgctggtctggagggggcgtgcctggaagccgaggcccagcagagaaccttgctctggaatcaggggtccacactcccctccctgatggactcgaaggcctgccagtccttccacgaggccctagaagcctgggcaaagggaccaggtgccgagcccttctacattcgtgccaacctcaccttgcctgagagggcagatccccatgccctttgcgtgaaagcccaagagatccttcgactggtggactcggcatacaagcggaggcaggaatggttctgcacccgggttgaccccctcactctgcgggacctggaccggggcaccgtgcccaattatcagagagcccagcagctcctagaagttcaggagaaatgcctgccctccagccggcaccgaggcccccgcagtaatctgaagaagagagccctggaccagctgcggctggtgaggcccaagcccgtgggggcgcctgcaggggactccccggatcagctgctgctggagccctgtgcagagccggagcggagcctcagaccctacagtttggtgcggccgctactggtgtctgccctgcggcccgtggtgctgttgcctgagtgcctggcgccccggctcatccgtaacctgctagacctgcccagctcccggctggacttccaagtgtgcccagcggaaagcctctctggggaggaactgtgcccatcctcagcgcctggagcccccaaggctcagcctgccacccctgggctaggcagcaggatccgggccatccaggagtctgttgggaagaagcactgcctgctggagctgggtgctcggggtgtgcgggagctggtgcagaacgagatctaccccatcgtcatccacgtggaggtgactgagaagaatgtccgggaagtcaggggtctgctgggccggccgggctggcgggactcagagctgctgcggcagtgccgtggctcagagcaggtgctctgggggctgccctgctcctgggtgcaggtgcccgcccatgagtggggacacgcagaggagctggccaaggtggtgcgcggccgcatcctgcaggagcaggcccgcctcgtgtgggtggagtgcggcagcagcagaggctgccccagcagcagtgaggcctgaggctcatctgatacctgcaccttctccccaagccagcgtggaccctggtgtctatggtgaagctgggccctcccaccctgagccttcctagacccttggactctcagatgcagggcccttggctctggcctctcacccccaaggctgtctctggccctgccgagcctatgggagtcccgggacagagtgcccactcccctctacttgctgctctgggcctccccacctttcctggggtctccacattcccactagtgggtcttatgtgtgtctgtgtcttctccttaaacactcgccctggagtctgttctcacacctgtgcgcaggtttgcacactcaagttctcatgggcaggctcaggtctgtcccgctgccctgggcacgaggtctcctgaggacctgggcctgttctgctcctaggagacctgagcccgttaccgcgtgactcccaccatccagctcgcgctcctcgtggattcagccatgcatggactggggtgttccctggcccatggtcacctgtgcccctcgtgtctcctcacatgggtgtctgtggttctctcctgtgtaaatgtcacgccccacccctgtttcatgtgggcactaacacgtgtgcgttcctggcgggcacactcaggaccgtgcctcacagggcccactccctgcctatgcctccctcttggggggccgaggagggcggctgctctgtcatgagaatgtacggcccgtggatgattaacgggcctttttcacttagaagctgcacattatggagcattaaacacttttgtcatagaaaannnnnn

SEQ ID NO: 335509 - DNA, 3955 bp, Homo sapiens
  misc_feature (3950)..(3955): n is a, c, g, or t
acccgggagcccgaggcgactgtagcgtgcgggaccctgaggacacggccatgccgggccgggcggaggcgggggaggccgaggaggaggccggggccggctcggggtctgaggcggaggaggacgcgctgtgggagcgaatcgagggcgtccggcatcggctggctcgcgccctgaacccggccaagctcacgccgtatctgcgccagtgccgggtcatcgacgagcaggacgaggaggaggtgctgagcacctaccgcttcccgtgccgcgtcaaccgcaccgggcgcctgatggacatcttgcgctgccgtggcaagaggggctatgaggccttcctggaagccctggagttctactaccccgaacacttcacgctgctcacgggccaggaacccgcccagcgctgctccatgatcctcgatgaggaggggcctgagggcctgacccaattcttgatgacagaggtgcgacggctgcgggaagctcgcaagagccagctgcagcgggagcagcaactgcaggcccggggccgggtgctcgaggaggagcgggcagggctggagcagcggctgcgggaccagcagcaggctcaggagcgctgtcaacggctgcgggaggactgggaggcgggcagcctggagctgctgcggctcaaggatgagaactacatgatcgccatgcgcctggcacagctcagtgaggagaagaactcggctgtacttcgcagccgtgacctgcagctggcggtggatcagctcaagctcaaagtgagtcggctggaggaagagtgtgcactgcttcgaagggccaggggcccgccccctggggcagaggagaaggagaaggagaaggagaaggagaaggagccagacaatgtggaccttgtctctgagctgcgtgctgagaaccagcggctgacggcgtcactgcgggagttgcaggagggcctgcagcaggaggcgagccggccgggggccccgggctccgagcgcatcctgctggacatcctagagcatgactggcgggaggcgcaggacagcaggcaggagctgtgccagaagctgcatgccgtgcagggggagctgcagtgggccgaggagctgcgcgaccagtacctgcaggagatggaagacctgcggctcaagcaccgcacgctgcagaaggactgtgacctgtacaagcaccgcatggccactgtcctggcccaactggaggagattgagaaggagcgagaccaggccatccagagccgtgaccggatccagttgcagtactcacagagcctcatcgagaaggaccagtaccgcaagcaggtgcggggcctggaggcggagcgggatgagctgctgacaacgctcaccagcctggagggcaccaaggctctgctggaggttcagctgcagcgggcccagggtggcacctgcctcaaggcctgtgcctcctcccattccctgtgctccaacctcagcagcacttggagcctgagcgagttcccctcccctctgggaggcccagaagcaactggggaggcagctgtcatggggggacctgagcctcacaactcggaggaagccacagacagtgaaaaggagatcaatcggctctccatcctgcccttcccccccagtgccggctccatcctccgccggcagcgtgaggaagaccccgcaccccctaagagatccttcagcagcatgtcagacatcacagggagtgtgacacttaagccctggtcccctggcctctcttcgtcctcatcctctgacagcgtgtggcctttgggaaagccggaaggcctcctggctcggggctgtggcctggacttcctcaacaggtctctggctattcgggtgtctggccggagccccccagggggcccagagccgcaggacaagggaccagatggactgtcgttttatggggacagatggtctggggctgtggtgcgcagggtgctgtctgggcctgggtccgccaggatggaaccaagagagcaaagggtggaagctgctggtctggagggggcgtgcctggaagccgaggcccagcagagaaccttgctctggaatcaggggtccacactcccctccctgatggactcgaaggcctgccagtccttccacgaggccctagaagcctgggcaaagggaccaggtgccgagcccttctacattcgtgccaacctcaccttgcctgagagggcagatccccatgccctttgcgtgaaagcccaagagatccttcgactggtggactcggcatacaagcggaggcaggaatggttctgcacccgggttgaccccctcactctgcgggacctggaccggggcaccgtgcccaattatcagagagcccagcagctcctagaagttcaggagaaatgcctgccctccagccggcaccgaggcccccgcagtaatctgaagaagagagccctggaccagctgcggctggtgaggcccaagcccgtgggggcgcctgcaggggactccccggatcagctgctgctggagccctgtgcagagccggagcggagcctcagaccctacagtttggtgcggccgctactggtgtctgccctgcggcccgtggtgctgttgcctgagtgcctggcgccccggctcatccgtaacctgctagacctgcccagctcccggctggacttccaagtgtgcccagcggaaagcctctctggggaggaactgtgcccatcctcagcgcctggagcccccaaggctcagcctgccacccctgggctaggcagcaggatccgggccatccaggagtctgttgggaagaagcactgcctgctggagctgggtgctcggggtgtgcgggagctggtgcagaacgagatctaccccatcgtcatccacgtggaggtgactgagaagaatgtccgggaagtcaggggtctgctgggccggccgggctggcgggactcagagctgctgcggcagtgccgtggctcagagcaggtgctctgggggctgccctgctcctgggtgcaggtgcccgcccatgagtggggacacgcagaggagctggccaaggtggtgcgcggccgcatcctgcaggagcaggcccgcctcgtgtgggtggagtgcggcagcagcagaggctgccccagcagcagtgaggcctgaggctcatctgatacctgcaccttctccccaagccagcgtggaccctggtgtctatggtgaagctgggccctcccaccctgagccttcctagacccttggactctcagatgcagggcccttggctctggcctctcacccccaaggctgtctctggccctgccgagcctatgggagtcccgggacagagtgcccactcccctctacttgctgctctgggcctccccacctttcctggggtctccacattcccactagtgggtcttatgtgtgtctgtgtcttctccttaaacactcgccctggagtctgttctcacacctgtgcgcaggtttgcacactcaagttctcatgggcaggctcaggtctgtcccgctgccctgggcacgaggtctcctgaggacctgggcctgttctgctcctaggagacctgagcccgttaccgcgtgactcccaccatccagctcgcgctcctcgtggattcagccatgcatggactggggtgttccctggcccatggtcacctgtgcccctcgtgtctcctcacatgggtgtctgtggttctctcctgtgtaaatgtcacgccccacccctgtttcatgtgggcactaacacgtgtgcgttcctggcgggcacactcaggaccgtgcctcacagggcccactccctgcctatgcctccctcttggggggccgaggagggcggctgctctgtcatgagaatgtacggcccgtggatgattaacgggcctttttcacttagaagctgcacattatggagcattaaacacttttgtcatagaaaannnnnn

SEQ ID NO: 335510 - DNA, 3507 bp, Homo sapiens
  misc_feature (3407)..(3408): n is a, c, g, or t
  misc_feature (3426)..(3426): n is a, c, g, or t
  misc_feature (3442)..(3442): n is a, c, g, or t
  misc_feature (3476)..(3476): n is a, c, g, or t
acccgggagcccgaggcgactgtagcgtgcgggaccctgaggacacggccatgccgggccgggcggaggcgggggaggccgaggaggaggccggggccggctcggggtctgaggcggaggaggacgcgctgtgggagcgaatcgagggcgtccggcatcggctggctcgcgccctgaacccggccaagctcacgccgtatctgcgccagtgccgggtcatcgacgagcaggacgaggaggaggtgctgagcacctaccgcttcccgtgccgcgtcaaccgcaccgggcgcctgatggacatcttgcgctgccgtggcaagaggggctatgaggccttcctggaagccctggagttctactaccccgaacacttcacgctgctcacgggccaggaacccgcccagcgctgctccatgatcctcgatgaggaggggcctgagggcctgacccaattcttgatgacagaggtgcgacggctgcgggaagctcgcaagagccagctgcagcgggagcagcaactgcaggcccggggccgggtgctcgaggaggagcgggcagggctggagcagcggctgcgggaccagcagcaggctcaggagcgctgtcaacggctgcgggaggactgggaggcgggcagcctggagctgctgcggctcaaggatgagaactacatgatcgccatgcgcctggcacagctcagtgaggagaagaactcggctgtacttcgcagccgtgacctgcagctggcggtggatcagctcaagctcaaagtgagtcggctggaggaagagtgtgcactgcttcgaagggccaggggcccgccccctggggcagaggagaaggagaaggagaaggagaaggagaaggagccagacaatgtggaccttgtctctgagctgcgtgctgagaaccagcggctgacggcgtcactgcgggagttgcaggagggcctgcagcaggaggcgagccggccgggggccccgggctccgagcgcatcctgctggacatcctagagcatgactggcgggaggcgcaggacagcaggcaggagctgtgccagaagctgcatgccgtgcagggggagctgcagtgggccgaggagctgcgcgaccagtacctgcaggagatggaagacctgcggctcaagcaccgcacgctgcagaaggactgtgacctgtacaagcaccgcatggccactgtcctggcccaactggaggagattgagaaggagcgagaccaggccatccagagccgtgaccggatccagttgcagtactcacagagcctcatcgagaaggaccagtaccgcaagcaggtgcggggcctggaggcggagcgggatgagctgctgacaacgctcaccagcctggagggcaccaaggctctgctggaggttcagctgcagcgggcccagggtggcacctgcctcaaggcctgtgcctcctcccattccctgtgctccaacctcagcagcacttggagcctgagcgagttcccctcccctctgggaggcccagaagcaactggggaggcagctgtcatggggggacctgagcctcacaactcggaggaagccacagacagtgaaaaggagatcaatcggctctccatcctgcccttcccccccagtgccggctccatcctccgccggcagcgtgaggaagaccccgcaccccctaagagatccttcagcagcatgtcagacatcacagggagtgtgacacttaagccctggtcccctggcctctcttcgtcctcatcctctgacagcgtgtggcctttgggaaagccggaaggcctcctggctcggggctgtggcctggacttcctcaacaggtctctggctattcgggtgtctggccggagccccccagggggcccagagccgcaggacaagggaccagatggactgtcgttttatggggacagatggtctggggctgtggtgcgcagggtgctgtctgggcctgggtccgccaggatggaaccaagagagcaaagggtggaagctgctggtctggagggggcgtgcctggaagccgaggcccagcagagaaccttgctctggaatcaggggtccacactcccctccctgatggactcgaaggcctgccagtccttccacgaggccctagaagcctgggcaaagggaccaggtgccgagcccttctacattcgtgccaacctcaccttgcctgagagggcagatccccatgccctttgcgtgaaagcccaagagatccttcgactggtggactcggcatacaagcggaggcaggaatggttctgcacccgggttgaccccctcactctgcgggacctggaccggggcaccgtgcccaattatcagagagcccagcagctcctagaagttcaggagaaatgcctgccctccagccggcaccgaggcccccgcagtaatctgaagaagagagccctggaccagctgcggctggtgaggcccaagcccgtgggggcgcctgcaggggactccccggatcagctgctgctggagccctgtgcagagccggagcggagcctcagaccctacagtttggtgcggccgctactggtgtctgccctgcggcccgtggtgctgttgcctgagtgcctggcgccccggctcatccgtaacctgctagacctgcccagctcccggctggacttccaagtgtgcccagcggaaagcctctctggggaggaactgtgcccatcctcagcgcctggagcccccaaggctcagcctgccacccctgggctaggcagcaggatccgggccatccaggagtctgttgggaagaagcactgcctgctggagctgggtgctcggggtgtgcgggagctggtgcagaacgagatctaccccatcgtcatccacgtggaggtgactgagaagaatgtccgggaagtcaggggtctgctgggccggccgggctggcgggactcagagctgctgcggcagtgccgtggctcagagcaggtgctctgggggctgccctgctcctgggtgcaggtgcccgcccatgagtggggacacgcagaggagctggccaaggtggtgcgcggccgcatcctgcaggagcaggcccgcctcgtgtgggtggagtgcggcagcagcagaggctgccccagcagcagtgaggcctgaggctcatctgatacctgcaccttctccccaagccagcgtggaccctggtgtctatggtgaagctgggccctcccaccctgagccttcctagacccttggactctcagatgcagggcccttggctctggcctctcacccccaaggctgtctctggccctgccgagcctatgggagtcccgggacagagtgcccactcccctctacttgctgctctgggcctccccacctttcctggggtctccacattcccactagtgnnggtctttaaatttggggnttgggttttggttttncctttgggtttggggttttccccctttttttttncccccttttttttcccccccccccccccccc

SEQ ID NO: 335511 - DNA, 743 bp, Homo sapiens
gacccacccaagaacagggtttgtgtgggtataatactaagttgagatgatatcatttacggggtactgcactcatgtgaggtaggactcatatctcttgtgctgatctcgatctcaaaacttcatgtatgatagctgcacaggccgagcctagaatgaggcgctagtaactgccgaccataccatgcacggagattgaagacctgcgtgctcgaaagaacaaccagggatcagctgacaatagagggaactgtgacccttgtatcgaatgcacccggacactgggcctaatctgtttcgctggacaccatgaggtggaagagcaggacttgaggaacgcgagcgagagcaggccatccagagccgtgaccggatccagttgcagtactcacagagcctcatcgagaaggaccagtaccgcaagcaggtgcggggcctggaggcggagcgggatgagctgctgacaacgctcaccagcctggagggcaccaaggctctgctggaggttcagctgcagcgggcccagggtggcacctgcctcaaggcctgtgcctcctcccattccctgtgctccaacctcagcagcacttggagcctgagcgagttcccctcccctctgggaggcccagaagcaactggggaggcagctgtcatggggggacctgagcctcacaactcggaagaagaccacagacacgtgaacacaggagatcaattcggtctccatacctggccttacccca

SEQ ID NO: 335512 - DNA, 3525 bp, Homo sapiens
  misc_feature (3520)..(3525): n is a, c, g, or t
tgcactcatagtccagcaaactggccatgcacgtctgctcccagcttggtggtcacaccacagctgcccaccccccataccaggccaacttctggctgcacactccgaactggtgattggttaggggcatgggattttgtttgaagctgtgaagacagccacggtcacactgtggcagctctgtagcccttcatagtttagaggcctctgcccacttgctgtcttgtttgattcttgcaacacctttgggaggcaaatgatggggccaggggattgactgggcccattttactgatgaggaaactgaggcccagaggaggtggatcagctcaagctcaaagtgagtcggctggaggaagagtgtgcactgcttcgaagggccaggggcccgccccctggggcagaggagaaggagaaggagaaggagaaggagaaggagccagacaatgtggaccttgtctctgagctgcgtgctgagaaccagcggctgacggcgtcactgcgggagttgcaggagggcctgcagcaggaggcgagccggccgggggccccgggctccgagcgcatcctgctggacatcctagagcatgactggcgggaggcgcaggacagcaggcaggagctgtgccagaagctgcatgccgtgcagggggagctgcagtgggccgaggagctgcgcgaccagtacctgcaggagatggaagacctgcggctcaagcaccgcacgctgcagaaggactgtgacctgtacaagcaccgcatggccactgtcctggcccaactggaggagattgagaaggagcgagaccaggccatccagagccgtgaccggatccagttgcagtactcacagagcctcatcgagaaggaccagtaccgcaagcaggtgcggggcctggaggcggagcgggatgagctgctgacaacgctcaccagcctggagggcaccaaggctctgctggaggttcagctgcagcgggcccagggtggcacctgcctcaaggcctgtgcctcctcccattccctgtgctccaacctcagcagcacttggagcctgagcgagttcccctcccctctgggaggcccagaagcaactggggaggcagctgtcatggggggacctgagcctcacaactcggaggaagccacagacagtgaaaaggagatcaatcggctctccatcctgcccttcccccccagtgccggctccatcctccgccggcagcgtgaggaagaccccgcaccccctaagagatccttcagcagcatgtcagacatcacagggagtgtgacacttaagccctggtcccctggcctctcttcgtcctcatcctctgacagcgtgtggcctttgggaaagccggaaggcctcctggctcggggctgtggcctggacttcctcaacaggtctctggctattcgggtgtctggccggagccccccagggggcccagagccgcaggacaagggaccagatggactgtcgttttatggggacagatggtctggggctgtggtgcgcagggtgctgtctgggcctgggtccgccaggatggaaccaagagagcaaagggtggaagctgctggtctggagggggcgtgcctggaagccgaggcccagcagagaaccttgctctggaatcaggggtccacactcccctccctgatggactcgaaggcctgccagtccttccacgaggccctagaagcctgggcaaagggaccaggtgccgagcccttctacattcgtgccaacctcaccttgcctgagagggcagatccccatgccctttgcgtgaaagcccaagagatccttcgactggtggactcggcatacaagcggaggcaggaatggttctgcacccgggttgaccccctcactctgcgggacctggaccggggcaccgtgcccaattatcagagagcccagcagctcctagaagttcaggagaaatgcctgccctccagccggcaccgaggcccccgcagtaatctgaagaagagagccctggaccagctgcggctggtgaggcccaagcccgtgggggcgcctgcaggggactccccggatcagctgctgctggagccctgtgcagagccggagcggagcctcagaccctacagtttggtgcggccgctactggtgtctgccctgcggcccgtggtgctgttgcctgagtgcctggcgccccggctcatccgtaacctgctagacctgcccagctcccggctggacttccaagtgtgcccagcggaaagcctctctggggaggaactgtgcccatcctcagcgcctggagcccccaaggctcagcctgccacccctgggctaggcagcaggatccgggccatccaggagtctgttgggaagaagcactgcctgctggagctgggtgctcggggtgtgcgggagctggtgcagaacgagatctaccccatcgtcatccacgtggaggtgactgagaagaatgtccgggaagtcaggggtctgctgggccggccgggctggcgggactcagagctgctgcggcagtgccgtggctcagagcaggtgctctgggggctgccctgctcctgggtgcaggtgcccgcccatgagtggggacacgcagaggagctggccaaggtggtgcgcggccgcatcctgcaggagcaggcccgcctcgtgtgggtggagtgcggcagcagcagaggctgccccagcagcagtgaggcctgaggctcatctgatacctgcaccttctccccaagccagcgtggaccctggtgtctatggtgaagctgggccctcccaccctgagccttcctagacccttggactctcagatgcagggcccttggctctggcctctcacccccaaggctgtctctggccctgccgagcctatgggagtcccgggacagagtgcccactcccctctacttgctgctctgggcctccccacctttcctggggtctccacattcccactagtgggtcttatgtgtgtctgtgtcttctccttaaacactcgccctggagtctgttctcacacctgtgcgcaggtttgcacactcaagttctcatgggcaggctcaggtctgtcccgctgccctgggcacgaggtctcctgaggacctgggcctgttctgctcctaggagacctgagcccgttaccgcgtgactcccaccatccagctcgcgctcctcgtggattcagccatgcatggactggggtgttccctggcccatggtcacctgtgcccctcgtgtctcctcacatgggtgtctgtggttctctcctgtgtaaatgtcacgccccacccctgtttcatgtgggcactaacacgtgtgcgttcctggcgggcacactcaggaccgtgcctcacagggcccactccctgcctatgcctccctcttggggggccgaggagggcggctgctctgtcatgagaatgtacggcccgtggatgattaacgggcctttttcacttagaagctgcacattatggagcattaaacacttttgtcatagaaaannnnnn

SEQ ID NO: 335513 - DNA, 2754 bp, Homo sapiens
acccgggagcccgaggcgactgtagcgtgcgggaccctgaggacacggccatgccgggccgggcggaggcgggggaggccgaggaggaggccggggccggctcggggtctgaggcggaggaggacgcgctgtgggagcgaatcgagggcgtccggcatcggctggctcgcgccctgaacccggccaagctcacgccgtatctgcgccagtgccgggtcatcgacgagcaggacgaggaggaggtgctgagcacctaccgcttcccgtgccgcgtcaaccgcaccgggcgcctgatggacatcttgcgctgccgtggcaagaggggctatgaggccttcctggaagccctggagttctactaccccgaacacttcacgctgctcacgggccaggaacccgcccagcgctgctccatgatcctcgatgaggaggggcctgagggcctgacccaattcttgatgacagaggtgcgacggctgcgggaagctcgcaagagccagctgcagcgggagcagcaactgcaggcccggggccgggtgctcgaggaggagcgggcagggctggagcagcggctgcgggaccagcagcaggctcaggagcgctgtcaacggctgcgggaggactgggaggcgggcagcctggagctgctgcggctcaaggatgagaactacatgatcgccatgcgcctggcacagctcagtgaggagaagaactcggctgtacttcgcagccgtgacctgcagctggcggtggatcagctcaagctcaaagtgagtcggctggaggaagagtgtgcactgcttcgaagggccaggggcccgccccctggggcagaggagaaggagaaggagaaggagaaggagaaggagccagacaatgtggaccttgtctctgagctgcgtgctgagaaccagcggctgacggcgtcactgcgggagttgcaggagggcctgcagcaggaggcgagccggccgggggccccgggctccgagcgcatcctgctggacatcctagagcatgactggcgggaggcgcaggacagcaggcaggagctgtgccagaagctgcatgccgtgcagggggagctgcagtgggccgaggagctgcgcgaccagtacctgcaggagatggaagacctgcggctcaagcaccgcacgctgcagaaggactgtgacctgtacaagcaccgcatggccactgtcctggcccaactggaggagattgagaaggagcgagaccaggccatccagagccgtgaccggatccagttgcagtactcacagagcctcatcgagaaggaccagtaccgcaagcaggtgcggggcctggaggcggagcgggatgagctgctgacaacgctcaccagcctggagggcaccaaggctctgctggaggttcagctgcagcgggcccagggtggcacctgcctcaaggcctgtgcctcctcccattccctgtgctccaacctcagcagcacttggagcctgagcgagttcccctcccctctgggaggcccagaagcaactggggaggcagctgtcatggggggacctgagcctcacaactcggaggaagccacagacagtgaaaaggagatcaatcggctctccatcctgcccttcccccccagtgccggctccatcctccgccggcagcgtgaggaagaccccgcaccccctaagagatccttcagcagcatgtcagacatcacagggagtgtgacacttaagccctggtcccctggcctctcttcgtcctcatcctctgacagcgtgtggcctttgggaaagccggaaggcctcctggctcggggctgtggcctggacttcctcaacaggtctctggctattcgggtgtctggccggagccccccagggggcccagagccgcaggacaagggaccagatggactgtcgttttatggggacagatggtctggggctgtggtgcgcagggtgctgtctgggcctgggtccgccaggatggaaccaagagagcaaagggtggaagctgctggtctggagggggcgtgcctggaagccgaggcccagcagagaaccttgctctggaatcaggggtccacactcccctccctgatggactcgaaggcctgccagtccttccacgaggccctagaagcctgggcaaagggaccaggtgccgagcccttctacattcgtgccaacctcaccttgcctgagagggcagatccccatgccctttgcgtgaaagcccaagagatccttcgactggtggactcggcatacaagcggaggcaggaatggttctgcacccgggttgaccccctcactctgcgggacctggaccggggcaccgtgcccaattatcagagagcccagcagctcctagaagttcaggagaaatgcctgccctccagccggcaccgaggcccccgcagtaatctgaagaagagagccctggaccagctgcggctggtgaggcccaagcccgtgggggcgcctgcaggggactccccggatcagctgctgctggagccctgtgcagagccggagcggagcctcagaccctacagtttggtgcggccgctactggtgtctgccctgcggcccgtggtgctgttgcctgagtgcctggcgccccggctcatccgtaacctgctagacctgcccagctcccggctggacttccaagtgtgcccagcggaagcctctctggggaggaactgtgcccatcctcacaccaagcaccagcacgaagttcagcaccagcacg

SEQ ID NO: 335514 - DNA, 366 bp, Homo sapiens
tgtgttctagaaaacctggttactgggtacatttatgattgttttccacagacaaaatattgacattctaagtcctttccttattaactatttactgaatatcaatggtggtagctccctagtcattcatttattcaacaaacatttgtgcctaccctgcgctaggccctgttctgggtgcaaataaatatctgaaggactgtatgtacagatggactcaattcaatctttcttataatcagtttgagttactgtgcaacatcgcttaagtcattaaactgaaagtcattgaaacacaagactgaaaaatgtaaggatgaagtactttcacatacaaagggatttctgccatactttcaaatagct

SEQ ID NO: 335515 - DNA, 458 bp, Homo sapiens
gatgtgtgttttagattcatgtaattttttgagagatgctagaagaatatcaaaactatgatatttctcttagacctcataaccttgaaaattcccaaatgatatttcttaaggtgctttgagaattacagactccttaaggttagtccctaacaacacactgggaagcttgctaggggagcatatgtgtaactcctagggaaacaggaagaagaaggattactgtgtctttgagcccactgccccagggtagattgtcctaccttgggaggatatgtcttctgttgtgtttttcaggggagaaagtgcagagggatgaaggaagaaagactgttgctgaaaagattcaggaaagagaatagatgttttcacaataccgttagaagtaagaccgagtgattatcaggggagccaacttattcacctgctcaatatggtgatgaacagagagaatgctc

SEQ ID NO: 335516 - DNA, 419 bp, Homo sapiens
aagtgcaaatggccaaaaatagccaaaacaattcataagattttaagaatttgaaggcattcatcctaccacatattagtaattacaaggctatactcattaaggttatatctccactgattagaaggatgagatgagataaataaataagagcataactatagtcattaaactagtgtggaactgactcagggatagacaaatcaaagcaactgaattgcagatttcataaacatcctcctgtgtcagaaagataaaaaaaagtatgggctattaaatatatgatgctggttatccatatggaaaaataatgaaattagatccttacatacaaaaataaattacaggtggattaaaggcctaaatgtaaaacaataacctcaataaaacaatgaaaaacaaaagaaagcttgtaatcc

SEQ ID NO: 335517 - DNA, 154 bp, Homo sapiens
ggtcattctcagggtgtgcttgagttattgcattctggcgcatctgccacacaccttcctacactccttcatccctatggaattacgatataattttggttagattcatagtcaccctatatcattaagacagggaaatactttagatcagtta

SEQ ID NO: 335518 - DNA, 317 bp, Homo sapiens
accaggtgttattgtcagaatccaaaggctaagagctcagtttcacaagtctgccccctactttagacaccagttgcaattaatggtcatctatacttctgattgactggctatatattggggtctccattagctcctctttgggttggattaagttgctaggacagcttacagatattataaaggatacagaagaacagccagatggaagagacttaatagggcaaggtgtgggagaaagggtgaggagcttccatgccctctctgggcatgccaccctcctaacacctcagtcccagggtgaagttccagcaact

SEQ ID NO: 335519 - DNA, 459 bp, Homo sapiens
tctgggaaaatgtctgggtgcacagtctaaagaggaaatgcaatagaaacctgaaatttctctaagcgcagcagaggttccagcgaagttcctttatggaataactacctcaggagtccttaatacgtgttgttgattgagtgactcttcccagggggagagtgtatctgttggttggctggattctcatcagagccagagctctgccctccctctggctgtgtatgagagtttttgtttcctttgtaaactccctttcctgaggaacaatgaggctcacttgctagggcatgcctctgtctctagatgtgtttgtgtggggctgagcgtttagtcggttggtttgtgcgttagtcaacctgtggcagtacctgtgtgtttatctgattcttgagtgtgcgtgtcgttgtgtgagtagttgtgtcagtatgtgttctacatgagtctccccccaccccc

SEQ ID NO: 335520 - DNA, 649 bp, Homo sapiens
tatacttaaaaggagaataaatcctcagcctaaacagatcttccaccaaagacagaatcctaatggagaagaggtggaattctgagacttgggatagtgacatttcagtggatgagctaaaaaatcttggacccttcccaaatttcctagaatctcctggctggaaacaacaacaacaacaacaacaacaacaacaacaacaacaacacaaaacaaaacaacccagaaaacaaaacctccccattgccagaggagaattctggaatgacttttctgaagcagatgactttaaagacaatgtctgttttccacaagacttattgtcaccaccattcattgctcctagatatgtaacagaaatcaagtcttggccgggcgtggtggctcacgcctgtaatcccagcactttgggaggccaaggcgggcagatcacgaggtcaggagatcgagaccatcctggctaacatggtgaaaccctgtgtctactaaaaatacaaaaattagccaggtgtggtggcgggcacctgtagtcccagctacttgggagactcaggcaggagaatggcgtgaacctgggaggcagagcttgcagtgagccaagattgcgccactgcactccagcctgggcaacagagcaagactccgtctc

SEQ ID NO: 335521 - DNA, 378 bp, Homo sapiens
actctgccggcttataactcaagaaatttgctgtattatgaagctaggaggctaaaatcaagcagaaatcccatgaaaatcagggaagaattccagccatattgtgatgctctgtagataggagatagagtttagagtgtgctgggtaaaggaatcctggtaaatcctggttctcaattaacatctgtgtaaggctaggacctaggagccaggagcctttctaaagtactatggcctggccaggagttaatttggtctcttaattggattagtgtggtcagccaacaagctgtgtcatagagagataatatgatccaaagctataaaatataaatgataagtgaacttcatatcagtagcaataattatccaacagaa

SEQ ID NO: 335522 - DNA, 380 bp, Homo sapiens
taactttgctgtcattcagcagatgagatctcagcaatccccactaggctggcttctaataacgctctcccactttaagccatgctcaaatctgagccgactccccaccattctaacagactaaggaacagagaaattggcaattctaaactatgcttttttacttttttgaatttgaccaaaataaatacagtgatacttagaaaattatagtcatgcatatccttatcgctctaattccccattatctaactagaatgttaggtagacagggcacttagaactgaaaattgacaaaaccatgctaaatggcagctcttttgtaggagagtcaaagattgtagttgggcagttgaaaagcataacctctaaatttaatc

SEQ ID NO: 335523 - DNA, 287 bp, Homo sapiens
gacacaattcagttcatagtaacctgcaaggagacatatcaggggcacattcttgtcacacggccaaacttccattgcaaaatgactacattacaatggatctttatatgagtgtctagcatattgttgcaattatttgatgaactatcattttgaatttgttcagctgcacttgtggaggaggaggggtaggagatgaaaaagaagaagagcatcgattatgtactcactctgtatcaagcactgttctaagtacttttgcatgcatcactacttcgtccagtttt

SEQ ID NO: 335524 - DNA, 400 bp, Homo sapiens
atttcataatatcctttgagggagatgaacataccacagggtgttgcaaaacaaaggctgaaaatcatagtttcagaggttctgttaactgattttatttttatccctccaaatttctctaaattttttttctactttttaaaattttaatctaaagtgtattttctagtcctggaaagctgcaagtcccttaagggatacagaaccttaaaggaaatctgttcatctaacaaacatgtattgtatacccctacataccaggcactcttcaaattaccaggatatagcagtgaacaaattccactctctcctgaagctgccaatccagtgaaaagacaaggatgactcattatcccagtttgcctgggactgcccttttttaactctgaatgtcctgcat

SEQ ID NO: 335525 - DNA, 297 bp, Homo sapiens
atcacaagtacatttcatagccccctgacttcattgggagttgtggataatttataaagacacagatttgttttctcgcagtctggaagctgggaagtccaagatggaagggttggcatctggtgagggccttcttgctccattatcccatggtgggaagtggaagggcaaagaggggagtgggagagagagaaagggggccaaaactcatccttttataaggaacccactcccacaatcatggcatttatcgatccatgaaggtggtgcccccatgacccaaacaccttctattag

SEQ ID NO: 335526 - DNA, 301 bp, Homo sapiens
ggggagtccctggaccttggtctgaggggtccctcccttgctcaaggtataatcaagtccctgcttgagggactccctattttccctgagatataatccagacttctcagctcggttttcagggcccttcttccaaattccagtaggatcctccttgccaacagttccttcctatgtgctcaggagctcagctgactgaacaacccactccatggcctctacctgttagactgccttgcctgtgtttctcaaagttcccctgcctggtgtgccttcccctcagcccggtgcctgcctgtgg

SEQ ID NO: 335527 - DNA, 190 bp, Homo sapiens
gcccttctgccagattgtctagtgtcaatttgttttctggcactgcttcacctcagttttcttcctcatcaccttgcactggtttggaaggactcatccccatcaaattggcttttgttaactactctggtgtgtctgttagctcttgaatttcttcaagatatcttgagacccttcaccccgacccccc

SEQ ID NO: 335528 - DNA, 153 bp, Homo sapiens
acccgggctcagggtcacgcaggctctgtccacacacctgggctcagggtcacgcaggctctgtccacacacctgggctcagggtcacgcaggctgtatccgcacacctgggctcagggtcacgtgggctgtatccacacacccgggctcagg

SEQ ID NO: 335529 - DNA, 216 bp, Homo sapiens
ctgtggcgaatcctcctcctcctaaccctagtcctaatcacataacctattcccccgagcaatctcaattacaacatatacaccaacaaacaatgttcaaccagtaactactactaatcaacgcccataatcatacaaagcccccgcaccaaaaggaattcctccccccacccccatcccactgcctcacctggctcctgcgtcggctaagccaca

SEQ ID NO: 335530 - DNA, 238 bp, Homo sapiens
acggatggcgaacgtgcaggtcgccgtgcgggtccggccgctcagcaagagggagaccaaagaagggggaagaattattgtggaagttgatggcaaagtggcaaaaatcaggaatttaaaggtggacaatcgaccagatggctttggggactcccgggagaaggttatggcatttggctttgattactgctactggtcagtcaacccagaggatccccagtatgcatctcaagatgtg

SEQ ID NO: 335531 - DNA, 88 bp, Homo sapiens
ccccttttttgtccctcaacttgagatgtatgaaggctttcggtctccctgggagtgggtggaggcagccagggcttacctgtacact

SEQ ID NO: 335532 - DNA, 417 bp, Homo sapiens
gtgacatttaaattttgttggaaaacactgtgtggtccaaacttgccttagctctgagaacctttctcacttggaatcatcaatttttgtattgcctctgaagcccgctttgccattcagtttctccccaattcacctttaacaagaacctgctcaactcttagggtaattaaattgcaaaccaatggcttcaaatgcaggttgagagaggttaagatactagaggttccaaactacttaaatgtttggaaagggctgttgtagcaacacctctcaagggctccttgggcattccttgcatatagtcacccctcccctccccagagagagacagatgtcattggacacccatgacatgtgcatccctgttccctgtgcctgacactgagaggacactaagatttctttctttctttt

SEQ ID NO: 335533 - DNA, 483 bp, Homo sapiens
agtatctcaatagcgtaacgaaaaatagtaactgatttcattcttacatcacaatttaatgtgggtgccgggggagtggaagaatctctgctccaagcagtgattcaaggaaccagccttcttccatctagtgattcctcaatgccttaggccttggagtcctctactggatggtctgcatgcagccagcctacagtggaaggtagtaatccatacagagaactcagtagatagttccttaaggatcaggcctagaagtcgcatccattacttctgcccacacctaacttggaaaggaggctgagaaacgtaatctaactctgttctcagaaagaaagagaaacgggatgacatgaacacatagcattgtctctgtcatactgaaaatgaaacgaccttattaattttaattgatacatatagatatatatattggggagctatgtgtgataatttcatacatttgtataatttgtaaagatc

SEQ ID NO: 335534 - DNA, 616 bp, Homo sapiens
ttctgctccctgaacatcacaactaaaagttccttgtctttgcaaaagagcaaaattacccccattacagtcagatgccgttgggagtgaacagtacaacgctaaatatatgttctcccctgatgcaggatggcattccccatgcttcattccatcattattctatgttccccagattccttcagcatctccataaaagcaataacacctttgccaaacacaagagaaaaaaaagagtagctgcccttgaaatagtaactcaatccaaagaaaagtttattgctggaagaacttttatttaccaaaacttccatactagacttacagcagggagaatacaacaaaaatggtttgtaggaaaaggtaccaggcaacagtgaatagcatggcacagaaaacagcaggacaggatgacagggaggcaggaaactcttaagggagattaaggatcccatagtcccacaatgaccttgtctgaaatagcatatggtcttgcagtccctgattgactatatgctccttgaagacagtcttactcatatgggtattatccacaccatctagtaccacaccataacatggtaggcactcaaatggtcacaaagaagctaaggcc

SEQ ID NO: 335535 - DNA, 349 bp, Homo sapiens
ggggaggatttgcctccagccacggaggaggggtatgctgtggaaggaggccagatctcccccagctgtttcccagctctgtttgaaggggaagggagagggataaatgactgggtgattgtggcacctacagccagcatctttcctctccacattctaggtcacaggcccacacctctctccctagtcaaagagagcctctgtgagggggttgaagggtgtcttggatctgtgggcaggacttgggatctgggcacagagaggttggggaattaacaaaggtcacacagccaggcaaaactagggaatgtggggagtcattctagacaggacctttagggggagctcc

SEQ ID NO: 335536 - DNA, 384 bp, Homo sapiens
agactcagtaagccttggaatttgccaaggactggctaggacctagaactaagatcttataaccacactccatgcaactatgagtctctaaatctctctgtaagaaaaaaatttcaaagtaaagattttactcttgcaatttctgttgtgatagtaccatctctttcacatactacatacaaattccctaataatcaaaagattgtacacatttttttcaatgaagtacaataatgtgaactgcatgtgtaaacagcatcacattattaccacctctctatggtattatagtggcagtatgctttgcctcagccttcactaattaggaatattgtgacaattcattgctaataaaacataacatgagtctctttgtactgtttt

SEQ ID NO: 335537 - DNA, 240 bp, Homo sapiens
ctttcctctttgtttttttcctggaaaggatgaaaatattattatctggacttgtcaaggttgtcctgcgttgttttttttacactttacatggtcacatttcagtgctgttggtaaacagggattcaaatactaggaggagacgtgaaagagagattgagaaaagaccagggaaataatgccaacaaagccagagtcagatttaagcactaagaaggcaagggcaacgcagggactatg

SEQ ID NO: 335538 - DNA, 309 bp, Homo sapiens
tagggtgatagaaacagaaaaagttacaatacaaagtgataaatgctgtaacaggttttacataaggtataataatgacctaaaagagagtgtcatctcctagtgtatgatatggactaggataggagaacttaggaaagaatttgcagaatgaaatggctttttatcttagttttgaaggaggaataagaaatttggtgaatagggacagagaggaatattgcaaatagaagagcatctgcaaaccacagaattgtaaaacatcaaaaaagtatgtttggaaaatactaagtactttggtggtggtgt

SEQ ID NO: 335539 - DNA, 676 bp, Homo sapiens
gacacagagtgagtgaggaaactcagcaaatggggagtctggtgacggtggcaaggtcttcgcactgcgcacaggatgggactccgacccaagggttcggtggcagaccaatgcatgcaccacactgcctccagtctagatgttagcagctctttgatatacctcaattcaatggtggcttttcaagaaaaagaatgcatgctaccacattaagtaaaataattaattgaaagtcatacaacaatcttagaatcttcagtatcaagtaaaaaacagtttatacctccttggggagaaggacacatgaccctgacatccttaagcacttgtattatccagctcactcctcacaggctaactctgtgctcaccaagcagccttccaattatattacccttcggcatctgaattttctacatgaagagaacatgccaatatggaaaggcaggtggtggggcctttgctgatgttaataaactcacattctagtttattccccaggctcttgtgagcacactcagcatgaatgctgctcctagagctcaagtcattttctgtgctctaacaaatccgaacttcttagtccctcaagcaaaggattagacctggaatgcagggccttactggggtgctgccatggtgggaatcttgctgggaatgagtgagctgcgtctgc

SEQ ID NO: 335540 - DNA, 976 bp, Homo sapiens
tgagacccagagtctcgttcagtcgcccaggctggagtgcagtggtgcaatcttggctcactgcaacctccacctcctgggttcaagcagttctcctgcctcagcttccccagtagcagggtgcgtcaccacacccggctaattttttgtatttttagtaaagacgaggttttgccatgttgcctaggctggtcttgaactcctgagctcaggtgatccgcccacctcagcctcccaaagtgcggggattacaggcatgagccaccacacccagtcctttcctggcacatttgcagcttgtcaacacagcggaaatcacgggagaatgttgagcccttccctgggctcagctgcttgctctgttcataagctttaatagcccccggggctctgggccaggtgacccggctttaaatccctgctgtgtgaacttaggcaggtacctcccctctctgggctcttcttttccatcaagcagacagaaaacctcaaccccacaaggttgctgtgagaagaagtgggaagctgctggttccctgggcacaggaagtgcttgttccttgttctggagactcaagacattcccagaatcttcttaagcagagctgctggggagtagcccctgtagcaagtaccatgctcttgacaggcagcatgagagcgtgactcccatgacccacctgtgctcaaaaaaaaaaaaaaaaaaaaagcaaaccaggaaaactgactacacaaacattgtagaaagattagaaaatagaagcagaaagaagactcattggccatcccactctctggggtgaatactgttatattttcttctaggcctttttctatgaatatatagaatatagattttgccaccgtggtatcctactatgcacactgttttcttataatctgcttttgcacttaactgtacattgtgaacctctttccatgtcaacaaatacatgtttatctcatcgctgtacgt

SEQ ID NO: 335541 - DNA, 994 bp, Homo sapiens
tgcctgcaccttaggatcacctggagagctttaaaaatcccatgtctagcctcaccccaggccaataaatcccaatctgagatttttaaaaagttccttccacaattctgttgtgcacctggggtcagaaaaccaccaggttagaccagtgtccagctgggatggaccggggagggtcagacagatcggactgggcacacccctgagtgtcacggcaggagacaaagaagaagaacaggaagagctttggtcactttggcctcctctgagctagtgctctaagtacctcatcttatttagcccccatcttacagatgacgaaactgagggtcagaaaggcccaaggtccatatagcaacaagtgtcagagccaggacacaaacacgggtctgactccacatccattgggctggcctctacttaccagcagccaaatcacagaggggcctggcttgcctgaaacccctcccgcgagtgcactgtcttgtgttttgttttagaaaacctcaaccccacaaggttgctgtgagaagaagtgggaagctgctggttccctgggcacaggaagtgcttgttccttgttctggagactcaagacattcccagaatcttcttaagcagagctgctggggagtagcccctgtagcaagtaccatgctcttgacaggcagcatgagagcgtgactcccatgacccacctgtgctcaaaaaaaaaaaaaaaaaaaaagcaaaccaggaaaactgactacacaaacattgtagaaagattagaaaatagaagcagaaagaagactcattggccatcccactctctggggtgaatactgttatattttcttctaggcctttttctatgaatatatagaatatagattttgccaccgtggtatcctactatgcacactgttttcttataatctgcttttgcacttaactgtacattgtgaacctctttccatgtcaacaaatacatgtttatctcatcgctgtacgt

SEQ ID NO: 335542 - DNA, 974 bp, Homo sapiens
tgagacccagagtctcgttcagtcgcccaggctggagtgcagtggtgcaatcttggctcactgcaacctccacctcctgggttcaagcagttctcctgcctcagcttccccagtagcagggtgcgtcaccacacccggctaattttttgtatttttagtaaagacgaggttttgccatgttgcctaggctggtcttgaactcctgagctcaggtgatccgcccacctcagcctcccaaagtgcggggattacaggcatgagccaccacacccagtcctttcctggcacatttgcagcttgtcaacacagcggaaatcacgggagaatgttgagcccttccctgggctcagctgcttgctctgttcataagctttaatagcccccggggctctgggccaggtgacccggctttaaatccctgctgtgtgaacttaggcaggtacctcccctctctgggctcttcttttccatcaagcagacagaaaacctcaaccccacaaggttgctgtgagaagaagtgggaagctgctggttccctgggcacaggaagtgcttgttccttgttctggagactcaagacattcccagaatcttcttaagcagagctgctggggagtagcccctgtagcaagtaccatgctcttgacaggcagcatgagagcgtgactcccatgacccacctgtgctcaaaaaaaaaaaaaaaaaaaaagcaaaccaggaagtgtgtagcggctgcctggtaagggagtacacagtggaggcaggaagaaggctctgtgcccataggggtctcaggggttaatggagggatattatgttgtggtcggtgccctatggggatatggaatgtgagctttggcaggcgtggtatcaggttatgggcattgtgttgtaatagtttgcttaggttgtgcagggggcagtgtaggcgtctttccagctcatcggtgatatgtttgtgtatggcctgaacc

SEQ ID NO: 335543 - DNA, 460 bp, Homo sapiens
ccccatcttacagatgacgaaactgagggtcagaaaggcccaaggtccatatagcaacaagtgtcagagccaggacacaaacacgggtctgactccacatccattgggctggcctctacttaccagcagccaaatcacagaggggcctggcttgcctgaaacccctcccgcgagtgctcagatggggctcctgcaggcggcaaaggaaggaacagccagcgccaggcactgagccaggcttcgaatatcctctcctttaatcctcacaaccaacccaggaatcattactcccattttatagatgagcaaagtgagtcttcattaaagtgaaataacttgcccaaggtcatctagctcctaaatcgcagagctgagattcaaacccaggcctctcgccacgctgggctcactgcctatgggttagccctgctccacaaggaacagcacaaatatttttgtt

SEQ ID NO: 335544 - DNA, 545 bp, Homo sapiens
gtggatcctagagtatgtgtacttttatgttgggctgctttcactcagcaaaatatttttttttattatttaagttctgggatacgtgtgcagaatgtgcaggtttgctacacaggtatatatgtgccatggtggtttgctgcacccatcaacccgtcacctaggttttaagccccacagaataggtatttgtcctaatgctgtccctccccttgcctcccaactcccaacaggccccggtgtgtgatgttcccctccctatgtccgtgtgttctcattgtttaactcccatttatgagtgagaacatgtggtgtttggttttctgttcctgtgttagtttgagattcatctaagttgttgtgtgtttcagtagttcattcattttgtagctgaggagtattacatggtatggtgtgttttaggctgttgttgcattgctgtaaggaaatacgtgagactcggtaatttagaaagaaaagagccttcattggctcctggttctgcaggctctacaagaagcatggtgctggcgtgcttggcttct

SEQ ID NO: 335545 - DNA, 3939 bp, Homo sapiens
acgttaccaaacggtctcctacaaaggcagaaaccgtttaaatatttcagaaggattgattttcattttgcaaatataatactggttcattttctttctcttcctccatccattctactattgaacataaaacgtgtcaatagtattgtagttcagcatgtatctcaggatattaaaagggcagtgtgactcagctagaaaaggatgaactttccccaaagataaagtgacctatgcgactctgttgggtacaagtgacacagaaagtcatctcaaactagctgaaacacaaaagcgcaggaaggcggaagggaaggcggagaccggcaagagaggggagaaggcccggggaagacgctcgggaccaagatgcggggcccgggtgcgagcagctgaacctctcggcccccaggcgtggtgacctgggtggcgacgctcgtggaggccgaggagcttctggaccggcgcttcgggggaccaagtggagaggctgctggagttgtcgcctgagtcctcccttagttcttcgcgccggcctcgcccacggctccgggtcccagccgccactgcagtctccgcagcaccgagcggggctccaccgactcgcgacctccagcctccgcctcaagggcagggagcgcggctgggtctctggaaagccatttttaaatcactgcctctgctgcccccatgtgaggtcggagtgtcctcccccgtctttgctttcaggttctttcaggttcctttgggcaaacccgcagctaagagtccagcttgtgaacttgaacctgaacttgctgaagaagctcccggcggccccctgctgtctgcggcctttgtttgagggagaggctggggtcacccggttgggccgcatttccggggccgtcacctgtcgggctgccaggccgcgcgtaccttgtcccatcgggggctctgctctgccccctgcgctgatgacgcgggtggaagggaggtatcaggggcactctggggagctgtacctggcgggcaccccccagctgctctccgtggggtacgacaccgagacctggttgggctgcaaggagaccgactgggattcccgggctggtggccggggagacgaaggcggggggtgagaggcaggaacccaggaggccccaggcccagcgctgtggggctgctgttgtcgttctgcgtggaggtctggccaaactggcttttgccccgagtgaggaattcctgctcttttttggttttggtaagaggtcgctattcacagagggggcggggttcgtcccctccaggcgagtacggggctggcgggcgcagtgctgcctttctgctctgtctcttgatcccgcttaggatctttgtggctcctctgagtcttcttagagaggccgtgaaagatgggaaaggcaggttgctgaaacgctgctgctcggggctggcagagaccctggtatagggaaggcgcaccactgtgggtcagatcagctgacagtgggggttttaggtgatggggtaaccttacagttcggatctcttagaacccagaagcaggtaggcgatcgctgcttcatcacacttcacagggagtcctggatctttcctgtccgtaacccatggacgccatgattcagtatggcggaggtccggggcttaagttcctgttcatgcttcctaatcattcatggatccatcacaatgtgctctgaagggcctctcttgctgggattgagaaggatacattttttgagcaggtttttatactcaatggacatgtagaagggaatatattctactcagttcccctcctgcagctccttgaaattctgtccatcaaaagcagggatctgctgaccagaggtgactgccacagaaggtatccagtttgtaaaagctgaatttgttgctgaagccagaatttgcaatcttgatgtttgtgttaacatccaagagcgtgttttctgcctttaaatctctgtggacaatacgtttctggtgacagcttgcacagcagacacttttggtagaatttgcttcagtcctttttttttctttcctgctgccatgagcaggtattcacaaacttctcctcctggctagtgtgcttcatgacaaagcaaagagattcctcaatatcgatcacagcaaatgtttcactatgttggggtgatccgagccttcatggttcctactttgtggatggtgtctggaggagatctgctgagtctcatcaatgaacttcacagctgctgctttcccagttaagaggtcccaggccaaccttaccttagccaggttgcccttgacgatggtctcaaggatcctagctgccagtaagggtcccttctcagcagagatggctgagaggccctgtggcatgtgagacttactgctgggcttggagtcaaggtgtcccaggtcagcttaatttcgggaaaaactggtaagacgcttggttcaaatcacttgaaaagaaaatcacttgcatagttcacctgaagaatggatctctataatggaattaaagcacaatgctggacaaaaagtaagaaaaagcaacaaactgaaaggaaaaattgagtaaaaagaataaagaactagaactggcaacctcagccaagccagggaattacatacatcttggaattccaaagcaatgcttccttatgagggcataggaagaaataaatctaataacaaggctgggattaattcacgtggttttctcacattttggtctcaagaactttttactctaaaactaattattgaggaccccaaagagctttttatgtgggttatagttatcagtatttactttattggaaattaaaacctgtaggatgtttcagtggtcttttctagtttgaagggtttaataatttttggcttttaaagagcccataatcaattaaaatattttattttcctttaaattgtaaatgattggtgtcataatgatgctacaacttaactggcattacaatactatacaaatacgttctattgtataagtcacaataaggtacattattaactctataacatttaggggaagatagctgttatcatattatttaaagttttgcctagtttctttgtagtagacttatcttttccaggagccagagaacccgctatatcagtttcagtatctttaaatgtagagattgcagctgtgtgttgagaaagcacgtttcacttagcatgggatggggacttcgaggtactggatatgtcactggcacctcaggggaggaaaccaagatgcccctatatgattttaaacatggtttattaaagcgtgatacagaaaagtgcacaaattgtccacctacagcttggtgactgttcacaaattgaactcatctaactagcctccagaataagaaacaggcctttacacacccccaccagcctcccaatccccttttcagtcaccttctctgcagtgataaccactattctatattctgacagcatagtttcacttgttttttaacttcacataaatgggatcagacagtattgaatcctttgtgtctgcttccttcactcaatattttcctgagatttttctatattgtttattctaaatgcccattgtacgactgtaacacaatttgtttatccattttactgttcttgggcatttgggtagttctcactgtggatgctaagaagagtgttgctataaacattcaggtcttttggtaagcatatacctggctttctgttggctatttatacctagaaatagagttgctggcttataaggtatgcatatttttagttttagtagacattgcagtttgtaccaattcacccacccaccaatgtgaatatctaatattgcctgcctgtctgtacgtgtgtactggtatagcattgtggttttaatttgcattttccagtgcctaatgaaataaagcaccttttaatatg

SEQ ID NO: 335546 - DNA, 443 bp, Homo sapiens
gataataatagtcgcttcctaaaactgatccgctccttgtttggagactgaaacagtctttgtaagacaatgaaaggtcacaagattagtattctgagaggggcctgaattctgctaaaatgttgctaactttggaggaagccagctgccatgtcacaaaaagattcaggaagccatgtggagaggcccacatcatgaggaactgaggtctttgccaattaccagcaaggaaatgaggcctcctgccaacagccacgtgagtatcctaccttggaaatggaccctctaacttcaatcagccttcaaataactgcagccccagttgatggcttgactgcaaccttaggagaaaccctgagccaaaaacattgaggaaaaacacccccagattcctatcagaaattgtgtaagataataaatgtttgttgttttaagctgctaaa

SEQ ID NO: 335547 - DNA, 424 bp, Homo sapiens
ggctctgcacccttccggccgctaagacaaggcctcagacacggggttctgccctgtctactgtcagcagagccaagctgagaaggatgggcacgagaaaaggttgctaactttggaggaagccagctgccatgtcacaaaaagattcaggaagccatgtggagaggcccacatcatgaggaactgaggtctttgccaattaccagcaaggaaatgaggcctcctgccaacagccacgtgagtatcctaccttggaaatggaccctctaacttcaatcagccttcaaataactgcagccccagttgatggcttgactgcaaccttaggagaaaccctgagccaaaaacattgaggaaaaacacccccagattcctatcagaaattgtgtaagataataaatgtttgttgttttaagctgctaaa

SEQ ID NO: 335548 - DNA, 3873 bp, Homo sapiens
tagttgtagcagggttagttgcaccttaggttgaagcaagattttgctactggaaattaaatatggtaaaaggaggtgctctcggccgccaatttgacaagggatggaccgtgctggttttgtatcaactggcctaagctagaacttcatttccattatgtctccatatcagactctgttgggtacaagtgacacagaaagtcatctcaaactagctgaaacacaaaagcgcaggaaggcggaagggaaggcggagaccggcaagagaggggagaaggcccggggaagacgctcgggaccaagatgcggggcccgggtgcgagcagctgaacctctcggcccccaggcgtggtgacctgggtggcgacgctcgtggaggccgaggagcttctggaccggcgcttcgggggaccaagtggagaggctgctggagttgtcgcctgagtcctcccttagttcttcgcgccggcctcgcccacggctccgggtcccagccgccactgcagtctccgcagcaccgagcggggctccaccgactcgcgacctccagcctccgcctcaagggcagggagcgcggctgggtctctggaaagccatttttaaatcactgcctctgctgcccccatgtgaggtcggagtgtcctcccccgtctttgctttcaggttctttcaggttcctttgggcaaacccgcagctaagagtccagcttgtgaacttgaacctgaacttgctgaagaagctcccggcggccccctgctgtctgcggcctttgtttgagggagaggctggggtcacccggttgggccgcatttccggggccgtcacctgtcgggctgccaggccgcgcgtaccttgtcccatcgggggctctgctctgccccctgcgctgatgacgcgggtggaagggaggtatcaggggcactctggggagctgtacctggcgggcaccccccagctgctctccgtggggtacgacaccgagacctggttgggctgcaaggagaccgactgggattcccgggctggtggccggggagacgaaggcggggggtgagaggcaggaacccaggaggccccaggcccagcgctgtggggctgctgttgtcgttctgcgtggaggtctggccaaactggcttttgccccgagtgaggaattcctgctcttttttggttttggtaagaggtcgctattcacagagggggcggggttcgtcccctccaggcgagtacggggctggcgggcgcagtgctgcctttctgctctgtctcttgatcccgcttaggatctttgtggctcctctgagtcttcttagagaggccgtgaaagatgggaaaggcaggttgctgaaacgctgctgctcggggctggcagagaccctggtatagggaaggcgcaccactgtgggtcagatcagctgacagtgggggttttaggtgatggggtaaccttacagttcggatctcttagaacccagaagcaggtaggcgatcgctgcttcatcacacttcacagggagtcctggatctttcctgtccgtaacccatggacgccatgattcagtatggcggaggtccggggcttaagttcctgttcatgcttcctaatcattcatggatccatcacaatgtgctctgaagggcctctcttgctgggattgagaaggatacattttttgagcaggtttttatactcaatggacatgtagaagggaatatattctactcagttcccctcctgcagctccttgaaattctgtccatcaaaagcagggatctgctgaccagaggtgactgccacagaaggtatccagtttgtaaaagctgaatttgttgctgaagccagaatttgcaatcttgatgtttgtgttaacatccaagagcgtgttttctgcctttaaatctctgtggacaatacgtttctggtgacagcttgcacagcagacacttttggtagaatttgcttcagtcctttttttttctttcctgctgccatgagcaggtattcacaaacttctcctcctggctagtgtgcttcatgacaaagcaaagagattcctcaatatcgatcacagcaaatgtttcactatgttggggtgatccgagccttcatggttcctactttgtggatggtgtctggaggagatctgctgagtctcatcaatgaacttcacagctgctgctttcccagttaagaggtcccaggccaaccttaccttagccaggttgcccttgacgatggtctcaaggatcctagctgccagtaagggtcccttctcagcagagatggctgagaggccctgtggcatgtgagacttactgctgggcttggagtcaaggtgtcccaggtcagcttaatttcgggaaaaactggtaagacgcttggttcaaatcacttgaaaagaaaatcacttgcatagttcacctgaagaatggatctctataatggaattaaagcacaatgctggacaaaaagtaagaaaaagcaacaaactgaaaggaaaaattgagtaaaaagaataaagaactagaactggcaacctcagccaagccagggaattacatacatcttggaattccaaagcaatgcttccttatgagggcataggaagaaataaatctaataacaaggctgggattaattcacgtggttttctcacattttggtctcaagaactttttactctaaaactaattattgaggaccccaaagagctttttatgtgggttatagttatcagtatttactttattggaaattaaaacctgtaggatgtttcagtggtcttttctagtttgaagggtttaataatttttggcttttaaagagcccataatcaattaaaatattttattttcctttaaattgtaaatgattggtgtcataatgatgctacaacttaactggcattacaatactatacaaatacgttctattgtataagtcacaataaggtacattattaactctataacatttaggggaagatagctgttatcatattatttaaagttttgcctagtttctttgtagtagacttatcttttccaggagccagagaacccgctatatcagtttcagtatctttaaatgtagagattgcagctgtgtgttgagaaagcacgtttcacttagcatgggatggggacttcgaggtactggatatgtcactggcacctcaggggaggaaaccaagatgcccctatatgattttaaacatggtttattaaagcgtgatacagaaaagtgcacaaattgtccacctacagcttggtgactgttcacaaattgaactcatctaactagcctccagaataagaaacaggcctttacacacccccaccagcctcccaatccccttttcagtcaccttctctgcagtgataaccactattctatattctgacagcatagtttcacttgttttttaacttcacataaatgggatcagacagtattgaatcctttgtgtctgcttccttcactcaatattttcctgagatttttctatattgtttattctaaatgcccattgtacgactgtaacacaatttgtttatccattttactgttcttgggcatttgggtagttctcactgtggatgctaagaagagtgttgctataaacattcaggtcttttggtaagcatatacctggctttctgttggctatttatacctagaaatagagttgctggcttataaggtatgcatatttttagttttagtagacattgcagtttgtaccaattcacccacccaccaatgtgaatatctaatattgcctgcctgtctgtacgtgtgtactggtatagcattgtggttttaatttgcattttccagtgcctaatgaaataaagcaccttttaatatg

SEQ ID NO: 335549 - DNA, 4274 bp, Homo sapiens
acgttaccaaacggtctcctacaaaggcagaaaccgtttaaatatttcagaaggattgattttcattttgcaaatataatactggttcattttctttctcttcctccatccattctactattgaacataaaacgtgtcaatagtattgtagttcagcatgtatctcaggatattaaaagggcagtgtgactcagctagaaaaggatgaactttccccaaagataaagtgacctatgcggtttggccaaaagatatatctatgccagatttgggaagcagaagtgaaagagtaaccgttactctgtgtagctggtgcggaaggagagaagtgtagatgtactgcttgtgggctctagcttgtcctcgcctgcctctgtcttgactccagctggtgtccttttctgcctgccttgctgaccaacagcagccccaaacccacagtcaatgcagaggcaacagccttccatgcacttcttcgccagctcctgttgtggtctcactcttgcaactggatgttcccagttctctatatgtaacctgtgacttttccttcacttgactacttcaggagagactctgttgggtacaagtgacacagaaagtcatctcaaactagctgaaacacaaaagcgcaggaaggcggaagggaaggcggagaccggcaagagaggggagaaggcccggggaagacgctcgggaccaagatgcggggcccgggtgcgagcagctgaacctctcggcccccaggcgtggtgacctgggtggcgacgctcgtggaggccgaggagcttctggaccggcgcttcgggggaccaagtggagaggctgctggagttgtcgcctgagtcctcccttagttcttcgcgccggcctcgcccacggctccgggtcccagccgccactgcagtctccgcagcaccgagcggggctccaccgactcgcgacctccagcctccgcctcaagggcagggagcgcggctgggtctctggaaagccatttttaaatcactgcctctgctgcccccatgtgaggtcggagtgtcctcccccgtctttgctttcaggttctttcaggttcctttgggcaaacccgcagctaagagtccagcttgtgaacttgaacctgaacttgctgaagaagctcccggcggccccctgctgtctgcggcctttgtttgagggagaggctggggtcacccggttgggccgcatttccggggccgtcacctgtcgggctgccaggccgcgcgtaccttgtcccatcgggggctctgctctgccccctgcgctgatgacgcgggtggaagggaggtatcaggggcactctggggagctgtacctggcgggcaccccccagctgctctccgtggggtacgacaccgagacctggttgggctgcaaggagaccgactgggattcccgggctggtggccggggagacgaaggcggggggtgagaggcaggaacccaggaggccccaggcccagcgctgtggggctgctgttgtcgttctgcgtggaggtctggccaaactggcttttgccccgagtgaggaattcctgctcttttttggttttggtaagaggtcgctattcacagagggggcggggttcgtcccctccaggcgagtacggggctggcgggcgcagtgctgcctttctgctctgtctcttgatcccgcttaggatctttgtggctcctctgagtcttcttagagaggccgtgaaagatgggaaaggcaggttgctgaaacgctgctgctcggggctggcagagaccctggtatagggaaggcgcaccactgtgggtcagatcagctgacagtgggggttttaggtgatggggtaaccttacagttcggatctcttagaacccagaagcaggtaggcgatcgctgcttcatcacacttcacagggagtcctggatctttcctgtccgtaacccatggacgccatgattcagtatggcggaggtccggggcttaagttcctgttcatgcttcctaatcattcatggatccatcacaatgtgctctgaagggcctctcttgctgggattgagaaggatacattttttgagcaggtttttatactcaatggacatgtagaagggaatatattctactcagttcccctcctgcagctccttgaaattctgtccatcaaaagcagggatctgctgaccagaggtgactgccacagaaggtatccagtttgtaaaagctgaatttgttgctgaagccagaatttgcaatcttgatgtttgtgttaacatccaagagcgtgttttctgcctttaaatctctgtggacaatacgtttctggtgacagcttgcacagcagacacttttggtagaatttgcttcagtcctttttttttctttcctgctgccatgagcaggtattcacaaacttctcctcctggctagtgtgcttcatgacaaagcaaagagattcctcaatatcgatcacagcaaatgtttcactatgttggggtgatccgagccttcatggttcctactttgtggatggtgtctggaggagatctgctgagtctcatcaatgaacttcacagctgctgctttcccagttaagaggtcccaggccaaccttaccttagccaggttgcccttgacgatggtctcaaggatcctagctgccagtaagggtcccttctcagcagagatggctgagaggccctgtggcatgtgagacttactgctgggcttggagtcaaggtgtcccaggtcagcttaatttcgggaaaaactggtaagacgcttggttcaaatcacttgaaaagaaaatcacttgcatagttcacctgaagaatggatctctataatggaattaaagcacaatgctggacaaaaagtaagaaaaagcaacaaactgaaaggaaaaattgagtaaaaagaataaagaactagaactggcaacctcagccaagccagggaattacatacatcttggaattccaaagcaatgcttccttatgagggcataggaagaaataaatctaataacaaggctgggattaattcacgtggttttctcacattttggtctcaagaactttttactctaaaactaattattgaggaccccaaagagctttttatgtgggttatagttatcagtatttactttattggaaattaaaacctgtaggatgtttcagtggtcttttctagtttgaagggtttaataatttttggcttttaaagagcccataatcaattaaaatattttattttcctttaaattgtaaatgattggtgtcataatgatgctacaacttaactggcattacaatactatacaaatacgttctattgtataagtcacaataaggtacattattaactctataacatttaggggaagatagctgttatcatattatttaaagttttgcctagtttctttgtagtagacttatcttttccaggagccagagaacccgctatatcagtttcagtatctttaaatgtagagattgcagctgtgtgttgagaaagcacgtttcacttagcatgggatggggacttcgaggtactggatatgtcactggcacctcaggggaggaaaccaagatgcccctatatgattttaaacatggtttattaaagcgtgatacagaaaagtgcacaaattgtccacctacagcttggtgactgttcacaaattgaactcatctaactagcctccagaataagaaacaggcctttacacacccccaccagcctcccaatccccttttcagtcaccttctctgcagtgataaccactattctatattctgacagcatagtttcacttgttttttaacttcacataaatgggatcagacagtattgaatcctttgtgtctgcttccttcactcaatattttcctgagatttttctatattgtttattctaaatgcccattgtacgactgtaacacaatttgtttatccattttactgttcttgggcatttgggtagttctcactgtggatgctaagaagagtgttgctataaacattcaggtcttttggtaagcatatacctggctttctgttggctatttatacctagaaatagagttgctggcttataaggtatgcatatttttagttttagtagacattgcagtttgtaccaattcacccacccaccaatgtgaatatctaatattgcctgcctgtctgtacgtgtgtactggtatagcattgtggttttaatttgcattttccagtgcctaatgaaataaagcaccttttaatatg

SEQ ID NO: 335550 - DNA, 3838 bp, Homo sapiens
acgttaccaaacggtctcctacaaaggcagaaaccgtttaaatatttcagaaggattgattttcattttgcaaatataatactggttcattttctttctcttcctccatccattctactattgaacataaaacgtgtcaatagtattgtagttcagcatgtatctcaggatattaaaagggcagtgtgactcagctagaaaaggatgaactttccccaaagataaagtgacctatgcgactctgttgggtacaagtgacacagaaagtcatctcaaactagctgaaacacaaaagcgcaggaaggcggaagggaaggcggagaccggcaagagaggggagaaggccgaggagcttctggaccggcgcttcgggggaccaagtggagaggctgctggagttgtcgcctgagtcctcccttagttcttcgcgccggcctcgcccacggctccgggtcccagccgccactgcagtctccgcagcaccgagcggggctccaccgactcgcgacctccagcctccgcctcaagggcagggagcgcggctgggtctctggaaagccatttttaaatcactgcctctgctgcccccatgtgaggtcggagtgtcctcccccgtctttgctttcaggttctttcaggttcctttgggcaaacccgcagctaagagtccagcttgtgaacttgaacctgaacttgctgaagaagctcccggcggccccctgctgtctgcggcctttgtttgagggagaggctggggtcacccggttgggccgcatttccggggccgtcacctgtcgggctgccaggccgcgcgtaccttgtcccatcgggggctctgctctgccccctgcgctgatgacgcgggtggaagggaggtatcaggggcactctggggagctgtacctggcgggcaccccccagctgctctccgtggggtacgacaccgagacctggttgggctgcaaggagaccgactgggattcccgggctggtggccggggagacgaaggcggggggtgagaggcaggaacccaggaggccccaggcccagcgctgtggggctgctgttgtcgttctgcgtggaggtctggccaaactggcttttgccccgagtgaggaattcctgctcttttttggttttggtaagaggtcgctattcacagagggggcggggttcgtcccctccaggcgagtacggggctggcgggcgcagtgctgcctttctgctctgtctcttgatcccgcttaggatctttgtggctcctctgagtcttcttagagaggccgtgaaagatgggaaaggcaggttgctgaaacgctgctgctcggggctggcagagaccctggtatagggaaggcgcaccactgtgggtcagatcagctgacagtgggggttttaggtgatggggtaaccttacagttcggatctcttagaacccagaagcaggtaggcgatcgctgcttcatcacacttcacagggagtcctggatctttcctgtccgtaacccatggacgccatgattcagtatggcggaggtccggggcttaagttcctgttcatgcttcctaatcattcatggatccatcacaatgtgctctgaagggcctctcttgctgggattgagaaggatacattttttgagcaggtttttatactcaatggacatgtagaagggaatatattctactcagttcccctcctgcagctccttgaaattctgtccatcaaaagcagggatctgctgaccagaggtgactgccacagaaggtatccagtttgtaaaagctgaatttgttgctgaagccagaatttgcaatcttgatgtttgtgttaacatccaagagcgtgttttctgcctttaaatctctgtggacaatacgtttctggtgacagcttgcacagcagacacttttggtagaatttgcttcagtcctttttttttctttcctgctgccatgagcaggtattcacaaacttctcctcctggctagtgtgcttcatgacaaagcaaagagattcctcaatatcgatcacagcaaatgtttcactatgttggggtgatccgagccttcatggttcctactttgtggatggtgtctggaggagatctgctgagtctcatcaatgaacttcacagctgctgctttcccagttaagaggtcccaggccaaccttaccttagccaggttgcccttgacgatggtctcaaggatcctagctgccagtaagggtcccttctcagcagagatggctgagaggccctgtggcatgtgagacttactgctgggcttggagtcaaggtgtcccaggtcagcttaatttcgggaaaaactggtaagacgcttggttcaaatcacttgaaaagaaaatcacttgcatagttcacctgaagaatggatctctataatggaattaaagcacaatgctggacaaaaagtaagaaaaagcaacaaactgaaaggaaaaattgagtaaaaagaataaagaactagaactggcaacctcagccaagccagggaattacatacatcttggaattccaaagcaatgcttccttatgagggcataggaagaaataaatctaataacaaggctgggattaattcacgtggttttctcacattttggtctcaagaactttttactctaaaactaattattgaggaccccaaagagctttttatgtgggttatagttatcagtatttactttattggaaattaaaacctgtaggatgtttcagtggtcttttctagtttgaagggtttaataatttttggcttttaaagagcccataatcaattaaaatattttattttcctttaaattgtaaatgattggtgtcataatgatgctacaacttaactggcattacaatactatacaaatacgttctattgtataagtcacaataaggtacattattaactctataacatttaggggaagatagctgttatcatattatttaaagttttgcctagtttctttgtagtagacttatcttttccaggagccagagaacccgctatatcagtttcagtatctttaaatgtagagattgcagctgtgtgttgagaaagcacgtttcacttagcatgggatggggacttcgaggtactggatatgtcactggcacctcaggggaggaaaccaagatgcccctatatgattttaaacatggtttattaaagcgtgatacagaaaagtgcacaaattgtccacctacagcttggtgactgttcacaaattgaactcatctaactagcctccagaataagaaacaggcctttacacacccccaccagcctcccaatccccttttcagtcaccttctctgcagtgataaccactattctatattctgacagcatagtttcacttgttttttaacttcacataaatgggatcagacagtattgaatcctttgtgtctgcttccttcactcaatattttcctgagatttttctatattgtttattctaaatgcccattgtacgactgtaacacaatttgtttatccattttactgttcttgggcatttgggtagttctcactgtggatgctaagaagagtgttgctataaacattcaggtcttttggtaagcatatacctggctttctgttggctatttatacctagaaatagagttgctggcttataaggtatgcatatttttagttttagtagacattgcagtttgtaccaattcacccacccaccaatgtgaatatctaatattgcctgcctgtctgtacgtgtgtactggtatagcattgtggttttaatttgcattttccagtgcctaatgaaataaagcaccttttaatatg

SEQ ID NO: 335551 - DNA, 1095 bp, Homo sapiens
gtcacagaaggtcattcaattatcaatggttcttccccagctactcaacaagagaatgagaacctctgatcactcacttcagtgcctatgccatcaggtcctaaataatgatgctacaacttaactggcattacaatactatacaaatacgttctattgtataagtcacaataaggtacattattaactctataacatttaggggaagatagctgttatcatattatttaaagttttgcctagtttctttgtagtagacttatcttttccaggagccagagaacccgctatatcagtttcagtatctttaaatgtagagattgcagctgtgtgttgagaaagcacgtttcacttagcatgggatggggacttcgaggtactggatatgtcactggcacctcaggggaggaaaccaagatgcccctatatgattttaaacatggtttattaaagcgtgatacagaaaagtgcacaaattgtccacctacagcttggtgactgttcacaaattgaactcatctaactagcctccagaataagaaacaggcctttacacacccccaccagcctcccaatccccttttcagtcaccttctctgcagtgataaccactattctatattctgacagcatagtttcacttgttttttaacttcacataaatgggatcagacagtattgaatcctttgtgtctgcttccttcactcaatattttcctgagatttttctatattgtttattctaaatgcccattgtacgactgtaacacaatttgtttatccattttactgttcttgggcatttgggtagttctcactgtggatgctaagaagagtgttgctataaacattcaggtcttttggtaagcatatacctggctttctgttggctatttatacctagaaatagagttgctggcttataaggtatgcatatttttagttttagtagacattgcagtttgtaccaattcacccacccaccaatgtgaatatctaatattgcctgcctgtctgtacgtgtgtactggtatagcattgtggttttaatttgcattttccagtgcctaatgaaataaagcaccttttaatatg

SEQ ID NO: 335552 - DNA, 1499 bp, Homo sapiens
tagttgtagcagggttagttgcaccttaggttgaagcaagattttgctactggaaattaaatatggtaaaaggaggtgctctcggccgccaatttgacaagggatggaccgtgctggttttgtatcaactggcctaagctagaacttcatttccattatgtctccatatcagactctgttgggtacaagtgacacagaaagtcatctcaaactagctgaaacacaaaagcgcaggaaggcggaagggaaggcggagaccggcaagagaggggagaaggcccggggaagacgctcgggaccaagatgcggggcccgggtgcgagcagctgaacctctcggcccccaggcgtggtgacctgggtggcgacgctcgtggaggccgaggagcttctggaccggcgcttcgggggaccaagtggagaggctgctggagttgtcgcctgagtcctcccttagttcttcgcgccggcctcgcccacggctccgggtcccagccgccactgcagtctccgcagcaccgagcggggctccaccgactcgcgacctccagcctccgcctcaagggcagggagcgcggctgggtctctggaaagccatttttaaatcactgcctctgctgcccccatgtgaggtcggagtgtcctcccccgtctttgctttcaggttctttcaggttcctttgggcaaacccgcagctaagagtccagcttgtgaacttgaacctgaacttgctgaagaagctcccggcggccccctgctgtctgcggcctttgtttgagggagaggctggggtcacccggttgggccgcatttccggggccgtcacctgtcgggctgccaggccgcgcgtaccttgtcccatcgggggctctgctctgccccctgcgctgatgacgcgggtggaagggaggtatcaggggcactctggggagctgtacctggcgggcaccccccagctgctctccgtggggtacgacaccgagacctggttgggctgcaaggagaccgactgggattcccgggctggtggccggggagacgaaggcggggggtgagaggcaggaacccaggaggccccaggcccagcgctgtggggctgctgttgtcgttctgcgtggaggtctggccaaactggcttttgccccgagtgaggaattcctgctcttttttggttttggttgctaactttggaggaagccagctgccatgtcacaaaaagattcaggaagccatgtggagaggcccacatcatgaggaactgaggtctttgccaattaccagcaaggaaatgaggcctcctgccaacagccacgtgagtatcctaccttggaaatggaccctctaacttcaatcagccttcaaataactgcagccccagttgatggcttgactgcaaccttaggagaaaccctgagccaaaaacattgaggaaaaacacccccagattcctatcagaaattgtgtaagataataaatgtttgttgttttaagctgctaaa

SEQ ID NO: 335553 - DNA, 134 bp, Homo sapiens
gggagctgctctgggaaaatgggagttatttttttcagtggacttagtagccttggaagggacctgcagtgagagaggaaggtccttttgcccagccagacacatgagtgggggcatcatcacatctttgtgtc

SEQ ID NO: 335554 - DNA, 134 bp, Homo sapiens
acgctcgctctctctctctctctctctctctcactcactctctttgcccagaattggtatgtcctaggaaaaggccttgttttaagagtgcttgattttctgcccttttactggttcaccccttcctcttcatc

SEQ ID NO: 335555 - DNA, 347 bp, Homo sapiens
atctacacagactgggccaatcattacctagccaaatccggccacaagcgtctcatcagggatctccagcaagatgtgacagatggcgtcctcctggcccagattatccaggttgtggcaaatgaaaagattgaagacatcaatggctgtccgaagaacagatcccaaatgattgaaaacatagatgcctgcttgaatttcctggcagctaagggaataaacatccaggggctgtctgcagaagagatcaggaatggaaacctcaaggccattctaggcctcttcttcagcctctcccgatacaagcagcagcagcagcagccccagaagcagcacctctcctcacc

SEQ ID NO: 335556 - DNA, 550 bp, Homo sapiens
aatcagctgggcatagtggcatgggcctgtagtcgcagctcctcaagaggctgaggtgagaggatcacttgagtgcaagagttcaaggctgcagtgagctatgatcatgccactatactgtagcctaggtgacagagtgaaatcccctctcaaattgattaattcattaattaatttaaaaaatcaggccaggaaggaaactcagacatttgaaaaaagcttctaacataacagactagagtaaaaacagacaagaggaactaagagaaagaaaacagtgtgagagaacaagacaaaatcttcaaaagttataataaagatcattaaagagattaggagaaaataatgcatccataatacaagaataggaagctataagaaagaacattttgggaaaattaaaaatttagtagaagtgttagaaaaccaatcagaaatattctcccataaagctaaatttaataaacgaagagacgagagagagagagagagagaaaggaaaaaaggttaaaccaggaggtctagcaaccacctaacaggaatcccagga

SEQ ID NO: 335557 - DNA, 356 bp, Homo sapiens
agaccatttgggggctatagcacagcccaggcaaaaatgtcaagagcttaagcagggaggtggccaagagggagagccactgtgaacacagaatccgacaggcttggtgaaggagtgggcagagtcagacagggtttcctgctaggtggctgggaagatgacagtggtgatgctcttacagaatcaggaccctgggaagaggaccagcctgggatgggggccttcttcagcttggggcatatggcatggcccagtgcagacccttgtatgtccctcactgctgttccttctcttcagctccaacaagccccatagagcaccctgcaccagtcaggcactcagtgaatacctctgag

SEQ ID NO: 335558 - DNA, 326 bp, Homo sapiens
ttgaattagtcagcaccactaactcattccaaagcaaggaccacctttattttctcatgtttaaggccagggctgaccactctcccttctctggacccagccactatgcctctctaacccaactcgttctctgcttttgtggttttagtctttaaaagaacttggcttgggaaagagcaataatgatccgaagctaaccacttagctcattagtatgtcatctagacaggcaaaatcaattccaacagcatcgagtttgggtattccctccccaaaaggtctgcgctattaatagcaagaaagtttcccaggctttggtttatttg

SEQ ID NO: 335559 - DNA, 248 bp, Homo sapiens
tactaccccaccattccctcccagttcattctccacattgcagtcagaatcaccttttaagaaaagcacacttgcttgttctttttgtaaaaatcttttattgcccttaaaatgaagcacagacattacagtggccaactcctatgtctttctacttttccacccctccgctttgctctttcattgaagatgttctttgaggtaagagttctgacttatcttgggtacctcacacatgctttttcttt

SEQ ID NO: 335560 - DNA, 322 bp, Homo sapiens
gattgcttgagctcaggagttcaaggctgcagtgagctgtgtatggcaccactgcactccagcctgggtgacggagtgagaccctgtctaaaaaaaaaggacagtgacataagcaaaggtatagggttttcaaagtctgtgttttcttaggtaaaggtgaatggtctgaatggtctggatggtttgagcacagagtgtgtgatggggaagagatgaggccaaaaagttaagtcaggaccaggttatgaatagccttgaagtccacgctgaggcaatgggaacttgattcgataaaacctggggacttcaggggtggggggca

SEQ ID NO: 335561 - DNA, 170 bp, Homo sapiens
attttctttaggaagtcacccttccctactcttggtccctatggtcttcatggttgcaccacctgcatctacagatgaaatcatgtgatcaagggaactgccacatttttgcacccacaacaattggttcatagacggggacatcacccagtcagatcctatgaaacacc

SEQ ID NO: 335562 - DNA, 483 bp, Homo sapiens
tctataaggcttaccctgaactcctaaatcctttaagtgttgaggaatgtgagaaatgtgtatgattttaagtatttgtctgaacttcataaattagggaaattacgtagtgacacggaaagccagatatacatgtgtgacttgtggattatccatgtaattgtttccttaaatcggtgcatacaaaaataagagtcagattttgaatgggcagaaacacacaaaaaacctgtattgcacctgttgttgggaagatttggctggttacaataaggctagatgggctagatgaggatacacaacaatggctcaccccaatttggggaagtcctttttggcctttatgcaatggtcttggggtctggaacccatttcctgctaggcaactgactcatcctgtgacttagggaagcaagccattgcccatctctgggtttcagtttccagagggtgttagattggaaggtttcttccagatttgaa

SEQ ID NO: 335563 - DNA, 220 bp, Homo sapiens
tagctgcaagcctcttagaggactgggtggtgtacctggtgctgctggcaacaccctgcaaatacttctgctccttccccctggagtggtgcaggggaaaggaattcgggaaaagttgatggaacaagggatgggggataggggaagaagaagagggggctcctggagataaacagactcaggcagggagagcagtttattctgtaaagtccctccctca

SEQ ID NO: 335564 - DNA, 791 bp, Homo sapiens
  misc_feature (28)..(28): n is a, c, g, or t
ctagttgccaggtgcccaagaacctggnaagcccaccccttgcatcatcgtgccctggatactcataggcagaaggaacttgccttgtctgaaatgagactttggacttggacttttgtgttaatgctggaatgagtcgagactttggggagctgttgggaaggcatgattgcattttgaaataaaggaatggaatctgagctaacctaccatgtttgtactggaagtcctgccaacagcatttaaggaggcctgcctctcctgcagtcaggtgtgaccaaaggagtatgagtgaaagtaatgtgtgcctctacaaaacctgacgcatatgaagaaacaaaccatccatccacacctgatccttgtcttctccatctgccagctgaatggagagaaacaaagaactcctgctgacccacactggactatgacatgagcaagaagcacacttttattatgttaagccactaatattttgggattatttgttagagcaatggaatctatcatgatgaatacattttttaacattctcatatcttttctttttttttggctaaaattgatccatattctgcgtacttgcttttgtcactgaacatcatgtaaatttttccaaatctattagtatagaggctactcattctttttaataggggtgtaataatcctatatgtattgcagtatatatttaatatgttattatattcaataattatgacagatgagtatttctttgtttttagattcttacttctataaatgatgctgcaataaatattcttatacat

SEQ ID NO: 335565 - DNA, 615 bp, Homo sapiens
catgacaaaatgtctggcttgttagctacctgcatggcagggctggatcttctgtcacctgcatatcatgctgccaggctcgggcgagggtgggggctaacactggagagtgactgagattactgagctcttttactaatacctgatgctgctgactagtcactgcatgaatccacactgggctcttagacttatacatctgacagatctttggctatactcaaagaactcctgctgacccacactggactatgacatgagcaagaagcacacttttattatgttaagccactaatattttgggattatttgttagagcaatggaatctatcatgatgaatacattttttaacattctcatatcttttctttttttttggctaaaattgatccatattctgcgtacttgcttttgtcactgaacatcatgtaaatttttccaaatctattagtatagaggctactcattctttttaataggggtgtaataatcctatatgtattgcagtatatatttaatatgttattatattcaataattatgacagatgagtatttctttgtttttagattcttacttctataaatgatgctgcaataaatattcttatacat

SEQ ID NO: 335566 - DNA, 111 bp, Homo sapiens
ccatcctcaaattcatatgttgaaactctaactcctaatgtgatagcatgtggagatggggcctttgggaggtaggcagggttagatgaggtcataagggtagggtcccca

SEQ ID NO: 335567 - DNA, 338 bp, Homo sapiens
catgaggaacaggaaactccctctggcttccagaaaggaaaactaagaggggaatgaggcacagaggccgaggcaggaaggcgtgaaaagatggaacaggcgattccggagcttagtagtaggtgagtaggtgagatgatccaactcccttgggaaaactgctggcattcaggttccaggcaagaactaggccaggggagactgggtgcggtggctcacgcctgtaatcccagcactttgggaggccgaggcaggtggatcactcgaggacaggagttcgagaccagcctgggcaacatggtgaaaccccatctctactaaaaatacaaaaattagcc

SEQ ID NO: 335568 - DNA, 662 bp, Homo sapiens
ggattaaacacaaaccgtccactgtccagttagtgtccagatagtttagaatgctctagaactgcccagatatatcccctgctcttgacctgaagtagcatttagttaccaagccacagcccactccacacagggcttggagcgaaggactgaagccagggagtgctctggcccttctgagggctgcactgcagcctgccttctctcccttgctcattgcgctgacaagggtgcctaggcccgggaaggatggctcagccagcggggtacagacttccttcctgggaagtcatttctgtaccagctcccctaaatgttgtcttgtgtgtcttttcccgcactaggcattcagtcttgactcttggattacttttgcccctgaatgtcctttggatgtcctcaacaaataaggacaaatatttattgtcatgcagtatttgtttatacgcttcatgtcatttacttcctacaaaagccaaagaggctgttactattattcctatttatacatcaggaaaatgaagctaatgaactcccaaatctaatagcaagtaagtgacatgaagctgggacagcagggaaaagcctaaagtgacaggacaaacccagttgttcactttctgcaccacatttacccaccgcaattccgtatttgttccggg

SEQ ID NO: 335569 - DNA, 105 bp, Homo sapiens
catgtataaaaggtcaaccaagcctgattcttttaacaacaggtgaagtggtatttgacccccttcaagtgcagggttttcctttcaaattaagtttagtcacca

SEQ ID NO: 335570 - DNA, 352 bp, Homo sapiens
catgcccagccatatcacttctttttctactccagcctttactcctattccaatcatttattgtcagcttcacttcctctacagtctcttaatcttttggggactcctcagcagtttgtgaatatgtctgcatttatcctggtgacactggatcttctttagcaactgcctcctctcttcctttcattttacagtcaagtttcttgaaataataatttatccttggaattgtgtgaattcatacttctcattcactttccaagctatgattatcagcttctttcttcctaaactgcttaggcaaagagcacacatggacactttcctaaaccttagtccattgggcattttg

SEQ ID NO: 335571 - DNA, 452 bp, Homo sapiens
ccacttaggaaaaagtgacagctggctggccctaagggaaggacgtgttctgcatcaaaatatgtcccacatggctgtgtggagcatgtggatatgtcccataggtgtgttcaagtgtgactcaacactcaagtgtggagtgttgtttgcccaagtagtctttaggagtgtgtatctcaggtataggagtgcatgtcctgggtaacagtatatctgagagtgcatctcagcatgccccatatgtatgtgggtgcacaattgtgccttatatgcatccatgtgcattcacacatgcagatgcgtacaagtatccctcatgtgtgttcctgtgtgtgtatcctgcctgtgctgagaatgtgcaagtgtgaatattcctcccatgtttaactgaatgtgtgttccaagtgtgttaatgtgaaaatatgttccagctgtgtgtcccatgtgtgtcc

SEQ ID NO: 335572 - DNA, 715 bp, Homo sapiens
gggatggctggctgtcccttttccacggagtggcgcttgtactctgtcccagtcagttaaacacatttgcatgggtctgtttctggttccctggtctgtcccattggtctccatgcccatgcccaccaatcccacactgttggtcactggagatgtctgagaaggctggacattggggatacgtattccttccccctcaatcttctttttcaaggttgttttagctattctagagcctgtgccttcccatataagttttagaattagctcatttatatctataaaaatccttgctgggattttgatagggattttactaaacccaaaggtccatttgggaagagtaaccctctgattttaaagtctcacaaattcgcagtgtgctgtgaccatcgtgtagtgggacagagacctctgtttgcagtgtagacagaagcaggtgacgccctgatcctggcatgcctcccgagtggcagtgagactggctggagccctgcagtgactcactcaagggttctgatgatcgtttccccttcagacatgcagcccagatctgcaatggcttcctcacccttcagacacacagtccagatctgcgatggcttcctcacccttcagacacacagtccaggccactgagatgccttcctcacccttcagacacacagtccagatctgcgataccttccacacccttcagacacacagtccagat

SEQ ID NO: 335573 - DNA, 173 bp, Homo sapiens
ggtagtgaaagagaaaaacattgagtagttacatgagatgatgtcacattatcagtctgaagagttatgaagaatgtacatggttctttaagagtataggtaaaggggggtttcacccagtcttgtgttaggaaggcttccctgaggaggtgatgcataagccgagatctgaa

SEQ ID NO: 335574 - DNA, 418 bp, Homo sapiens
gtggaggttgcagtgagccaagattgcgccactgcactccagcctcggcaacagagcaagactctgtctcaaaaataaataaacaaataaataaggcaccctgggcattaagccacctctgttctgtgattgcatacctccttgggatcggcttgtgacaggcacaaggccaggtgctggggcttagccaggtagatgagcctctttcttcatgtgactcacagtcaaatgggaatagacatcaagtaatcagagcaattttttaaagttttaaaataaatcacagaaaagtaaatgtgatgaggaaagttttaaaataaatcacagaaaagtaaatgtggtgatgaggaaatacagactgttcagtctgggtggtttagggaaagcctttctaagtaacatgatgtttacattaaaa

SEQ ID NO: 335575 - DNA, 293 bp, Homo sapiens
aggggaccagcatcaaggagacttcagcgaagtgaagacagaggcttgggccctcagtgctggctgagaaggagggagggatccctgactgcctcatctctcaaccaagggaaaactgaagaaacctttttgtgggggccttggatatataaccctcccctctgtgaaggagttcctttctttcctctcctctacctttcactccagcttctattcagttccaggcttggggttaggtctcttcatcctcgttctaatggccttaggaaaaaaatgtatgatgcaatcctggg

SEQ ID NO: 335576 - DNA, 180 bp, Homo sapiens
gaggaggactcagatatgtaacaaccggtttttttctctttctagcccagagtttcttactatgatctggattcgtggggaggaaggctgggtagagctagactcatcatctgctttggtgttcttgggagcttatctcttttcctgccaggtagatagtttttcctttctttccttccc

SEQ ID NO: 335577 - DNA, 458 bp, Homo sapiens
gatcatgaaatgaacaaaaaggaagactcagaaatatttctactaattattattagtattgaaattgttggaatcatgatcaatgtgattttgagcccaaaacaaaacaaaaacaggtaattacacttcatactgagtgaagaattaatgctattaagaagtaagtagctacaggaaaatctgaatgttaataaaaaatgccctaaagggaattggttcattccttctcaatgatttttactgctgagtatccctttacaaatatcttcatttccccctttcttcctccaggttctaaaagagttttctaaagaaaaaaaaaagttatataataaacctcttagacaaaaattggttgtacttgccataagcagatcccaagtggtcatgggaaccactaaaataactcctaccatttctagaatagaattctcaaaagaagcacctctagggaattc

SEQ ID NO: 335578 - DNA, 135 bp, Homo sapiens
ctcctgcgtgattccatcgagcttaggatggtcgtgtagtcgggacccatgtcaggagcatggctcagccccagcttgtgtgcctcagtcaggcaggcctcacctcggggccatctcctgcgtgactccatcaag

SEQ ID NO: 335579 - DNA, 441 bp, Homo sapiens
cagataaaagaaaggatatagaagattagaataatacaataaagaattgtgaccacaccagaatgagaggtcatatacctttcaaacaccccaagaacattgattatattgctactttttacttgggcatgtattttttttttttttttagtttccaaatatatgaattttatgacttttaacaaatatctttttatcgtgaacttcaaatttaattgcattgatgtcggaaaacgtagtattactcattcttggaactttgttgtaacttgctttttaacctcaaatataaggatatcgtttcaagaccattggaaatagctgcagtgtgataaatgtaagggtaagaagagagtgttacaggagtgtttaccatcagtttgcgcatgtccaagtcatatgcctggtaggaaaactttaaatttgggatcacacattttt

SEQ ID NO: 335580 - DNA, 779 bp, Homo sapiens
ggagaaaagcatgacacaggcagaatcatgtttagtgatgctcagtggcaccaactttggagttctagagatagggtggccagagcagtggcagagggagtaaagagaccacactgagtcactgactacttcatgcagacaccaggattggggtctaactggaaagggggagaaggcgtccaagacaatgttaaggttctgagtgtgaagggctgggtgtgtcatctgagatctggatgtggaaggagatgctgttggtgggaagtggaaggcttggtttgcacatgctaagtgtgaggtgtgaatttcccaggcaaaaatgctcaggaggcatcaaaaccagtgtctgcagttcaggggtgaggtcctggctggagacccagatgtagcaatgtcggcacagagatgaggcctggggctaaggagatgggtgacactaccaagggagaatgctcaaggcaagaggaagtgagtctcactgatcaggtatgggagctgccatcacacctgtagcaggtagactgctgggcagcgtacccttcctctccacttgtctgggtctcgcccaccctctgggcccggccccacccactccgggaagccctctctagctattccatcccccaggcatccttcctttgctgtgagcttctcagctctggccatccccaccttagcagtgggtcttgtgttgccaccttggtgtagtccccaagcaccttgagggcaggatgacagttaacccccatgggacactgcattttctgacacagagcacc

SEQ ID NO: 335581 - DNA, 263 bp, Homo sapiens
tgggtcatcagcaggcatggtcgggtgtcatggctgtgccccgcagcacgcggtgtctgcctgcttggaggggcctccgcagtggggcactgcgtggccctgtaggatgcaggcaggctttggcaaggctggccctgctctaggtgggtgtctgaacctgttccctccccaggcagagcccgcaaggcgagcacacgctccttcatgacggggccgggtccagcgtccgctgccgctgggctctggggtctgtccggggtgcc

SEQ ID NO: 335582 - DNA, 138 bp, Homo sapiens
aataattattgatttccaaaatggacttcttaaagaggtgaggaatatctctgagtatttctgagttttttaaaagtccaaaaacttaagaaaataatacttaatgttcagcatgaagttgagattgggctgcaaaat

SEQ ID NO: 335583 - DNA, 405 bp, Homo sapiens
cctttgacagcaatacatacgcctagtacagctgagccatacaagtttcctttctctacaaaggactctcagcatgtcagttctgtagcgcaaacccaaaaacaatatgatacatcttctaaaactcactcaaattctcagcaaggaacgtcatccatgctcgaagacgaccttcagctcagtgacagtgaggacagtgacagtgaacaaaccccagagaagcctccctcctcatctgcacctccaagtgctccacagtcccttccagaaccagtggcatcagcacattccagcagtgcagagtcagaaagcaccagtgactcagacagttcctcagactcagagagcgagagcagttcaagtgacagcgaagaaaatgagcccctagaaaccccagctccggag

SEQ ID NO: 335584 - DNA, 372 bp, Homo sapiens
cctttgacagcaatacatacgcctagtacagctgagccatacaagtttcctttctctacaaaggactctcagcatgtcagttctgtagcgcaaacccaaaaacaatatgatacatcttctaaaactcactcaaattctcagcaaggaacgtcatccatgctcgaagacgaccttcagctcagtgacagtgaggacagtgacagtgaacaaaccccagagaagcctccctcctcatctgcacctccaagtgctccacagtcccttccagaaccagtggcatcagcacattccagcagtgcagagtcagaaagcaccagtgacgttcctcatcccagtgacgttcctcatcccagtgacgttcctcatccacag

SEQ ID NO: 335585 - DNA, 388 bp, Homo sapiens
acatcagctccccaccagatctccagctgcacggctctcaaacaggaacatcagctccccacaggatctccagctgcacggctctcaaacaggaacatcagctccccaccagatctccagctgcacggctctcaaacaggaacatcagctccccacaggatctccagctgcacggctctcaaacagtgaacaaaccccagagaagcctccctcctcatctgcacctccaagtgctccacagtcccttccagaaccagtggcatcagcacattccagcagtgcagagtcagaaagcaccagtgactcagacagttcctcagactcagagagcgagagcagttcaagtgacagcgaagaaaatgagcccctagaaaccccagctccggag

SEQ ID NO: 335586 - DNA, 383 bp, Homo sapiens
tctcaacaccattgcagctttggtaagcaaaatttcctgcagggagtatcagtactgtttcattgtcaattcagaaaaaatgataacacgttttaatatcagaaactttttggtgatgtgggaagatggattccaaagttcatctgtctgagagaatgtagacctacatgtctacatttgggagtaaaggagatttaaaattaggtaaaatgtcctttgggtgtatgcagaggtctattagtcctttttcttctcccctccaagggcactgactagtgattttcttcgggtgcaacatcttagttcatgttgaatgactgttatgtactgggtgctgtgatataaatgagtagatgggcaaatgagtgaattcagtgcccagc

SEQ ID NO: 335587 - DNA, 350 bp, Homo sapiens
cttgggtatggggaggatgctaaaaatataacagcagctcctcacagaaactgtattcagagactctctcaaatctccaaaaacctaatgtggataaatttcctaactcacttctaagccccttcttggaaactgtaatgcggtttatctaactctctttggaatatagcatctctcatcttcattcctcagccgaaaacaaggcaagaagaatcctatttgaataccccgttggaatatgaaagtactatcatggcagcacaagttaagaacactgttctgtagatccgcatcaggcccggctccttgaggcaggccttcactgagctccctctgttcaggtctgtgct

SEQ ID NO: 335588 - DNA, 221 bp, Homo sapiens
atgggatcctcagaacttagagagagaatatgtatatgggatcctcagaacttagagagagaatatgtatatgggatcctcagaacttacagagagtatatgtatatgggatcctcagaacttacagagaaccctgcaaatcaatgggaaaggaatgatgcctgcactaggagaggagcgcgtgacgaccgttcctggaaaacgagccaaaaacggccaga

SEQ ID NO: 335589 - DNA, 205 bp, Homo sapiens
tcatacaagatttggtatggaatgtgttttcacttctcttgggtatatacctaggagcagaattacagggtcatatatggtaatgcatgtttttctccaagaatatgatatatattaactatagttttattaatatatagtgattctatgtttaattatttgaggaaatgccaaactgctttccacagtggctgtaccattttac

SEQ ID NO: 335590 - DNA, 385 bp, Homo sapiens
aaaaaaaaaaagaggaaaagaaaagaaaatgtgttgtcaagggcctggagatctctgaaatacaaaagcaggtggagtgtgagtgcagagaggcatgaaagggatgggaagatgtgagcttgtggtcagcaaatagcttcctagaggtcaagagttctaacgtggaacagctctatgtggtaacgatgcccaggctgtgggtgtaggggactgaaatgcaggggaggcaaaggtcactggagttgaagtcaagaagtagtactacagttcccggcttgtggtttggttttccacactggtggtcaaggtacccaggatagtggcagaatcaagggagagaaagactgaacaggtaaatttttttcttcagtaccaaacattttat

SEQ ID NO: 335591 - DNA, 519 bp, Homo sapiens
aaccctagccctaaaccctaatcccgactctaacattcaccataacctggagcatcaataaccccaagccaaatcccacactctatctccagatctaactccagtcctacacctgacctcaaacctcagtcccaactcccaactctgacaccatcactcatgaggagcttgaccacacggcagaagctgaagtgtgttcacatgaacctgtttcctctccttcctgggcaaagagctgaactacatttcccagcctcccttgcagctgggcgtggccacggcctgagttatggacactagaatgtgggcagaagtgatggtcagtccctccaggcttagcccccgaaaacctcccatgtgagcctcgaaactctcttgccctgttcaccagcagcaaacccagccacaatgccaaagctccctggcacagtggagtcacaagatggaatggccacatggcagaagaaagccacccaccaactaggaacactctcgtaaaactttgcctgagaggccagg

SEQ ID NO: 335592 - DNA, 143 bp, Homo sapiens
tgccaggaaaaggttaatgtcaggaggtaaatgaggcaggggaaagggaaagaaagcaatggacacggaggctattttagattagaaaagccttccctgaggagccagcaactgaggtaagagaaacaaaacaatccatgtaa

SEQ ID NO: 335593 - DNA, 376 bp, Homo sapiens
agcctgccctgatctggtgccaacctaccttgccagcctgggtccctactgtgtactttatctcctcaactccagccacatcctatggctcgtcttatcccagacctgctgtgcattttcatggccgaccaccttggctcatagacaagcttgttcctagcacttacagtgttgtgggggaggaggattaatcacataatcccgtaaataaatatatcctaacaaactctaagttcagcgtatctttaggaactcaaagagaggttataatggggatgggatttagactggggactcggagaaggcctctaggcatgggaggcactgcagtgtattggattcttgttacttcgaatgcttggggcggggcttattt

SEQ ID NO: 335594 - DNA, 549 bp, Homo sapiens
tggacaagatctggaaggcggcagagagagaggtggttgaaaggaggcttcccggcaaatgagaacctagttgtaggcaaataatgtcagccttaggaggcaggggtgctgctattctagggatagatcatttggaggttggtttaagcattgtgttgcacagtcgatcaggttgtgctcatgcctgctttgcttctaccccataagttcgtagaaccaaagcacccaggatacgccactgtggttcagaggaaggccagaacagcactcccctgccaagccacagggtcctttattcttgataagaaggatgctgagtaggtctcaatgacacctttttggggatctatatcagacgactgcatttcattccccagaatctgcagggacaggacgtgagacagtggacccctttctcctctcaagcctgtgagagaatggggaaccctgagccagtgtcctcactctaagaaacagctgcattttggatggctgacatgggtggagtagaaggtctccctcaggaccctggttgtcattggtgccaac

SEQ ID NO: 335595 - DNA, 384 bp, Homo sapiens
gaatccattggaacaggttaagggaacgcgaaccacagtcattcagtggagctgccctggcctgctggctggtggatttctggggcacttagctgtttgttatttctggggcacttagctctttattatcctaggatctcagaagaatagaacaagagttatctattgagcaaaagcctatcacatgccaggattttacctacattctctctaatcctcccaccaaccttgcaaggtcagcatgatatcagcaagatatcaatgtcaccatttttatacagctgaggaaacctgatttcagagtgggagtgacttgcctgatacaacaaggttcatgtaaatagcagagtcaagagcctcctaagccggaggccacagggactc

SEQ ID NO: 335596 - DNA, 590 bp, Homo sapiens
tccatgctgttcccgtccacatttcattgtgtccaccattctctttttgggaagcaaactgctccttgagcctgttacctctctctcaacccctccccagcctctttcctctcatcacagccacacttcttgaaaaatgatgtctgcattcactgtcttcccttccacccattagctcattgcaggcggttttctacccacaccctctccagagtcaccggtgacttttttgttgccaaatccatcctcctctgctgttcccatcgtgttagtccactagagaatatctggcatttgtgtttgtccttttcacacattgtctttgggctcctctgtcctcagccaggcaggaaagggcaaggggagtgccatgttctccagatgtcttgcctgcccctctgacgtcctttctgtctcctttgtgagctcctcgtcctccacttgaccctccttcatggggacatctcccctgggaaagagatgccatctagaaacagcccaatagtgtttcctccccaccctgtacatccacgtctccaactgctactggacacctccttgtggacgtcccacaggtatctcagactctg

SEQ ID NO: 335597 - DNA, 344 bp, Homo sapiens
atggtctaaaagcatagcattgccaataaaggaattagaattctaaatatagcagtttatatttaacacgtactaattttaagctgccagaatactgaatatgatgaatagcaacattcatgtacagcaaccaacaagctttgtaatgtacaaagttttgttatttctttatccaaaactataccaaagacatgttcactcacatatgcaggattatcctaaaaagatacatgctggacaactgcaagatgtcataggttaaacataccctataaatactttgttctcaaaatattttcattcatattctatgaatagccgatgttttgggatttggccattgt

SEQ ID NO: 335598 - DNA, 236 bp, Homo sapiens
acaagtgaaacttaggagtgctaatttagtaaaatggctgtcaagatctggcagactgccttacatcatggctcatgcctgtaatcccagctttttgggaggccgaggtttgcttgcttaagcccaggaattcaagaccagcttggatgacatagtgagacctccatctccacaaaaaataaaaaattagctgggcatgttggcacacctgtagtcccagctactcgggaggctga

SEQ ID NO: 335599 - DNA, 88 bp, Homo sapiens
tggatcccaaatttctcacttatagccaggcccttatatgaagccacaagggagggtgaaaaggaacccctcctctgaaaggctgacc

SEQ ID NO: 335600 - DNA, 458 bp, Homo sapiens
caacctttgaaaagaccaaagatcaattcctggtactcatgtgggctggggacaggacccgttcccaccagccagactagggaaactctcaatagatcaattcctgatactcatgtgggctggggacaggacccactcccaccagccagactaggaaaactcccaatctgtgagcattaggtggagttctcagaaaatcttgcctcaggaatggggataattagccctagactgagccctgctcctgactcgcctacaaaatcataaaagcaagacctaaaatgatcaaaccattcccagataattcactttatcccagaacaaagctccagatgatctaggggttaccaaagtgtccacaccctgcaaggtaaactcacagtgcctgacctcggagtgccaggcgtgcagaggagcagccaagggcaaacactccaaggagagtcgcctggcaaagc

SEQ ID NO: 335601 - DNA, 587 bp, Homo sapiens
agtgatagtaaagtgattgaaatatttattccatcctctacaaaactcaagtaaaaatagttttctgcatgtggtcctcaatatattcagtccatgggttcaaccaatcacaggtgaaaaatataaaaaaataaaaataaaaaagcaatacagcgtaacaactatttacatagcattgacactatattaggtgttataaggaatctagagatgattgagagtacacaggaggatatgttcaggtcatatgcaaatactacaccattttctatcagagacttgattgagtctctgtggattttggtatccttggggatctggaatcagtcccccacggaccctgagggctgagtgtgcgtccatcctgggattgatcagtgtctccccagagtctccgagaggctcagtcttgctctctcagtgtgattttgtgatattataagcatgtgactggtctgtgtccccagtccctggcagtagagttcttaagcccttgcagttttctgagacctgtaggggtgacaggagcttctttttttctgaggtgactcttggtaggctcctaggaagcttcagggtggccctgg

SEQ ID NO: 335602 - DNA, 497 bp, Homo sapiens
ggtgctcatcacttctctccactctgttcttcctttgattggccttcggaaaacctttaaaatccagattttgatcctgtcctttgtatagagcacacttgacataactaactccatcttagaaaaagacaatttgtatttcacagggcactctgccatcaagggtaagatgctttgtttaataaacaaaaaaaaaagacggccaggcacggtggttcacgcctataatcccagcactttcggaggccgaggcgagcggattgcctgagcttgggagttcaaaagcagcctaggcaacatggcgaaaccccatctctactaaaaatacaaaaaattagccaggtgtggtggcgggtgcctgtaatcccagctactcgggaggctgaaacaagagaatctcttgaacccgggaggcggaggttgcagtgagctgagatcacaccactgcactccaggctgggtgacagactgagacgctgtctcagtaaaataaataa

SEQ ID NO: 335603 - DNA, 4225 bp, Homo sapiens
gagtgcgttcgcggctgctttgacctggtgggcgccgcctccggcactgcaccgaggcggggcgccagcgcccaggttgctgggctggccttggcgcccccttcccctacccagagcgcaggcaggcaggggggtcccgccgcgccccttcagcatatgccggtgcagctgacgacagccctgcgtgtggtgggcaccagcctgtttgccctggcagtgctgggtggcatcctggcagcctatgtgacgggctaccagttcatccacacggaaaagcactacctgtccttcggcctgtacggcgccatcctgggcctgcacctgctcattcagagcctttttgccttcctggagcaccggcgcatgcgacgtgccggccaggccctgaagctgccctccccgcggcggggctcggtggcactgtgcattgccgcataccaggaggaccctgactacttgcgcaagtgcctgcgctcggcccagcgcatctccttccctgacctcaaggtggtcatggtggtggatggcaaccgccaggaggacgcctacatgctggacatcttccacgaggtgctgggcggcaccgagcaggccggcttctttgtgtggcgcagcaacttccatgaggcaggcgagggtgagacggaggccagcctgcaggagggcatggaccgtgtgcgggatgtggtgcgggccagcaccttctcgtgcatcatgcagaagtggggaggcaagcgcgaggtcatgtacacggccttcaaggccctcggcgattcggtggactacatccaggtgtgcgactctgacactgtgctggatccagcctgcaccatcgagatgcttcgagtcctggaggaggatccccaagtagggggagtcgggggagatgtccagatcctcaacaagtacgactcatggatttccttcctgagcagcgtgcggtactggatggccttcaacgtggagcgggcctgccagtcctactttggctgtgtgcagtgtattagtgggcccttgggcatgtaccgcaacagcctcctccagcagttcctggaggactggtaccatcagaagttcctaggcagcaagtgcagcttcggggatgaccggcacctcaccaaccgagtcctgagccttggctaccgaactaagtataccgcgcgctccaagtgcctcacagagacccccactaagtacctccggtggctcaaccagcaaacccgctggagcaagtcttacttccgggagtggctctacaactctctgtggttccataagcaccacctctggatgacctacgagtcagtggtcacgggtttcttccccttcttcctcattgccacggttatacagcttttctaccggggccgcatctggaacattctcctcttcctgctgacggtgcagctggtgggcattatcaaggccacctacgcctgcttccttcggggcaatgcagagatgatcttcatgtccctctactccctcctctatatgtccagccttctgccggccaagatctttgccattgctaccatcaacaaatctggctggggcacctctggccgaaaaaccattgtggtgaacttcattggcctcattcctgtgtccatctgggtggcagttctcctgggaggggctggcctacacagcttattgccaggacctgttcagtgagacagagctagccttccttgtctctggggctatactgtatggctgctactgggtggccctcctcatgctatatctggccatcatcgcccggcgatgtgggaagaagccggagcagtacagcttggcttttgctgaggtgtgacatggcccccaagcagagcgggtaaagtgcaatgggtaagggagggaaggggaatggaagagaaaagacagggtgggagggaggagggagtgctgtgttttagtctcttaatggtccaaaggacaaatctaaaatgcaaagaacggtgatgtagtatggcctgacagctctgtttagaggaggcaacactgatcccccagatgcagggctgcaggggattctgtgttttcagactgcctgtctgcttgcatctgcacataggcagtagcctcctcctgggctccagagggcactcagaagttgtgctaaaccaagttaagtcccattcagtggcaacttgtgataggtacctgagtgacggcaacctgcggaaggaggttctcccagcccatctgaacacaaccagaggtggcaggagaatttctactgagcgagctgggccggttagtgtatgtcacccccaccccacccctaagtagtcatcaatgcaataagattgcgcctgagatacaaggcccagaagcctgatctttgggcatcagaaaacagggtccaggaatggtgctttatgtgagataccccactccacatcaacattccagggatgagccaaaccagcagggagttagcactgaactgcttttaaaagtgcacattaaaaaggaaagtttgccaggaggaacaaagagattgtggtggtgctaaaggaggccataagctacacagaggccttgggtgttccacctggaaactgctcagacgtctagatgggttcttagcttgtctgtgatctctgctggggagataaaaagattaagccccaacatgttcagaaaagaagtgaagtcttgggtattttaacctgtatactcttgaattcctctcaaattcagctctgatctgaggctaagacacactccccacttcactttcttcaaagccacattttttgaggtatcactgcagtcacctcttctaccctcatcatcataggtaaggttttcaaggtggcaattggggcggagccccggctcttatagaagcttcagcaggaggcaagcgtgttctcagcacatatgggaactatgaggagcctctgatcaaattggctacaatcttggagctgcttggacggattccttggcagccgggttagcatgtgtgactttcaggctactgttcttgacaatcatctccaatggaaagcttttcagtgttcccaaagtgaactctcaaatccaaaatggttatctttgagaccatccattctcctcagtggcttctccagggaattcttacagccaagttgtgacagtcactgcatttgcctgcttctttccagaaaccaaactaggagatgaaactggttcctacatcctaaggttcttgctttctctctcatgcctcctgaggctgtttttggctgttttccctctgctgcttttggggaatgaggggaagccattttccagtgacttgcaatccaggctgttctcagcgttttgagtttaaaacctgggatcctgactaagcctttgacttaagggttgcttgcttgccctccaaatgtcctttctcagaggggccagctaacccgtgcagaaccagcactaaggtggacagcagacaagagggcaagcctctagtgtaccaagtgcttcctacaaagacgcaaggtgtgctctgagccacagatgggcaaaccctggtgctttccttcatctcccacgaactcaagggttttccaggtgtagctaacagttgccacatcacacagacctcgagtttctggtaagactgctggttgacatcagacccaacccatgaaggctggaaggcagcaggcatttgctaaggcagctgatccaggcaatcgttctgctggccaagaagttaaactattttgagcattagaatggaggaaatccggtcagccaagtgcagagttcagacttcgctaagggcttgtttttcttcagcatttacttgaagattaatgtaggatgacaggctctcctggctgtcctaccatcagctctgccttgcactgtggtcgtcaactttcctcaaatcaaaaacaggcaggtacaggtagtgggctcacaacgtttgacctcgactggtttttctaagttattttgtacatttttcagcagcaaaaccaaactgggtcttcagctttatccccgtttcttgcaagggaagagcctttatacaattggacgcattttggtttttcctcattgagaattcaaatcctcttttgtattgtttctacaataatttgtaaacatatttatttttacctgcttttttttttttttttaattttcaggtcaagttttttatactgcacttatttgtcaaaataaagattctcacatatgccggttatctcgaaactac

SEQ ID NO: 335604 - DNA, 4128 bp, Homo sapiens
gaggggcatggagccgccgcgggcctgctgagctccggagcgcggcagccggcggcacgatgccggtgcagctgacgacagccctgcgtgtggtgggcaccagcctgtttgccctggcagtgctgggtggcatcctggcagcctatgtgacgggctaccagttcatccacacggaaaagcactacctgtccttcggcctgtacggcgccatcctgggcctgcacctgctcattcagagcctttttgccttcctggagcaccggcgcatgcgacgtgccggccaggccctgaagctgccctccccgcggcggggctcggtggcactgtgcattgccgcataccaggaggaccctgactacttgcgcaagtgcctgcgctcggcccagcgcatctccttccctgacctcaaggtggtcatggtggtggatggcaaccgccaggaggacgcctacatgctggacatcttccacgaggtgctgggcggcaccgagcaggccggcttctttgtgtggcgcagcaacttccatgaggcaggcgagggtgagacggaggccagcctgcaggagggcatggaccgtgtgcgggatgtggtgcgggccagcaccttctcgtgcatcatgcagaagtggggaggcaagcgcgaggtcatgtacacggccttcaaggccctcggcgattcggtggactacatccaggtgtgcgactctgacactgtgctggatccagcctgcaccatcgagatgcttcgagtcctggaggaggatccccaagtagggggagtcgggggagatgtccagatcctcaacaagtacgactcatggatttccttcctgagcagcgtgcggtactggatggccttcaacgtggagcgggcctgccagtcctactttggctgtgtgcagtgtattagtgggcccttgggcatgtaccgcaacagcctcctccagcagttcctggaggactggtaccatcagaagttcctaggcagcaagtgcagcttcggggatgaccggcacctcaccaaccgagtcctgagccttggctaccgaactaagtataccgcgcgctccaagtgcctcacagagacccccactaagtacctccggtggctcaaccagcaaacccgctggagcaagtcttacttccgggagtggctctacaactctctgtggttccataagcaccacctctggatgacctacgagtcagtggtcacgggtttcttccccttcttcctcattgccacggttatacagcttttctaccggggccgcatctggaacattctcctcttcctgctgacggtgcagctggtgggcattatcaaggccacctacgcctgcttccttcggggcaatgcagagatgatcttcatgtccctctactccctcctctatatgtccagccttctgccggccaagatctttgccattgctaccatcaacaaatctggctggggcacctctggccgaaaaaccattgtggtgaacttcattggcctcattcctgtgtccatctgggtggcagttctcctgggaggggctggcctacacagcttattgccaggacctgttcagtgagacagagctagccttccttgtctctggggctatactgtatggctgctactgggtggccctcctcatgctatatctggccatcatcgcccggcgatgtgggaagaagccggagcagtacagcttggcttttgctgaggtgtgacatggcccccaagcagagcgggtaaagtgcaatgggtaagggagggaaggggaatggaagagaaaagacagggtgggagggaggagggagtgctgtgttttagtctcttaatggtccaaaggacaaatctaaaatgcaaagaacggtgatgtagtatggcctgacagctctgtttagaggaggcaacactgatcccccagatgcagggctgcaggggattctgtgttttcagactgcctgtctgcttgcatctgcacataggcagtagcctcctcctgggctccagagggcactcagaagttgtgctaaaccaagttaagtcccattcagtggcaacttgtgataggtacctgagtgacggcaacctgcggaaggaggttctcccagcccatctgaacacaaccagaggtggcaggagaatttctactgagcgagctgggccggttagtgtatgtcacccccaccccacccctaagtagtcatcaatgcaataagattgcgcctgagatacaaggcccagaagcctgatctttgggcatcagaaaacagggtccaggaatggtgctttatgtgagataccccactccacatcaacattccagggatgagccaaaccagcagggagttagcactgaactgcttttaaaagtgcacattaaaaaggaaagtttgccaggaggaacaaagagattgtggtggtgctaaaggaggccataagctacacagaggccttgggtgttccacctggaaactgctcagacgtctagatgggttcttagcttgtctgtgatctctgctggggagataaaaagattaagccccaacatgttcagaaaagaagtgaagtcttgggtattttaacctgtatactcttgaattcctctcaaattcagctctgatctgaggctaagacacactccccacttcactttcttcaaagccacattttttgaggtatcactgcagtcacctcttctaccctcatcatcataggtaaggttttcaaggtggcaattggggcggagccccggctcttatagaagcttcagcaggaggcaagcgtgttctcagcacatatgggaactatgaggagcctctgatcaaattggctacaatcttggagctgcttggacggattccttggcagccgggttagcatgtgtgactttcaggctactgttcttgacaatcatctccaatggaaagcttttcagtgttcccaaagtgaactctcaaatccaaaatggttatctttgagaccatccattctcctcagtggcttctccagggaattcttacagccaagttgtgacagtcactgcatttgcctgcttctttccagaaaccaaactaggagatgaaactggttcctacatcctaaggttcttgctttctctctcatgcctcctgaggctgtttttggctgttttccctctgctgcttttggggaatgaggggaagccattttccagtgacttgcaatccaggctgttctcagcgttttgagtttaaaacctgggatcctgactaagcctttgacttaagggttgcttgcttgccctccaaatgtcctttctcagaggggccagctaacccgtgcagaaccagcactaaggtggacagcagacaagagggcaagcctctagtgtaccaagtgcttcctacaaagacgcaaggtgtgctctgagccacagatgggcaaaccctggtgctttccttcatctcccacgaactcaagggttttccaggtgtagctaacagttgccacatcacacagacctcgagtttctggtaagactgctggttgacatcagacccaacccatgaaggctggaaggcagcaggcatttgctaaggcagctgatccaggcaatcgttctgctggccaagaagttaaactattttgagcattagaatggaggaaatccggtcagccaagtgcagagttcagacttcgctaagggcttgtttttcttcagcatttacttgaagattaatgtaggatgacaggctctcctggctgtcctaccatcagctctgccttgcactgtggtcgtcaactttcctcaaatcaaaaacaggcaggtacaggtagtgggctcacaacgtttgacctcgactggtttttctaagttattttgtacatttttcagcagcaaaaccaaactgggtcttcagctttatccccgtttcttgcaagggaagagcctttatacaattggacgcattttggtttttcctcattgagaattcaaatcctcttttgtattgtttctacaataatttgtaaacatatttatttttacctgcttttttttttttttttaattttcaggtcaagttttttatactgcacttatttgtcaaaataaagattctcacatatgccggttatctcgaaactac

SEQ ID NO: 335605 - DNA, 389 bp, Homo sapiens
gaaccttgcgtttgggacttctaggcaatgagacaattctcccacctctgctgcttgtcatctgacccttcctggtgctgttccatggggaaaataatggcaccatgtcctgggtagcctcttcttatcacagtaagcaaataaaagcttgactgttactttcagtggggctagttgtcctaattcaacaccttaacacctgaaagtactcacatacatgccccctctctctttctctctctctctctctctcaatttgacaaaggagctgagtggtcaattaagcacaatgcctttttggaaaaacaaaaagcctaaaagtccttcagggcacagtagaggtgctggtggttcatctgcaagagtctgagggtaccgcagaacacttg

SEQ ID NO: 335606 - DNA, 387 bp, Homo sapiens
ttgtggcagtttgttacagccatcctaggaaactaatgcaccccctttcatctcagaaatcctatcatctaacctctttgtctttaatatcaaatatgcatccatgtcacctacacccaatagaacacagcaccttggacatagtacattcttgccaaatatggttgacaaaggtgggagtagaggagggagtgaagaagagacctgaactcgcaccaggagagtaaaatgacttgggtgcaagctggcaagcagaaggcctgtctggctaaatattaacacaaataaccacaaagagtaaatggtagagagatgctgctctaagacaataccacccgacatccatgtctctttagttcagcatgtctgagattaagaattgaagac

SEQ ID NO: 335607 - DNA, 304 bp, Homo sapiens
tccttacagaagtggctgattccagggctatggcaaagaaaatataagataatcctagattaacaacttgtagtaccagaaaataagaaatgctcaccaaaggtgagcaggttgaaaaggcacagatgccaacttgaaagagttcccaatggccaaagcagaagacaaataactaaggatagtataggattataactcatggaataaaataaacatctatgagtccatattgatataaataattgaataaatagaggaaaaagggagtattccttcttacagaagaattccagctaatgggcca

SEQ ID NO: 335608 - DNA, 218 bp, Homo sapiens
acactgtattagcctcgttcactgccagaggggcccctgaaggggacacagtgacacagtatctactgatactgcccttattcaagaggtcagtgctgtccttcacccctacctcattccctacaccctggctagaatctcataactcctccaacaacttaaaatcactctctcacctttgtgttagatttctgtttccaactctgcccctgtcccct

SEQ ID NO: 335609 - DNA, 918 bp, Homo sapiens
gactcgcgtcggttggcgactcccggacgtaggtagtttgttgggccgggttctgaggccttgcttctctttacttttccactctagcctgggtgacagaactagactcggtctcaaaaaaaataaaataagggaataaatgcagaacgaattttaatacaaaaggccttatctccaattgatggctctttttgccctgttaatgattgaatataattaaggatccatgttaacttcgacttttttataatcccatgtatccatcatttttctaatcccataattgatttagaatactgtcttctatggacctaaaatctttttctgtcagaaatttcagtgagaaggtatgtgcattctctcataggacatgtgctaaaattttggatgatgaagattaatatggcctttttacaagattgccacacaaatttgtacaatgcgtggataacaatttttttaagtgagttgtttaaaaggctcacttaaaaaaatcagttgggcatgatgaggttgaacttcaagttatctaagttgtcgacttttatcatacggatcattagttcctgttgtttcaaaactcatgtgaacctttaacgatgggctgagccaacggtggctctgtactacaaaacgaggacagggctgccagcttaaagtggcctgtttgaagattctacaacagatggcttttatgacccaaccataagcagatcttaagtctctaggtgaagaatttaaccgtgctaaccgggcacgacattggttctgctttaaccagttactatctttccagccgtggggaaattgggagaaacccggccttagcaaattctaatctttgggcacagacacggtctcatgggttgcccggttgactggagtccgggatcagacaggttttcgctctagccccca

SEQ ID NO: 335610 - DNA, 503 bp, Homo sapiens
  misc_feature (19)..(19): n is a, c, g, or t
  misc_feature (33)..(33): n is a, c, g, or t
  misc_feature (67)..(67): n is a, c, g, or t
  misc_feature (75)..(75): n is a, c, g, or t
  misc_feature (196)..(196): n is a, c, g, or t
  misc_feature (264)..(264): n is a, c, g, or t
atgggtttttcctaatatntcatttcaaattancggatacaaatttgccagagaaacaattacatgntttacctnaacatcaaataatctccagtttctaagacagatgcatttcttgttcaatttcccaaaagtaaataaaggctttctaactgaaaacatttgcatccctagctctctaaagtaattaaaaagnaaattacaaaaaatgacctctaagcttctgaacagcccacttagttacataaagtactttctgtcccnacactttctctaattcaaaagatatttacttcctaagtacacgacaaagtcttcatttcaaaccattcactcagtttccatggtaacattgcgggcttccttggctaccataagtcgcattagttgactgtggaatttctcaatcttctttacatctttgtttggtgtataaaacagaccaagctcaagatgtaaagaagattgagcttggtctgttttatacaccaaacaaactaaat

SEQ ID NO: 335611 - DNA, 408 bp, Homo sapiens
gactcgcgtcggttggcgactcccggacgtaggtagtttgttgggccgggttctgaggccttgcttctctttacttttccactctaggccacgatgccgcagtaccagacctgggaggagttcagccgcgctgccgagaagctttacctcgctgaccctatgaaggcacgtgtggttctcaaatataggcattctgatgggaacttgtgtgttaaagtaacagatgatttagtttgtttggtgtataaaacagaccaagctcaagatgtaaagaagattgagaaattccacagtcaactaatgcgacttatggtagccaaggaagcccgcaatgttaccatggaaactgagtgaatggtttgaaatgaagactttgtcgtgtacttaggaagtaaatatcttttgaat

SEQ ID NO: 335612 - DNA, 912 bp, Homo sapiens
aaaaggagaacagggatccccaggaagtgtctcacgtccggcgctgtggaattagttgctgatcaagtagggagaaaatgtaaatatcaccttttctcctgctccccttgcccatccgtgtgacggggggactcacacctaaggctgagggcatgggggaggggaaatgagaggtcccttatcatattccgaagtctatccgtgactttaaaaagctgttagggaccttcagagggttcataaggccaaaaccctactgtgcaaatattggctgaaatgtttgtttcacacacagctcccacacccattgaaccaccctataagtttttaaccttgaccacaaggataacagggagaaaacaaggatggtgccagctcaactgtacaggaaaatggttacttcatgagtggaccagatcagcagcctgggtctacttgaagcgcccctttcagggtcaccttgcggtatcagtctccccacaaacaaacgctccccagagtttttttattttttaagccgacctataaacaagcagtttgtccctgcttgctcgcctggcactaaggacccacagagatgtcactcggtttaatgctgtctcattttgatgcctggcccgtttggggttgccgcccctttactacgccgggaccctcctcggcctcaggctcccaggcactgcaggatgctggctgggcactcagcagtcgaggcgctgggcatgctcagtggctgggacccggcgggccgcgggggagcgcgcctcggcccaatgcggctgaggggcggagcgagtttcccggggaggcctgctgattggtgggatggcctgtttttcaagccttgcactgcagagggaaggtgggggtagaagggttgagggtaccaaggtaggttgcaaagcgtagtaa

SEQ ID NO: 335613 - DNA, 2955 bp, Homo sapiens
gtgctcaccgccgcttccggtccgcgtgaggtgcattctcgcgccggtggcgaggttagggcccgcgttgcgacgtggtgcagcgcatattttcacaagtgggtctcccttgtccgggactatggccaccgactcgtgggccctggcggtggacgagcaggaagcggctgtcaagtcgatgaccaatttgcagatcaaggaagagaaagtcaaagcagataccaatggtattatcaaaaccagtaccactgccgagaaaacagatgaagaggagaaagaggacagagctgcccagtccttactcaacaagctgatcagaagcaaccttgttgataacacaaaccaagtggaagtcctgcaacgggatccaaactcccctctgtactcggtgaagtcgtttgaagagcttcggctgaaaccacagcttctccagggagtctatgccatgggcttcaatcgaccctccaagatacaagagaacgcattacccatgatgcttgctgaacccccacagaatctgattgcccagtctcagtctggcactggtaaaacagctgcctttgtcttagccatgctcagccgagtggagccatcagacagatacccccagtgtctgtgcctctccccaacatatgagctggcgcttcaaacaggaaaagtgattgagcagatgggcaaattttacccagaactgaagcttgcctatgccgttcgaggcaataaattggaaagaggccagaagatcagtgagcagattgtcattggcacccctgggaccgtgctggactggtgctccaagctcaagttcattgatcccaagaaaatcaaggtgtttgttctggatgaggctgatgtcatgatagccactcagggccaccaagatcagagcatccgcatccagaggatgctgcccaggaactgccagatgctgcttttctccgccacctttgaagactctgtgtggaagtttgcccagaaagtggtcccagacccaaatgttatcaaactgaagcgtgaggaagagaccctggataccatcaagcagtactatgtcctgtgcagcagcagagacgagaagttccaggccttgtgtaacctctacggggccatcaccattgctcaagccatgatcttctgccatactcgcaaaacagctagttggctggcagcagagctctcaaaagaaggccaccaggtggctctgctgagtggggagatgatggtggagcagagggctgcggtgattgagcgcttccgagagggcaaagagaaggttttggtgaccaccaacgtgtgtgcccgcggcattgatgttgaacaagtgtctgtcgtcatcaactttgatcttcccgtggacaaggacgggaatcctgacaatgagacctacctgcaccggatcgggcgcacgggccgctttggcaagaggggcctggcagtgaacatggtggacagcaagcacagcatgaacatcctgaacagaatccaggagcattttaataagaagatagaaagattggacacagatgatttggacgagattgagaaaatagccaactgagaagctccaccagccactgatgccagccctggcactgcccctgcacaggagacaagtgcatttagggcacaggccccgacatcaccccaaggacaacggcagaagtagagagaaactacctacctcacttcaaattatgtttggacttgacaaaaataggtgcaaatgatggggggcaatagaagaaaaaatttgcattttggaaaattgggtcctttccccacttttttaaagccacattcccccatctttataataatctggtcacagtggtagtcgctggccccaggaccccctcctgattttggctaggcatcgtggaaccagctccagcccctgaagaaacgatagatgtgcaggttgtgcggaagaggctgagtggaaaatggtgtgagccccaccgctgtgcatcgaatgagggaagtggcagcagagaggccagagctgccccctctctgtctcttcaatggacccttcacaagtgtttctcctgcccttggggctgtcttccttctcctgaaatccagagactttcttgctcatcccttctccctttcacttctgttctctgctgcagaaagcagacttgcatatccctgatgagcagctcggctacttttgtaaacttcagatttggagagaaacacgaaagtctgaatcctgaccccttgagagagagtgatctggcgagggccgatgaaggggctgggcctggtcttgccttctcttctctcggttgctccctctgcctaggcccctggtactcagtcacggcagccaggagaccccaggtgagtttctgagcgcatacgtagttggttcttacccccaggtgtcacacggggccgagagctgagcaagaatttggaatggaagttatgaccaagggaattatgctgttcatttataatagtggacattatggagagctctgattcctacataatatgaataaggatggataggccgggcgtggtggctcatgcctataatcccagcacgttgggaggctgaggcgggcggatcggttgagctcaggcgttcgggaccagcctggccaacatgatgaaaccccgtctctaccaaaaatagaaaaaaatatagccgggcctggtggcgcacgcctgtagtcccagctactcgggaggctgaggtaggaggatcgcttgagcctgggtagaggctgctgtgagctgaaatggcgccactgcactccagcctgggtaacagagcgagaccccgactcaataaataaataaggatggataaattgtagcgtatgcaccattcattatgctaagacattttaaagtaattatgagaaacgctctactaatgatttgtttttatttgtatttttctgcttattagacaaatatatactcattttaaaaagg

SEQ ID NO: 335614 - DNA, 475 bp, Homo sapiens
aaataaataaataaataaacataaaaagagttggatgatgttggattataggaggaagaagaagggaactgatgcttattgaaggattgctgtgtgggatttgatcctgaccacagtgcactgagataggtgtcattctgcccacttcacagcagaagagaccaagactgaggggaacactcatgtgtgttttgaaatctggaaataacttgttctcctagtcctagaaggatgggcagggctttgatttccagagctggctttgcctttgaaatacctatgaaaatcacctgggtctccacagtggaaagaggccagaagatcagtgagcagattgtcattggcacccctgggaccgtgctggactggtgctccaagctcaagttcattgatcccaagaaaatcaaggaagcttaaggagtaaagggataattgactgtggccgtccggaagagaccccagggatcctctagat

SEQ ID NO: 335615 - DNA, 3316 bp, Homo sapiens
gtgctcaccgccgcttccggtccgcgtgaggtgcattctcgcgccggtggcgaggttagggcccgcgttgcgacgtggtgcagcgcatattttcacaagtgggtctcccttgtccgggactatggccaccgactcgtgggccctggcggtggacgagcaggaagcggctgtcaagtcgatgaccaatttgcagatcaaggaagagaaagtcaaagcagataccaatggtattatcaaaaccagtaccactgccgagaaaacagatgaagaggagaaagaggacagagctgcccagtccttactcaacaagctgatcagaagcaaccttgttgataacacaaaccaagtggaagtcctgcaacgggatccaaactcccctctgtactcggtgaagtcgtttgaagagcttcggctgaaaccacagcttctccagggagtctatgccatgggcttcaatcgaccctccaagatacaagagaacgcattacccatgatgcttgctgaacccccacagaatctgattgcccagtctcagtctggcactggtaaaacagctgcctttgtcttagccatgctcagccgagtggagccatcagacagatacccccagtgtctgtgcctctccccaacatatgagctggcgcttcaaacaggaaaagtgattgagcagatgggcaaattttacccagaactgaagcttgcctatgccgttcgaggcaataaattggaaagaggccagaagatcagtgagcagattgtcattggcacccctgggaccgtgctggactggtgctccaagctcaagttcattgatcccaagaaaatcaaggtgtttgttctggatgaggctgatgtcatgatagccactcagggccaccaagatcagagcatccgcatccagaggatgctgcccaggaactgccagatgctgcttttctccgccacctttgaagactctgtgtggaagtttgcccagaaagtggtcccagacccaaatgttatcaaactgaagcgtgaggaagagaccctggataccatcaagcagtactatgtcctgtgcagcagcagagacgagaagttccaggccttgtgtaacctctacggggccatcaccattgctcaagccatgatcttctgccatactcgcaaaacagctagttggctggcagcagagctctcaaaagaaggccaccaggtggctctgctgagtggggagatgatggtggagcagagggctgcggtgattgagcgcttccgagagggcaaagagaaggttttggtgaccaccaacgtgtgtgcccgcggcattgatgttgaacaagtgtctgtcgtcatcaactttgatcttcccgtggacaaggacgggaatcctgacaatgagacctacctgcaccggatcgggcgcacgggccgctttggcaagaggggcctggcagtgaacatggtggacagcaagcacagcatgaacatcctgaacagaatccaggagcattttaataagaagatagaaagattggacacagatgatttggacgagattgagaaaatagccaactgagaagctccaccagccactgatgccagccctggcactgcccctgcacaggagacaagtgcatttagggcacaggccccgacatcaccccaaggacaacggcagaagtagagagaaactacctacctcacttcaaattatgtttggacttgacaaaaataggtgcaaatgatggggggcaatagaagaaaaaatttgcattttggaaaattgggtcctttccccacttttttaaagccacattcccccatctttataataatctggtcacagtggtagtcgctggccccaggaccccctcctgattttggctaggcatcgtggaaccagctccagcccctgaagaaacgatagatgtgcaggttgtgcggaagaggctgagtggaaaatggtgtgagccccaccgctgtgcatcgaatgagggaagtggcagcagagaggccagagctgccccctctctgtctcttcaatggacccttcacaagtgtttctcctgcccttggggctgtcttccttctcctgaaatccagagactttcttgctcatcccttctccctttcacttctgttctctgctgcagaaagcagacttgcatatccctgatgagcagctcggctacttttgtaaacttcagatttggagagaaacacgaaagtctgaatcctgaccccttgagagagagtgatctggcgagggccgatgaaggggctgggcctggtcttgccttctcttctctcggttgctccctctgcctaggcccctggtactcagtcacggcagccaggagaccccaggtgagtttctgagcgcatacgtagttggttcttacccccaggtgtcacacggggccgagagctgagcaagaatttggaatggaagttatgaccaagggaattatgctgttcatttataatagtggacattatggagagctctgattcctacataatatgaataaggatggataggccgggcgtggtggctcatgcctataatcccagcacgttgggaggctgaggcgggcggatcggttgagctcaggcgttcgggaccagcctggccaacatgatgaaaccccgtctctaccaaaaatagaaaaaaatatagccgggcctggtggcgcacgcctgtagtcccagctactcgggaggctgaggtaggaggatcgcttgagcctgggtagaggctgctgtgagctgaaatggcgccactgcactccagcctgggtaacagagcgagaccccgactcaataaataaataaggatggataaattgtagcgtatgcaccattcattatgctaagacattttaaagtaattatgagaaacgctctactaatgatttgtttttatttgtatttttctgcttattagacaaatatatactcattttaaaaaggcgtgtgtgtatataaagtgagagtgctctctatcccttctcttctgggatcctgattcctggcagcttggtgaatattctaccatattgccttttatttgcataaacccatttttcttttacaaaaacaggaacattctgttcacactactatgcaacctgctttcactgatcagcatgtgttagacatgttgacatgtccaatacacacacatcttccttgccctggaaacaccatccaccttcctttctgcgtgtagctgtcccggcatttatctcctggttcctctagtgacaggcatgggggatttctagtacatggctgttatccacagtaccacaatgaacattttttttttctt

SEQ ID NO: 335616 - DNA, 2840 bp, Homo sapiens
gtgctcaccgccgcttccggtccgcgtgaggtgcattctcgcgccggtggcgaggttagggcccgcgttgcgacgtggtgcagcgcatattttcacaagtgggtctcccttgtccgggactatggccaccgactcgtgggccctggcggtggacgagcaggaagcggctgtcaagtcgatgaccaatttgcagatcaaggaagagaaagtcaaagcagataccaatggtattatcaaaaccagtaccactgccgagaaaacagatgaagaggagaaagaggacagagctgcccagtccttactcaacaagctgatcagaagcaaccttgttgataacacaaaccaagtggaagtcctgcaacgggatccaaactcccctctgtactcggtgaagtcgtttgaagagcttcggctgaaaccacagcttctccagggagtctatgccatgggcttcaatcgaccctccaagatacaagagaacgcattacccatgatgcttgctgaacccccacagaatctgattgcccagtctcagtctggcactggtaaaacagctgcctttgtcttagccatgctcagccgagtggagccatcagacagatacccccagtggaaagaggccagaagatcagtgagcagattgtcattggcacccctgggaccgtgctggactggtgctccaagctcaagttcattgatcccaagaaaatcaaggtgtttgttctggatgaggctgatgtcatgatagccactcagggccaccaagatcagagcatccgcatccagaggatgctgcccaggaactgccagatgctgcttttctccgccacctttgaagactctgtgtggaagtttgcccagaaagtggtcccagacccaaatgttatcaaactgaagcgtgaggaagagaccctggataccatcaagcagtactatgtcctgtgcagcagcagagacgagaagttccaggccttgtgtaacctctacggggccatcaccattgctcaagccatgatcttctgccatactcgcaaaacagctagttggctggcagcagagctctcaaaagaaggccaccaggtggctctgctgagtggggagatgatggtggagcagagggctgcggtgattgagcgcttccgagagggcaaagagaaggttttggtgaccaccaacgtgtgtgcccgcggcattgatgttgaacaagtgtctgtcgtcatcaactttgatcttcccgtggacaaggacgggaatcctgacaatgagacctacctgcaccggatcgggcgcacgggccgctttggcaagaggggcctggcagtgaacatggtggacagcaagcacagcatgaacatcctgaacagaatccaggagcattttaataagaagatagaaagattggacacagatgatttggacgagattgagaaaatagccaactgagaagctccaccagccactgatgccagccctggcactgcccctgcacaggagacaagtgcatttagggcacaggccccgacatcaccccaaggacaacggcagaagtagagagaaactacctacctcacttcaaattatgtttggacttgacaaaaataggtgcaaatgatggggggcaatagaagaaaaaatttgcattttggaaaattgggtcctttccccacttttttaaagccacattcccccatctttataataatctggtcacagtggtagtcgctggccccaggaccccctcctgattttggctaggcatcgtggaaccagctccagcccctgaagaaacgatagatgtgcaggttgtgcggaagaggctgagtggaaaatggtgtgagccccaccgctgtgcatcgaatgagggaagtggcagcagagaggccagagctgccccctctctgtctcttcaatggacccttcacaagtgtttctcctgcccttggggctgtcttccttctcctgaaatccagagactttcttgctcatcccttctccctttcacttctgttctctgctgcagaaagcagacttgcatatccctgatgagcagctcggctacttttgtaaacttcagatttggagagaaacacgaaagtctgaatcctgaccccttgagagagagtgatctggcgagggccgatgaaggggctgggcctggtcttgccttctcttctctcggttgctccctctgcctaggcccctggtactcagtcacggcagccaggagaccccaggtgagtttctgagcgcatacgtagttggttcttacccccaggtgtcacacggggccgagagctgagcaagaatttggaatggaagttatgaccaagggaattatgctgttcatttataatagtggacattatggagagctctgattcctacataatatgaataaggatggataggccgggcgtggtggctcatgcctataatcccagcacgttgggaggctgaggcgggcggatcggttgagctcaggcgttcgggaccagcctggccaacatgatgaaaccccgtctctaccaaaaatagaaaaaaatatagccgggcctggtggcgcacgcctgtagtcccagctactcgggaggctgaggtaggaggatcgcttgagcctgggtagaggctgctgtgagctgaaatggcgccactgcactccagcctgggtaacagagcgagaccccgactcaataaataaataaggatggataaattgtagcgtatgcaccattcattatgctaagacattttaaagtaattatgagaaacgctctactaatgatttgtttttatttgtatttttctgcttattagacaaatatatactcattttaaaaagg

SEQ ID NO: 335617 - DNA, 2060 bp, Homo sapiens
caggcaggtagaggcggggttgaatcggcacggaggcttttctccgccacctttgaagactctgtgtggaagtttgcccagaaagtggtcccagacccaaatgttatcaaactgaagcgtgaggaagagaccctggataccatcaagcagtactatgtcctgtgcagcagcagagacgagaagttccaggccttgtgtaacctctacggggccatcaccattgctcaagccatgatcttctgccatactcgcaaaacagctagttggctggcagcagagctctcaaaagaaggccaccaggtggctctgctgagtggggagatgatggtggagcagagggctgcggtgattgagcgcttccgagagggcaaagagaaggttttggtgaccaccaacgtgtgtgcccgcggcattgatgttgaacaagtgtctgtcgtcatcaactttgatcttcccgtggacaaggacgggaatcctgacaatgagacctacctgcaccggatcgggcgcacgggccgctttggcaagaggggcctggcagtgaacatggtggacagcaagcacagcatgaacatcctgaacagaatccaggagcattttaataagaagatagaaagattggacacagatgatttggacgagattgagaaaatagccaactgagaagctccaccagccactgatgccagccctggcactgcccctgcacaggagacaagtgcatttagggcacaggccccgacatcaccccaaggacaacggcagaagtagagagaaactacctacctcacttcaaattatgtttggacttgacaaaaataggtgcaaatgatggggggcaatagaagaaaaaatttgcattttggaaaattgggtcctttccccacttttttaaagccacattcccccatctttataataatctggtcacagtggtagtcgctggccccaggaccccctcctgattttggctaggcatcgtggaaccagctccagcccctgaagaaacgatagatgtgcaggttgtgcggaagaggctgagtggaaaatggtgtgagccccaccgctgtgcatcgaatgagggaagtggcagcagagaggccagagctgccccctctctgtctcttcaatggacccttcacaagtgtttctcctgcccttggggctgtcttccttctcctgaaatccagagactttcttgctcatcccttctccctttcacttctgttctctgctgcagaaagcagacttgcatatccctgatgagcagctcggctacttttgtaaacttcagatttggagagaaacacgaaagtctgaatcctgaccccttgagagagagtgatctggcgagggccgatgaaggggctgggcctggtcttgccttctcttctctcggttgctccctctgcctaggcccctggtactcagtcacggcagccaggagaccccaggtgagtttctgagcgcatacgtagttggttcttacccccaggtgtcacacggggccgagagctgagcaagaatttggaatggaagttatgaccaagggaattatgctgttcatttataatagtggacattatggagagctctgattcctacataatatgaataaggatggataggccgggcgtggtggctcatgcctataatcccagcacgttgggaggctgaggcgggcggatcggttgagctcaggcgttcgggaccagcctggccaacatgatgaaaccccgtctctaccaaaaatagaaaaaaatatagccgggcctggtggcgcacgcctgtagtcccagctactcgggaggctgaggtaggaggatcgcttgagcctgggtagaggctgctgtgagctgaaatggcgccactgcactccagcctgggtaacagagcgagaccccgactcaataaataaataaggatggataaattgtagcgtatgcaccattcattatgctaagacattttaaagtaattatgagaaacgctctactaatgatttgtttttatttgtatttttctgcttattagacaaatatatactcattttaaaaagg

SEQ ID NO: 335618 - DNA, 2120 bp, Homo sapiens
gtgctcaccgccgcttccggtccgcgtgaggtgcattctcgcgccggtggcgaggttagggcccgcgttgcgacgtggtgcagcgcatattttcacaagtgggtctcccttgtccgggactatggccaccgactcgtgggccctggcggtggacgagcaggaagcggctgtcaagtcgatgaccaatttgcagatcaaggaagagaaagtcaaagcagataccaatggtattatcaaaaccagtaccactgccgagaaaacagatgaagaggagaaagaggacagagctgcccagtccttactcaacaagctgatcagaagcaaccttgttgataacacaaaccaagtggaagtcctgcaacgggatccaaactcccctctgtactcggtgaagtcgtttgaagagcttcggctgaaaccacagcttctccagggagtctatgccatgggcttcaatcgaccctccaagatacaagagaacgcattacccatgatgcttgctgaacccccacagaatctgattgcccagtctcagtctggcactggtaaaacagctgcctttgtcttagccatgctcagccgagtggagccatcagacagatacccccagtgtctgtgcctctccccaacatatgagctggcgcttcaaacaggaaaagtgattgagcagatgggcaaattttacccagaactgaagcttgcctatgccgttcgaggcaataaattggaaagaggccagaagatcagtgagcagattgtcattggcacccctgggaccgtgctggactggtgctccaagctcaagttcattgatcccaagaaaatcaaggtgtttgttctggatgaggctgatgtcatgatagccactcagggccaccaagatcagagcatccgcatccagaggatgctgcccaggaactgccagatgctgcttttctccgccacctttgaagactctgtgtggaagtttgcccagaaagtggtcccagacccaaatgttatcaaactgaagcgtgaggaagagaccctggataccatcaagcagtactatgtcctgtgcagcagcagagacgagaagttccaggccttgtgtaacctctacggggccatcaccattgctcaagccatgatcttctgccatactcgcaaaacagctagttggctggcagcagagctctcaaaagaaggccaccaggtggctctgctgagtggggagatgatggtggagcagagggctgcggtgattgagcgcttccgagagggcaaagagaaggttttggtgaccaccaacgtgtgtgcccgcggcattgatgttgaacaagtgtctgtcgtcatcaactttgatcttcccgtggacaaggacgggaatcctgacaatgagacctacctgcaccggatcgggcgcacgggccgctttggcaagaggggcctggcagtgaacatggtggacagcaagcacagcatgaacatcctgaacagaatccaggagcattttaataagaagatagaaagattggacacagatgatttggacgagattgagaaaatagccaactgagaagctccaccagccactgatgccagccctggcactgcccctgcacaggagacaagtgcatttagggcacaggccccgacatcaccccaaggacaacggcagaagtagagagaaactacctacctcacttcaaattatgtttggacttgacaaaaataggtgcaaatgatggggggcaatagaagaaaaaatttgcattttggaaaattgggtcctttccccacttttttaaagccacattcccccatctttataataatctggtcacagtggtagtcgctggccccaggaccccctcctgattttggctaggcatcgtggaaccagctccagcccctgaagaaacgatagatgtgcaggttgtgcggaagaggctgagtggaaaatggtgtgagccccaccgctgtgcatcgaatgagggaagtggcagcagagaggccagagctgccccctctctgtctcttcaatggacccttcacaagtgtttctcctgcccttggggcgtgtactctccctttctaacctgaggactggcatggacgactttctcctcttgcgtcaa

SEQ ID NO: 335619 - DNA, 1459 bp, Homo sapiens
gtgctcaccgccgcttccggtccgcgtgaggtgcattctcgcgccggtggcgaggttagggcccgcgttgcgacgtggtgcagcgcatattttcacaagtgggtctcccttgtccgggactatggccaccgactcgtgggccctggcggtggacgagcaggaagcggctgtcaagtcgatgaccaatttgcagatcaaggaagagaaagtcaaagcagataccaatggtattatcaaaaccagtaccactgccgagaaaacagatgaagaggagaaagaggacagagctgcccagtccttactcaacaagctgatcagaagcaaccttgttgataacacaaaccaagtggaagtcctgcaacgggatccaaactcccctctgtactcggtgaagtcgtttgaagagcttcggctgaaaccacagcttctccagggagtctatgccatgggcttcaatcgaccctccaagatacaagagaacgcattacccatgatgcttgctgaacccccacagaatctgattgcccagtctcagtctggcactggtaaaacagctgcctttgtcttagccatgctcagccgagtggagccatcagacagatacccccagtgtctgtgcctctccccaacatatgagctggcgcttcaaacaggaaaagtgattgagcagatgggcaaattttacccagaactgaagcttgcctatgccgttcgaggcaataaattggaaagaggccagaagatcagtgagcagattgtcattggcacccctgggaccgtgctggactggtgctccaagctcaagttcattgatcccaagaaaatcaaggtgtttgttctggatgaggctgatgtcatgatagccactcagggccaccaagatcagagcatccgcatccagaggatgctgcccaggaactgccagatgctgcttttctccgccacctttgaagactctgtgtggaagtttgcccagaaagtggtcccagacccaaatgttatcaaactgaagcgtgaggaagagaccctggataccatcaagcagtactatgtcctgtgcagcagcagagacgagaagttccaggccttgtgtaacctctacggggccatcaccattgctcaagccatgatcttctgccatactcgcaaaacagctagttggctggcagcagagctctcaaaagaaggccaccaggtggctctgctgagtggggagatgatggtggagcagagggctgcggtgattgagcgcttccgagagggcaaagagaaggttttggtgaccaccaacgtgtgtgcccgcggcattgatgttgaacaagtgtctgtcgtcatcaactttgatcttcccgtggacaaggacgggaatcctgaaagaaaacctccccctgcgcttggggcggcccccccgtttttttatagaggggggcgggcctaaaaaaaaatggggtggaccaac

SEQ ID NO: 335620 - DNA, 1731 bp, Homo sapiens
gtgctcaccgccgcttccggtccgcgtgaggtgcattctcgcgccggtggcgaggttagggcccgcgttgcgacgtggtgcagcgcatattttcacaagtgggtctcccttgtccgggactatggccaccgactcgtgggccctggcggtggacgagcaggaagcggctgtcaagtcgatgaccaatttgcagatcaaggaagagaaagtcaaagcagataccaatggtattatcaaaaccagtaccactgccgagaaaacagatgaagaggagaaagaggacagagctgcccagtccttactcaacaagctgatcagaagcaaccttgttgataacacaaaccaagtggaagtcctgcaacgggatccaaactcccctctgtactcggtgaagtcgtttgaagagcttcggctgaaaccacagcttctccagggagtctatgccatgggcttcaatcgaccctccaagatacaagagaacgcattacccatgatgcttgctgaacccccacagaatctgattgcccagtctcagtctggcactggtaaaacagctgcctttgtcttagccatgctcagccgagtggagccatcagacagatacccccagtgtctgtgcctctccccaacatatgagctggcgcttcaaacaggaaaagtgattgagcagatgggcaaattttacccagaactgaagcttgcctatgccgttcgaggcaataaattggaaagaggccagaagatcagtgagcagattgtcattggcacccctgggaccgtgctggactggtgctccaagctcaagttcattgatcccaagaaaatcaaggtgtttgttctggatgaggctgatgtcatgatagccactcagggccaccaagatcagagcatccgcatccagaggatgctgcccaggaactgccagatgctgcttttctccgccacctttgaagactctgtgtggaagtttgcccagaaagtggtcccagacccaaatgttatcaaactgaagcgtgaggaagagaccctggataccatcaagcagtactatgtcctgtgcagcagcagagacgagaactcctgattttggctaggcatcgtggaaccagctccagcccctgaagaaacgatagatgtgcaggttgtgcggaagaggctgctgtgagctgaaatggcgccactgcactccagcctgggtaacagagcgagaccccgactcaataaataaataaggatggataaattgtagcgtatgcaccattcattatgctaagacattttaaagtaattatgagaaacgctctactaatgatttgtttttatttgtatttttctgcttattagacaaatatatactcattttaaaaaggcgtgtgtgtatataaagtgagagtgctctctatcccttctcttctgggatcctgattcctggcagcttggtgaatattctaccatattgccttttatttgcataaacccatttttcttttacaaaaacaggaacattctgttcacactactatgcaacctgctttcactgatcagcatgtgttagacatgttgacatgtccaatacacacacatcttccttgccctggaaacaccatccaccttcctttctgcgtgtagctgtcccggcatttatctcctggttcctctagtgacaggcatgggggatttctagtacatggctgttatccacagtaccacaatgaacattttttttttctt

SEQ ID NO: 335621 - DNA, 558 bp, Homo sapiens
catgcttccctgtgctattcaagtgctaataacatcagcatactgggtgccttcaggtctgttaccaaatggctctcctaaactcatcctttatgatttttctgtcagtgtctgtgcctctccccaacatatgagctggcgcttcaaacaggaaaagtgattgagcagatgggcaaattttacccagaactgaagcttgcctatgccgttcgaggcaataaatgtgagtacggcaggcgacaactgaacagtgagcagggtagggggttgggcgtttgaattttgaagatgcgatgaccgtattcaactttctaattcagtctgaccctggagcctaactgtgttgctctatttgaatctatttgaatacctgctaatttgttaacagtctttttcagtcttaaaataagattttcggttgattaaaggtagagttttgaatttagcgtccagagttctgggacctgctaccaaagagggattaacaggactgaggatggaaggttggggtcagctccctttctttaaaagtaagcaaaaccaggtacagtggctcac

SEQ ID NO: 335622 - DNA, 310 bp, Homo sapiens
tttaaaataatcatttattttacaatttaagcagctttttaacagcgtataaaaaaatgtatgaaagtaatttgtgctcaatggagaaaacctgggtaatatagagaagcacgaagggggaaatatgcctttcattcagaaagaacattttgacatgttactgagtttcaccaatttaagtttcatttctgttcttccttgatccagcccacagaatctgattgcccagtctcagtctggcactggtaaaacagctgcctttgtcttagccatgctcagccgagtggagccatcagacagatacccccag

SEQ ID NO: 335623 - DNA, 733 bp, Homo sapiens
cggtccgcgtgaggtgcattctcgcgccggtggcgaggttagggcccgcgttgcgacgtggtgcagcgcatattttcacaagtgggtctcccttgtccgggactatggccaccgactcgtgggccctggcggtggacgagcaggaagcggctgtcaagtcggtcagtagctcagctcctggcgaggaggacgtagcaggggcccaagcgaaacctcccaaaagcacagggagctccccgggttggggaggcccctgggcaacgcgctcctgcagtttgctagggcagtcacttgcccttgatttgctcttagagctaaagagaccaatgtcgagctttttatctccatctgggctggttaaggacttcatcctttggtaaatccgccccactatgcatgctgtcattcctctattgacctcctcggtgacgattataaggaaagccaagtttagattctgattctctttttcattacgcgactgttcttcgcatgtttctgtactactctgtatttaacatttcttagatccatgcttaacgtggttggtagtttgtagctctttgcagaataacagattgacttttggatttaatacctcaatctactgcagatgttggaaggaggcactacaaattgtttcattgatgtgtaaagtaacggtttcatgtacttgttctttcagtaatgaatattcattcaactggaatgtaattacagcatacactgtggc

SEQ ID NO: 335624 - DNA, 599 bp, Homo sapiens
cagtgtctgtgcctctccccaacatatgagctggcgcttcaaacaggaaaagtgattgagcagatgggcaaattttacccagaactgaagcttgcctatgccgttcgaggcaataaatgtgagtacggcaggcgacaactgaacagtgagcagggtagggggttgggcgtttgaattttgaagatgcgatgaccgtattcaactttctaattcagtctgaccctggagcctaactgtgttgctctatttgaatctatttgaatacctgctaatttgttaacagtctttttcagtcttaaaataagattttcggttgattaaaaaaaaaaatccacgcatggctcacagagttcttaatatctagagttcttcgctcagaaggtagagttttgaatttagcgtccagagttctgggacctgctaccaaagagggattaacaggactgaggatggaaggttggggtcagctccctttctttaaaagtaagcaaaaccaggtacagtggctcacacctgcaatcccagccctttgggaggccagggtgggaggactgcttgagcacatggttcgagaccagcctgggcaacatagtaagaca

SEQ ID NO: 335625 - DNA, 2572 bp, Homo sapiens
ttttaagtcaattcacgcgagggcaggcgactagcagttctctcaaggacatagtctatgccatgggcttcaatcgaccctccaagatacaagagaacgcattacccatgatgcttgctgaacccccacagaatctgattgcccagtctcagtctggcactggtaaaacagctgcctttgtcttagccatgctcagccgagtggagccatcagacagatacccccagtgtctgtgcctctccccaacatatgagctggcgcttcaaacaggaaaagtgattgagcagatgggcaaattttacccagaactgaagcttgcctatgccgttcgaggcaataaattggaaagaggccagaagatcagtgagcagattgtcattggcacccctgggaccgtgctggactggtgctccaagctcaagttcattgatcccaagaaaatcaaggtgtttgttctggatgaggctgatgtcatgatagccactcagggccaccaagatcagagcatccgcatccagaggatgctgcccaggaactgccagatgctgcttttctccgccacctttgaagactctgtgtggaagtttgcccagaaagtggtcccagacccaaatgttatcaaactgaagcgtgaggaagagaccctggataccatcaagcagtactatgtcctgtgcagcagcagagacgagaagttccaggccttgtgtaacctctacggggccatcaccattgctcaagccatgatcttctgccatactcgcaaaacagctagttggctggcagcagagctctcaaaagaaggccaccaggtggctctgctgagtggggagatgatggtggagcagagggctgcggtgattgagcgcttccgagagggcaaagagaaggttttggtgaccaccaacgtgtgtgcccgcggcattgatgttgaacaagtgtctgtcgtcatcaactttgatcttcccgtggacaaggacgggaatcctgacaatgagacctacctgcaccggatcgggcgcacgggccgctttggcaagaggggcctggcagtgaacatggtggacagcaagcacagcatgaacatcctgaacagaatccaggagcattttaataagaagatagaaagattggacacagatgatttggacgagattgagaaaatagccaactgagaagctccaccagccactgatgccagccctggcactgcccctgcacaggagacaagtgcatttagggcacaggccccgacatcaccccaaggacaacggcagaagtagagagaaactacctacctcacttcaaattatgtttggacttgacaaaaataggtgcaaatgatggggggcaatagaagaaaaaatttgcattttggaaaattgggtcctttccccacttttttaaagccacattcccccatctttataataatctggtcacagtggtagtcgctggccccaggaccccctcctgattttggctaggcatcgtggaaccagctccagcccctgaagaaacgatagatgtgcaggttgtgcggaagaggctgagtggaaaatggtgtgagccccaccgctgtgcatcgaatgagggaagtggcagcagagaggccagagctgccccctctctgtctcttcaatggacccttcacaagtgtttctcctgcccttggggctgtcttccttctcctgaaatccagagactttcttgctcatcccttctccctttcacttctgttctctgctgcagaaagcagacttgcatatccctgatgagcagctcggctacttttgtaaacttcagatttggagagaaacacgaaagtctgaatcctgaccccttgagagagagtgatctggcgagggccgatgaaggggctgggcctggtcttgccttctcttctctcggttgctccctctgcctaggcccctggtactcagtcacggcagccaggagaccccaggtgagtttctgagcgcatacgtagttggttcttacccccaggtgtcacacggggccgagagctgagcaagaatttggaatggaagttatgaccaagggaattatgctgttcatttataatagtggacattatggagagctctgattcctacataatatgaataaggatggataggccgggcgtggtggctcatgcctataatcccagcacgttgggaggctgaggcgggcggatcggttgagctcaggcgttcgggaccagcctggccaacatgatgaaaccccgtctctaccaaaaatagaaaaaaatatagccgggcctggtggcgcacgcctgtagtcccagctactcgggaggctgaggtaggaggatcgcttgagcctgggtagaggctgctgtgagctgaaatggcgccactgcactccagcctgggtaacagagcgagaccccgactcaataaataaataaggatggataaattgtagcgtatgcaccattcattatgctaagacattttaaagtaattatgagaaacgctctactaatgatttgtttttatttgtatttttctgcttattagacaaatatatactcattttaaaaagg

SEQ ID NO: 335626 - DNA, 2453 bp, Homo sapiens
catgcttccctgtgctattcaagtgctaataacatcagcatactgggtgccttcaggtctgttaccaaatggctctcctaaactcatcctttatgatttttctgtcagtgtctgtgcctctccccaacatatgagctggcgcttcaaacaggaaaagtgattgagcagatgggcaaattttacccagaactgaagcttgcctatgccgttcgaggcaataaattggaaagaggccagaagatcagtgagcagattgtcattggcacccctgggaccgtgctggactggtgctccaagctcaagttcattgatcccaagaaaatcaaggtgtttgttctggatgaggctgatgtcatgatagccactcagggccaccaagatcagagcatccgcatccagaggatgctgcccaggaactgccagatgctgcttttctccgccacctttgaagactctgtgtggaagtttgcccagaaagtggtcccagacccaaatgttatcaaactgaagcgtgaggaagagaccctggataccatcaagcagtactatgtcctgtgcagcagcagagacgagaagttccaggccttgtgtaacctctacggggccatcaccattgctcaagccatgatcttctgccatactcgcaaaacagctagttggctggcagcagagctctcaaaagaaggccaccaggtggctctgctgagtggggagatgatggtggagcagagggctgcggtgattgagcgcttccgagagggcaaagagaaggttttggtgaccaccaacgtgtgtgcccgcggcattgatgttgaacaagtgtctgtcgtcatcaactttgatcttcccgtggacaaggacgggaatcctgacaatgagacctacctgcaccggatcgggcgcacgggccgctttggcaagaggggcctggcagtgaacatggtggacagcaagcacagcatgaacatcctgaacagaatccaggagcattttaataagaagatagaaagattggacacagatgatttggacgagattgagaaaatagccaactgagaagctccaccagccactgatgccagccctggcactgcccctgcacaggagacaagtgcatttagggcacaggccccgacatcaccccaaggacaacggcagaagtagagagaaactacctacctcacttcaaattatgtttggacttgacaaaaataggtgcaaatgatggggggcaatagaagaaaaaatttgcattttggaaaattgggtcctttccccacttttttaaagccacattcccccatctttataataatctggtcacagtggtagtcgctggccccaggaccccctcctgattttggctaggcatcgtggaaccagctccagcccctgaagaaacgatagatgtgcaggttgtgcggaagaggctgagtggaaaatggtgtgagccccaccgctgtgcatcgaatgagggaagtggcagcagagaggccagagctgccccctctctgtctcttcaatggacccttcacaagtgtttctcctgcccttggggctgtcttccttctcctgaaatccagagactttcttgctcatcccttctccctttcacttctgttctctgctgcagaaagcagacttgcatatccctgatgagcagctcggctacttttgtaaacttcagatttggagagaaacacgaaagtctgaatcctgaccccttgagagagagtgatctggcgagggccgatgaaggggctgggcctggtcttgccttctcttctctcggttgctccctctgcctaggcccctggtactcagtcacggcagccaggagaccccaggtgagtttctgagcgcatacgtagttggttcttacccccaggtgtcacacggggccgagagctgagcaagaatttggaatggaagttatgaccaagggaattatgctgttcatttataatagtggacattatggagagctctgattcctacataatatgaataaggatggataggccgggcgtggtggctcatgcctataatcccagcacgttgggaggctgaggcgggcggatcggttgagctcaggcgttcgggaccagcctggccaacatgatgaaaccccgtctctaccaaaaatagaaaaaaatatagccgggcctggtggcgcacgcctgtagtcccagctactcgggaggctgaggtaggaggatcgcttgagcctgggtagaggctgctgtgagctgaaatggcgccactgcactccagcctgggtaacagagcgagaccccgactcaataaataaataaggatggataaattgtagcgtatgcaccattcattatgctaagacattttaaagtaattatgagaaacgctctactaatgatttgtttttatttgtatttttctgcttattagacaaatatatactcattttaaaaagg

SEQ ID NO: 335627 - DNA, 2534 bp, Homo sapiens
aaataaataaataaataaacataaaaagagttggatgatgttggattataggaggaagaagaagggaactgatgcttattgaaggattgctgtgtgggatttgatcctgaccacagtgcactgagataggtgtcattctgcccacttcacagcagaagagaccaagactgaggggaacactcatgtgtgttttgaaatctggaaataacttgttctcctagtcctagaaggatgggcagggctttgatttccagagctggctttgcctttgaaatacctatgaaaatcacctgggtctccacagtggaaagaggccagaagatcagtgagcagattgtcattggcacccctgggaccgtgctggactggtgctccaagctcaagttcattgatcccaagaaaatcaaggtgtttgttctggatgaggctgatgtcatgatagccactcagggccaccaagatcagagcatccgcatccagaggatgctgcccaggaactgccagatgctgcttttctccgccacctttgaagactctgtgtggaagtttgcccagaaagtggtcccagacccaaatgttatcaaactgaagcgtgaggaagagaccctggataccatcaagcagtactatgtcctgtgcagcagcagagacgagaagttccaggccttgtgtaacctctacggggccatcaccattgctcaagccatgatcttctgccatactcgcaaaacagctagttggctggcagcagagctctcaaaagaaggccaccaggtggctctgctgagtggggagatgatggtggagcagagggctgcggtgattgagcgcttccgagagggcaaagagaaggttttggtgaccaccaacgtgtgtgcccgcggcattgatgttgaacaagtgtctgtcgtcatcaactttgatcttcccgtggacaaggacgggaatcctgacaatgagacctacctgcaccggatcgggcgcacgggccgctttggcaagaggggcctggcagtgaacatggtggacagcaagcacagcatgaacatcctgaacagaatccaggagcattttaataagaagatagaaagattggacacagatgatttggacgagattgagaaaatagccaactgagaagctccaccagccactgatgccagccctggcactgcccctgcacaggagacaagtgcatttagggcacaggccccgacatcaccccaaggacaacggcagaagtagagagaaactacctacctcacttcaaattatgtttggacttgacaaaaataggtgcaaatgatggggggcaatagaagaaaaaatttgcattttggaaaattgggtcctttccccacttttttaaagccacattcccccatctttataataatctggtcacagtggtagtcgctggccccaggaccccctcctgattttggctaggcatcgtggaaccagctccagcccctgaagaaacgatagatgtgcaggttgtgcggaagaggctgagtggaaaatggtgtgagccccaccgctgtgcatcgaatgagggaagtggcagcagagaggccagagctgccccctctctgtctcttcaatggacccttcacaagtgtttctcctgcccttggggctgtcttccttctcctgaaatccagagactttcttgctcatcccttctccctttcacttctgttctctgctgcagaaagcagacttgcatatccctgatgagcagctcggctacttttgtaaacttcagatttggagagaaacacgaaagtctgaatcctgaccccttgagagagagtgatctggcgagggccgatgaaggggctgggcctggtcttgccttctcttctctcggttgctccctctgcctaggcccctggtactcagtcacggcagccaggagaccccaggtgagtttctgagcgcatacgtagttggttcttacccccaggtgtcacacggggccgagagctgagcaagaatttggaatggaagttatgaccaagggaattatgctgttcatttataatagtggacattatggagagctctgattcctacataatatgaataaggatggataggccgggcgtggtggctcatgcctataatcccagcacgttgggaggctgaggcgggcggatcggttgagctcaggcgttcgggaccagcctggccaacatgatgaaaccccgtctctaccaaaaatagaaaaaaatatagccgggcctggtggcgcacgcctgtagtcccagctactcgggaggctgaggtaggaggatcgcttgagcctgggtagaggctgctgtgagctgaaatggcgccactgcactccagcctgggtaacagagcgagaccccgactcaataaataaataaggatggataaattgtagcgtatgcaccattcattatgctaagacattttaaagtaattatgagaaacgctctactaatgatttgtttttatttgtatttttctgcttattagacaaatatatactcattttaaaaagg

SEQ ID NO: 335628 - DNA, 2360 bp, Homo sapiens
tcccttcacttcagacgcctcctctggcttctgcctgggtcttggctctcgtactctcagcagcatttgtttgacgggccatttccatgtcagcgctgatcacagtccctcccaacctgggttgagaaaggagacctagggactcttccccaacccttgtccccatcccaggcctgctgctcctcctccccaagatgctcctcccccatcagccttcctgggcatctagaccctcccagctggggaggctgtgcttccgttgcttcccagggccacctggggccatctacccgggccttcccttgcaggatgctgcccaggaactgccagatgctgcttttctccgccacctttgaagactctgtgtggaagtttgcccagaaagtggtcccagacccaaatgttatcaaactgaagcgtgaggaagagaccctggataccatcaagcagtactatgtcctgtgcagcagcagagacgagaagttccaggccttgtgtaacctctacggggccatcaccattgctcaagccatgatcttctgccatactcgcaaaacagctagttggctggcagcagagctctcaaaagaaggccaccaggtggctctgctgagtggggagatgatggtggagcagagggctgcggtgattgagcgcttccgagagggcaaagagaaggttttggtgaccaccaacgtgtgtgcccgcggcattgatgttgaacaagtgtctgtcgtcatcaactttgatcttcccgtggacaaggacgggaatcctgacaatgagacctacctgcaccggatcgggcgcacgggccgctttggcaagaggggcctggcagtgaacatggtggacagcaagcacagcatgaacatcctgaacagaatccaggagcattttaataagaagatagaaagattggacacagatgatttggacgagattgagaaaatagccaactgagaagctccaccagccactgatgccagccctggcactgcccctgcacaggagacaagtgcatttagggcacaggccccgacatcaccccaaggacaacggcagaagtagagagaaactacctacctcacttcaaattatgtttggacttgacaaaaataggtgcaaatgatggggggcaatagaagaaaaaatttgcattttggaaaattgggtcctttccccacttttttaaagccacattcccccatctttataataatctggtcacagtggtagtcgctggccccaggaccccctcctgattttggctaggcatcgtggaaccagctccagcccctgaagaaacgatagatgtgcaggttgtgcggaagaggctgagtggaaaatggtgtgagccccaccgctgtgcatcgaatgagggaagtggcagcagagaggccagagctgccccctctctgtctcttcaatggacccttcacaagtgtttctcctgcccttggggctgtcttccttctcctgaaatccagagactttcttgctcatcccttctccctttcacttctgttctctgctgcagaaagcagacttgcatatccctgatgagcagctcggctacttttgtaaacttcagatttggagagaaacacgaaagtctgaatcctgaccccttgagagagagtgatctggcgagggccgatgaaggggctgggcctggtcttgccttctcttctctcggttgctccctctgcctaggcccctggtactcagtcacggcagccaggagaccccaggtgagtttctgagcgcatacgtagttggttcttacccccaggtgtcacacggggccgagagctgagcaagaatttggaatggaagttatgaccaagggaattatgctgttcatttataatagtggacattatggagagctctgattcctacataatatgaataaggatggataggccgggcgtggtggctcatgcctataatcccagcacgttgggaggctgaggcgggcggatcggttgagctcaggcgttcgggaccagcctggccaacatgatgaaaccccgtctctaccaaaaatagaaaaaaatatagccgggcctggtggcgcacgcctgtagtcccagctactcgggaggctgaggtaggaggatcgcttgagcctgggtagaggctgctgtgagctgaaatggcgccactgcactccagcctgggtaacagagcgagaccccgactcaataaataaataaggatggataaattgtagcgtatgcaccattcattatgctaagacattttaaagtaattatgagaaacgctctactaatgatttgtttttatttgtatttttctgcttattagacaaatatatactcattttaaaaagg

SEQ ID NO: 335629 - DNA, 1617 bp, Homo sapiens
gtgctcaccgccgcttccggtccgcgtgaggtgcattctcgcgccggtggcgaggttagggcccgcgttgcgacgtggtgcagcgcatattttcacaagtgggtctcccttgtccgggactatggccaccgactcgtgggccctggcggtggacgagcaggaagcggctgtcaagtcgatgaccaatttgcagatcaaggaagagaaagtcaaagcagataccaatggtattatcaaaaccagtaccactgccgagaaaacagatgaagaggagaaagaggacagagctgcccagtccttactcaacaagctgatcagaagcaaccttgttgataacacaaaccaagtggaagtcctgcaacgggatccaaactcccctctgtactcggtgaagtcgtttgaagagcttcggctgaaaccacagcttctccagggagtctatgccatgggcttcaatcgaccctccaagatacaagagaacgcattacccatgatgcttgctgaacccccacagaatctgattgcccagtctcagtctggcactggtaaaacagctgcctttgtcttagccatgctcagccgagtggagccatcagacagatacccccagtgtctgtgcctctccccaacatatgagctggcgcttcaaacaggaaaagtgattgagcagatgggcaaattttacccagaactgaagcttgcctatgccgttcgaggcaataaattggaaagaggccagaagatcagtgagcagattgtcattggcacccctgggaccgtgctggactggtgctccaagctcaagttcattgatcccaagaaaatcaaggtgtttgttctggatgaggctgatgtcatgatagccactcagggccaccaagatcagagcatccgcatccagaggatgctgcccaggaactgccagatgctgcttttctccgccacctttgaagactctgtgtggaagtttgcccagaaagtggtcccagacccaaatgttatcaaactgaagcgtgaggaagagaccctggataccatcaagcagtactatgtcctgtgcagcagcagagacgagaagttccaggccttgtgtaacctctacggggccatcaccattgctcaagccatgatcttctgccatactcgcaaaacagctagttggctggcagcagagctctcaaaagaaggccaccaggtggctctgctgagtggggagatgatggtggagcagagggctgcggtgattgagcgcttccgagagggcaaagagaaggttttggtgaccaccaacgtgtgtgcccgcggtgagcagaggacgtgtcccacctggtctgccaggctcggggtcccaggcccaattagagccagaaatccttgtatacagggaagtcggatggtctcagggagatgggtggggttggtgacactattcctttctaggagagactgtttggatttccctgaggtggtaagaactcacacatgccaggtgcggtggctcatgcctgcaatcccaaggcaggaaaattgcttgaaccctggagacagaggttgcagtgagccgagaatgtgctatagcactccatcctgggtgacagagtgagactctgtctccaa

SEQ ID NO: 335630 - DNA, 1060 bp, Homo sapiens
gtgctcaccgccgcttccggtccgcgtgaggtgcattctcgcgccggtggcgaggttagggcccgcgttgcgacgtggtgcagcgcatattttcacaagtgggtctcccttgtccgggactatggccaccgactcgtgggccctggcggtggacgagcaggaagcggctgtcaagtcgatgaccaatttgcagatcaaggaagagaaagtcaaagcagataccaatggtattatcaaaaccagtaccactgccgagaaaacagatgaagaggagaaagaggacagagctgcccagtccttactcaacaagctgatcagaagcaaccttgttgataacacaaaccaagtggaagtcctgcaacgggatccaaactcccctctgtactcggtgaagtcgtttgaagagcttcggctgaaaccacagcttctccagggagtctatgccatgggcttcaatcgaccctccaagatacaagagaacgcattacccatgatgcttgctgaacccccacagaatctgattgcccagtctcagtctggcactggtaaaacagctgcctttgtcttagccatgctcagccgagtggagccatcagacagatacccccagtgtctgtgcctctccccaacatatgagctggcgcttcaaacaggaaaagtgattgagcagatgggcaaattttacccagaactgaagcttgcctatgccgttcgaggcaataaatgtgagtacggcaggcgacaactgaacagtgagcagggtagggggttgggcgtttgaattttgaagatgcgatgaccgtattcaactttctaattcagtctgaccctggagcctaactgtgttgctctatttgaatctatttgaatacctgctaatttgttaacagtctttttcagtcttaaaataagattttcggttgattaaaggtagagttttgaatttagcgtccagagttctgggacctgctaccaaagagggattaacaggactgaggatggaaggttggggtcagctccctttctttaaaagtaagcaaaaccaggtacagtggctcac

SEQ ID NO: 335631 - DNA, 477 bp, Homo sapiens
aggatgctgcccaggaactgccagatgctgcttttctccgccacctttgaagactctgtgtggaagtttgcccagaaagtggtcccagacccaaatgttatcaaactgaagcgtgaggaagagaccctggataccatcaagcagtactatgtcctgtgcagcagcagagacgagaagttccaggccttgtgtaacctctacggggccatcaccattgctcaagccatgatcttctgccatgtgagtagcagcggcagtggcaggcctggcccctccctctcagccagctccccacagggctcaggaggactggatgcccctgagcgccatggaaagaagggaagtgctttttgaagatgtaagagacaggctctcctttagtgggggtaatggtagtatcccaagggatacatagcctaaagatagagcccctgaactttatgtcttatttgtggatgatgtattgttgcacaaccc

SEQ ID NO: 335632 - DNA, 708 bp, Homo sapiens
aaataaaaaaataaataaaaataaaaaaaataaaaaaagcatatttttgaaaagttttcgggccaggcacagtggctcatgcctgcttccactttcccatctcctttgactttgaccttttgtatccctttttcacttattaggaccttttaaggacattgtgcccacctggatcacccaggagacgctccccaactcaaaatcattaactgaatcacacctgcaaagttgcaaagtccttttagctgtgtaaggcactgtattcacagatcctgggggcgaggacgtgggggtctagagacgcatatcttcgggggccatgatctgtctcctatattagggacatagcagaagtcccactgaccagatagaggagacttaatagagtgacgaagaaactgtaaaaagctaagtgggaactcaacatttttctgctcacagctctcaagggaaagaccaaagtcctccccggtggccttcaaggtattatatatcacccctctgacctcaactccccctcccctttgctcagtgggccccaaccacaccagccccttcctgctccctggacacctctaagccttttccggcctctgggtttgactttccctcctagacccatctgtccttggagtctcatctccgattccagctcaaatgtcatcttctctgagaggcccaccgcagtggccccacagagagagcgtc

SEQ ID NO: 335633 - DNA, 511 bp, Homo sapiens
atgctggcaggaagggctctctggcagccttatatgacttggctgtccttaaaaaaaaggttaaggaaaaagaggaaaagaagaagaagaaaataaaaacgatcaaatcagaggcagaggacctggccgagccgctaagcagtactgaaggggtcgcacctctctcacaggccccctctccgctggcaattcctgctatcaaggaagagccccttgaagacctcaagccttgccttggaatcaatgaaatatcttccagcttcttctctcttctattagagatcttgctgctggagagtcaggctagccttcctatgctagaggagcgagttttggattggcagtcatcgccagccagctccctcaacagctggttctctgcggcccccaactgggctgagttggtactaccagccctgcagtatcttgctggagaaagtcgagctgttccttccagtttctctccatttgttgaattcaaagagaaaacccagcagtggaagttgcttgg

SEQ ID NO: 335634 - DNA, 169 bp, Homo sapiens
ccagcataactattaatagcatccctttgactcacaagtatcctgattcaggtgataaattacatgatcacctcatccataggagatagtaagtgcctaagaagataaaaaacaaaacaccaacgacctagaactaacccaccagatcccttcattaactgattcttcc

SEQ ID NO: 335635 - DNA, 657 bp, Homo sapiens
caagtagaagaggatgatttctagctctctattggaatttcagattaatgtctacaaaactcactaaagtccttgtattgaataattctttacccaactgatagcagttaggcttcattttcaatgccattaactctgagagcaaacgacaggcttttggtctgccaatatattaaaagtgtgtttctgaggaaatttcaatgagtcattcgtttatataacaaatacttgttgagcatctactttctattgggtactgttatagggattagagataacagctgcaagcaagtaaaaggcccttgctttctcagagctttcattccaggaaggagagaaagagagtaaccacacacatcaatagatgaccaggctgttgtgaagacacaaaagccaaatgagttgagggagagactgggggttagacaagggtgtttagggaagcactctaaagtgaggtgacgtggagttaaaattctgaatgataaaaaaaatgaaccacctatgtgaccatttgaggatggaacattccagacagagaggaaggcagatacaaatattctaggatgggaaggagctcagaatgtctgagagaattgaagacaagctttgtgcttagagcagagcaagctactttgaggttagagagggagccag

SEQ ID NO: 335636 - DNA, 215 bp, Homo sapiens
aggaagaagggaaggaacacaccctcacaggctcttccctggctgcattcatgcactgtgtcccgcttctcagtggaaccagctatcagcaccatggacagaacccgggagattgggtcctcagagcaagtaaaatgattcaggagtgtctggccaaggcactaactacagagatttttatttcatgtgaataaacagttttctgtttgacttca

SEQ ID NO: 335637 - DNA, 611 bp, Homo sapiens
gaggatgtagcaaatggtaacctgcagaaaatgatcccaaattcagtttttcagagacttaaatgatgcctatgtgtttgggagacacgaagtggataacaggcaggaaataaaaagtcccactatagagtaaaaattaagtccatagcatgaactatgagattaacaatgtaaatttgtgtttttttgttttgttttgagacgagtctcgctctgtcatccaggctggagtgcagtggcacgatcttggctcactgcaacctccgtctcccaggttcaagcgattctcctgcctctgcctactgagtagctgggattacaggcacatgccaccacacccgactaatttgggtatctccagtagagaggggacttcaccaggtgggccaagctggtctcgaactcctgacctcaagtgatctgcctccttgacctggaaaagtgctgggatcacaggcatgagccaccacgcctgtccggttatgggatttttataagaaaattttactataattttcagataactttatgtcactgtcatccattacattttaatttttgaaactgatgtctttcccagaatttatgtactctataacggtgtgaatgat

SEQ ID NO: 335638 - DNA, 3034 bp, Homo sapiens
ctgccggctttcaaaatcctcctcctccgccatcatccgccgcggtgcggagagcaggtggtgctggaagcgcgtgaggccgggagctcgagagagctaacagactagccggctggacatctggaccgctggatccggaggtggcgaccccggcctgacccggaccctaaatccgtccccgccccagagggcggaggcgcgcgctcgattccccccacgcggcggcgccgcctgtttacgtctgcagatctccaggggagcccaccagcctagtcaacatggcctcggaagacattgccaagctggcagagacacttgccaagactcaggtggccgggggacagctgagtttcaaaggcaagagcctcaaactcaacactgcagaagatgctaaagatgtgattaaagagattgaagactttgacagcttggaggctctgcgtctggaaggcaacacagtgggcgtggaagcagccagggtcatcgccaaggccttagagaagaagtcggagttgaagcgctgccactggagtgacatgttcacgggaaggctgcggaccgagatcccaccagccctgatctcactaggggaaggactcatcacagctggggctcagctggtggagctggacttaagcgacaacgcattcgggcccgacggtgtgcaaggcttcgaggccctgctcaagagctcagcctgcttcaccctgcaggaactcaagctcaacaactgtggcatgggcattggcggcggcaagatcctggctgcagctctgaccgaatgtcaccggaaatccagtgcccaaggcaagcctctggccctgaaggtctttgtggctggcagaaaccgtctggagaatgatggcgccactgccttggcagaagcttttagggtcatcgggaccctggaggaggtccacatgccacagaatgggatcaaccaccctggcatcactgccctggcccaggctttcgctgtcaaccccctgctgcgggtcatcaacctgaatgacaacaccttcactgagaagggcgccgtggccatggccgagaccttgaagaccttgcggcaggtggaggtgattaattttggggactgcctggtgcgctccaagggtgcagttgccattgcagatgccatccgcggcggcctgcccaagctaaaggagctgaacttgtcattctgtgaaatcaagagggatgctgccctggctgttgctgaggccatggcagacaaagctgagctggagaagctggacctgaatggcaacaccctgggagaagaaggctgtgaacagcttcaggaggtgctggagggcttcaacatggccaaggtgctggcgtccctcagtgatgacgaggacgaggaggaggaggaggaaggagaagaggaagaagaggaagcagaagaagaggaggaggaagatgaggaagaggaggaagaagaggaggaggaggaggaagaagagcctcagcagcgagggcagggagagaagtcagccacgccctcacggaagattctggaccctaacactggggagccagctcccgtgctgtcctccccacctcctgcagacgtctccaccttcctggcttttccctctccagagaagctgctgcgcctagggcccaagagctccgtgctgatagcccagcagactgacacgtctgaccccgagaaggtggtctctgccttcctaaaggtgtcatctgtgttcaaggacgaagctactgtgaggatggcagtgcaggatgcagtagatgccctgatgcagaaggctttcaactcctcgtccttcaactccaacaccttcctcaccaggctcctcgtgcacatgggtctgctcaagagtgaagacaaggtcaaggccattgccaacctgtacggccccctgatggcgctgaaccacatggtgcagcaggactatttccccaaggcccttgcacccctgctgctggcgttcgtgaccaagcccaacagcgccctggaatcctgctccttcgcccgccacagtctgctgcagacgctgtacaaggtctagactcaaagcctctcccatcccttggcctggaccagtgagctggggagggactcggatgaactgaggcgcagcctacgccattgccttggacaggactctggccacaggcagggcgggtctgtgtcccatgtgtcctgtcagtcccctgagtatgtgtgtgggtgtggcgcatgtgcaggtctgtgcctcctgtcgggatttgggttttaacgtcttctgctggcccagccctgctctgttgtggggagttggcccccaggggaaagggctgtgagctgctccgccattaaactcacctccacctgagggcgctctgctgatctccgcctgggccctgatggccgtccccacccacctgccttccggcccggctccctggcggagccagaacccagggagttgcccgcgtgctgtccttcccctctgtgttgtgattgggttgtttcctgccctgcctggggctgcttctcgtcaccaagccctggtcctgcggcagctgtcacccctaccatccataccactgtgctgaccgctcagcctgaagagcagagaatgccatgggtgggactgtgggggtcggatcgtggggttgttggcagagggcaaccctgggccccacaccgtgtggacaggcagacaccagattgtccaggagcaggagctgctgggactgcgctggccccggacctagtgggccttctcctggctgctgagatgtcgtctgtgactggcctggctggagggggagtgttgacaacccaaagctgttctccagtctggggagggagaggcagggtccccaatgtccgagctgcatctggacgctgctcttaaaggacctcctggggcaggggagcggtagggtctggactgggcagatgctgtatgacctccctgagcacccgtgactgccccatgctttcccctttgtgctctgtgtgtgtctgggctgtgcccgggggcttcacaaataaagtcgtgtggcagcttca

SEQ ID NO: 335639 - DNA, 1570 bp, Homo sapiens
  misc_feature (2)..(2): n is a, c, g, or t
  misc_feature (5)..(5): n is a, c, g, or t
  misc_feature (7)..(7): n is a, c, g, or t
  misc_feature (10)..(10): n is a, c, g, or t
  misc_feature (13)..(13): n is a, c, g, or t
  misc_feature (30)..(30): n is a, c, g, or t
  misc_feature (39)..(39): n is a, c, g, or t
  misc_feature (42)..(43): n is a, c, g, or t
  misc_feature (47)..(47): n is a, c, g, or t
  misc_feature (73)..(74): n is a, c, g, or t
  misc_feature (79)..(79): n is a, c, g, or t
  misc_feature (83)..(83): n is a, c, g, or t
  misc_feature (87)..(87): n is a, c, g, or t
  misc_feature (114)..(115): n is a, c, g, or t
  misc_feature (184)..(184): n is a, c, g, or t
  misc_feature (281)..(281): n is a, c, g, or t
  misc_feature (325)..(325): n is a, c, g, or t
  misc_feature (355)..(355): n is a, c, g, or t
  misc_feature (1550)..(1550): n is a, c, g, or t
tngcnancanacngtgccctgtctctactnaaaatacanaannattngctggacatggtggtgggtgcctgtnntcccngctnctcnggaggctgaggcaggagaatgacatgnnccttggaggcggagcttgcagtgagcccagatggcgccactgtgctccagcctgggcgactgagcgagnctccgtctcaaaaaaaaaaaattctttcatttatttagttacttttagagatagagcctcccgctgttgcccaggctggagtgcagtggcagtcatngcttactgcagctttgaactcctgggctcaaatgatcctcctgnctcagcctctccagtagctgggactgactncaggcacgtgccaccacacccagctaatttttatttttatttttatttttttgagacagggttttactctgtcacccaggctagagtgcagtggtgagatcatggctcactgtagcctctgtctccggggctcaatcaatcctcccacctcagcctccccagtggctgggattactggtgcacaccaccataccctgctaattgtatttatttttagtagagatgggattttgccatgttgcccagactggtcttgagctgctgggctcaagcgatcttcccatcacagcttcccaatgtgctgggattacaggtgtgagccactgtacctggccagctttacttcttttaccagcactcctgattttataaatagtgaggcttatcaaccccatttctacccaaatcttctggtagacttgagtatagtagggcttcataggtagcagccctgtccctgtcctattatgatggtagctgttgtgatgtggcgatctctgatctagaaacccctgaggggccattgtggcctgcccagtctcccggccacggttgaaaccagacgtgcagtggggctgacccctgtgccccaccccagagtcatgccagcgtgggtggtggggcattctctgggatgaatgatctggatcccatagccatctgtgtcctgtttgaggaatgggaccctcaaacagagaacagccaagatgctcaagcagtggtttatctctagggtctccatagcaggggaggtagggtcagactcctgagatggctgatgtcctaccctgcccccaaccaggggccccaggagactcctttttcttactgcaactttggcctcctcagtctgcagatctccaggggagcccaccagcctagtcaacatggcctcggaagacattgccaagctggcagagacacttgccaagactcaggtggccgggggacagctgagtttcaaaggcaagagcctcaaactcaacactgcagaagatgctaaagatgtgattaaagagattgaagactttgacagcttggaggctctgcgtctggaaggcaacacagtgggcgtggaagcagccagggtcatcgccaaggccttagagaagaagtcggagttgaagcgctgccactggagtgacatgttcacgggaaggctgcggaccgagatcccaccagccctgatctcacnagggaaggaggggtaccgag

SEQ ID NO: 335640 - DNA, 678 bp, Homo sapiens
ctgccggctttcaaaatcctcctcctccgccatcatccgccgcggtgcggagagcaggtggtgctggaagcgcgtgaggccgggagctcgagagagctaacagactagccggctggacatctggaccgctggatccggaggtggcgaccccggcctgacccggaccctaaatccgtccccgccccagagggcggaggcgcgcgctcgattccccccacgcggcggcgccgcctgtttacgagacggtctccttctgtcacccaggctggagtgtagtggaacgatcaccgctgaactgcagcgtcggcttcctgggctcaagcgatcctcccacctcaacctcccaagtcatggggactacagatgccatcacacctggctaatttttaaatttttctgtggagacagggtctcattctgttgcccaggcttgtctcgaaccctggtctaaagtgatcttcccgcctagcctcccaaaatgttggaattacaggtgtgagttattgcactgggctggtttctggttaatttattttttgaaacagggtctccagaagtacagcagcaagatctcagctcactgtagcctccacctacggggctcaagtgatcctcccaccttacatcccaggtagctgggactgcaggcacctgccaccacacccagctagtttttgt

SEQ ID NO: 335641 - DNA, 455 bp, Homo sapiens
gtactggaccgtcgtgctagatgaattctgcttcactatggcagaagcaggaaacaagctacaggagctgaacttgtcattctgtgaaatcaagagggatgctgccctggctgttgctgaggccatggcagacaaagctgagctggagaagctggacctgaatgcaacaccctggcagaagcaggaagcgcttcctgcttctgcctaggggttggtgattcttacgttgttgttccacaggttacagtgactcttcttctcatcctgctgttattcttcatgaattggcttctaggcaacccagtagtgtacatataccaaaagggctcacctcagccagcacaggaggcttcttgaagttctagtcctctttatgaaacatccactgaattgcttccaagactaggttaccactctaacaaggcactctgctatacattgcttcctgcttctgc

SEQ ID NO: 335642 - DNA, 3287 bp, Homo sapiens
ctgccggctttcaaaatcctcctcctccgccatcatccgccgcggtgcggagagcaggtggtgctggaagcgcgtgaggccgggagctcgagagagctaacagactagccggctggacatctggaccgctggatccggaggtggcgaccccggcctgacccggaccctaaatccgtccccgccccagagggcggaggcgcgcgctcgattccccccacgcggcggcgccgcctgtttacgagacggtctccttctgtcacccaggctggagtgtagtggaacgatcaccgctgaactgcagcgtcggcttcctgggctcaagcgatcctcccacctcaacctcccaagtcatggggactacagatgccatcacacctggctaatttttaaatttttctgtggagacagggtctcattctgttgcccaggcttgtctcgaaccctggtctaaagtgatcttcccgcctagcctcccaaaatgttggaattacagtctgcagatctccaggggagcccaccagcctagtcaacatggcctcggaagacattgccaagctggcagagacacttgccaagactcaggtggccgggggacagctgagtttcaaaggcaagagcctcaaactcaacactgcagaagatgctaaagatgtgattaaagagattgaagactttgacagcttggaggctctgcgtctggaaggcaacacagtgggcgtggaagcagccagggtcatcgccaaggccttagagaagaagtcggagttgaagcgctgccactggagtgacatgttcacgggaaggctgcggaccgagatcccaccagccctgatctcactaggggaaggactcatcacagctggggctcagctggtggagctggacttaagcgacaacgcattcgggcccgacggtgtgcaaggcttcgaggccctgctcaagagctcagcctgcttcaccctgcaggaactcaagctcaacaactgtggcatgggcattggcggcggcaagatcctggctgcagctctgaccgaatgtcaccggaaatccagtgcccaaggcaagcctctggccctgaaggtctttgtggctggcagaaaccgtctggagaatgatggcgccactgccttggcagaagcttttagggtcatcgggaccctggaggaggtccacatgccacagaatgggatcaaccaccctggcatcactgccctggcccaggctttcgctgtcaaccccctgctgcgggtcatcaacctgaatgacaacaccttcactgagaagggcgccgtggccatggccgagaccttgaagaccttgcggcaggtggaggtgattaattttggggactgcctggtgcgctccaagggtgcagttgccattgcagatgccatccgcggcggcctgcccaagctaaaggagctgaacttgtcattctgtgaaatcaagagggatgctgccctggctgttgctgaggccatggcagacaaagctgagctggagaagctggacctgaatggcaacaccctgggagaagaaggctgtgaacagcttcaggaggtgctggagggcttcaacatggccaaggtgctggcgtccctcagtgatgacgaggacgaggaggaggaggaggaaggagaagaggaagaagaggaagcagaagaagaggaggaggaagatgaggaagaggaggaagaagaggaggaggaggaggaagaagagcctcagcagcgagggcagggagagaagtcagccacgccctcacggaagattctggaccctaacactggggagccagctcccgtgctgtcctccccacctcctgcagacgtctccaccttcctggcttttccctctccagagaagctgctgcgcctagggcccaagagctccgtgctgatagcccagcagactgacacgtctgaccccgagaaggtggtctctgccttcctaaaggtgtcatctgtgttcaaggacgaagctactgtgaggatggcagtgcaggatgcagtagatgccctgatgcagaaggctttcaactcctcgtccttcaactccaacaccttcctcaccaggctcctcgtgcacatgggtctgctcaagagtgaagacaaggtcaaggccattgccaacctgtacggccccctgatggcgctgaaccacatggtgcagcaggactatttccccaaggcccttgcacccctgctgctggcgttcgtgaccaagcccaacagcgccctggaatcctgctccttcgcccgccacagtctgctgcagacgctgtacaaggtctagactcaaagcctctcccatcccttggcctggaccagtgagctggggagggactcggatgaactgaggcgcagcctacgccattgccttggacaggactctggccacaggcagggcgggtctgtgtcccatgtgtcctgtcagtcccctgagtatgtgtgtgggtgtggcgcatgtgcaggtctgtgcctcctgtcgggatttgggttttaacgtcttctgctggcccagccctgctctgttgtggggagttggcccccaggggaaagggctgtgagctgctccgccattaaactcacctccacctgagggcgctctgctgatctccgcctgggccctgatggccgtccccacccacctgccttccggcccggctccctggcggagccagaacccagggagttgcccgcgtgctgtccttcccctctgtgttgtgattgggttgtttcctgccctgcctggggctgcttctcgtcaccaagccctggtcctgcggcagctgtcacccctaccatccataccactgtgctgaccgctcagcctgaagagcagagaatgccatgggtgggactgtgggggtcggatcgtggggttgttggcagagggcaaccctgggccccacaccgtgtggacaggcagacaccagattgtccaggagcaggagctgctgggactgcgctggccccggacctagtgggccttctcctggctgctgagatgtcgtctgtgactggcctggctggagggggagtgttgacaacccaaagctgttctccagtctggggagggagaggcagggtccccaatgtccgagctgcatctggacgctgctcttaaaggacctcctggggcaggggagcggtagggtctggactgggcagatgctgtatgacctccctgagcacccgtgactgccccatgctttcccctttgtgctctgtgtgtgtctgggctgtgcccgggggcttcacaaataaagtcgtgtggcagcttca

SEQ ID NO: 335643 - DNA, 3472 bp, Homo sapiens
ttcctttccccgtcacctgcctggaacaggggtgcggggcgaggagggcgtggcgcccgtgtgcgccttctgcctgccccctcggccttcttcacttagccttcgacggccgagcgccccaggggtggcggtgggagtggggttgttgagcggcgctggctcctttcacaaatggggaaactgaggcttaaagggcgtctgactcgccagagcagctcagcctgcagctgctagcagtggcgtctcatattagcattgttgtcaaccggaggcggtgcgagtccgccggggattccagatggggctcctgcgccgcccgcctatcatttgcggcctgtattcgcgcgtcgctcccgcagagccacctcccagcaggcccacgcccgcgggggccccgggctggcgccgctgtccctggaatcgatagacggtctccttctgtcacccaggctggagtgtagtggaacgatcaccgctgaactgcagcgtcggcttcctgggctcaagcgatcctcccacctcaacctcccaagtcatggggactacagatgccatcacacctggctaatttttaaatttttctgtggagacagggtctcattctgttgcccaggcttgtctcgaaccctggtctaaagtgatcttcccgcctagcctcccaaaatgttggaattacagtctgcagatctccaggggagcccaccagcctagtcaacatggcctcggaagacattgccaagctggcagagacacttgccaagactcaggtggccgggggacagctgagtttcaaaggcaagagcctcaaactcaacactgcagaagatgctaaagatgtgattaaagagattgaagactttgacagcttggaggctctgcgtctggaaggcaacacagtgggcgtggaagcagccagggtcatcgccaaggccttagagaagaagtcggagttgaagcgctgccactggagtgacatgttcacgggaaggctgcggaccgagatcccaccagccctgatctcactaggggaaggactcatcacagctggggctcagctggtggagctggacttaagcgacaacgcattcgggcccgacggtgtgcaaggcttcgaggccctgctcaagagctcagcctgcttcaccctgcaggaactcaagctcaacaactgtggcatgggcattggcggcggcaagatcctggctgcagctctgaccgaatgtcaccggaaatccagtgcccaaggcaagcctctggccctgaaggtctttgtggctggcagaaaccgtctggagaatgatggcgccactgccttggcagaagcttttagggtcatcgggaccctggaggaggtccacatgccacagaatgggatcaaccaccctggcatcactgccctggcccaggctttcgctgtcaaccccctgctgcgggtcatcaacctgaatgacaacaccttcactgagaagggcgccgtggccatggccgagaccttgaagaccttgcggcaggtggaggtgattaattttggggactgcctggtgcgctccaagggtgcagttgccattgcagatgccatccgcggcggcctgcccaagctaaaggagctgaacttgtcattctgtgaaatcaagagggatgctgccctggctgttgctgaggccatggcagacaaagctgagctggagaagctggacctgaatggcaacaccctgggagaagaaggctgtgaacagcttcaggaggtgctggagggcttcaacatggccaaggtgctggcgtccctcagtgatgacgaggacgaggaggaggaggaggaaggagaagaggaagaagaggaagcagaagaagaggaggaggaagatgaggaagaggaggaagaagaggaggaggaggaggaagaagagcctcagcagcgagggcagggagagaagtcagccacgccctcacggaagattctggaccctaacactggggagccagctcccgtgctgtcctccccacctcctgcagacgtctccaccttcctggcttttccctctccagagaagctgctgcgcctagggcccaagagctccgtgctgatagcccagcagactgacacgtctgaccccgagaaggtggtctctgccttcctaaaggtgtcatctgtgttcaaggacgaagctactgtgaggatggcagtgcaggatgcagtagatgccctgatgcagaaggctttcaactcctcgtccttcaactccaacaccttcctcaccaggctcctcgtgcacatgggtctgctcaagagtgaagacaaggtcaaggccattgccaacctgtacggccccctgatggcgctgaaccacatggtgcagcaggactatttccccaaggcccttgcacccctgctgctggcgttcgtgaccaagcccaacagcgccctggaatcctgctccttcgcccgccacagtctgctgcagacgctgtacaaggtctagactcaaagcctctcccatcccttggcctggaccagtgagctggggagggactcggatgaactgaggcgcagcctacgccattgccttggacaggactctggccacaggcagggcgggtctgtgtcccatgtgtcctgtcagtcccctgagtatgtgtgtgggtgtggcgcatgtgcaggtctgtgcctcctgtcgggatttgggttttaacgtcttctgctggcccagccctgctctgttgtggggagttggcccccaggggaaagggctgtgagctgctccgccattaaactcacctccacctgagggcgctctgctgatctccgcctgggccctgatggccgtccccacccacctgccttccggcccggctccctggcggagccagaacccagggagttgcccgcgtgctgtccttcccctctgtgttgtgattgggttgtttcctgccctgcctggggctgcttctcgtcaccaagccctggtcctgcggcagctgtcacccctaccatccataccactgtgctgaccgctcagcctgaagagcagagaatgccatgggtgggactgtgggggtcggatcgtggggttgttggcagagggcaaccctgggccccacaccgtgtggacaggcagacaccagattgtccaggagcaggagctgctgggactgcgctggccccggacctagtgggccttctcctggctgctgagatgtcgtctgtgactggcctggctggagggggagtgttgacaacccaaagctgttctccagtctggggagggagaggcagggtccccaatgtccgagctgcatctggacgctgctcttaaaggacctcctggggcaggggagcggtagggtctggactgggcagatgctgtatgacctccctgagcacccgtgactgccccatgctttcccctttgtgctctgtgtgtgtctgggctgtgcccgggggcttcacaaataaagtcgtgtggcagcttca

SEQ ID NO: 335644 - DNA, 3165 bp, Homo sapiens
ctgccggctttcaaaatcctcctcctccgccatcatccgccgcggtgcggagagcaggtggtgctggaagcgcgtgaggccgggagctcgagagagctaacagactagccggctggacatctggaccgctggatccggaggtggcgaccccggcctgacccggaccctaaatccgtccccgccccagagggcggaggcgcgcgctcgattccccccacgcggcggcgccgcctgtttacgtctgcagatctccaggggagcccaccagcctagtcaacatggcctcggaagacattgccaagctggcagagacacttgccaagactcaggtggccgggggacagctgagtttcaaaggcaagagcctcaaactcaacactgcagaagatgctaaagatgtgattaaagagattgaagactttgacagcttggaggctctgcgtctggaaggcaacacagtgggcgtggaagcagccagggtcatcgccaaggccttagagaagaagtcggagttgaagcgctgccactggagtgacatgttcacgggaaggctgcggaccgagatcccaccagccctgatctcactaggggaaggactcatcacagctggggctcagctggtggagctggacttaagcgacaacgcattcgggcccgacggtgtgcaaggcttcgaggccctgctcaagagctcagcctgcttcaccctgcaggaactcaagctcaacaactgtggcatgggcattggcggcggcaagatcctggctgcagctctgaccgaatgtcaccggaaatccagtgcccaaggcaagcctctggccctgaaggtctttgtggctggcagaaaccgtctggagaatgatggcgccactgccttggcagaagcttttagggtcatcgggaccctggaggaggtccacatgccacagaatgggatcaaccaccctggcatcactgccctggcccaggctttcgctgtcaaccccctgctgcgggtcatcaacctgaatgacaacaccttcactgagaagggcgccgtggccatggccgagaccttgaagaccttgcggcaggtggaggtgattaattttggggactgcctggtgcgctccaagggtgcagttgccattgcagatgccatccgcggcggcctgcccaagctaaaggagctgaacttgtcattctgtgaaatcaagagggatgctgccctggctgttgctgaggccatggcagacaaagctgagctggagaagctggacctgaatggcaacaccctgggagaagaaggctgtgaacagcttcaggaggtgctggagggcttcaacatggccaaggtgctggcgtccctcagtgatgacgaggacgaggaggaggaggaggaaggagaagaggaagaagaggaagcagaagaagaggaggaggaagatgaggaagaggaggaagaagaggaggaggaggaggaagaagagcctcagcagcgagggcagggagagaagtcagccacgccctcacggaagattctggaccctaacactggggagccagctcccgtgctgtcctccccacctcctgcagacgtctccaccttcctggcttttccctctccagagaagctgctgcgcctagggcccaagagctccgtgctgatagcccagcagactgacacgtctgaccccgagaaggtggtctctgccttcctaaaggtgtcatctgtgttcaaggacgaagctactgtgaggatggcagtgcaggatgcagtagatgccctgatgcagaaggctttcaactcctcgtccttcaactccaacaccttcctcaccaggctcctcgtgcacatgggtctgctcaagagtgaagacaaggtcaaggccattgccaacctgtacggccccctgatggcgctgaaccacatggtgcagcaggactatttccccaaggcccttgcacccctgctgctggcgttcgtgaccaagcccaacagcgccctggaatcctgctccttcgcccgccacagtctgctgcagacgctgtacaaggtctagactcaaagcctctcccatcccttggcctggaccagtgagctggggagggactcggatgaactgaggcgcagcctacgccattgccttggacaggactctggccacaggcagggcgggtctgtgtcccatgtgtcctgtcagtcccctgagtatgtgtgtgggtgtggcgcatgtgcaggtctgtgcctcctgtcgggatttgggttttaacgtcttctgctggcccagccctgctctgttgtggggagttggcccccaggggaaagggctgtgagctgctccgccattaaactcacctccacctgagggcgctctgctgatctccgcctgggccctgatggccgtccccacccacctgccttccggcccggctccctggcggagccagaacccagggagttgcccgcgtgctgtccttcccctctgtgttgtgattgggttgtttcctgccctgcctggggctgcttctcgtcaccaagccctggtcctgcggcagctgtcacccctaccatccataccactgtgctgaccgctcagcctgaagagcagagaatgccatgggtgggactgtgggggtcggatcgtggggttgttggcagagggcaaccctgggccccacaccgtgtggacaggcagacaccagattgtccaggagcaggagctgctgggactgcgctggccccggacctagtgggccttctcctggctgctgagatgtcgtctgtgactggcctggctggagggggagtgttgacaacccaaagctgttctccagtctggggagggagaggcagggtccccaatgtccgagctgcatctggacgctgctcttaaaggacctcctggggcaggggagcggtagggtctggactgggcagatgctgtatgacctccctgagcacccgtgactgccccatgctttcccctttgtgctctgtgtgtgtctgggctgtgcccgggggcttcacaaataaagtcgtgtggcagcttcaaaaaaaaaaaatcccaaaaaacccctcggggcctccttattcggggggccgccaaaccgccgttttgcaattggccctgggcctcaccctttttcccgtgccccctttttttgttcccaccggggccactc

SEQ ID NO: 335645 - DNA, 3278 bp, Homo sapiens
  misc_feature (3050)..(3051): n is a, c, g, or t
  misc_feature (3054)..(3054): n is a, c, g, or t
ctgccggctttcaaaatcctcctcctccgccatcatccgccgcggtgcggagagcaggtggtgctggaagcgcgtgaggccgggagctcgagagagctaacagactagccggctggacatctggaccgctggatccggaggtggcgaccccggcctgacccggaccctaaatccgtccccgccccagagggcggaggcgcgcgctcgattccccccacgcggcggcgccgcctgtttacgtctgcagatctccaggggagcccaccagcctagtcaacatggcctcggaagacattgccaagctggcagagacacttgccaagactcaggtggccgggggacagctgagtttcaaaggcaagagcctcaaactcaacactgcagaagatgctaaagatgtgattaaagagattgaagactttgacagcttggaggctctgcgtctggaaggcaacacagtgggcgtggaagcagccagggtcatcgccaaggccttagagaagaagtcggagttgaagcgctgccactggagtgacatgttcacgggaaggctgcggaccgagatcccaccagccctgatctcactaggggaaggactcatcacagctggggctcagctggtggagctggacttaagcgacaacgcattcgggcccgacggtgtgcaaggcttcgaggccctgctcaagagctcagcctgcttcaccctgcaggaactcaagctcaacaactgtggcatgggcattggcggcggcaagatcctggctgcagctctgaccgaatgtcaccggaaatccagtgcccaaggcaagcctctggccctgaaggtctttgtggctggcagaaaccgtctggagaatgatggcgccactgccttggcagaagcttttagggtcatcgggaccctggaggaggtccacatgccacagaatgggatcaaccaccctggcatcactgccctggcccaggctttcgctgtcaaccccctgctgcgggtcatcaacctgaatgacaacaccttcactgagaagggcgccgtggccatggccgagaccttgaagaccttgcggcaggtggaggtgattaattttggggactgcctggtgcgctccaagggtgcagttgccattgcagatgccatccgcggcggcctgcccaagctaaaggagctgaacttgtcattctgtgaaatcaagagggatgctgccctggctgttgctgaggccatggcagacaaagctgagctggagaagctggacctgaatggcaacaccctgggagaagaaggctgtgaacagcttcaggaggtgctggagggcttcaacatggccaaggtgctggcgtccctcagtgatgacgaggacgaggaggaggaggaggaaggagaagaggaagaagaggaagcagaagaagaggaggaggaagatgaggaagaggaggaagaagaggaggaggaggaggaagaagagcctcagcagcgagggcagggagagaagtcagccacgccctcacggaagattctggaccctaacactggggagccagctcccgtgctgtcctccccacctcctgcagacgtctccaccttcctggcttttccctctccagagaagctgctgcgcctagggcccaagagctccgtgctgatagcccagcagactgacacgtctgaccccgagaaggtggtctctgccttcctaaaggtgtcatctgtgttcaaggacgaagctactgtgaggatggcagtgcaggatgcagtagatgccctgatgcagaaggctttcaactcctcgtccttcaactccaacaccttcctcaccaggctcctcgtgcacatgggtctgctcaagagtgaagacaaggtcaaggccattgccaacctgtacggccccctgatggcgctgaaccacatggtgcagcaggactatttccccaaggcccttgcacccctgctgctggcgttcgtgaccaagcccaacagcgccctggaatcctgctccttcgcccgccacagtctgctgcagacgctgtacaaggtctagactcaaagcctctcccatcccttggcctggaccagtgagctggggagggactcggatgaactgaggcgcagcctacgccattgccttggacaggactctggccacaggcagggcgggtctgtgtcccatgtgtcctgtcagtcccctgagtatgtgtgtgggtgtggcgcatgtgcaggtctgtgcctcctgtcgggatttgggttttaacgtcttctgctggcccagccctgctctgttgtggggagttggcccccaggggaaagggctgtgagctgctccgccattaaactcacctccacctgagggcgctctgctgatctccgcctgggccctgatggccgtccccacccacctgccttccggcccggctccctggcggagccagaacccagggagttgcccgcgtgctgtccttcccctctgtgttgtgattgggttgtttcctgccctgcctggggctgcttctcgtcaccaagccctggtcctgcggcagctgtcacccctaccatccataccactgtgctgaccgctcagcctgaagagcagagaatgccatgggtgggactgtgggggtcggatcgtggggttgttggcagagggcaaccctgggccccacaccgtgtggacaggcagacaccagattgtccaggagcaggagctgctgggactgcgctggccccggacctagtgggccttctcctggctgctgagatgtcgtctgtgactggcctggctggagggggagtgttgacaacccaaagctgttctccagtctggggagggagaggcagggtccccaatgtccgagctgcatctggacgctgctcttaaaggacctcctggggcaggggagcggtagggtctggactgggcagatgctgtatgacctccctgagcacccgtgactgccccatgctttcccctttgtgctctgtgtgtgtctgggctgtgcccgggggcttcacaaataaagtcgtgtggcagcttcaaaaacaaaaaaaaatnnatnaataaaaaaatataaatttttttttattataattatattttttttatttttttattttttaaaaaaaaaaaaaaactctaggggggcccgggcacccaattccccctatggggagctttttaaaataaatggccggcgtttacaacttctgaatgggaaaaccttggtttaccaacttaatggcttttgggtcaaacaattgccccctgaatgggaatgggaaa

SEQ ID NO: 335646 - DNA, 2899 bp, Homo sapiens
ctgccggctttcaaaatcctcctcctccgccatcatccgccgcggtgcggagagcaggtggtgctggaagcgcgtgaggccgggagctcgagagagctaacagactagccggctggacatctggaccgctggatccggaggtggcgaccccggcctgacccggaccctaaatccgtccccgccccagagggcggaggcgcgcgctcgattccccccacgcggcggcgccgcctgtttacgtctgcagatctccaggggagcccaccagcctagtcaacatggcctcggaagacattgccaagctggcagagacacttgccaagactcaggtggccgggggacagctgagtttcaaaggcaagagcctcaaactcaacactgcagaagatgctaaagatgtgattaaagagattgaagactttgacagcttggaggctctgcgtctggaaggcaacacagtgggcgtggaagcagccagggtcatcgccaaggccttagagaagaagtcggagttgaagcgctgccactggagtgacatgttcacgggaaggctgcggaccgagatcccaccagccctgatctcactaggggaaggactcatcacagctggggctcagctggtggagctggacttaagcgacaacgcattcgggcccgacggtgtgcaaggcttcgaggccctgctcaagagctcagcctgcttcaccctgcaggaactcaagctcaacaactgtggcatgggcattggcggcggcaaggtcatcgggaccctggaggaggtccacatgccacagaatgggatcaaccaccctggcatcactgccctggcccaggctttcgctgtcaaccccctgctgcgggtcatcaacctgaatgacaacaccttcactgagaagggcgccgtggccatggccgagaccttgaagaccttgcggcaggtggaggtgattaattttggggactgcctggtgcgctccaagggtgcagttgccattgcagatgccatccgcggcggcctgcccaagctaaaggagctgaacttgtcattctgtgaaatcaagagggatgctgccctggctgttgctgaggccatggcagacaaagctgagctggagaagctggacctgaatggcaacaccctgggagaagaaggctgtgaacagcttcaggaggtgctggagggcttcaacatggccaaggtgctggcgtccctcagtgatgacgaggacgaggaggaggaggaggaaggagaagaggaagaagaggaagcagaagaagaggaggaggaagatgaggaagaggaggaagaagaggaggaggaggaggaagaagagcctcagcagcgagggcagggagagaagtcagccacgccctcacggaagattctggaccctaacactggggagccagctcccgtgctgtcctccccacctcctgcagacgtctccaccttcctggcttttccctctccagagaagctgctgcgcctagggcccaagagctccgtgctgatagcccagcagactgacacgtctgaccccgagaaggtggtctctgccttcctaaaggtgtcatctgtgttcaaggacgaagctactgtgaggatggcagtgcaggatgcagtagatgccctgatgcagaaggctttcaactcctcgtccttcaactccaacaccttcctcaccaggctcctcgtgcacatgggtctgctcaagagtgaagacaaggtcaaggccattgccaacctgtacggccccctgatggcgctgaaccacatggtgcagcaggactatttccccaaggcccttgcacccctgctgctggcgttcgtgaccaagcccaacagcgccctggaatcctgctccttcgcccgccacagtctgctgcagacgctgtacaaggtctagactcaaagcctctcccatcccttggcctggaccagtgagctggggagggactcggatgaactgaggcgcagcctacgccattgccttggacaggactctggccacaggcagggcgggtctgtgtcccatgtgtcctgtcagtcccctgagtatgtgtgtgggtgtggcgcatgtgcaggtctgtgcctcctgtcgggatttgggttttaacgtcttctgctggcccagccctgctctgttgtggggagttggcccccaggggaaagggctgtgagctgctccgccattaaactcacctccacctgagggcgctctgctgatctccgcctgggccctgatggccgtccccacccacctgccttccggcccggctccctggcggagccagaacccagggagttgcccgcgtgctgtccttcccctctgtgttgtgattgggttgtttcctgccctgcctggggctgcttctcgtcaccaagccctggtcctgcggcagctgtcacccctaccatccataccactgtgctgaccgctcagcctgaagagcagagaatgccatgggtgggactgtgggggtcggatcgtggggttgttggcagagggcaaccctgggccccacaccgtgtggacaggcagacaccagattgtccaggagcaggagctgctgggactgcgctggccccggacctagtgggccttctcctggctgctgagatgtcgtctgtgactggcctggctggagggggagtgttgacaacccaaagctgttctccagtctggggagggagaggcagggtccccaatgtccgagctgcatctggacgctgctcttaaaggacctcctggggcaggggagcggtagggtctggactgggcagatgctgtatgacctccctgagcacccgtgactgccccatgctttcccctttgtgctctgtgtgtgtctgggctgtgcccgggggcttcacaaataaagtcgtgtggcagcttca

SEQ ID NO: 335647 - DNA, 2501 bp, Homo sapiens
aaacctctcaggctggtgtgacacagcattagagataaaaaccttgtgtaactgaagtgctggacatatttaaggtgtgactgttgagctgttagcagtcctgcgtcccctgacctgcaccgatgggtggcgtgggatgttgaagagcagttcagcagcagtggccaccccgctgggagaaggggctcctgcccatgaccagggccccttgcctttccccacagaatcctggctgcagctctgaccgaatgtcaccggaaatccagtgcccaaggcaagcctctggccctgaaggtctttgtggctggcagaaaccgtctggagaatgatggcgccactgccttggcagaagcttttagggtcatcgggaccctggaggaggtccacatgccacagaatgggatcaaccaccctggcatcactgccctggcccaggctttcgctgtcaaccccctgctgcgggtcatcaacctgaatgacaacaccttcactgagaagggcgccgtggccatggccgagaccttgaagaccttgcggcaggtggaggtgattaattttggggactgcctggtgcgctccaagggtgcagttgccattgcagatgccatccgcggcggcctgcccaagctaaaggagctgaacttgtcattctgtgaaatcaagagggatgctgccctggctgttgctgaggccatggcagacaaagctgagctggagaagctggacctgaatggcaacaccctgggagaagaaggctgtgaacagcttcaggaggtgctggagggcttcaacatggccaaggtgctggcgtccctcagtgatgacgaggacgaggaggaggaggaggaaggagaagaggaagaagaggaagcagaagaagaggaggaggaagatgaggaagaggaggaagaagaggaggaggaggaggaagaagagcctcagcagcgagggcagggagagaagtcagccacgccctcacggaagattctggaccctaacactggggagccagctcccgtgctgtcctccccacctcctgcagacgtctccaccttcctggcttttccctctccagagaagctgctgcgcctagggcccaagagctccgtgctgatagcccagcagactgacacgtctgaccccgagaaggtggtctctgccttcctaaaggtgtcatctgtgttcaaggacgaagctactgtgaggatggcagtgcaggatgcagtagatgccctgatgcagaaggctttcaactcctcgtccttcaactccaacaccttcctcaccaggctcctcgtgcacatgggtctgctcaagagtgaagacaaggtcaaggccattgccaacctgtacggccccctgatggcgctgaaccacatggtgcagcaggactatttccccaaggcccttgcacccctgctgctggcgttcgtgaccaagcccaacagcgccctggaatcctgctccttcgcccgccacagtctgctgcagacgctgtacaaggtctagactcaaagcctctcccatcccttggcctggaccagtgagctggggagggactcggatgaactgaggcgcagcctacgccattgccttggacaggactctggccacaggcagggcgggtctgtgtcccatgtgtcctgtcagtcccctgagtatgtgtgtgggtgtggcgcatgtgcaggtctgtgcctcctgtcgggatttgggttttaacgtcttctgctggcccagccctgctctgttgtggggagttggcccccaggggaaagggctgtgagctgctccgccattaaactcacctccacctgagggcgctctgctgatctccgcctgggccctgatggccgtccccacccacctgccttccggcccggctccctggcggagccagaacccagggagttgcccgcgtgctgtccttcccctctgtgttgtgattgggttgtttcctgccctgcctggggctgcttctcgtcaccaagccctggtcctgcggcagctgtcacccctaccatccataccactgtgctgaccgctcagcctgaagagcagagaatgccatgggtgggactgtgggggtcggatcgtggggttgttggcagagggcaaccctgggccccacaccgtgtggacaggcagacaccagattgtccaggagcaggagctgctgggactgcgctggccccggacctagtgggccttctcctggctgctgagatgtcgtctgtgactggcctggctggagggggagtgttgacaacccaaagctgttctccagtctggggagggagaggcagggtccccaatgtccgagctgcatctggacgctgctcttaaaggacctcctggggcaggggagcggtagggtctggactgggcagatgctgtatgacctccctgagcacccgtgactgccccatgctttcccctttgtgctctgtgtgtgtctgggctgtgcccgggggcttcacaaataaagtcgtgtggcagcttca

SEQ ID NO: 335648 - DNA, 2767 bp, Homo sapiens
ctgccggctttcaaaatcctcctcctccgccatcatccgccgcggtgcggagagcaggtggtgctggaagcgcgtgaggccgggagctcgagagagctaacagactagccggctggacatctggaccgctggatccggaggtggcgaccccggcctgacccggaccctaaatccgtccccgccccagagggcggaggcgcgcgctcgattccccccacgcggcggcgccgcctgtttacgtctgcagatctccaggggagcccaccagcctagtcaacatggcctcggaagacattgccaagctggcagagacacttgccaagactcaggtggccgggggacagctgagtttcaaaggcaagagcctcaaactcaacactgcagaagatgctaaagatgtgattaaagagattgaagactttgacagcttggaggctctgcgtctggaaggcaacacagtgggcgtggaagcagccagggtcatcgccaaggccttagagaagaagtcggagttgaagcgctgccactggagtgacatgttcacgggaaggctgcggaccgagatcccaccagccctgatctcactaggggaaggactcatcacagctggggctcagctggtggagctggacttaagcgacaacgcattcgggcccgacggtgtgcaaggcttcgaggccctgctcaagagctcagcctgcttcaccctgcaggaactcaagctcaacaactgtggcatgggcattggcggcggcaagatcctggctgcagctctgaccgaatgtcaccggaaatccagtgcccaaggcaagcctctggccctgaaggtctttgtggctggcagaaaccgtctggagaatgatggcgccactgccttggcagaagcttttagggtcatcgggaccctggaggaggtccacatgccacagaatgggatcaaccaccctggcatcactgccctggcccaggctttcgctgtcaaccccctgctgcgggtcatcaacctgaatgacaacaccttcactgagaagggcgccgtggccatggccgagaccttgaagaccttgcggcaggtggaggtgattaattttggggactgcctggtgcgctccaagggtgcagttgccattgcagatgccatccgcggcggcctgcccaagctaaaggagctgaacttgtcattctgtgaaatcaagagggatgctgccctggctgttgctgaggccatggcagacaaagctgagctggagaagctggacctgaatggcaacaccctgggagaagaaggctgtgaacagcttcaggaggtgctggagggcttcaacatggccaaggtgctggcgtccctcagtgatgacgaggacgaggaggaggaggaggaaggagaagaggaagaagaggaagcagaagaagaggaggaggaagatgaggaagaggaggaagaagaggaggaggaggaggaagaagagcctcagcagcgagggcagggagagaagtcagccacgccctcacggaagattctggaccctaacactggggagccagctcccgtgctgtcctccccacctcctgcagacgtctccaccttcctggcttttccctctccagagaagctgctgcgcctagggcccaagagctccgtgctgatagcccagcagactgacacgtctgaccccgagaaggtggtctctgccttcctaaaggtgtcatctgtgttcaaggacgaagctactgtgaggatggcagtgcaggatgcagtagatgccctgatgcagaaggctttcaactcctcgtccttcaactccaacaccttcctcaccaggctcctcgtgcacatgggtctgctcaagagtgaagacaaggtcaaggccattgccaacctgtacggccccctgatggcgctgaaccacatggtgcagcaggactatttccccaaggcccttgcacccctgctgctggcgttcgtgaccaagcccaacagcgccctggaatcctgctccttcgcccgccacagtctgctgcagacgctgtacaaggtctagactcaaagcctctcccatcccttggcctggaccagtgagctggggagggactcggatgaactgaggcgcagcctacgccattgccttggacaggactctggccacaggcagggcgggtctgtgtcccatgtgtcctgtcagtcccctgagtatgtgtgtgggtgtggcgcatgtgcaggtctgtgcctcctgtcgggatttgggttttaacgtcttctgctggcccagccctgctctgttgtggggagttggcccccaggggaaagggctgtgagctgctccgccattaaactcacctccacctgagggcgctctgctgatctccgcctgggccctgatggccgtccccacccacctgccttccggcccggctccctggcggagccagaacccagggagttgcccgcgtgctgtccttcccctctgtgttgtgattgggttgtttcctgccctgcctggggctgcttctcgtcaccaagctggggagggagaggcagggtccccaatgtccgagctgcatctggacgctgctcttaaaggacctcctggggcaggggagcggtagggtctggactgggcagatgctgtatgacctccctgagcacccgtgactgccccatgctttcccctttgtgctctgtgtgtgtctgggctgtgcccgggggcttcacaaataaagtcgtgtggcagcttcaaaaaaaaaaaaaaaaaaaaaaaaaaaaacc

SEQ ID NO: 335649 - DNA, 1402 bp, Homo sapiens
ggacgcgtgggtcgacccacgcgtcgactgacacgtctgaccccgagaaggtggtctctgccttcctaaaggtgtcatctgtgttcaaggacgaagctactgtgaggatggcagtgcaggatgcagtagatgccctgatgcagaaggctttcaactcctcgtccttcaactccaacaccttcctcaccaggctcctcgtgcacatgggtctgctcaagagtgaagacaaggtcaaggccattgccaacctgtacggccccctgatggcgctgaaccacatggtgcagcaggactatttccccaaggcccttgcacccctgctgctggcgttcgtgaccaagcccaacagcgccctggaatcctgctccttcgcccgccacagtctgctgcagacgctgtacaaggtctagactcaaagcctctcccatcccttggcctggaccagtgagctggggagggactcggatgaactgaggcgcagcctacgccattgccttggacaggactctggccacaggcagggcgggtctgtgtcccatgtgtcctgtcagtcccctgagtatgtgtgtgggtgtggcgcatgtgcaggtctgtgcctcctgtcgggatttgggttttaacgtcttctgctggcccagccctgctctgttgtggggagttggcccccaggggaaagggctgtgagctgctccgccattaaactcacctccacctgagggcgctctgctgatctccgcctgggccctgatggccgtccccacccacctgccttccggcccggctccctggcggagccagaacccagggagttgcccgcgtgctgtccttcccctctgtgttgtgattgggttgtttcctgccctgcctggggctgcttctcgtcaccaagccctggtcctgcggcagctgtcacccctaccatccataccactgtgctgaccgctcagcctgaagagcagagaatgccatgggtgggactgtgggggtcggatcgtggggttgttggcagagggcaaccctgggccccacaccgtgtggacaggcagacaccagattgtccaggagcaggagctgctgggactgcgctggccccggacctagtgggccttctcctggctgctgagatgtcgtctgtgactggcctggctggagggggagtgttgacaacccaaagctgttctccagtctggggagggagaggcagggtccccaatgtccgagctgcatctggacgctgctcttaaaggacctcctggggcaggggagcggtagggtctggactgggcagatgctgtatgacctccctgagcacccgtgactgccccatgctttcccctttgtgctctgtgtgtgtctgggctgtgcccgggggcttcacaaataaagtcgtgtggcagcttca

SEQ ID NO: 335650 - DNA, 1473 bp, Homo sapiens
actccgtctcaaaaaaaaaagaaaaagaaaaagaaaaaaagcaaccaaaaaaacaatggctagccatttacttatgatccagattggactctagtgggccagtcctatgtggccactggcagccagtaaggattccctggcctatgtctgctggaagggcccttggagagcctggctgagggggccttcattctggccagctctgggctgtgtggcgttgggtgcctggctctctgagcctctcgcacctcccatccccacccacggtgtgcagaaggcagagggctaatgtctctcttgctgagtcgttgtgcaaattaacaaaaatgagtctggcaccaaaatggcccccacacttggaaaacaggccaagaggcatccaccgacctgctgacccctctttccccgcaggcccaacagcgccctggaatcctgctccttcgcccgccacagtctgctgcagacgctgtacaaggtctagactcaaagcctctcccatcccttggcctggaccagtgagctggggagggactcggatgaactgaggcgcagcctacgccattgccttggacaggactctggccacaggcagggcgggtctgtgtcccatgtgtcctgtcagtcccctgagtatgtgtgtgggtgtggcgcatgtgcaggtctgtgcctcctgtcgggatttgggttttaacgtcttctgctggcccagccctgctctgttgtggggagttggcccccaggggaaagggctgtgagctgctccgccattaaactcacctccacctgagggcgctctgctgatctccgcctgggccctgatggccgtccccacccacctgccttccggcccggctccctggcggagccagaacccagggagttgcccgcgtgctgtccttcccctctgtgttgtgattgggttgtttcctgccctgcctggggctgcttctcgtcaccaagccctggtcctgcggcagctgtcacccctaccatccataccactgtgctgaccgctcagcctgaagagcagagaatgccatgggtgggactgtgggggtcggatcgtggggttgttggcagagggcaaccctgggccccacaccgtgtggacaggcagacaccagattgtccaggagcaggagctgctgggactgcgctggccccggacctagtgggccttctcctggctgctgagatgtcgtctgtgactggcctggctggagggggagtgttgacaacccaaagctgttctccagtctggggagggagaggcagggtccccaatgtccgagctgcatctggacgctgctcttaaaggacctcctggggcaggggagcggtagggtctggactgggcagatgctgtatgacctccctgagcacccgtgactgccccatgctttcccctttgtgctctgtgtgtgtctgggctgtgcccgggggcttcacaaataaagtcgtgtggcagcttca

SEQ ID NO: 335651 - DNA, 1810 bp, Homo sapiens
ctgccggctttcaaaatcctcctcctccgccatcatccgccgcggtgcggagagcaggtggtgctggaagcgcgtgaggccgggagctcgagagagctaacagactagccggctggacatctggaccgctggatccggaggtggcgaccccggcctgacccggaccctaaatccgtccccgccccagagggcggaggcgcgcgctcgattccccccacgcggcggcgccgcctgtttacgatcctggctgcagctctgaccgaatgtcaccggaaatccagtgcccaaggcaagcctctggccctgaaggtctttgtggctggcagaaaccgtctggagaatgatggcgccactgccttggcagaagcttttagggtcatcgggaccctggaggaggtccacatgccacagaatgggatcaaccaccctggcatcactgccctggcccaggctttcgctgtcaaccccctgctgcgggtcatcaacctgaatgacaacaccttcactgagaagggcgccgtggccatggccgagaccttgaagaccttgcggcaggtggaggtgattaattttggggactgcctggtgcgctccaagggtgcagttgccattgcagatgccatccgcggcggcctgcccaagctaaaggagctgaacttgtcattctgtgaaatcaagagggatgctgccctggctgttgctgaggccatggcagacaaagctgagctggagaagctggacctgaatggcccaacagcgccctggaatcctgctccttcgcccgccacagtctgctgcagacgctgtacaaggtctagactcaaagcctctcccatcccttggcctggaccagtgagctggggagggactcggatgaactgaggcgcagcctacgccattgccttggacaggactctggccacaggcagggcgggtctgtgtcccatgtgtcctgtcagtcccctgagtatgtgtgtgggtgtggcgcatgtgcaggtctgtgcctcctgtcgggatttgggttttaacgtcttctgctggcccagccctgctctgttgtggggagttggcccccaggggaaagggctgtgagctgctccgccattaaactcacctccacctgagggcgctctgctgatctccgcctgggccctgatggccgtccccacccacctgccttccggcccggctccctggcggagccagaacccagggagttgcccgcgtgctgtccttcccctctgtgttgtgattgggttgtttcctgccctgcctggggctgcttctcgtcaccaagccctggtcctgcggcagctgtcacccctaccatccataccactgtgctgaccgctcagcctgaagagcagagaatgccatgggtgggactgtgggggtcggatcgtggggttgttggcagagggcaaccctgggccccacaccgtgtggacaggcagacaccagattgtccaggagcaggagctgctgggactgcgctggccccggacctagtgggccttctcctggctgctgagatgtcgtctgtgactggcctggctggagggggagtgttgacaacccaaagctgttctccagtctggggagggagaggcagggtccccaatgtccgagctgcatctggacgctgctcttaaaggacctcctggggcaggggagcggtagggtctggactgggcagatgctgtatgacctccctgagcacccgtgactgccccatgctttcccctttgtgctctgtgtgtgtctgggctgtgcccgggggcttcacaaataaagtcgtgtggcagcttca

SEQ ID NO: 335652 - DNA, 1214 bp, Homo sapiens
gacggcagtgcaccgtgatgccgtgatggccactctagagggccccggacagcacgcgctaacaaaaatgagtctggcaccaaaatggcccccacacttggaaaacaggccaagaggcatccaccgacctgctgacccctctttccccgcaggcccaacagcgccctggaatcctgctccttcgcccgccacagtctgctgcagacgctgtacaaggtctagactcaaagcctctcccatcccttggcctggaccagtgagctggggagggactcggatgaactgaggcgcagcctacgccattgccttggacaggactctggccacaggcagggcgggtctgtgtcccatgtgtcctgtcagtcccctgagtatgtgtgtgggtgtggcgcatgtgcaggtctgtgcctcctgtcgggatttgggttttaacgtcttctgctggcccagccctgctctgttgtggggagttggcccccaggggaaagggctgtgagctgctccgccattaaactcacctccacctgagggcgctctgctgatctccgcctgggccctgatggccgtccccacccacctgccttccggcccggctccctggcggagccagaacccagggagttgcccgcgtgctgtccttcccctctgtgttgtgattgggttgtttcctgccctgcctggggctgcttctcgtcaccaagccctggtcctgcggcagctgtcacccctaccatccataccactgtgctgaccgctcagcctgaagagcagagaatgccatgggtgggactgtgggggtcggatcgtggggttgttggcagagggcaaccctgggccccacaccgtgtggacaggcagacaccagattgtccaggagcaggagctgctgggactgcgctggccccggacctagtgggccttctcctggctgctgagatgtcgtctgtgactggcctggctggagggggagtgttgacaacccaaagctgttctccagtctggggagggagaggcagggtccccaatgtccgagctgcatctggacgctgctcttaaaggacctcctggggcaggggagcggtagggtctggactgggcagatgctgtatgacctccctgagcacccgtgactgccccatgctttcccctttgtgctctgtgtgtgtctgggctgtgcccgggggcttcacaaataaagtcgtgtggcagcttca

SEQ ID NO: 335653 - DNA, 1102 bp, Homo sapiens
  misc_feature (9)..(9): n is a, c, g, or t
  misc_feature (11)..(11): n is a, c, g, or t
  misc_feature (39)..(39): n is a, c, g, or t
tccccaagncncttgccccctgctgtggcgttcgtgacnagcccaacagcgccctggaatcctgctccttcgcccgccacagtctgctgcagacgctgtacaaggtctagactcaaagcctctcccatcccttggcctggaccagtgagctggggagggactcggatgaactgaggcgcagcctacgccattgccttggacaggactctggccacaggcagggcgggtctgtgtcccatgtgtcctgtcagtcccctgagtatgtgtgtgggtgtggcgcatgtgcaggtctgtgcctcctgtcgggatttgggttttaacgtcttctgctggcccagccctgctctgttgtggggagttggcccccaggggaaagggctgtgagctgctccgccattaaactcacctccacctgagggcgctctgctgatctccgcctgggccctgatggccgtccccacccacctgccttccggcccggctccctggcggagccagaacccagggagttgcccgcgtgctgtccttcccctctgtgttgtgattgggttgtttcctgccctgcctggggctgcttctcgtcaccaagccctggtcctgcggcagctgtcacccctaccatccataccactgtgctgaccgctcagcctgaagagcagagaatgccatgggtgggactgtgggggtcggatcgtggggttgttggcagagggcaaccctgggccccacaccgtgtggacaggcagacaccagattgtccaggagcaggagctgctgggactgcgctggccccggacctagtgggccttctcctggctgctgagatgtcgtctgtgactggcctggctggagggggagtgttgacaacccaaagctgttctccagtctggggagggagaggcagggtccccaatgtccgagctgcatctggacgctgctcttaaaggacctcctggggcaggggagcggtagggtctggactgggcagatgctgtatgacctccctgagcacccgtgactgccccatgctttcccctttgtgctctgtgtgtgtctgggctgtgcccgggggcttcacaaataaagtcgtgtggcagcttca

SEQ ID NO: 335654 - DNA, 2031 bp, Homo sapiens
ctgccggctttcaaaatcctcctcctccgccatcatccgccgcggtgcggagagcaggtggtgctggaagcgcgtgaggccgggagctcgagagagctaacagactagccggctggacatctggaccgctggatccggaggtggcgaccccggcctgacccggaccctaaatccgtccccgccccagagggcggaggcgcgcgctcgattccccccacgcggcggcgccgcctgtttacgtctgcagatctccaggggagcccaccagcctagtcaacatggcctcggaagacattgccaagctggcagagacacttgccaagactcaggtggccgggggacagctgagtttcaaaggcaagagcctcaaactcaacactgcagaagatgctaaagatgtgattaaagagattgaagactttgacagcttggaggctctgcgtctggaaggcaacacagtgggcgtggaagcagccagggtcatcgccaaggccttagagaagaagtcggagttgaagcgctgccactggagtgacatgttcacgggaaggctgcggaccgagatcccaccagccctgatctcactaggggaaggactcatcacagctggggctcagctggtggagctggacttaagcgacaacgcattcgggcccgacggtgtgcaaggcttcgaggccctgctcaagagctcagcctgcttcaccctgcaggaactcaagctcaacaactgtggcatgggcattggcggcggcaagatcctggctgcagctctgaccgaatgtcaccggaaatccagtgcccaaggcaagcctctggccctgaaggtctttgtggctggcagaaaccgtctggagaatgatggcgccactgccttggcagaagcttttagggtcatcgggaccctggaggaggtccacatgccacagaatgggatcaaccaccctggcatcactgccctggcccaggctttcgctgtcaaccccctgctgcgggtcatcaacctgaatgacaacaccttcactgagaagggcgccgtggccatggccgagaccttgaagaccttgcggcaggtggaggtgattaattttggggactgcctggtgcgctccaagggtgcagttgccattgcagatgccatccgcggcggcctgcccaagctaaaggagctgaacttgtcattctgtgaaatcaagagggatgctgccctggctgttgctgaggccatggcagacaaagctgagctggagaagctggacctgaatggcaacaccctgggagaagaaggctgtgaacagcttcaggaggtgctggagggcttcaacatggccaaggtgctggcgtccctcagtgatgacgaggacgaggaggaggaggaggaaggagaagaggaagaagaggaagcagaagaagaggaggaggaagatgaggaagaggaggaagaagaggaggaggaggaggaagaagagcctcagcagcgagggcagggagagaagtcagccacgccctcacggaagattctggaccctaacactggggagccagctcccgtgctgtcctccccacctcctgcagacgtctccaccttcctggcttttccctctccagagaagctgctgcgcctagggcccaagagctccgtgctgatagcccagcagactgacacgtctgaccccgagaaggtggtctctgccttcctaaaggtgtcatctgtgttcaaggacgaagctactgtgaggatggcagtgcaggatgcagtagatgccctgatgcagaaggctttcaactcctcgtccttcaactccaacaccttcctcaccaggctcctcgtgcacatgggtctgctcaagagtgaagacaaggtcaaggccattgccaacctgtacggccccctgatggcgctgaaccacatggtgcagcaggactattctccctgagcacccgtgactgccccatgctttcccctttgtgctctgtgtgtgtctgggctgtgcccgggggcttcacaaataaagtcgtgtggcagcttca

SEQ ID NO: 335655 - DNA, 1691 bp, Homo sapiens
ctgccggctttcaaaatcctcctcctccgccatcatccgccgcggtgcggagagcaggtggtgctggaagcgcgtgaggccgggagctcgagagagctaacagactagccggctggacatctggaccgctggatccggaggtggcgaccccggcctgacccggaccctaaatccgtccccgccccagagggcggaggcgcgcgctcgattccccccacgcggcggcgccgcctgtttacgtctgcagatctccaggggagcccaccagcctagtcaacatggcctcggaagacattgccaagctggcagagacacttgccaagactcaggtggccgggggacagctgagtttcaaaggcaagagcctcaaactcaacactgcagaagatgctaaagatgtgattaaagagattgaagactttgacagcttggaggctctgcgtctggaaggcaacacagtgggcgtggaagcagccagggtcatcgccaaggccttagagaagaagtcggagttgaagcgctgccactggagtgacatgttcacgggaaggctgcggaccgagatcccaccagccctgatctcactaggggaaggactcatcacagctggggctcagctggtggagctggacttaagcgacaacgcattcgggcccgacggtgtgcaaggcttcgaggccctgctcaagagctcagcctgcttcaccctgcaggaactcaagctcaacaactgtggcatgggcattggcggcggcaagatcctggctgcagctctgaccgaatgtcaccggaaatccagtgcccaaggcaagcctctggccctgaaggtctttgtggctggcagaaaccgtctggagaatgatggcgccactgccttggcagaagcttttagggtcatcgggaccctggaggaggtccacatgccacagaatgggatcaaccaccctggcatcactgccctggcccaggctttcgctgtcaaccccctgctgcgggtcatcaacctgaatgacaacaccttcactgagaagggcgccgtggccatggccgagaccttgaagaccttgcggcaggtggaggtgattaattttggggactgcctggtgcgctccaagggtgcagttgccattgcagatgccatccgcggcggcctgcccaagctaaaggagctgaacttgtcattctgtgaaatcaagagggatgctgccctggctgttgctgaggccatggcagacaaagctgagctggagaagctggacctgaatggcaacaccctgggagaagaaggctgtgaacagcttcaggaggtgctggagggcttcaacatggccaaggtgctggcgtccctcagtgatgacgaggacgaggaggaggaggaggaaggagaagaggaagaagaggaagcagaagaagaggaggaggaagatgaggaagaggaggaagaagaggaggaggaggaggaagaagagcctcagcagcgagggcagggagagaagtcagccacgccctcacggaagattctggaccctaacactggggagccagctcccgtgctgtcctccccacctcctcttcctcctcttcctcatcttcctcctcctcttcttctgcttcctcttcttcctcttctccttcctcctcctcctcctcgtcctcgtcatcactgagggacgccagcaccttgccatgta

SEQ ID NO: 335656 - DNA, 606 bp, Homo sapiens
  misc_feature (586)..(586): n is a, c, g, or t
ctgccggctttcaaaatcctcctcctccgccatcatccgccgcggtgcggagagcaggtggtgctggaagcgcgtgaggccgggagctcgagagagctaacagactagccggctggacatctggaccgctggatccggaggtggcgaccccggcctgacccggaccctaaatccgtccccgccccagagggcggaggcgcgcgctcgattccccccacgcggcggcgccgcctgtttacgtctgcagatctccaggggagcccaccagcctagtcaacatggcctcggaagacattgccaagctggcagagacacttgccaagactcaggtggccgggggacagctgagtttcaaaggcaagagcctcaaactcaacactgcagaagatgctaaagatgtgattaaagagattgaagactttgacagcttggaggctctgcgtctggaaggcaacacagtgggcgtggaagcagccagggtcatcgccaaggccttagagaagaagtcggagttgaagcgctgccactggagtgacatgttcacgggaaggctgcggaccgagatcccaccagccctgatctcacnagggaaggaggggtaccgag

SEQ ID NO: 335657 - DNA, 1253 bp, Homo sapiens
ttcctttccccgtcacctgcctggaacaggggtgcggggcgaggagggcgtggcgcccgtgtgcgccttctgcctgccccctcggccttcttcacttagccttcgacggccgagcgccccaggggtggcggtgggagtggggttgttgagcggcgctggctcctttcacaaatggggaaactgaggcttaaagggcgtctgactcgccagagcagctcagcctgcagctgctagcagtggcgtctcatattagcattgttgtcaaccggaggcggtgcgagtccgccggggattccagatggggctcctgcgccgcccgcctatcatttgcggcctgtattcgcgcgtcgctcccgcagagccacctcccagcaggcccacgcccgcgggggccccgggctggcgccgctgtccctggaatcgatgtgagtcactgctgacgctttgcaggagcatgcatctcacctcagaaagtctctgacgttgctgcggagcggggagaggatgtttctctattagccctttgcttttgctctggcgctgatcctttgctgaccttggacaaatcaatttacgtttctgtgctccagtttcttggtttataaagtgagtgtggaggggtgcatctctgtctcgctctctcttggactgaggaatgggcccccgttcagctgagaagttctgtccctattctatctggaggcttcaccaccaccttttaccctcaaattgtcccatctcagaactgcaagagatgctggggtttcaggttaatttttttgttggtttttctttaaatttttttatctttttagagacggtctccttctgtcacccaggctggagtgtagtggaacgatcaccgctgaactgcagcgtcggcttcctgggctcaagcgatcctcccacctcaacctcccaagtcatggggactacagatgccatcacacctggctaatttttaaatttttctgtggagacagggtctcattctgttgcccaggcttgtctcgaaccctggtctaaagtgatcttcccgcctagcctcccaaaatgttggaattacaggtgtgagttattgcactgggctggtttctggttaatttattttttgaaacagggtctccagaagtacagcagcaagatctcagctcactgtagcctccacctacggggctcaagtgatcctcccaccttacatcccaggtagctgggactgcaggcacctgccaccacacccagctagtttttgt

SEQ ID NO: 335658 - DNA, 4241 bp, Homo sapiens
  misc_feature (2)..(2): n is a, c, g, or t
  misc_feature (5)..(5): n is a, c, g, or t
  misc_feature (7)..(7): n is a, c, g, or t
  misc_feature (10)..(10): n is a, c, g, or t
  misc_feature (13)..(13): n is a, c, g, or t
  misc_feature (30)..(30): n is a, c, g, or t
  misc_feature (39)..(39): n is a, c, g, or t
  misc_feature (42)..(43): n is a, c, g, or t
  misc_feature (47)..(47): n is a, c, g, or t
  misc_feature (73)..(74): n is a, c, g, or t
  misc_feature (79)..(79): n is a, c, g, or t
  misc_feature (83)..(83): n is a, c, g, or t
  misc_feature (87)..(87): n is a, c, g, or t
  misc_feature (114)..(115): n is a, c, g, or t
  misc_feature (184)..(184): n is a, c, g, or t
  misc_feature (281)..(281): n is a, c, g, or t
  misc_feature (325)..(325): n is a, c, g, or t
  misc_feature (355)..(355): n is a, c, g, or t
tngcnancanacngtgccctgtctctactnaaaatacanaannattngctggacatggtggtgggtgcctgtnntcccngctnctcnggaggctgaggcaggagaatgacatgnnccttggaggcggagcttgcagtgagcccagatggcgccactgtgctccagcctgggcgactgagcgagnctccgtctcaaaaaaaaaaaattctttcatttatttagttacttttagagatagagcctcccgctgttgcccaggctggagtgcagtggcagtcatngcttactgcagctttgaactcctgggctcaaatgatcctcctgnctcagcctctccagtagctgggactgactncaggcacgtgccaccacacccagctaatttttatttttatttttatttttttgagacagggttttactctgtcacccaggctagagtgcagtggtgagatcatggctcactgtagcctctgtctccggggctcaatcaatcctcccacctcagcctccccagtggctgggattactggtgcacaccaccataccctgctaattgtatttatttttagtagagatgggattttgccatgttgcccagactggtcttgagctgctgggctcaagcgatcttcccatcacagcttcccaatgtgctgggattacaggtgtgagccactgtacctggccagctttacttcttttaccagcactcctgattttataaatagtgaggcttatcaaccccatttctacccaaatcttctggtagacttgagtatagtagggcttcataggtagcagccctgtccctgtcctattatgatggtagctgttgtgatgtggcgatctctgatctagaaacccctgaggggccattgtggcctgcccagtctcccggccacggttgaaaccagacgtgcagtggggctgacccctgtgccccaccccagagtcatgccagcgtgggtggtggggcattctctgggatgaatgatctggatcccatagccatctgtgtcctgtttgaggaatgggaccctcaaacagagaacagccaagatgctcaagcaggtgtgtgcttgggccagactctgcagcctttggtttgggacttgactgccattcactgaaggggcccaggaaatgggcagctcacatggtgttgctgggtgtccagctgcggcagtttagcagaggaggacttgtaatgagatggtagcttcttataggctaagacatgatttttctgttcttttactacctcctgcaccttctagaactgttccttcctgatgctgttttcctttcttccagtggtttatctctagggtctccatagcaggggaggtagggtcagactcctgagatggctgatgtcctaccctgcccccaaccaggggccccaggagactcctttttcttactgcaactttggcctcctcagtctgcagatctccaggggagcccaccagcctagtcaacatggcctcggaagacattgccaagctggcagagacacttgccaagactcaggtggccgggggacagctgagtttcaaaggcaagagcctcaaactcaacactgcagaagatgctaaagatgtgattaaagagattgaagactttgacagcttggaggctctgcgtctggaaggcaacacagtgggcgtggaagcagccagggtcatcgccaaggccttagagaagaagtcggagttgaagcgctgccactggagtgacatgttcacgggaaggctgcggaccgagatcccaccagccctgatctcactaggggaaggactcatcacagctggggctcagctggtggagctggacttaagcgacaacgcattcgggcccgacggtgtgcaaggcttcgaggccctgctcaagagctcagcctgcttcaccctgcaggaactcaagctcaacaactgtggcatgggcattggcggcggcaagatcctggctgcagctctgaccgaatgtcaccggaaatccagtgcccaaggcaagcctctggccctgaaggtctttgtggctggcagaaaccgtctggagaatgatggcgccactgccttggcagaagcttttagggtcatcgggaccctggaggaggtccacatgccacagaatgggatcaaccaccctggcatcactgccctggcccaggctttcgctgtcaaccccctgctgcgggtcatcaacctgaatgacaacaccttcactgagaagggcgccgtggccatggccgagaccttgaagaccttgcggcaggtggaggtgattaattttggggactgcctggtgcgctccaagggtgcagttgccattgcagatgccatccgcggcggcctgcccaagctaaaggagctgaacttgtcattctgtgaaatcaagagggatgctgccctggctgttgctgaggccatggcagacaaagctgagctggagaagctggacctgaatggcaacaccctgggagaagaaggctgtgaacagcttcaggaggtgctggagggcttcaacatggccaaggtgctggcgtccctcagtgatgacgaggacgaggaggaggaggaggaaggagaagaggaagaagaggaagcagaagaagaggaggaggaagatgaggaagaggaggaagaagaggaggaggaggaggaagaagagcctcagcagcgagggcagggagagaagtcagccacgccctcacggaagattctggaccctaacactggggagccagctcccgtgctgtcctccccacctcctgcagacgtctccaccttcctggcttttccctctccagagaagctgctgcgcctagggcccaagagctccgtgctgatagcccagcagactgacacgtctgaccccgagaaggtggtctctgccttcctaaaggtgtcatctgtgttcaaggacgaagctactgtgaggatggcagtgcaggatgcagtagatgccctgatgcagaaggctttcaactcctcgtccttcaactccaacaccttcctcaccaggctcctcgtgcacatgggtctgctcaagagtgaagacaaggtcaaggccattgccaacctgtacggccccctgatggcgctgaaccacatggtgcagcaggactatttccccaaggcccttgcacccctgctgctggcgttcgtgaccaagcccaacagcgccctggaatcctgctccttcgcccgccacagtctgctgcagacgctgtacaaggtctagactcaaagcctctcccatcccttggcctggaccagtgagctggggagggactcggatgaactgaggcgcagcctacgccattgccttggacaggactctggccacaggcagggcgggtctgtgtcccatgtgtcctgtcagtcccctgagtatgtgtgtgggtgtggcgcatgtgcaggtctgtgcctcctgtcgggatttgggttttaacgtcttctgctggcccagccctgctctgttgtggggagttggcccccaggggaaagggctgtgagctgctccgccattaaactcacctccacctgagggcgctctgctgatctccgcctgggccctgatggccgtccccacccacctgccttccggcccggctccctggcggagccagaacccagggagttgcccgcgtgctgtccttcccctctgtgttgtgattgggttgtttcctgccctgcctggggctgcttctcgtcaccaagccctggtcctgcggcagctgtcacccctaccatccataccactgtgctgaccgctcagcctgaagagcagagaatgccatgggtgggactgtgggggtcggatcgtggggttgttggcagagggcaaccctgggccccacaccgtgtggacaggcagacaccagattgtccaggagcaggagctgctgggactgcgctggccccggacctagtgggccttctcctggctgctgagatgtcgtctgtgactggcctggctggagggggagtgttgacaacccaaagctgttctccagtctggggagggagaggcagggtccccaatgtccgagctgcatctggacgctgctcttaaaggacctcctggggcaggggagcggtagggtctggactgggcagatgctgtatgacctccctgagcacccgtgactgccccatgctttcccctttgtgctctgtgtgtgtctgggctgtgcccgggggcttcacaaataaagtcgtgtggcagcttca

SEQ ID NO: 335659 - DNA, 573 bp, Homo sapiens
tgcacacgccgaacgaccatacaggtcacaatggacgaagttgttgcccgagtgtccacaccacatgagctaagtctgggcattcggcgtgtgcagtatggaggctcggcgtgtgcatgcacacgccgagtgtccacaccactgtgctgaccgctcagcctgaagagcagagaatgccatgggtgggactgtgggggtcggatcgtggggttgttggcagagggcaaccctgggccccacaccgtgtggacaggcagacaccagattgtccaggagcaggagctgctgggactgcgctggccccggacctagtgggccttctcctggctgctgagatgtcgtctgtgactggcctggctggagggggagtgttgacaacccaaagctgttctccagtctggggagggagaggcagggtccccaatgtccgagctgcatctggacgctgctcttaaaggacctcctggggcaggggagcggtagggtatgatattccgcgtgtgctgcacacgcccgaataaccagactgagccaatccgactggacgcagctgttggcagatcctcctagaac

SEQ ID NO: 335660 - DNA, 3219 bp, Homo sapiens
ttcctttccccgtcacctgcctggaacaggggtgcggggcgaggagggcgtggcgcccgtgtgcgccttctgcctgccccctcggccttcttcacttagccttcgacggccgagcgccccaggggtggcggtgggagtggggttgttgagcggcgctggctcctttcacaaatggggaaactgaggcttaaagggcgtctgactcgccagagcagctcagcctgcagctgctagcagtggcgtctcatattagcattgttgtcaaccggaggcggtgcgagtccgccggggattccagatggggctcctgcgccgcccgcctatcatttgcggcctgtattcgcgcgtcgctcccgcagagccacctcccagcaggcccacgcccgcgggggccccgggctggcgccgctgtccctggaatcgattctgcagatctccaggggagcccaccagcctagtcaacatggcctcggaagacattgccaagctggcagagacacttgccaagactcaggtggccgggggacagctgagtttcaaaggcaagagcctcaaactcaacactgcagaagatgctaaagatgtgattaaagagattgaagactttgacagcttggaggctctgcgtctggaaggcaacacagtgggcgtggaagcagccagggtcatcgccaaggccttagagaagaagtcggagttgaagcgctgccactggagtgacatgttcacgggaaggctgcggaccgagatcccaccagccctgatctcactaggggaaggactcatcacagctggggctcagctggtggagctggacttaagcgacaacgcattcgggcccgacggtgtgcaaggcttcgaggccctgctcaagagctcagcctgcttcaccctgcaggaactcaagctcaacaactgtggcatgggcattggcggcggcaagatcctggctgcagctctgaccgaatgtcaccggaaatccagtgcccaaggcaagcctctggccctgaaggtctttgtggctggcagaaaccgtctggagaatgatggcgccactgccttggcagaagcttttagggtcatcgggaccctggaggaggtccacatgccacagaatgggatcaaccaccctggcatcactgccctggcccaggctttcgctgtcaaccccctgctgcgggtcatcaacctgaatgacaacaccttcactgagaagggcgccgtggccatggccgagaccttgaagaccttgcggcaggtggaggtgattaattttggggactgcctggtgcgctccaagggtgcagttgccattgcagatgccatccgcggcggcctgcccaagctaaaggagctgaacttgtcattctgtgaaatcaagagggatgctgccctggctgttgctgaggccatggcagacaaagctgagctggagaagctggacctgaatggcaacaccctgggagaagaaggctgtgaacagcttcaggaggtgctggagggcttcaacatggccaaggtgctggcgtccctcagtgatgacgaggacgaggaggaggaggaggaaggagaagaggaagaagaggaagcagaagaagaggaggaggaagatgaggaagaggaggaagaagaggaggaggaggaggaagaagagcctcagcagcgagggcagggagagaagtcagccacgccctcacggaagattctggaccctaacactggggagccagctcccgtgctgtcctccccacctcctgcagacgtctccaccttcctggcttttccctctccagagaagctgctgcgcctagggcccaagagctccgtgctgatagcccagcagactgacacgtctgaccccgagaaggtggtctctgccttcctaaaggtgtcatctgtgttcaaggacgaagctactgtgaggatggcagtgcaggatgcagtagatgccctgatgcagaaggctttcaactcctcgtccttcaactccaacaccttcctcaccaggctcctcgtgcacatgggtctgctcaagagtgaagacaaggtcaaggccattgccaacctgtacggccccctgatggcgctgaaccacatggtgcagcaggactatttccccaaggcccttgcacccctgctgctggcgttcgtgaccaagcccaacagcgccctggaatcctgctccttcgcccgccacagtctgctgcagacgctgtacaaggtctagactcaaagcctctcccatcccttggcctggaccagtgagctggggagggactcggatgaactgaggcgcagcctacgccattgccttggacaggactctggccacaggcagggcgggtctgtgtcccatgtgtcctgtcagtcccctgagtatgtgtgtgggtgtggcgcatgtgcaggtctgtgcctcctgtcgggatttgggttttaacgtcttctgctggcccagccctgctctgttgtggggagttggcccccaggggaaagggctgtgagctgctccgccattaaactcacctccacctgagggcgctctgctgatctccgcctgggccctgatggccgtccccacccacctgccttccggcccggctccctggcggagccagaacccagggagttgcccgcgtgctgtccttcccctctgtgttgtgattgggttgtttcctgccctgcctggggctgcttctcgtcaccaagccctggtcctgcggcagctgtcacccctaccatccataccactgtgctgaccgctcagcctgaagagcagagaatgccatgggtgggactgtgggggtcggatcgtggggttgttggcagagggcaaccctgggccccacaccgtgtggacaggcagacaccagattgtccaggagcaggagctgctgggactgcgctggccccggacctagtgggccttctcctggctgctgagatgtcgtctgtgactggcctggctggagggggagtgttgacaacccaaagctgttctccagtctggggagggagaggcagggtccccaatgtccgagctgcatctggacgctgctcttaaaggacctcctggggcaggggagcggtagggtctggactgggcagatgctgtatgacctccctgagcacccgtgactgccccatgctttcccctttgtgctctgtgtgtgtctgggctgtgcccgggggcttcacaaataaagtcgtgtggcagcttca

SEQ ID NO: 335661 - DNA, 3862 bp, Homo sapiens
ttcctttccccgtcacctgcctggaacaggggtgcggggcgaggagggcgtggcgcccgtgtgcgccttctgcctgccccctcggccttcttcacttagccttcgacggccgagcgccccaggggtggcggtgggagtggggttgttgagcggcgctggctcctttcacaaatggggaaactgaggcttaaagggcgtctgactcgccagagcagctcagcctgcagctgctagcagtggcgtctcatattagcattgttgtcaaccggaggcggtgcgagtccgccggggattccagatggggctcctgcgccgcccgcctatcatttgcggcctgtattcgcgcgtcgctcccgcagagccacctcccagcaggcccacgcccgcgggggccccgggctggcgccgctgtccctggaatcgatgtgagtcactgctgacgctttgcaggagcatgcatctcacctcagaaagtctctgacgttgctgcggagcggggagaggatgtttctctattagccctttgcttttgctctggcgctgatcctttgctgaccttggacaaatcaatttacgtttctgtgctccagtttcttggtttataaagtgagtgtggaggggtgcatctctgtctcgctctctcttggactgaggaatgggcccccgttcagctgagaagttctgtccctattctatctggaggcttcaccaccaccttttaccctcaaattgtcccatctcagaactgcaagagatgctggggtttcaggttaatttttttgttggtttttctttaaatttttttatctttttagagacggtctccttctgtcacccaggctggagtgtagtggaacgatcaccgctgaactgcagcgtcggcttcctgggctcaagcgatcctcccacctcaacctcccaagtcatggggactacagatgccatcacacctggctaatttttaaatttttctgtggagacagggtctcattctgttgcccaggcttgtctcgaaccctggtctaaagtgatcttcccgcctagcctcccaaaatgttggaattacagtctgcagatctccaggggagcccaccagcctagtcaacatggcctcggaagacattgccaagctggcagagacacttgccaagactcaggtggccgggggacagctgagtttcaaaggcaagagcctcaaactcaacactgcagaagatgctaaagatgtgattaaagagattgaagactttgacagcttggaggctctgcgtctggaaggcaacacagtgggcgtggaagcagccagggtcatcgccaaggccttagagaagaagtcggagttgaagcgctgccactggagtgacatgttcacgggaaggctgcggaccgagatcccaccagccctgatctcactaggggaaggactcatcacagctggggctcagctggtggagctggacttaagcgacaacgcattcgggcccgacggtgtgcaaggcttcgaggccctgctcaagagctcagcctgcttcaccctgcaggaactcaagctcaacaactgtggcatgggcattggcggcggcaagatcctggctgcagctctgaccgaatgtcaccggaaatccagtgcccaaggcaagcctctggccctgaaggtctttgtggctggcagaaaccgtctggagaatgatggcgccactgccttggcagaagcttttagggtcatcgggaccctggaggaggtccacatgccacagaatgggatcaaccaccctggcatcactgccctggcccaggctttcgctgtcaaccccctgctgcgggtcatcaacctgaatgacaacaccttcactgagaagggcgccgtggccatggccgagaccttgaagaccttgcggcaggtggaggtgattaattttggggactgcctggtgcgctccaagggtgcagttgccattgcagatgccatccgcggcggcctgcccaagctaaaggagctgaacttgtcattctgtgaaatcaagagggatgctgccctggctgttgctgaggccatggcagacaaagctgagctggagaagctggacctgaatggcaacaccctgggagaagaaggctgtgaacagcttcaggaggtgctggagggcttcaacatggccaaggtgctggcgtccctcagtgatgacgaggacgaggaggaggaggaggaaggagaagaggaagaagaggaagcagaagaagaggaggaggaagatgaggaagaggaggaagaagaggaggaggaggaggaagaagagcctcagcagcgagggcagggagagaagtcagccacgccctcacggaagattctggaccctaacactggggagccagctcccgtgctgtcctccccacctcctgcagacgtctccaccttcctggcttttccctctccagagaagctgctgcgcctagggcccaagagctccgtgctgatagcccagcagactgacacgtctgaccccgagaaggtggtctctgccttcctaaaggtgtcatctgtgttcaaggacgaagctactgtgaggatggcagtgcaggatgcagtagatgccctgatgcagaaggctttcaactcctcgtccttcaactccaacaccttcctcaccaggctcctcgtgcacatgggtctgctcaagagtgaagacaaggtcaaggccattgccaacctgtacggccccctgatggcgctgaaccacatggtgcagcaggactatttccccaaggcccttgcacccctgctgctggcgttcgtgaccaagcccaacagcgccctggaatcctgctccttcgcccgccacagtctgctgcagacgctgtacaaggtctagactcaaagcctctcccatcccttggcctggaccagtgagctggggagggactcggatgaactgaggcgcagcctacgccattgccttggacaggactctggccacaggcagggcgggtctgtgtcccatgtgtcctgtcagtcccctgagtatgtgtgtgggtgtggcgcatgtgcaggtctgtgcctcctgtcgggatttgggttttaacgtcttctgctggcccagccctgctctgttgtggggagttggcccccaggggaaagggctgtgagctgctccgccattaaactcacctccacctgagggcgctctgctgatctccgcctgggccctgatggccgtccccacccacctgccttccggcccggctccctggcggagccagaacccagggagttgcccgcgtgctgtccttcccctctgtgttgtgattgggttgtttcctgccctgcctggggctgcttctcgtcaccaagccctggtcctgcggcagctgtcacccctaccatccataccactgtgctgaccgctcagcctgaagagcagagaatgccatgggtgggactgtgggggtcggatcgtggggttgttggcagagggcaaccctgggccccacaccgtgtggacaggcagacaccagattgtccaggagcaggagctgctgggactgcgctggccccggacctagtgggccttctcctggctgctgagatgtcgtctgtgactggcctggctggagggggagtgttgacaacccaaagctgttctccagtctggggagggagaggcagggtccccaatgtccgagctgcatctggacgctgctcttaaaggacctcctggggcaggggagcggtagggtctggactgggcagatgctgtatgacctccctgagcacccgtgactgccccatgctttcccctttgtgctctgtgtgtgtctgggctgtgcccgggggcttcacaaataaagtcgtgtggcagcttca

SEQ ID NO: 335662 - DNA, 4123 bp, Homo sapiens
ctgccggctttcaaaatcctcctcctccgccatcatccgccgcggtgcggagagcaggtggtgctggaagcgcgtgaggccgggagctcgagagagctaacagactagccggctggacatctggaccgctggatccggaggtggcgaccccggcctgacccggaccctaaatccgtccccgccccagagggcggaggcgcgcgctcgattccccccacgcggcggcgccgcctgtttacgtctgcagatctccaggggagcccaccagcctagtcaacatggcctcggaagacattgccaagctggcagagacacttgccaagactcaggtggccgggggacagctgagtttcaaaggcaagagcctcaaactcaacactgcagaagatgctaaagatgtgattaaagagattgaagactttgacagcttggaggctctgcgtctggaaggcaacacagtgggcgtggaagcagccagggtcatcgccaaggccttagagaagaagtcggagttgaagcgctgccactggagtgacatgttcacgggaaggctgcggaccgagatcccaccagccctgatctcactaggggaaggactcatcacagctggggctcagctggtggagctggacttaagcgacaacgcattcgggcccgacggtgtgcaaggcttcgaggccctgctcaagagctcagcctgcttcaccctgcaggaactcaagctcaacaactgtggcatgggcattggcggcggcaagatcctggctgcagctctgaccgaatgtcaccggaaatccagtgcccaaggcaagcctctggccctgaaggtctttgtggctggcagaaaccgtctggagaatgatggcgccactgccttggcagaagcttttagggtcatcgggaccctggaggaggtccacatgccacagaatgggatcaaccaccctggcatcactgccctggcccaggctttcgctgtcaaccccctgctgcgggtcatcaacctgaatgacaacaccttcactgagaagggcgccgtggccatggccgagaccttgaagaccttgcggcaggtggaggtgattaattttggggactgcctggtgcgctccaagggtgcagttgccattgcagatgccatccgcggcggcctgcccaagctaaaggagctgaacttgtcattctgtgaaatcaagagggatgctgccctggctgttgctgaggccatggcagacaaagctgagctggagaagctggacctgaatggcaacaccctgggagaagaaggctgtgaacagcttcaggaggtgctggagggcttcaacatggccaaggtgctggcgtccctcagtgatgacgaggacgaggaggaggaggaggaaggagaagaggaagaagaggaagcagaagaagaggaggaggaagatgaggaagaggaggaagaagaggaggaggaggaggaagaagagcctcagcagcgagggcagggagagaagtcagccacgccctcacggaagattctggaccctaacactggggagccagctcccgtgctgtcctccccacctcctgcagacgtctccaccttcctggcttttccctctccagagaagctgctgcgcctagggcccaagagctccgtgctgatagcccagcagactgacacgtctgaccccgagaaggtggtctctgccttcctaaaggtgtcatctgtgttcaaggacgaagctactgtgaggatggcagtgcaggatgcagtagatgccctgatgcagaaggctttcaactcctcgtccttcaactccaacaccttcctcaccaggctcctcgtgcacatgggtctgctcaagagtgaagacaaggtcaaggccattgccaacctgtacggccccctgatggcgctgaaccacatggtgcagcaggactatttccccaaggcccttgcacccctgctgctggcgttcgtgaccaagcccaacagcgccctggaatcctgctccttcgcccgccacagtctgctgcagacgctgtacaaggtctagactcaaagcctctcccatcccttggcctggaccagtgagctggggagggactcggatgaactgaggcgcagcctacgccattgccttggacaggactctggccacaggcagggcgggtctgtgtcccatgtgtcctgtcagtcccctgagtatgtgtgtgggtgtggcgcatgtgcaggtctgtgcctcctgtcgggatttgggttttaacgtcttctgctggcccagccctgctctgttgtggggagttggcccccaggggaaagggctgtgagctgctccgccattaaactcacctccacctgagggcgctctgctgatctccgcctgggccctgatggccgtccccacccacctgccttccggcccggctccctggcggagccagaacccagggagttgcccgcgtgctgtccttcccctctgtgttgtgattgggttgtttcctgccctgcctggggctgcttctcgtcaccaagccctggtcctgcggcagctgtcacccctaccatccataccactgtgctgaccgctcagcctgaagagcagagaatgccatgggtgggactgtgggggtcggatcgtggggttgttggcagagggcaaccctgggccccacaccgtgtggacaggcagacaccagattgtccaggagcaggagctgctgggactgcgctggccccggacctagtgggccttctcctggctgctgagatgtcgtctgtgactggcctggctggagggggagtgttgacaacccaaagctgttctccagtctggggagggagaggcagggtccccaatgtccgagctgcatctggacgctgctcttaaaggacctcctggggcaggggagcggtagggtctggactgggcagatgctgtatgacctccctgagcacccgtgactgccccatgctttcccctttgtgctctgtgtgtgtctgggctgtgcccgggggcttcacaaataaagtcgtgtggcagcttcaactcagaaactctcactgaaagcgggatagtctcgggggccgttgtacgtggagtcccacctcggcagagcatgcggccccgcagcagtctgtggggcagtcagccctgcagaagggcccggcctcggcctcaggccactacctgggaagtggcagtcctgagtgggggcccattttcctgcctggccacacctcacccagcaccctgcctttgggctgcagctcgcttggcttctgcgttgctccttcactatggaagccacctcccttgggatcctttgctccactgccacatatgtgaggacagcccagccaaccttccttacctcctaccctacaccatgtatgtgctttgggagcccatgtcccccacaaacggcctccaagaagtccctccaaggtttcttagagggcaatattttctcattggcagtcggccacgtaggtgaccaggtggcagaggatactgctggccctgtcccctgtcttctgtgtgagttgatacggtagggggtgggtgtggggctggcattaagttctgatgccagctacaacgtggatgaactttgaaaacatgttaaatgaaataagccagacacaaaaggacaaatatgattccatttagatgaggcatctagaataagcaaattcagagaccaagaaggtagaggttgccagggctaggggaagggtggaatagggagtgaggctgcaaacagattctctgggatgatgaagatgttctggaaatggagagtggtggtggttgcataacattgtgaatgtacttaatgcactgaattgtacacataaaaatggttaaaatgatagatttcatgtattaatatattttacctcagctcacttaacaggcatgaaccaccatgcccggctacagtgctctttctaataaacccatgctggaaacaacccaaatgtctatcactagaggaatgggtaagctacttgtggtacggtgtggtaccgagaaggtaggaatggtctgcccaagaagaaatattttagcattgacattgtttagacttgtcagcacatgataataaaaagcagagaccaactttaagtcag

SEQ ID NO: 335663 - DNA, 2964 bp, Homo sapiens
ctgccggctttcaaaatcctcctcctccgccatcatccgccgcggtgcggagagcaggtggtgctggaagcgcgtgaggccgggagctcgagagagctaacagactagccggctggacatctggaccgctggatccggaggtggcgaccccggcctgacccggaccctaaatccgtccccgccccagagggcggaggcgcgcgctcgattccccccacgcggcggcgccgcctgtttacgtctgcagatctccaggggagcccaccagcctagtcaacatggcctcggaagacattgccaagctggcagagacacttgccaagactcaggtggccgggggacagctgagtttcaaaggcaagagcctcaaactcaacactgcagaagatgctaaagatgtgattaaagagattgaagactttgacagcttggaggctctgcgtctggaaggcaacacagtgggcgtggaagcagccagggtcatcgccaaggccttagagaagaagtcggagttgaagcgctgccactggagtgacatgttcacgggaaggctgcggaccgagatcccaccagccctgatctcactaggggaaggactcatcacagctggggctcagctggtggagctggacttaagcgacaacgcattcgggcccgacggtgtgcaaggcttcgaggccctgctcaagagctcagcctgcttcaccctgcaggaactcaagctcaacaactgtggcatgggcattggcggcggcaagatcctggctgcagctctgaccgaatgtcaccggaaatccagtgcccaaggcaagcctctggccctgaaggtctttgtggctggcagaaaccgtctggagaatgatggcgccactgccttggcagaagcttttagggtcatcgggaccctggaggaggtccacatgccacagaatgggatcaaccaccctggcatcactgccctggcccaggctttcgctgtcaaccccctgctgcgggtcatcaacctgaatgacaacaccttcactgagaagggcgccgtggccatggccgagttgccattgcagatgccatccgcggcggcctgcccaagctaaaggagctgaacttgtcattctgtgaaatcaagagggatgctgccctggctgttgctgaggccatggcagacaaagctgagctggagaagctggacctgaatggcaacaccctgggagaagaaggctgtgaacagcttcaggaggtgctggagggcttcaacatggccaaggtgctggcgtccctcagtgatgacgaggacgaggaggaggaggaggaaggagaagaggaagaagaggaagcagaagaagaggaggaggaagatgaggaagaggaggaagaagaggaggaggaggaggaagaagagcctcagcagcgagggcagggagagaagtcagccacgccctcacggaagattctggaccctaacactggggagccagctcccgtgctgtcctccccacctcctgcagacgtctccaccttcctggcttttccctctccagagaagctgctgcgcctagggcccaagagctccgtgctgatagcccagcagactgacacgtctgaccccgagaaggtggtctctgccttcctaaaggtgtcatctgtgttcaaggacgaagctactgtgaggatggcagtgcaggatgcagtagatgccctgatgcagaaggctttcaactcctcgtccttcaactccaacaccttcctcaccaggctcctcgtgcacatgggtctgctcaagagtgaagacaaggtcaaggccattgccaacctgtacggccccctgatggcgctgaaccacatggtgcagcaggactatttccccaaggcccttgcacccctgctgctggcgttcgtgaccaagcccaacagcgccctggaatcctgctccttcgcccgccacagtctgctgcagacgctgtacaaggtctagactcaaagcctctcccatcccttggcctggaccagtgagctggggagggactcggatgaactgaggcgcagcctacgccattgccttggacaggactctggccacaggcagggcgggtctgtgtcccatgtgtcctgtcagtcccctgagtatgtgtgtgggtgtggcgcatgtgcaggtctgtgcctcctgtcgggatttgggttttaacgtcttctgctggcccagccctgctctgttgtggggagttggcccccaggggaaagggctgtgagctgctccgccattaaactcacctccacctgagggcgctctgctgatctccgcctgggccctgatggccgtccccacccacctgccttccggcccggctccctggcggagccagaacccagggagttgcccgcgtgctgtccttcccctctgtgttgtgattgggttgtttcctgccctgcctggggctgcttctcgtcaccaagccctggtcctgcggcagctgtcacccctaccatccataccactgtgctgaccgctcagcctgaagagcagagaatgccatgggtgggactgtgggggtcggatcgtggggttgttggcagagggcaaccctgggccccacaccgtgtggacaggcagacaccagattgtccaggagcaggagctgctgggactgcgctggccccggacctagtgggccttctcctggctgctgagatgtcgtctgtgactggcctggctggagggggagtgttgacaacccaaagctgttctccagtctggggagggagaggcagggtccccaatgtccgagctgcatctggacgctgctcttaaaggacctcctggggcaggggagcggtagggtctggactgggcagatgctgtatgacctccctgagcacccgtgactgccccatgctttcccctttgtgctctgtgtgtgtctgggctgtgcccgggggcttcacaaataaagtcgtgtggcagcttca

SEQ ID NO: 335664 - DNA, 2960 bp, Homo sapiens
ctgccggctttcaaaatcctcctcctccgccatcatccgccgcggtgcggagagcaggtggtgctggaagcgcgtgaggccgggagctcgagagagctaacagactagccggctggacatctggaccgctggatccggaggtggcgaccccggcctgacccggaccctaaatccgtccccgccccagagggcggaggcgcgcgctcgattccccccacgcggcggcgccgcctgtttacgtctgcagatctccaggggagcccaccagcctagtcaacatggcctcggaagacattgccaagctggcagagacacttgccaagactcaggtggccgggggacagctgagtttcaaaggcaagagcctcaaactcaacactgcagaagatgctaaagatgtgattaaagagattgaagactttgacagcttggaggctctgcgtctggaaggcaacacagtgggcgtggaagcagccagggtcatcgccaaggccttagagaagaagtcggagttgaagcgctgccactggagtgacatgttcacgggaaggctgcggaccgagatcccaccagccctgatctcactaggggaaggactcatcacagctggggctcagctggtggagctggacttaagcgacaacgcattcgggcccgacggtgtgcaaggcttcgaggccctgctcaagagctcagcctgcttcaccctgcaggaactcaagctcaacaactgtggcatgggcattggcggcggcaagatcctggctgcagctctgaccgaatgtcaccggaaatccagtgcccaaggcaagcctctggccctgaaggtctttgtggctggcagaaaccgtctggagaatgatggcgccactgccttggcagaagcttttagggtcatcgggaccctggaggaggtccacatgccacagaatgggatcaaccaccctggcatcactgccctggcccaggctttcgctgtcaaccccctgctgcgggtcatcaacctgaatgacaacaccttcactgagaagggcgccgtggccatggccgagaccttgaagaccttgcggcaggtggaggtgattaattttggggactgcctggtgcgctccaagggtgcagttgccattgcagatgccatccgcggcggcctgcccaagctaaaggagctgaacttgtcattctgtgaaatcaagagggatgctgccctggctgttgctgaggccatggcagacaaagctgagctggagaagctggacctgaatggcaacaccctgggagaagaaggctgtgaacagcttcaggaggtgctggagggcttcaacatggccaaggtgctggcgtccctcagatgaggaagaggaggaagaagaggaggaggaggaggaagaagagcctcagcagcgagggcagggagagaagtcagccacgccctcacggaagattctggaccctaacactggggagccagctcccgtgctgtcctccccacctcctgcagacgtctccaccttcctggcttttccctctccagagaagctgctgcgcctagggcccaagagctccgtgctgatagcccagcagactgacacgtctgaccccgagaaggtggtctctgccttcctaaaggtgtcatctgtgttcaaggacgaagctactgtgaggatggcagtgcaggatgcagtagatgccctgatgcagaaggctttcaactcctcgtccttcaactccaacaccttcctcaccaggctcctcgtgcacatgggtctgctcaagagtgaagacaaggtcaaggccattgccaacctgtacggccccctgatggcgctgaaccacatggtgcagcaggactatttccccaaggcccttgcacccctgctgctggcgttcgtgaccaagcccaacagcgccctggaatcctgctccttcgcccgccacagtctgctgcagacgctgtacaaggtctagactcaaagcctctcccatcccttggcctggaccagtgagctggggagggactcggatgaactgaggcgcagcctacgccattgccttggacaggactctggccacaggcagggcgggtctgtgtcccatgtgtcctgtcagtcccctgagtatgtgtgtgggtgtggcgcatgtgcaggtctgtgcctcctgtcgggatttgggttttaacgtcttctgctggcccagccctgctctgttgtggggagttggcccccaggggaaagggctgtgagctgctccgccattaaactcacctccacctgagggcgctctgctgatctccgcctgggccctgatggccgtccccacccacctgccttccggcccggctccctggcggagccagaacccagggagttgcccgcgtgctgtccttcccctctgtgttgtgattgggttgtttcctgccctgcctggggctgcttctcgtcaccaagccctggtcctgcggcagctgtcacccctaccatccataccactgtgctgaccgctcagcctgaagagcagagaatgccatgggtgggactgtgggggtcggatcgtggggttgttggcagagggcaaccctgggccccacaccgtgtggacaggcagacaccagattgtccaggagcaggagctgctgggactgcgctggccccggacctagtgggccttctcctggctgctgagatgtcgtctgtgactggcctggctggagggggagtgttgacaacccaaagctgttctccagtctggggagggagaggcagggtccccaatgtccgagctgcatctggacgctgctcttaaaggacctcctggggcaggggagcggtagggtctggactgggcagatgctgtatgacctccctgagcacccgtgactgccccatgctttcccctttgtgctctgtgtgtgtctgggctgtgcccgggggcttcacaaataaagtcgtgtggcagcttca

SEQ ID NO: 335665 - DNA, 1660 bp, Homo sapiens
ggacgcgtgggtcgacccacgcgtcggaagcagaagaagaggaggaggaagatgaggaagaggaggaagaagaggaggaggaggaggaagaagagcctcagcagcgagggcagggagagaagtcagccacgccctcacggaagattctggaccctaacactggggagccagctcccgtgctgtcctccccacctcctgcagacgtctccaccttcctggcttttccctctccagagaagctgctgcgcctagggcccaagagctccgtgctgatagcccagcagactgacacgtctgaccccgagaaggtggtctctgccttcctaaaggtgtcatctgtgttcaaggacgaagctactgtgaggatggcagtgcaggatgcagtagatgccctgatgcagaaggctttcaactcctcgtccttcaactccaacaccttcctcaccaggctcctcgtgcacatgggtctgctcaagagtgaagacaaggtcaaggccattgccaacctgtacggccccctgatggcgctgaaccacatggtgcagcaggactatttccccaaggcccttgcacccctgctgctggcgttcgtgaccaagcccaacagcgccctggaatcctgctccttcgcccgccacagtctgctgcagacgctgtacaaggtctagactcaaagcctctcccatcccttggcctggaccagtgagctggggagggactcggatgaactgaggcgcagcctacgccattgccttggacaggactctggccacaggcagggcgggtctgtgtcccatgtgtcctgtcagtcccctgagtatgtgtgtgggtgtggcgcatgtgcaggtctgtgcctcctgtcgggatttgggttttaacgtcttctgctggcccagccctgctctgttgtggggagttggcccccaggggaaagggctgtgagctgctccgccattaaactcacctccacctgagggcgctctgctgatctccgcctgggccctgatggccgtccccacccacctgccttccggcccggctccctggcggagccagaacccagggagttgcccgcgtgctgtccttcccctctgtgttgtgattgggttgtttcctgccctgcctggggctgcttctcgtcaccaagccctggtcctgcggcagctgtcacccctaccatccataccactgtgctgaccgctcagcctgaagagcagagaatgccatgggtgggactgtgggggtcggatcgtggggttgttggcagagggcaaccctgggccccacaccgtgtggacaggcagacaccagattgtccaggagcaggagctgctgggactgcgctggccccggacctagtgggccttctcctggctgctgagatgtcgtctgtgactggcctggctggagggggagtgttgacaacccaaagctgttctccagtctggggagggagaggcagggtccccaatgtccgagctgcatctggacgctgctcttaaaggacctcctggggcaggggagcggtagggtctggactgggcagatgctgtatgacctccctgagcacccgtgactgccccatgctttcccctttgtgctctgtgtgtgtctgggctgtgcccgggggcttcacaaataaagtcgtgtggcagcttca

SEQ ID NO: 335666 - DNA, 2328 bp, Homo sapiens
ctgccggctttcaaaatcctcctcctccgccatcatccgccgcggtgcggagagcaggtggtgctggaagcgcgtgaggccgggagctcgagagagctaacagactagccggctggacatctggaccgctggatccggaggtggcgaccccggcctgacccggaccctaaatccgtccccgccccagagggcggaggcgcgcgctcgattccccccacgcggcggcgccgcctgtttacgtctgcagatctccaggggagcccaccagcctagtcaacatggcctcggaagacattgccaagctggcagagacacttgccaagactcaggtggccgggggacagctgagtttcaaaggcaagagcctcaaactcaacactgcagaagatgctaaagatgtgattaaagagattgaagactttgacagcttggaggctctgcgtctggaaggcaacacagtgggcgtggaagcagccagggtcatcgccaaggccttagagaagaagtcggagttgaagcgctgccactggagtgacatgttcacgggaaggctgcggaccgagatcccaccagccctgatctcactaggggaaggactcatcacagctggggctcagctggtggagctggacttaagcgacaacgcattcgggcccgacggtgtgcaaggcttcgaggccctgctcaagagctcagcctgcttcaccctgcaggaactcaagctcaacaactgtggcatgggcattggcggcggcaagatcctggctgcagctctgaccgaatgtcaccggaaatccagtgcccaaggcaagcctctggccctgaaggtctttgtggctggcagaaaccgtctggagaatgatggcgccactgccttggcagaagcttttagggtcatcgggaccctggaggaggtccacatgccacagaatgggatcaaccaccctggcatcactgccctggcccaggctttcgctgtcaaccccctgctgcgggtcatcaacctgaatgacaacaccttcactgagaagggcgccgtggccatggccgagaccttgaagaccttgcggcaggtggaggtgattaattttggggactgcctggtgcgctccaagggtgcagttgccattgcagatgccatccgcggcggcctgcccaagctaaaggagctgaacttgtcattctgtgaaatcaagagggatgctgccctggctgttgctgaggccatggcagacaaagctgagctggagaagctggacctgaatggcccaacagcgccctggaatcctgctccttcgcccgccacagtctgctgcagacgctgtacaaggtctagactcaaagcctctcccatcccttggcctggaccagtgagctggggagggactcggatgaactgaggcgcagcctacgccattgccttggacaggactctggccacaggcagggcgggtctgtgtcccatgtgtcctgtcagtcccctgagtatgtgtgtgggtgtggcgcatgtgcaggtctgtgcctcctgtcgggatttgggttttaacgtcttctgctggcccagccctgctctgttgtggggagttggcccccaggggaaagggctgtgagctgctccgccattaaactcacctccacctgagggcgctctgctgatctccgcctgggccctgatggccgtccccacccacctgccttccggcccggctccctggcggagccagaacccagggagttgcccgcgtgctgtccttcccctctgtgttgtgattgggttgtttcctgccctgcctggggctgcttctcgtcaccaagccctggtcctgcggcagctgtcacccctaccatccataccactgtgctgaccgctcagcctgaagagcagagaatgccatgggtgggactgtgggggtcggatcgtggggttgttggcagagggcaaccctgggccccacaccgtgtggacaggcagacaccagattgtccaggagcaggagctgctgggactgcgctggccccggacctagtgggccttctcctggctgctgagatgtcgtctgtgactggcctggctggagggggagtgttgacaacccaaagctgttctccagtctggggagggagaggcagggtccccaatgtccgagctgcatctggacgctgctcttaaaggacctcctggggcaggggagcggtagggtctggactgggcagatgctgtatgacctccctgagcacccgtgactgccccatgctttcccctttgtgctctgtgtgtgtctgggctgtgcccgggggcttcacaaataaagtcgtgtggcagcttca

SEQ ID NO: 335667 - DNA, 2253 bp, Homo sapiens
ctgccggctttcaaaatcctcctcctccgccatcatccgccgcggtgcggagagcaggtggtgctggaagcgcgtgaggccgggagctcgagagagctaacagactagccggctggacatctggaccgctggatccggaggtggcgaccccggcctgacccggaccctaaatccgtccccgccccagagggcggaggcgcgcgctcgattccccccacgcggcggcgccgcctgtttacgtctgcagatctccaggggagcccaccagcctagtcaacatggcctcggaagacattgccaagctggcagagacacttgccaagactcaggtggccgggggacagctgagtttcaaaggcaagagcctcaaactcaacactgcagaagatgctaaagatgtgattaaagagattgaagactttgacagcttggaggctctgcgtctggaaggcaacacagtgggcgtggaagcagccagggtcatcgccaaggccttagagaagaagtcggagttgaagcgctgccactggagtgacatgttcacgggaaggctgcggaccgagatcccaccagccctgatctcactaggggaaggactcatcacagctggggctcagctggtggagctggacttaagcgacaacgcattcgggcccgacggtgtgcaaggcttcgaggccctgctcaagagctcagcctgcttcaccctgcaggaactcaagctcaacaactgtggcatgggcattggcggcggcaagatcctggctgcagctctgaccgaatgtcaccggaaatccagtgcccaaggcaagcctctggccctgaaggtctttgtggctggcagaaaccgtctggagaatgatggcgccactgccttggcagaagcttttagggtcatcgggaccctggaggaggtccacatgccacagaatgggatcaaccaccctggcatcactgccctggcccaggctttcgctgtcaaccccctgctgcgggtcatcaacctgaatgacaacaccttcactgagaagggcgccgtggccatggccgagaccttgaagaccttgcggcaggtggaggtgattaattttggggactgcctggtgcgctccaagggtgcagttgccattgcagatgccatccgcggcggcctgcccaagctaaaggagctgaacttgtcattctgtgaaatcaagagggatgctgccctggctgttgctgaggccatggcagacaaagctgagctggagaagctggacctgaatggcaacaccctgggagaagaaggctgtgaacagcttcaggaggtgctggagggcttcaacatggccaaggtgctggcgtccctcagtgatgacgaggacgaggaggaggaggaggaaggagaagaggaagaagaggaagcagaagaagaggaggaggaagatgaggaagaggaggaagaagaggaggaggaggaggaagaagagcctcagcagcgagggcagggagagaagtcagccacgccctcacggaagattctggaccctaacactggggagccagctcccgtgctgtcctccccacctcctgcagacgtctccaccttcctggcttttccctctccagagaagctgctgcgcctagggcccaagagctccgtgctgatagcccagcagactgacacgtctgaccccgagaaggtggtctctgccttcctaaaggtgtcatctgtgttcaaggacgaagctactgtgaggatggcagtgcaggatgcagtagatgccctgatgcagaaggctttcaactcctcgtccttcaactccaacaccttcctcaccaggctcctcgtgcacatgggtctgctcaagagtgaagacaaggtcaaggccattgccaacctgtacggccccctgatggcgctgaaccacatggtgcagcaggactatttccccaaggcccttgcacccctgctgctggcgttcgtgaccaagcccaacagcgccctggaatcctgctccttcgcccgccacagtctgctgcagacgctgtacaaggctggggagggagaggcagggtccccaatgtccgagctgcatctggacgctgctcttaaaggacctcctggggcaggggagcggtagggtctggactgggcagatgctgtatgacctccctgagcacccgtgactgccccatgctttcccctttgtgctctgtgtgtgtctgggctgtgcccgggggcttcacaaataaagtcgtgtggcagcttca

SEQ ID NO: 335668 - DNA, 1699 bp, Homo sapiens
ctgccggctttcaaaatcctcctcctccgccatcatccgccgcggtgcggagagcaggtggtgctggaagcgcgtgaggccgggagctcgagagagctaacagactagccggctggacatctggaccgctggatccggaggtggcgaccccggcctgacccggaccctaaatccgtccccgccccagagggcggaggcgcgcgctcgattccccccacgcggcggcgccgcctgtttacgtctgcagatctccaggggagcccaccagcctagtcaacatggcctcggaagacattgccaagctggcagagacacttgccaagactcaggtggccgggggacagctgagtttcaaaggcaagagcctcaaactcaacactgcagaagatgctaaagatgtgattaaagagattgaagactttgacagcttggaggctctgcgtctggaaggcaacacagtgggcgtggaagcagccagggtcatcgccaaggccttagagaagaagtcggagttgaagcgctgccactggagtgacatgttcacgggaaggctgcggaccgagatcccaccagccctgatctcactaggggaaggactcatcacagctggggctcagctggtggagctggacttaagcgacaacgcattcgggcccgacggtgtgcaaggcttcgaggccctgctcaagagctcagcctgcttcaccctgcaggaactcaagctcaacaactgtggcatgggcattggcggcggcaagatcctggctgcagctctgaccgaatgtcaccggaaatccagtgcccaaggcaagcctctggccctgaaggtctttgtggctggcagaaaccgtctggagaatgatggcgccactgccttggcagaagcttttagggtcatcgggaccctggaggaggtccacatgccacagaatgggatcaaccaccctggcatcactgccctggcccaggctttcgctgtcaaccccctgctgcgggtcatcaacctgaatgacaacaccttcactgagaagggcgccgtggccatggccgagaccttgaagaccttgcggcaggtggaggtgattaattttggggactgcctggtgcgctccaagggtgcagttgccattgcagatgccatccgcggcggcctgcccaagctaaaggagctgaacttgtcattctgtgaaatcaagagggatgctgccctggctgttgctgaggccatggcagacaaagctgagctggagaagctggacctgaatggcaacaccctgggagaagaaggctgtgaacagcttcaggaggtgctggagggcttcaacatggccaaggtgctggcgtccctcagtgatgacgaggacgaggaggaggaggaggaaggagaagaggaagaagaggaagcagaagaagaggaggaggaagatgaggaagaggaggaagaagaggaggaggaggaggaagaagagcctcagcagcgagggcagggagagaagtcagccacgccctcacggaagattctggaccctaacactggggtgaggatacagcaagaaagcagccatctataaaccaggaaggcggccctcaccaacaacctgaccatgctgggaccctggtcgtggacttccagcccccagatcagtgagaaataaatttctactgcttaaaaaaaaaaaaaaaaaaaaaaaaaaaaacc

SEQ ID NO: 335669 - DNA, 1856 bp, Homo sapiens
gttctagaggatccctcaagctgctcacagaagattcggacctaacactggggagccagctcccgtgctgtcctccccacctcctgcagacgtctccaccttcctggcttttccctctccagagaagctgctgcgcctagggcccaagagctccgtgctgatagcccagcagactgacacgtctgaccccgagaaggtggtctctgccttcctaaaggtgtcatctgtgttcaaggacgaagctactgtgaggatggcagtgcaggatgcagtagatgccctgatgcagaaggctttcaactcctcgtccttcaactccaacaccttcctcaccaggctcctcgtgcacatgggtctgctcaagagtgaagacaaggtcaaggccattgccaacctgtacggccccctgatggcgctgaaccacatggtgcagcaggactatttccccaaggcccttgcacccctgctgctggcgttcgtgaccaagcccaacagcgccctggaatcctgctccttcgcccgccacagtctgctgcagacgctgtacaaggctggggagggagaggcagggtccccaatgtccgagctgcatctggacgctgctcttaaaggacctcctggggcaggggagcggtagggtctggactgggcagatgctgtatgacctccctgagcacccgtgactgccccatgctttcccctttgtgctctgtgtgtgtctgggctgtgcccgggggcttcacaaataaagtcgtgtggcagcttcaactcagaaactctcactgaaagcgggatagtctcgggggccgttgtacgtggagtcccacctcggcagagcatgcggccccgcagcagtctgtggggcagtcagccctgcagaagggcccggcctcggcctcaggccactacctgggaagtggcagtcctgagtgggggcccattttcctgcctggccacacctcacccagcaccctgcctttgggctgcagctcgcttggcttctgcgttgctccttcactatggaagccacctcccttgggatcctttgctccactgccacatatgtgaggacagcccagccaaccttccttacctcctaccctacaccatgtatgtgctttgggagcccatgtcccccacaaacggcctccaagaagtccctccaaggtttcttagagggcaatattttctcattggcagtcggccacgtaggtgaccaggtggcagaggatactgctggccctgtcccctgtcttctgtgtgagttgatacggtagggggtgggtgtggggctggcattaagttctgatgccagctacaacgtggatgaactttgaaaacatgttaaatgaaataagccagacacaaaaggacaaatatgattccatttagatgaggcatctagaataagcaaattcagagaccaagaaggtagaggttgccagggctaggggaagggtggaatagggagtgaggctgcaaacagattctctgggatgatgaagatgttctggaaatggagagtggtggtggttgcataacattgtgaatgtacttaatgcactgaattgtacacataaaaatggttaaaatgatagatttcatgtattaatatattttacctcagctcacttaacaggcatgaaccaccatgcccggctacagtgctctttctaataaacccatgctggaaacaacccaaatgtctatcactagaggaatgggtaagctacttgtggtacggtgtggtaccgagaaggtaggaatggtctgcccaagaagaaatattttagcattgacattgtttagacttgtcagcacatgataataaaaagcagagaccaactttaagtcag

SEQ ID NO: 335670 - DNA, 896 bp, Homo sapiens
ccgtgcgtcccttgtcccccggtccggcccccttctcgtcgtacatgttcgggggctctaccgcttgagtctgtcgtagcgcccgagtttggacccctgggacgcaactgcttggcggggccccgggtaactggccagttgttaatctgactatgtgggaacaccctcagtgagagatgcctgtatttatgaaggaagaatataaaatctgttaaaaacttaaaacatctaaaataggtatgaagagaggcttatggtgctcattttaacagcattcttgagtaggttaccttgcagtcaaagcatctgctccagaccagtgttttaaactgtggattatggtaccactatgggtcatgaaattaatttattgcattatgactagcattttttatttaaaatagagaaaagaatagaaaataaaagcgtacatcacagatggtaagggtatgtgtttttaagtaaacatttgttcatgtgtatatgtgttagattaccttgtaaaacatattccttattgtgggttacaggccaaaaaaagtgtttgtttttgtttttaaaaatctacagttcagattttccttagaaaatggggaaaaaaggaatgttagaaagatctgactgcctatgaactagtgaaggattttagaggaagtaccaggctattttagagatctgatactggtttcagaaaggtaatcttaaggcaaagggtaggaaataaagttatgttgttagtagaaatgtcaaatacggttaaagttgtgaggaggaattattttcctagtggacctacatttgttgtgtgtagatctgtgactattactgatctgttgtagcacattttccaatctaaaatgtccgatacagcacaataataaacatggggcagaata

SEQ ID NO: 335671 - DNA, 747 bp, Homo sapiens
tgtagattttattatccatgccatctatttataatcctatgacactcctatattgtttatggtttttttgtttttttttgtttttttttttagacgaagtcttgctctgtcacccaggctggagtgcagtggtgcaatctcggctcactgcaagctccgcctcccggttcacgccatgcttctgcctcagcctccccagtacctgggactacaggcgcccaccaccacgcccggctaattttttgtacttttagtagagatggggtttcaccgtgttagccaggatggtctccatctcctgacctcgtgatcccccggcctcggcctcccaaagtgttgggattacaggcgtgagccactgtgcctggccttactgtttatgttttcatgcatctataccttatgttactaaatcaaagtgaccagttccacattatactacaagtttcactgtgtaatgcataagaattacacagagggaagggcctcaaaaaatgcacttctgaagtattttaatgtaaaattatttaagaccataaagtttcatgaaagcctaatctttctggaacctacacatactctgcatgtgaaccagagttaaactagtcaagtattttaatactgaactaatctggaaaaacatcatttaaaaaattactgtatttatgaaggaagaatataaaatctgttaaaaacttaaaacatctaaaatagtccgcatccaagacggatcctctagccaccacc

SEQ ID NO: 335672 - DNA, 345 bp, Homo sapiens
  misc_feature (265)..(265): n is a, c, g, or t
actaatacttcctcaacgcttcatctttctcaacgcttatcttcctcaacgctttatacttcggaagggcctcaaaaaatgcacttctgaagtattttaatgtaaaattatttaagaccataaagtttcatgaaagcctaatctttctggaacctacacatactctgcatgtgaaccagagttaaactagtcaagtattttaatactgaactaatctggaaaaacatcatttaaaaaattactgtatttatgaaggaagaataangcgttgagaaagtataaagcgttgaggaagtataaagcgttgagaaagtataaagcgttgaggaagtataaagcgttgag

SEQ ID NO: 335673 - DNA, 1373 bp, Homo sapiens
tgtagattttattatccatgccatctatttataatcctatgacactcctatattgtttatggtttttttgtttttttttgtttttttttttagacgaagtcttgctctgtcacccaggctggagtgcagtggtgcaatctcggctcactgcaagctccgcctcccggttcacgccatgcttctgcctcagcctccccagtacctgggactacaggcgcccaccaccacgcccggctaattttttgtacttttagtagagatggggtttcaccgtgttagccaggatggtctccatctcctgacctcgtgatcccccggcctcggcctcccaaagtgttgggattacaggcgtgagccactgtgcctggccttactgtttatgttttcatgcatctataccttatgttactaaatcaaagtgaccagttccacattatactacaagtttcactgtgtaatgcataagaattacacagagggaagggcctcaaaaaatgcacttctgaagtattttaatgtaaaattatttaagaccataaagtttcatgaaagcctaatctttctggaacctacacatactctgcatgtgaaccagagttaaactagtcaagtattttaatactgaactaatctggaaaaacatcatttaaaaaattactgtatttatgaaggaagaatataaaatctgttaaaaacttaaaacatctaaaataggtatgaagagaggcttatggtgctcattttaacagcattcttgagtaggttaccttgcagtcaaagcatctgctccagaccagtgttttaaactgtggattatggtaccactatgggtcatgaaattaatttattgcattatgactagcattttttatttaaaatagagaaaagaatagaaaataaaagcgtacatcacagatggtaagggtatgtgtttttaagtaaacatttgttcatgtgtatatgtgttagattaccttgtaaaacatattccttattgtgggttacaggccaaaaaaagtgtttgtttttgtttttaaaaatctacagttcagattttccttagaaaatggggaaaaaaggaatgttagaaagatctgactgcctatgaactagtgaaggattttagaggaagtaccaggctattttagagatctgatactggtttcagaaaggtaatcttaaggcaaagggtaggaaataaagttatgttgttagtagaaatgtcaaatacggttaaagttgtgaggaggaattattttcctagtggacctacatttgttgtgtgtagatctgtgactattactgatctgttgtagcacattttccaatctaaaatgtccgatacagcacaataataaacatggggcagaata

SEQ ID NO: 335674 - DNA, 1606 bp, Homo sapiens
tgtagattttattatccatgccatctatttataatcctatgacactcctatattgtttatggtttttttgtttttttttgtttttttttttagacgaagtcttgctctgtcacccaggctggagtgcagtggtgcaatctcggctcactgcaagctccgcctcccggttcacgccatgcttctgcctcagcctccccagtacctgggactacaggcgcccaccaccacgcccggctaattttttgtacttttagtagagatggggtttcaccgtgttagccaggatggtctccatctcctgacctcgtgatcccccggcctcggcctcccaaagtgttgggattacaggcgtgagccactgtgcctggccttactgtttatgttttcatgcatctataccttatgttactaaatcaaagtgaccagttccacattatactacaagtttcactgtgtaatgcataagaattacacagagggaagggcctcaaaaaatgcacttctgaagtattttaatgtaaaattatttaagaccataaagtttcatgaaagcctaatctttctggaacctacacatactctgcatgtgaaccagagttaaactagtcaagtattttaatactgaactaatctggaaaaacatcatttaaaaaattactgtatttatgaaggaagaatataaaatctgttaaaaacttaaaacatctaaaataggtatgaagagaggcttatggtgctcattttaacagcattcttgagtaggttaccttgcagtcaaagcatctgctccagaccagtgttttaaactgtggattatggtaccactatgggtcatgaaattaatttattgcattatgactagcattttttatttaaaatagagaaaagaatagaaaataaaagcgtacatcacagatggtaagggtatgtgtttttaagtaaacatttgttcatgtgtatatgtgttagattaccttgtaaaacatattccttattgtgggttacaggccaaaaaaagtgtttgtttttgtttttaaaaatctacagttcagattttccttagaaaatggggaaaaaaggaatgttagaaagatctgactgcctatgaactagtgaaggattttagaggaagtaccaggctattttagagatctgatactggtttcagaaaggtaatcttaaggcaaagggtaggaaataaagttatgttgttagtagaaatgtcaaatacggttaaagttgtgaggaggaattattttcctagtggacctacatttgttgtgtgtagatctgtgactattactgatctgttgtagcacattttccaatctaaaatgtccgatacagcacaataataaacatggggcagaatatatgtttgtttctatttcttcccaccttcccttcaatcttaaaacaagtgtttattaataagtcagaccaaagcaaatttctatctttcacagagtaattatcataggaacaaattactccctgaaaatggtggaaacttctttctccctccgaaaaataaactttcaataagtgttttctctctagccaaagtaaataagttcttaaataggtaacgctcgtcgtgccatcc

SEQ ID NO: 335675 - DNA, 947 bp, Homo sapiens
tgtagattttattatccatgccatctatttataatcctatgacactcctatattgtttatggtttttttgtttttttttgtttttttttttagacgaagtcttgctctgtcacccaggctggagtgcagtggtgcaatctcggctcactgcaagctccgcctcccggttcacgccatgcttctgcctcagcctccccagtacctgggactacaggcgcccaccaccacgcccggctaattttttgtacttttagtagagatggggtttcaccgtgttagccaggatggtctccatctcctgacctcgtgatcccccggcctcggcctcccaaagtgttgggattacaggcgtgagccactgtgcctggccttactgtttatgttttcatgcatctataccttatgttactaaatcaaagtgaccagttccacattatactacaagtttcactgtgtaatgcataagaattacacagagggaagggcctcaaaaaatgcacttctgaagtattttaatgtaaaattatttaagaccataaagtttcatgaaagcctaatctttctggaacctacacatactctgcatgtgaaccagagttaaactagtcaagtattttaatactgaactaatctggaaaaacatcatttaaaaaattactgtatttatgaaggaagaatataaaatctgttaaaaacttaaaacatctaaaataggtatgaagagaggcttatggtgctcattttaacagcattcttgagtaggttaccttgcagtcaaagcatctgctccagaccagtgttttaaactgtggattatggtaccactatgggtcatgaaattaatttattgcattatgactagcattttttatttaaaatagagaaaagaatagaaaataaaagcgtccgtaagggttttccaagtcagagaccggcaagtggcaggc

SEQ ID NO: 335676 - DNA, 375 bp, Homo sapiens
ccctccgctatgagtccccagctctgtgcatcccttgcctccccatcagagcagtttccattcctcactcagccctctcgtggattgcaaaggctcttccagacagaggaggcctccttcattgtgcttcccccgagctaaccacacagatttccttaccacgatccctccccctccagaaatgctagccgaactgaggcaaggaaacaatcagagcagatcccgagagggtctcgggagaaacagggtacggcactgtttctgctgctcccaacatgtcccccagccaaggagcttttacagcctcctggggtgtgacatgatttaagaaggcctcaaggttccagtctgggatacaaaaagctgtaaatgaac

SEQ ID NO: 335677 - DNA, 165 bp, Homo sapiens
tgagatcatgccactgcactctagcctgggcatcacagcaaagaaaaagtaaaaagacaacccagtgagtggaaaaaaatatttgcaaatcacatcggaaatagccaaacaatcatgaaaaagaacaaagctggaagattcacactttctgatttcaaaacttac

SEQ ID NO: 335678 - DNA, 239 bp, Homo sapiens
acagaatcacagcagccacccatgttcatgaggccagcagcagatcccacgccattttcacgatccactacacgcaggcaatcctggagaacaacctcccttctgaaatggctagcaagatcaaccttgtggacctagcaggcagcgaaagagcagatcccagttactgtaaggaccgcattgctgaaggagccaatatcaacaagtcccttgtgactctaggaattgtcatctccacc

SEQ ID NO: 335679 - DNA, 571 bp, Homo sapiens
ccatagacacctagagaataataaatgtttattgttttaggacactaaattttgagaaaatgtgttacacagcactaagtagctaacaaagttgcattttgctagactgctttggtatctagaaatggagtctatcaatagtttataggttagaggtgccagtcctcatgttttcaggtttgagaaacactgctctaagctacaagataagccaacatgtcctagggctccaccaagggagagagagggctgtaagacagtaaagcactgccactgctggcatgactccatgtgcacagccagaaggcagagaacagtacaggtctaattcagggaaacagtgttgacatgcctgccctatatgaccttaagccccaggaaggcttgccgctcagagtcttgctgcatctgtgtaaaattaagctgcctaatactacataccgtgcacgtgcttaaactagagcagccagacagtgcttggcaggaatctgttttgttcccccctatataccagaaatactaactaaagaaacatcatggggccggggagaaaaaaacagaaaggatgaca

SEQ ID NO: 335680 - DNA, 940 bp, Homo sapiens
  misc_feature (503)..(503): n is a, c, g, or t
  misc_feature (580)..(580): n is a, c, g, or t
  misc_feature (599)..(599): n is a, c, g, or t
  misc_feature (604)..(604): n is a, c, g, or t
  misc_feature (615)..(615): n is a, c, g, or t
  misc_feature (636)..(636): n is a, c, g, or t
  misc_feature (651)..(651): n is a, c, g, or t
tctgcacctcactcactctgttccagccacacgggccttctcgctgtcctgtcctgaagatacccatgcaagctctcaccacaggccactgacccaaccactgtcttggcagcgctgcccagacaaccacatggcttgctcgcacacctcctgaatacctcacttcagtgagaccttccctcatcacaatatatttaaaattgcaaaatttcctctctctactccctgcaaagcatccactttcctctgcttctccaaagcactaattacctaaaaggacacacaagtttgcctaccacatagcagcagcccaataaatatttgttaaatgtagttaagagtattattagtgagcctaaggcaaaaattcaagattccaattctaggccggcgcagtggctcacatctgcaatcctaacacttcaggaggttaaggcaggaggatcgcttgagtctgggaggtcaaggctgcagtgagctgagactgggccactgcactccancctgggtgacagaacgagaccctgtctcaaaaaacaaaacaaaagacacacaaaaaagtgatgctagggaggccttnggcagagaatggatttccntaatngtgaatgtggnggtggtgcttctggaaatggnaatcaacagcacttngtggaggggcttttgcacagaatacatatatgaaccataaagaagtcccatttcccctccctaggttctcttcatacaagaaatggtagttagctccatggtttcctctgaatactttcctttgttgtctttcttgaaggactggcacaactcctgtccagctgctctatccagggtcccgattcagcaatgtcaaatctctccagctactttgcagattcgggatacgacagctcgtcaggatagatcacatcccagatctcccatgcatagtacatggggtcgcggg

SEQ ID NO: 335681 - DNA, 596 bp, Homo sapiens
ggaccgcctcagccctgcttgttgctagactctgattctgatatagatgcaatgaatatttgttgaatagatgaataacttatctcatgatgttgacagagacctttgaaatacgcctttcattaaccttataccaaatgatgccaagccagcatacctttatccttttagtaagtcttggcttgaatttcatccacattcttcctcattcaacaagaattactacatctttataatctgcccaaggatcaagcttaagaatagaaagagattttgtgcttaagtttcctgaccacttcgccatgcaaggagggcctctctcatcagtagctgttctgagtgagccgagatcatgccactgcactccagcctggatgacagagcaagactccatctcaaaaaagaagaaaggaatactataaggggaaaaaaattaagcagtaactacttaaaacccagaaatttttggtaatagtgataatacttaatcaaaattggacagttattttacaatttaacaattcattttacagtcaaaacagtgttatgatagaagtaggatgagttttactgttatccactgttaaaaaaataaa

SEQ ID NO: 335682 - DNA, 345 bp, Homo sapiens
atactaaatgaacatgatgcaaaatgaacaacacataagtttctgagagaaaagtcctcatgctgagaaagttaagaaatccttagtaacacggggttctgagtgaagaattactaaaggagattctagaaatccttggtagaatctgaactgtcaaaggactaaattgaacaattactgctctcccactattgcaaagccatttcctatagttgctgccacaagctagaacttcatcctgggcatgattcaacccctaatttgcaaatttataacagctcttggctactaagcatggttttcttctatagaccatacttcaataaaatactgttacaaataaca

SEQ ID NO: 335683 - DNA, 436 bp, Homo sapiens
tcaggtaaaaagcatgtcagtgggagagcgagggctgggagggctcctttactacctaaagataaatgttcatcagtgtgtgtatagatgaagtacttggatgaatgattttatttttttcggagggaggcttgtcatgattaacaaattcagtctaaattcgcttgctgaattcctaaccagttaaccctcaacattgaatttactcaaagtcatcctagagccagcatggtatagggtgtgtgtggtatagggtatatgtttgggctaggaaaaaaataatggagtgtcaggaagataaaaatccacaagataggccgggcacagtggctcacgcctgtaatcccagtgttttgggaagccgaggcaggtggatcacctaaggtcaggagtgtgagactagcctggccaatatggtgaaaccccatctctacta

SEQ ID NO: 335684 - DNA, 264 bp, Homo sapiens
catggggtgtgtgcaggtgtgtgtgtgcatgtgtgcccaggtgtttgagcatgtagatgggtgcacgtgtggggtatgtgcatggggtgtgtgcacgtgtgtgtgtgcgcccaggtgtatgagcgtgtggatgggtgcacgtatagaagtgcgcgtgggagaagtgcgcctgggtgcagaagtgcgcctgggtgcagaagtgcgcctgggtgcagaagtgcgcctgggtgcagaagtgcgcctgggtgcagaagcgcctgggtg

SEQ ID NO: 335685 - DNA, 523 bp, Homo sapiens
catggggtgtgtgcaggtgtgtgtgtgcatgtgtgcccaggtgtttgagcatgtagatgggtgcacgtgtggggtatgtgcatggggtgtgtgcacgtgtgtgtgtgcgcccaggtgtatgagcgtgtggatgggtgcacgtatagaatgtgtaaatgaaatgtgtgcatatgtgtgtgtgtatgtgtgcccaggtgtatgtgtggatgggtgtgtgtgggatgtgtgcatgggtgtgtgtgtgtgtgcatgtgtgaccaggtatatgagtggatgggtgtgtgtggggtgtgtgcatggggtgtgtgcacgtgtgtgtgtgtgtgtgcccaggtgtatgagtggataggtacacgtgtgggatgtgtgcacatgtgtgaatgtgtgcccaggtgtatgaatgtgttgatgggtgtatgggaatgtgtacatgaaatgtgtgcgtatgtgtgtgcatgtgtgcccaggtgtatgactgtgtggataaatgtgtgggatgtgtccatggggtgtatgcgcgcgt

SEQ ID NO: 335686 - DNA, 352 bp, Homo sapiens
catactgggggagtggatttattttatctattttttaactacttctaaatacttcagggtgtattttctgaaaataagtacgttgaattgaattgagggtagtggagaaccattgaaagttttaagcagaatgatgtgatacagtggaggagtggaaggaaattaggctaacttgtaaagaaactggcagtttagatgtaattctgtaagtgaatggaagtcattaagtctgagctattgaatggatttgggtagtcttggtatggattgaggtaatatttgaagttatttgaatggaagaaattgaataggcagagaatttagagataaaagaggagagagggcttatgag

SEQ ID NO: 335687 - DNA, 258 bp, Homo sapiens
tcctcctctgctctccgctcagtgacccctgccctctgaaaagccctctagacccctgggttcccccaacctagtcctgcccactctgcggatgaatctgttcctctcactgagtcccgtgaagacagggctggtcaccgctgtggccccagcagtgctcagcaggaggctcaaacacccaaaatctgtgagccacagatatccaagaagacttaagactggacattgggactacgaccagtgtgcctgagatgaggt

SEQ ID NO: 335688 - DNA, 249 bp, Homo sapiens
agtccagaaatagatctaagtatattgggaacttaatatatgagataggtgggaagaggaagatgtatttaatgaataatgctggcatatttggctctcataaaaacaaaggcagagcccctacctcatacaagaagtaaattagagaattaagcatcacagataaaacagttaaaatattagaataaaattgtttaagcctggaggagaccttcctaagcaagaccaaacaatgcagtggcaatagta

SEQ ID NO: 335689 - DNA, 410 bp, Homo sapiens
gatgggaaatgtgtccttctcatgtccacagccacagactgtccctgtgacttttctgagctccaggagttatctggctctgccaggcaactctggggaggacaaagtgtctgtcacttttcaatttcgaacgtggaacagagcaggacatttgcttttcggcgaacttcaacgtggttcagggagtttcgtcctctttcttaaggatggcaagctcaaactgagtctcttccaggcgggacagtcaccaaggaatgtcacagcaggtgctggattaaacgatgggcagtggcactctgtgtccttctctgccaagtggagccatatgaatgtggtggtggacgatgacacagctgttcagcccctggtggctgtgctcattgattcaggtgacacctattattttggag

SEQ ID NO: 335690 - DNA, 204 bp, Homo sapiens
caagctggagccaaatggcttagatgtgtttacctgattcccaagggtgacacggacactgacccagaggtggcgggcacggcagggcagcactgcatccctgctgctgtgcagagtggccccatcttgtccattcagtcagcgaccactgctcagtgaatgggaacttggtatttctgtgtggtggctgtaagcctcagtcag

SEQ ID NO: 335691 - DNA, 94 bp, Homo sapiens
tgacaaaaagagcacaggagtgcttgggaatctctgctaagacaggtaagagaaatttcaataaacagtttggaggggtggatttatttgggga

SEQ ID NO: 335692 - DNA, 82 bp, Homo sapiens
catgtggtttttactcctagagtttgtttattcctcaccgcagcttggtgaggtaccactgttagcgttagtgtattaggac

SEQ ID NO: 335693 - DNA, 338 bp, Homo sapiens
ctcaggtgaagaaaccaagacacagtaaagaatgaatatgtaaaggatgtcagaactaggaagtgatggaatcaggaagagagcctggacagcctgccttgtgactcataggtcatctggccacaaaaacaatgaaatagaaaacctatccaataatcaatatggaatctcaagggatctcaaatagccaaaacaatcttgaaacagaagaacaaaactgaaggactcaacctttctaattttaaaacttactacaaacctaaagtaactaaaacagtgtggtattgacataaagacagaaatatagaccaatggaataaaataaaaagcctggaaat

SEQ ID NO: 335694 - DNA, 1361 bp, Homo sapiens
ctccagcatatgttcttgtttttatggaactgtactcaagactcgtctgggataaaatgtcatcagtagcctctggcaagtagagattccacatctgggtaacttcacctgtccttactttataatgcatgagcaccagtctgatactctggagttcttccattgccgtgccagcagagagatgactcatggcccaggtgaaattcaggtccaagctctggagagtgtgtggggactggtgaaaagacatggttttattgttatctgtttagttcctgctgcggaagatgagactctcgctctctttgtcatttccccacatgcacagaaacacacatatttctacttttctcatcctctcaacaggctatcataactttggttaaatcaatagtcagtgtttgtatattattattggataaatattacttacagtggaacccattttgtgtatgattagatattctttcttgtagaactttatgtttatccaggagttaatacttatctgattattttcagttgcttaatgtcctatacacctgttattaatttatgctgaactctccaacagaaactgaaatcttgtcttactatgtttaaacacattgggtattctacaagtttcttttcttatttatgtataattctcctagggctttccatcttcctgctctagtctaaactggttgttctctaggccagtggcaatgttatcatcctgatattctccttcaccatcagcctgggagttctgttggtttttctcctgtatggaatcctctatttcctgttatttttaaaaacttggtgtcaaccctaattttcatgggtatatttatgcaataacttttcagaaaaagatacaaaaaaagcaacattttttttcctgtgattttgcttacttgaaaatatctttattccatgggtcagccaactataggctgtaggctaaaatcctcccattttagtgaataaggttttattagaatacagccacatccatttgtttacttattatatattatgccacaatggaagatttgagaaattgcaataaagaacatttagatgataaaatctacaacatttattatctggacctttacgaagcaaatatttgctaacacttgctttattctatgttcacacaaaattgttaattttgctagatatagaattttaaagggctttttttttatcttctagcttccagagtgaatgtttaatagccttacaacattctgattcctaatcctttatataaaaactgttattttgtttgtttttggaagcttctgaaaccttctccttgttcttggtatgaacacttgtttttctaatgcaataaacacatgatg

SEQ ID NO: 335695 - DNA, 1318 bp, Homo sapiens
ctcaggtgaagaaaccaagacacagtaaagaatgaatatgtaaaggatgtcagaactaggaagtgatggaatcaggaagagagcctggacagcctgccttgtgactcataggtcatctggccacaaaaacaatgagagatgactcatggcccaggtgaaattcaggtccaagctctggagagtgtgtggggactggtgaaaagacatggttttattgttatctgtttagttcctgctgcggaagatgagactctcgctctctttgtcatttccccacatgcacagaaacacacatatttctacttttctcatcctctcaacaggctatcataactttggttaaatcaatagtcagtgtttgtatattattattggataaatattacttacagtggaacccattttgtgtatgattagatattctttcttgtagaactttatgtttatccaggagttaatacttatctgattattttcagttgcttaatgtcctatacacctgttattaatttatgctgaactctccaacagaaactgaaatcttgtcttactatgtttaaacacattgggtattctacaagtttcttttcttatttatgtataattctcctagggctttccatcttcctgctctagtctaaactggttgttctctaggccagtggcaatgttatcatcctgatattctccttcaccatcagcctgggagttctgttggtttttctcctgtatggaatcctctatttcctgttatttttaaaaacttggtgtcaaccctaattttcatgggtatatttatgcaataacttttcagaaaaagatacaaaaaaagcaacattttttttcctgtgattttgcttacttgaaaatatctttattccatgggtcagccaactataggctgtaggctaaaatcctcccattttagtgaataaggttttattagaatacagccacatccatttgtttacttattatatattatgccacaatggaagatttgagaaattgcaataaagaacatttagatgataaaatctacaacatttattatctggacctttacgaagcaaatatttgctaacacttgctttattctatgttcacacaaaattgttaattttgctagatatagaattttaaagggctttttttttatcttctagcttccagagtgaatgtttaatagccttacaacattctgattcctaatcctttatataaaaactgttattttgtttgtttttggaagcttctgaaaccttctccttgttcttggtatgaacacttgtttttctaatgcaataaacacatgatg

SEQ ID NO: 335696 - DNA, 105 bp, Homo sapiens
tcatgtataacttttacctgcttttgcattagaaggaaaactttgtcttactggttatatccaaacctcttgtgctaagtattttttatactttcactgaaaaaa

SEQ ID NO: 335697 - DNA, 621 bp, Homo sapiens
atgcaagaaacaacacagagaaattccatgcacactgcgcccagtttcctccaaaaaagacaagatagaggactgtatctgtatccagtgattcatccagattgtcacttccttttactgccaagtgacattctgtggtacgaaggggcctcactttaactattcactcactgaaggctatctagatcatttccagtttcccgctattataaataaagctgctatgaacatccacgtgtaggctattgtataaacatgtcttcatttctccaggataaatgctcaaggtacactggttgcatgtttagttttttgtttgttttgagacggagtctcgctctgtcgcccaggatggagtgcagtggcgctatatcggctcactgcaagctccgcctcccgggttcacgccattctcctgcttcagcctcccgagtagctgggactacaagcagccaccaccacgcccagctaattttttgtatttttagaagagacagggtttcaccatgttaaccaggatggtctcgatctcctgacctcgtgatccgcccgcctcggcctcccaaagtgctgggattacaggtgtgagccaccacgcctggccgcatgtttagtttttaa

SEQ ID NO: 335698 - DNA, 353 bp, Homo sapiens
ttttcttcttactttccccctttttaatgcctatagctttttgccaaaaaagttagctttttacaataataaagtactgctttgttaagttctactcatcacttacctacattgcccctaccaacgtaacaatttcatatcattttcctattagataggttcaaagatagactaaaatcctaaatgtattttgagatacatttaaaaatcaacttaaaaatgaattttgtgacatgtgagaaggagcatttgtgcatgtattttaaatattacattctggatattttgacatggtgttagcacaaagaattttcccttcaaaatcaacttagttaaaaagacaaactgttgtg

SEQ ID NO: 335699 - DNA, 203 bp, Homo sapiens
tcggcggactgattttgtctgtgcagcgggaaggaagaatccatcaggcaattacagtattcaggtaagaatgaattcactttgcagttttaaaaagccacagaaaagaacatggattacactgaatttcctatgatcaaaatttttatttgggaaaacttcaaacctcaagaaaattgaaagaatatgctcaacattatatc

SEQ ID NO: 335700 - DNA, 548 bp, Homo sapiens
gaggctgcggtgagctatgatcacactgctgtactcagctctctctaaaaagaaagaaaagaaaatctttataaatcctgtgaggcagcaccatttgccactgcagatatgccttctgcctgttgcttccatgccactctaccaagttaaagcaaacaaggccagtctcaaggcaaattttccaccctgtgtctcctcctttgctgtccaccaatctttagcagaaatatgaacttgttaatacatcattaaatattgtcttaaaaacgagtataactcacatctcaaattggagcaaagtcctttagactggtgatttccaagtgagtcaagtttgttattaaacacttttatgaagtaccatagctataaaatcacttcaggaattcaaggctatgattcttgagtggcaacaaagtttatatcctctttggtggaattgtttaatgatgctcttgagctgcccaggaagtagtaaggcctcctaagagttgtttcattattattttgggagttttgggttttttttttttctttttgagacagag

SEQ ID NO: 335701 - DNA, 659 bp, Homo sapiens
aatctgaagtggctgggggttggagaaagaaaaaaatgaaggggaaaaaaaggaaggagaaaagaaaaaggacagaaagttataaccagagtacagacacaggcatttagtatttctgaagaatagtaaggtccagtatctggcaatgggaataggttgctgaaacaaggtgtaggtgatgactgctggaactgatgtatgatgaagtgagaggtgacaatgttgccaagacattatatccagacactcagattgccaaagataatacagacatgaataggataagaaagagttggtcaaatttcctactggatgtgggtgaatgaccaagatatcaattaaggatagaagacagacaataaaatgaataaaatataagataattccatgatgaaaccataaagaaaaatgttttcctatgcagttaaaaatataaaagctcaaaagcactgcatccactcttgtagcacatggactgaataagaagccatatttctagagaaaagtcagaacatgcagaggaagcagtctgttaaaaagttgagggtaagctaaaactataaaagtcttagaagaaaacacagccataaatctatatgaaccttagattagacactgatttcttagatgtaatgccaaagcacaaacaacaaaaacaa

SEQ ID NO: 335702 - DNA, 154 bp, Homo sapiens
tgatgtggacctgacagatgcgattcccagccacacactgtattgttaaaaacggagcaggagtgtgacactgacagtaactgagagaaggaaggacatggaatgagaagagaggacagctgacatccagtggaatgtgaccgtgttaaatagc

SEQ ID NO: 335703 - DNA, 272 bp, Homo sapiens
tttgctaacagatcaatgtgataatttaacaatttattaaaacaacatttaaatttatgtcttgatcttaaaaaaaaaaaatcccaacaaaacggccgggtgtggtggcccacagctgtaatcccagcactttgggaggccgagatgggcagatcacctgaggtcaggagttcgagaccagcctggccaaaatggtaaaaccctgtctctactaaaaatacagaaattatccaggcatggtggtgtgtgcctgtgatcccagctactcggga

SEQ ID NO: 335704 - DNA, 230 bp, Homo sapiens
tgtaaaaaccttattcattctttaagactcaggtcaatgactgccttctcggtcaatattttcctgactctttttcaagaaaagttgagcaatcattccctctattttcctattattatagaactctgtgcttttaaaattcttgtattaatattaatatctattatgttgcctttttgtttgtttgcttctgtttccccccaatgactgatctccttaaaggcagagtt

SEQ ID NO: 335705 - DNA, 203 bp, Homo sapiens
ctatctatggagtcctaagtgttaggctgccgtgcagtcaccactttggagagaccacagagaaagacatggttgccagagtcccagctgtttctgtcttcccacatctgtgaataataaaggcttcaagatgatcccagacagcaaccatcttactgcaacatcatcagagatttagactcgattcacccagctgagctact

SEQ ID NO: 335706 - DNA, 558 bp, Homo sapiens
gagccggtcctactttccacaggggcatgacctgatgtacattacatgtgtccacccaggagggagagctccatttccctatctataaaatgcaggcataggactgattaatttgaaagcttctccagagaaatatcattgtataaactgtggtgttgcattatccaaatttttctctaaacaactggctgggattacaggcatgagccaccacacctgaccaagaaatcaaataagcttttgaaggctgtacatacaatctaatctgattttatccagccataaattaaaaattgttagttctgtgctccgtattctagttgctttcgcagacacgctttgctcacttaaagtctgtataataaccccattgtaaacacaaacaactgcaaatgtgtatgtgcgcagattaaccttttctagacactccttgtaattttcaaagccagtactggagttctagagtgcattagcacatgcatcaaatggtagattccccaggacctcaccgcagtgccaactgcagccccagcctacttcaccaaaaccacatcctgt

SEQ ID NO: 335707 - DNA, 201 bp, Homo sapiens
agacctgaaggaatagagggcagagaggagacctctgggaagtggcattctgtgctgaactttgtgtgagtccatgtgcctgaatccacacaaagggagaaaaagatgctgaggaaatcaagatgaacagatacagatcatttctttgagtgtccggcaacatgtttttgatcatctgtgctaaataggagataaggttgc

SEQ ID NO: 335708 - DNA, 422 bp, Homo sapiens
ggtgtatctatctgttgtgagcagggtagaagctcttctaaacaatctctgattaagaaactcattgtattaatagacgctcttcatcccctctatgagcacactgtcagattcttgaaactcactgaatggtcgtatctgtaaacttctctcttacataccatttcgataaaccatctgatttccacttggataagtgaacatctatggtaatagaaatatattcatgatacttaattttaaagtaaactattaataagaatttaagagaattttcaaggtccagagtgagactatgcctcagtaggagtctggtataaagaaacagaaagccaacatgaattgcttgccatctcttatctctaaatctttatgtgccctgtttcattcttgtcagtcttacttttctaatactcatctac

SEQ ID NO: 335709 - DNA, 430 bp, Homo sapiens
tatctcgtgtcctgcgatctgggtcagcagctcggtcgtgtcatctgggatgcaggctcctttcctctttctcctcctccatttcatagctccaggttcaccactgcacagtaatggccagagcaagaaagggaccattgtgccctgtgcccccttctcaggcaccaggtagactttccctctgtctcgttgaccaggactaagtcaagtatgtatccctagtagggaacgtgatgagcctaatggcatgggcagtgacatccccttactggtgagatcccaggtggggagctcactccacagaaacagtttgtaatgagagaactctctctgcaacaaggtattcgctgcagcatcatttgtaacaggaaaaagctagaacactctacataccctgactagggcctaattgagtaaatgaggttttatc

SEQ ID NO: 335710 - DNA, 310 bp, Homo sapiens
ccagttcccttttgctatttcattcttttgactgcttttactgagtactcactaaatgcagctaaacgaacaaagtatgtgcctggaactaaattcactaacttaaagaaaatcaagcagccatgcacaaacagaagaacatttaaaaaaaattaaaatacttagaatcctatccagtgtaatgatgcgaatttatttaacaattcttggtccagtttttgtccatttggtattccatatctccctgcctccctcagtgtaactcttcacttgaaggaaagaatggaacaacaaaaaaaaaaaagacaat

SEQ ID NO: 335711 - DNA, 340 bp, Homo sapiens
  misc_feature (40)..(42): n is a, c, g, or t
cgcagcacaaatcacggacatcactaaatgagaaacaaannntttagaaaaactgacccatctgaatttttagtgcctttatggaatttctgtactttgaccaaccagaagaaggactatttttgttaaagaatgttcatccgagccattccaaacatgccatagaagcaactgactattgaaggagacacccttgctttgacattttataacaatgatctatgtaatacttaagactctttaaatttgagataatagaaaatgtaactcaaactagtttaaacaataaagtgaatttattggctcatctaaaaaaaaaaaatttttctcgttggcctaa

SEQ ID NO: 335712 - DNA, 311 bp, Homo sapiens
  misc_feature (40)..(42): n is a, c, g, or t
cgcagcacaaatcacggacatcactaaatgagaaacaaannntttagaaaaactgacccatctgaatttttagtgcctttatggaatttctgtactttgaccaaccagaagaaggactatttttgttaaagaatgttcatccgagccattccaaacatgccatagaagcaactgactattgaaggagacacccttgctttgacattttataacaatgatctatgtaatacttaagactctttaaatttgagataatagaaaatgtaactcaaactagtttaaacaataaagtgaatttattggctcatcta

SEQ ID NO: 335713 - DNA, 365 bp, Homo sapiens
  misc_feature (40)..(42): n is a, c, g, or t
cgcagcacaaatcacggacatcactaaatgagaaacaaannntttagaaaaactgacccatctgaatttttagtgcctttatggaatttctgtactttgaccaaccagaagaaggactatttttgttaaagaatgttcatccgagccattccaaacatgccatagaagcaactgactattgaaggagacacccttgctttgacattttataacaatgatctatgtaatacttaagactctttaaatttgagataatagaaaatgtaactcaaactagtttaaacaataaagtgaatttattggctcatctaaaaaaaaaaacaaaccagacaccctcaccccttcattggcctttgttggcctca

SEQ ID NO: 335714 - DNA, 259 bp, Homo sapiens
tctctgtttctattacagggacccatctgaatttttagtgcctttatggaatttctgtactttgaccaaccagaagaaggactatttttgttaaagaatgttcatccgagccattccaaacatgccatagaagcaactgactattgaaggagacacccttgctttgacattttataacaatgatctatgtaatacttaagactctttaaatttgagataatagaaaatgtaactcaaactagtttaaacaataaagtga

SEQ ID NO: 335715 - DNA, 257 bp, Homo sapiens
gaaatttctctcccatattagtagtatgagaacctgatcaagctcctggaggtaaaactcacagaagcatgggagccctcctctgtgactgggttttcccggagtttttaactctcagacttgcccacactaggtctctaggaatttgtcaattacatttgagctttccctatgcaggcacttgttcctccagtggattctgctttcattatgttgtgattctctgaatctgcctgtttttctctatgattctgggg

SEQ ID NO: 335716 - DNA, 175 bp, Homo sapiens
attctcctgcctcagcctcccaagtagctggaacaacaggcgtgcaccaccatggctggctaagacctttccccctattttcttaatgtcttttagtgagtcccatcatctgtaggtcaagttccagttctagagcttggtacccaagacttcccataatctgacccagcccttc

SEQ ID NO: 335717 - DNA, 765 bp, Homo sapiens
cgttgtattaagaacctcacttagattatctgattcaatcttcataataaccctgcaacccccacctttttttgagacagggtcttgctctgttgtccaggctacagtgcactggtacaatcatagttcactgcagtgtcaacctcctgagctcaagcaatcctcccacctcagccttgcaagcagcttggactacaggcgtgccaccacaccttgccatttttttttattttaagtagaaacaaggtcttattaatactatgttgcccaggctggtcttgaactccagcgatcctcctgccccagcctcccaaagtgcttgggattacggaagtaagccactgtgcctggccagtgcaacccccattttatactaaaacaggaaggcccagaaaggtttggagtaacttgtccagggtcacacagatgatatttgaactcaggtctccctggctcccaagagagtctgctttccactaggactcccaggagaaaaaaaaaaaaaaaacagtagacttggagacagaaaatctgatttgagtcttagttgagctaggctaactgtgtaactgtgggcaagttccttagcccctgtgagcctcagtttcttatctgtaaaatgtcataaaagaaatccatctcatggagtagttgtgatgatcaaggactctgaaaacattagaatggtttaatgtgaaggattagcagcagcacatggcaacattgtgcatcttatattaactatccaaatatatcaagcgtcat

SEQ ID NO: 335718 - DNA, 633 bp, Homo sapiens
cgttgtattaagaacctcacttagattatctgattcaatcttcataataaccctgcaacccccacctttttttgagacagggtcttgctctgttgtccaggctacagtgcactggtacaatcatagttcactgcagtgtcaacctcctgagctcaagcaatcctcccacctcagcctcccaaagtgcttgggattacggaagtaagccactgtgcctggccagtgcaacccccattttatactaaaacaggaaggcccagaaaggtttggagtaacttgtccagggtcacacagatgatatttgaactcaggtctccctggctcccaagagagtctgctttccactaggactcccaggagaaaaaaaaaaaaaaaacagtagacttggagacagaaaatctgatttgagtcttagttgagctaggctaactgtgtaactgtgggcaagttccttagcccctgtgagcctcagtttcttatctgtaaaatgtcataaaagaaatccatctcatggagtagttgtgatgatcaaggactctgaaaacattagaatggtttaatgtgaaggattagcagcagcacatggcaacattgtgcatcttatattaactatccaaatatatcaagcgtcat

SEQ ID NO: 335719 - DNA, 507 bp, Homo sapiens
gaatgtcttccaggcacttcagactctcttctctagactttgctggactttcactcttccccctaaaactggctcctcttccactgtgcctggccagtgcaacccccattttatactaaaacaggaaggcccagaaaggtttggagtaacttgtccagggtcacacagatgatatttgaactcaggtctccctggctcccaagagagtctgctttccactaggactcccaggagaaaaaaaaaaaaaaaacagtagacttggagacagaaaatctgatttgagtcttagttgagctaggctaactgtgtaactgtgggcaagttccttagcccctgtgagcctcagtttcttatctgtaaaatgtcataaaagaaatccatctcatggagtagttgtgatgatcaaggactctgaaaacattagaatggtttaatgtgaaggattagcagcagcacatggcaacattgtgcatcttatattaactatccaaatatatcaagcgtcat

SEQ ID NO: 335720 - DNA, 263 bp, Homo sapiens
acctctgctgattttattctatatcttgtcactgtaataaatcataaccctgaatataatggctttgctaagttctctgagtccttctagcaaatcatggaacatcaggatgatcttggaggatcccccgatcatgcttatttcccccagaacaatgtgattacaacagtgcagcgcaatgtaggtctacaagcacgctacttccccgtatcatagaagacgcttatcacctcttcatgtatcacgaccctgggctaccgaga

SEQ ID NO: 335721 - DNA, 295 bp, Homo sapiens
acctctgctgattttattctatatcttgtcactgtaataaatcataaccctgaatataatggctttgctaagttctctgagtccttctagcaaatcatggaacatcaggatgatcttggaggatcccccgatcatgcttatttcccccagaacaatgtgattacaacagtgcagagttttccttaacttttatttttttccttgcaaaataggtttaagatatttttatttgttgcaaaagacagacctgtgacttctattcctgatgtctgtctctcattgctttttttttttt

SEQ ID NO: 335722 - DNA, 501 bp, Homo sapiens
atggaggtcactgtagccagagtccagggtgtggggattggaaggagcgagactggcgctggaagcaggggctagaatcacatgggaccttgtaatcagggtggggagtatcaataactgtgacagttgacaatagctgttggcaagatttgagtttagtagattgaaccagggtaactgagacagaggtggtgtgaagcggccacattctggctctgttttgaggtagaggtgatgttatgtggacatgagaggaggagaggagtcagggatgacactggggcatttgtcctgagcagctgtgtcctggaggagcccaaccgggggatgcaggagcaagaggtgggttttggccagtgtgtcggagaggcccgtgagcctcccagggggagatgctgagccagcagctcgggccatgccggatctggagctcagggagaggctgagtgaggaggcatcagcacgtggatggaattttaggtcacaggagggagagggtca

SEQ ID NO: 335723 - DNA, 1078 bp, Homo sapiens
gtggcgttttcttcggtttcgacttccggtaggagagtcccaaacggccagcggctgggaatttgcggtgggaaggatacgagcaagataaagcagcgagggatttaagtctggcaacagttggactgctggattttcagagaagtgttccccaaagcaaattatagtgctaatttccaatgttccataagcgtggcaagaaaaatgggaagttctcggtaaggtatatagtattatttctagaaataaagatgaaccaatccaagattgattttttgtttgtttaatcctggcagtattcttaactaaattgtattcattcttccctttactttccagactttttaattttatttatttttttattttttgggacggagtcttgcccaggctggagtgcagtgccacaatcttggctcactgcaacctctgcctccctggttcaggcgtttctcctgcctcaccctcccgagtagctgggactacaggcacgtgccatcacgccaggctagtttttgcatttttagtacagatggggttttacatgttgatcaggctggtcttggactcctgacttggtgatccacccgcctcagcctcccaaagtgttgggattacaggcatgagccactgcgccaggccactttccagatactatagtccctaatttattgtgtctcaaatgccaaataaatttgagcttagactggagctgctgtactgatacaggattggatttatgggtgaatgggtgactataggtgtcatgttattttcatagaaccattcaggtttgaaattaagaaggaaagaagttcccttgaatggagatagccagaggcagaattaagacctttcttccaagatcagtctgaaataacattttggcaagtaaaagaggcatgtctgtcatagaagaaataaaaaggcaacctggaagaacagaaaaagggaggactagatagaaattagttaactgtctagctgggcatggtggcaggcacctgtaataccagctactcaggaggctgaggcaggagaatcgcttgaacccaggaagcggaggttgcagtgagcc

SEQ ID NO: 335724 - DNA, 721 bp, Homo sapiens
gtggcgttttcttcggtttcgacttccggtaggagagtcccaaacggccagcggctgggaatttgcggtatcgcgggggggtgggaaatttcccttggtgcgtgctccttctgatgtcagccttcaaaacgtttgtgggactcccctttgatttgagtctctgctgctagcagctgcttccctgacctctaaaaccaggaaagaccataggttctctaagtgagcagccgccgtttgctgcccttagaaaactcacagaagtgaagagtgtttctttcctgacttattcctgttcccctaggcaggcgtgctaggggttaggagttctgccgtgattcttcttcattcatttattaatctattcattcacgtattcattcattggcttatgcatttatgtactcattgattgattgatcgattgcagacgaggtcgggctgtgttgcccagggggactcaatttcctgggctcaagcgatcttcctgcctcgacttcccaaagtggtgggattgcaggctcagccaccgcgcccggcccctgtcgtgattcttagttctgaaaagaattgattgggagacgagccatggaaggcctggagccacagagttcagttatgtgattaataataacacataataataacacatagcacccctctccattttgccaagcattaggtatgttcgtggatcccagatcgaagtccacgcataagccaa

SEQ ID NO: 335725 - DNA, 314 bp, Homo sapiens
tccgcccacctcggcctcccaaagtgctgggattataggcgtgagccactgtgcccagccccctctggctacttttaagattttcttgttatcactggtttgagcaatttgattgtcatggaccttggtgtagtttttctctgtgtttcttttgttgaggattcgttaagcttttttgatttgtggctttatagttttcatcaaattttgaaaaactttgtccattatttcttcaactatccaataaacccccctccccgctgacctttagggactctatttactcacttattaggctctttgaagttccacag

SEQ ID NO: 335726 - DNA, 626 bp, Homo sapiens
acaggagaatcgcttgaacccgggaggcagaggttgcagtgagccaaggttgcaccactgcactccagcctgggtgacagagagagactctttctcaaaaagaaaaagaaagacggggatgctgatgcccccagcacaggttgagccgaacagatgccccaggtgtttgaaaggacaggcgaaagtgcagcgagcgtgaacctggcccctcctcccctcacctgtcctacctcatttagcagcatcttcttatagcttctgtgggaaaagtcatggtaataaaaacataatgctttaatcaataacacccatgtctctgttttagctttttattctgggaatgctcagatatacacaaaagcagagtgtagagcatcccaagcccctgggtattcgtctcccagcaccacctggacaacatggcaaaaccctgtctctactaaaaatacaaaaattagttgggtgtggtggtacacatctgtaatcccagctactaggaggcggaggcaggagaatagcttgaacctgggaggcagaggttgcagggagctgagattgtgccactgcactccaatcttggtgacagagcgagactccgcgtcaaaaaaaaaaatcattctgtgtcc

SEQ ID NO: 335727 - DNA, 234 bp, Homo sapiens
taacgactaggtcctactggcttatgtattgaaaagtagatcaatgaactcattctggagctaaatgttgtctattactgtggattatccatgacataacccactcattatattccagtattggttaaaaggtaggagagaagtgatagtaaatttcatgggttcggcatatcttctgaccgacagaagacatggaaatgttttaaatgtttcttttccttttttttttttttt

SEQ ID NO: 335728 - DNA, 400 bp, Homo sapiens
gtggaaggatcatttgagcttgggaggtcgagaatgcagcgtgcaataattgtgacactgcacgccagcctgggagaaagaacaagactttatctcaaaaaaaaaaagaaaaagaaaaagtaacccacaaatggaaaatatttgcaaatcatatatctgataaaggactagtatccagaatacataaagaactcatagcactcaaaaataaaagagcaaataacccaatcttaaaataggcaaaagatttgaatagatgtttttccaaagaagatgtacaaatggccactaagcatatgaaaagatgctcaacattactagtcattagggcaacactaatcaaaaccaaaatgagataccacttcacacatgctagaatgctcagaattaaaaacatgaa

SEQ ID NO: 335729 - DNA, 184 bp, Homo sapiens
aaataaaaacacacctcaccaagctcagccaccaacttaaaaaggactggacaatacttttaccactttcccttctcagaattcaggcctgtcctcggaatgctacagggtacagcccatttgagctcctgtatggatactcctttttgttaggccccagtctcattccggacactagaccaac

SEQ ID NO: 335730 - DNA, 310 bp, Homo sapiens
gccactgcactccagcctgggcaacagagcgagactgtctcaaagaaaaaacaaacagccagtttttttttttttttttttttaaatcctggattttaagaactaagccagccaggttttcatcaggctgacttttcattaaaatactgttttttttttctttttgctaactataaaatcatattgtcatgtcgaatatactttttcaaattacgctcctgtgtgatattttcctgggccacatcacagattactgaaaagatacttcatgctacggaccacagaaaagtttgtcaggacataggtgtga

SEQ ID NO: 335731 - DNA, 572 bp, Homo sapiens
gctggtctcgaactcctgagctcaaggcatccacacaccttggcctcccaaagtgctggaattataggcacgagccaccgtgcccggccaagactaaatttttaaattcatgccaggatccttttcattaactactcacacaattgttctgtaatctacctaagcagcataaatatgtattgaaattctcctgaccatgacatttaacgtgcattcacattttccaatactggttttgcttgttcctctaacgacacattctgaaagtgggagttctttctttggtttatctaatacagatggctccacgggagaccagaggaaccacatggggccttgagccaacggacatagtatgtcactgcagctccttacattttatcattgtaaagatacccatatagtcttctgttgagaatgaaatattattattattattattattattattattatttgagacggagtctagctctatagcccgggctggggtgcagtttcgtgatctcggctcactgcaacctctgcctcctgggttcaagtgattctcccgcctcagccttctgagtagg

SEQ ID NO: 335732 - DNA, 241 bp, Homo sapiens
tcttggtcctcacctggagattcaatctgccttgttcagttgaagattcattagacttaggtcaccactgttgtggcccaccagtttgactagaaaaccgagggctttgacttctctgccctgctgtcttacacaagcaccaactgtgccactgtcaaaaggctgttcgagccaatgtgcacacactcagacactccacatgctaacataacagtaactgctgccgctgaatgccaactat

SEQ ID NO: 335733 - DNA, 259 bp, Homo sapiens
tgtcaaaatgtctattgtttcctgtccaggacctatttatatagacatatttatgctcatccattagcaattcatagttaaaccttggcacatcaagctacaaaaacaatcttataaatagatgatctgaagaacaaatcaatatgtattataggctagaatgtggttctgcctttgatttattggttctatttgtatcgtttccttcagtgtaatgtaatatgggggtagaagaccacagttagagagatcttatttc

SEQ ID NO: 335734 - DNA, 1220 bp, Homo sapiens
  misc_feature (1220)..(1220): n is a, c, g, or t
ctttgaggcccaagggggagcgagccggtgctgctgcaggctgaggctgcggcagaggcggcgaggcgcgggcggtgaggacggacagtcaccgacttagtccagttccctgtgatctcaaaacaattgttgcagcaggctcctggcagtctcaagcagttcatcttcttggtgtactggtttcctattgtgattttatcatggaaaatcaattggctaaatcaactgaagaacgaacatttcagtaccaggattctcttccatcactgcctgttccttcacttgaagaatcattaaaaaaataccttgaatcagtgaaaccatttgcaaatcaagaagaatataagaaaactgaagaaatagttcaaaaatttcaaagtgggattggagaaaaattgcaccagaaattgcttgaaagagcaaaaggaaaaagaaattgggtatttgttgttataattgaataatgatgatgtttaaagaatgataaataaaaagtgcatagtttttatttttaaattattgctgtaaaaatttttacagttattattgttattttcataatccaaaagaaggaatgaatcacttaactttgggagttttcagtgggtggattcgggaacttgttaaaatgcagatttgctgggataagtgattctgattcacatggctggaatgaggcccagagattcttattttaacaatcacttcatgtggtttggctgcaggtaatctgtagaccatgctgaaggaaaacattttgtccaggtgactagcttgaaaaatcagaaacactaaaatagacatgtcacataggtggcatagaaatattttcgtagtacaatggagaaagggaatcattaaaaatcagagtggagaatggttatgtatattgtatatttcagttagataaattgaggaagctagtataataattattgaaggtctcaataattttccacaaaattctttaacttcttcagctcaaccatttctgtacttctctactatgaatcagaggatgaggttgtataattcaaaagcattgccttagtctagaaataattattgtacctatcatttagttttagaaataaaaagcaagctgattttttttgatgaaccatttatatctgtgatggaataataaaatttcacacttccggattcctttgttctcaattttgagccttgagttgttttaattaaagaggggtaaaggn

SEQ ID NO: 335735 - DNA, 1163 bp, Homo sapiens
ctttgaggcccaagggggagcgagccggtgctgctgcaggctgaggctgcggcagaggcggcgaggcgcgggcggtgaggacggacagtcaccgacttagtccagttccctgtgatctcaaaacaattgttgcagcaggctcctggcagtctcaagcagttcatcttcttggtgtactggtttcctattgtgattttatcatggaaaatcaattggctaaatcaactgaagaacgaacatttcagtaccaggattctcttccatcactgcctgttccttcacttgaagaatcattaaaaaaataccttgaatcagtgaaaccatttgcaaatcaagaagaatataagaaaactgaagaaatagttcaaaaatttcaaagtgggattggagaaaaattgcaccagaaattgcttgaaagagcaaaaggaaaaagaaattgggtatttgttgttataattgaataatgatgatgtttaaagaatgataaataaaaagtgcatagtttttatttttaaattattgctgtaaaaatttttacagttattattgttattttcataatccaaaagaaggaatgaatcacttaactttgggagttttcagtgggtggattcgggaacttgttaaaatgcagatttgctgggataagtgattctgattcacatggctggaatgaggcccagagattcttattttaacaatcacttcatgtggtttggctgcaggtaatctgtagaccatgctgaaggaaaacattttgtccaggtgactagcttgaaaaatcagaaacactaaaatagacatgtcacataggtggcatagaaatattttcgtagtacaatggagaaagggaatcattaaaaatcagagtggagaatggttatgtatattgtatatttcagttagataaattgaggaagctagtataataattattgaaggtctcaataattttccacaaaattctttaacttcttcagctcaaccatttctgtacttctctactatgaatcagaggatgaggttgtataattcaaaagcattgccttagtctagaaataattattgtacctatcatttagttttagaaataaaaagcaagctgattttttttgatgaaccatttatatctgtgatggaataataaaatttcacacttccgg

SEQ ID NO: 335736 - DNA, 3270 bp, Homo sapiens
ctttgaggcccaagggggagcgagccggtgctgctgcaggctgaggctgcggcagaggcggcgaggcgcgggcggtgaggacggacagtcaccgacttagtccagttccctgtgatctcaaaacaattgttgcagcaggctcctggcagtctcaagcagttcatcttcttggtgtactggtttcctattgtgattttatcatggaaaatcaattggctaaatcaactgaagaacgaacatttcagtaccaggattctcttccatcactgcctgttccttcacttgaagaatcattaaaaaaataccttgaatcagtcaccagaacatgctaccagataaggggtcttgatccagatgctaagagagggttcttggatctcacgcgggaaggaattcaagtgaaaccatttgcaaatcaagaagaatataagaaaactgaagaaatagttcaaaaatttcaaagtgggattggagaaaaattgcaccagaaattgcttgaaagagcaaaaggaaaaagaaattggctggaagagtggtggctgaatgttgcctatctggatgttcgtataccatcacaattgaatgtcaactttgcgggtcctgcagctcattttgaacactactggcctccaaaggaagggactcaattagaaagaggaagtataactctttggcataacttgaactactggcagctattaagaaaagaaaaagtgcctgttcataaagttggaaatactcctctagatatgaatcaattccgaatgctattttctacctgcaaggttccaggaattactagagactccattatgaattattttaggactgagagtgaagggcgttccccaaaccacattgtagtgctgtgtcgaggccgagcttttgtctttgatgtaatacatgaaggatgtttggtcaccccgccagagcttctcagacaactgacatatatccacaagaagtgccatagtgaacctgatggacctgggattgcagcattaactagtgaggagcgaactcgatgggctaaggcacgagaatatctgattggtcttgatccagagaacttggctttgttagaaaaaattcagagtagtttactggtatattccatggaggatagcagtccacatgtaacaccagaggattattctgagattattgcagccatccttattggagatccaacagtacgctggggtgacaaatcctataacttgatttccttttctaatggagtatttggctgtaattgtgatcatgctccttttgatgcaatgattatggtgaacatcagttattatgtggatgagaaaatttttcagaatgaaggaagatggaagggttcagagaaggtacgagatataccacttccagaagagctcattttcattgtggatgagaaagttttaaatgacatcaaccaagctaaagcccagtatctcagggaggcatctgatctacagattgcggcttatgcctttacatcttttggcaaaaagctaaccaagaacaagatgcttcacccggatacgtttattcagcttgcacttcagctggcctattacagacttcatggacaccctggttgttgctatgaaacagctatgacaagacatttttatcatggccgtacagagactatgcgatcatgcacagttgaagcagtgaggtggtgccagtccatgcaggatccttctgtcaatcttcgtgagcggcagcaaaagatgttacaagcttttgcaaagcataataaaatgatgaaagattgttcagctggaaaaggatttgatcgtcaccttttaggtctcttactcatagcaaaagaggaaggtcttcctgttccagaactctttacggacccacttttttccaaaagcggaggaggtggaaattttgttctctcaacaagtctggttggctatttacgagtccagggagtggtagttcccatggtacacaatggttatggatttttctaccatatcagagatgacaggtttgttgtggcctgttcagcctggaaatcctgtcccgagactgatgcggaaaagctagttcagctgactttttgtgcttttcatgatatgatacagctgatgaactctactcatctttagagatgaatcatctattaagcacttaccaaaacatatcattaaactgagtgctgggagtgagttggtaatatgagatgggaaggaatgttgacttgctaacattcctttaacaagttaagaaaacttgttaaatgtagaaattagtagaatcatgctctctaaatttattctgccatagaaggtagaaatatttttaagctcctctgatgcagcagcaatgcaaattatgacatagtgaatatagaactatgcagtatttaagcctcaacaatccaaatctacaaactttaacaatgcaagtcttactctaatttttaagtatttttgttggtacttacatgggttataaatcctctctctggacatcaatgtagagtccatctttcaagcactttaatttttttagctgccaaagggtatgaattacattattgtatgctaatttccctgaaatcaatgccttctatgttcaccacagggatacaagcctgttatgtttgatgggaaagaccactacaatctaatggtgatctaaaataacttttttgggctgggtgcagtggctcatgcctataatcttagcactttgggaggccaaggtaggaggattgcttgaagctaggagtttgagaccagcctgggcaacagggtaaggtcctgtctctacaagatcaaaaacttagccgggtatggtggtgcatgtgtgcctgtagtccaagctacttgaaggctgagacaggaggatcggttgagcccaggaggttgtggctgcagtgagctgtgatgtgcccttatgctatagcctgggcaagagcgtgagaccctgtctcaaagaagaaaaaaagagaaaaataactcttttgaacaaacagacaaattagctagtagtatggagatgtataccctctattacacacataaaaccgtaacaaaattcattgtggtgtattataattagttttgtgaatagaaaaataaagcacttatgtttaaatttgttacagtgacttttaaaggattaatgttgaatcacattgtcagaattttttcctcctcgctgttcaattttgtagtttttactctcaaaaaatgaaattctcaaaattatatagctttttgttttgtttgaataaatgattcattcctg

SEQ ID NO: 335737 - DNA, 3001 bp, Homo sapiens
ctttgaggcccaagggggagcgagccggtgctgctgcaggctgaggctgcggcagaggcggcgaggcgcgggcggtgaggacggacagtcaccgacttagtccagttccctgtgatctcaaaacaattgttgcagcaggctcctggcagtctcaagcagttcatcttcttggtgtactggtttcctattgtgattttatcatggaaaatcaattggctaaatcaactgaagaacgaacatttcagtaccaggattctcttccatcactgcctgttccttcacttgaagaatcattaaaaaaataccttgaatcagtgaaaccatttgcaaatcaagaagaatataagaaaactgaagaaatagttcaaaaatttcaaagtgggattggagaaaaattgcaccagaaattgcttgaaagagcaaaaggaaaaagaaattggctggaagagtggtggctgaatgttgcctatctggatgttcgtataccatcacaattgaatgtcaactttgcgggtcctgcagctcattttgaacactactggcctccaaaggaagggactcaattagaaagaggaagtataactctttggcataacttgaactactggcagctattaagaaaagaaaaagtgcctgttcataaagttggaaatactcctctagatatgaatcaattccgaatgctattttctacctgcaaggttccaggaattactagagactccattatgaattattttaggactgagagtgaagggcgttccccaaaccacattgtagtgctgtgtcgaggccgagcttttgtctttgatgtaatacatgaaggatgtttggtcaccccgccagagcttctcagacaactgacatatatccacaagaagtgccatagtgaacctgatggacctgggattgcagcattaactagtgaggagcgaactcgatgggctaaggcacgagaatatctgattggtcttgatccagagaacttggctttgttagaaaaaattcagagtagtttactggtatattccatggaggatagcagtccacatgtaacaccagaggattattctgagattattgcagccatccttattggagatccaacagtacgctggggtgacaaatcctataacttgatttccttttctaatggagtatttggctgtaattgtgatcatgctccttttgatgcaatgattatggtgaacatcagttattatgtggatgagaaaatttttcagaatgaaggaagatggaagggttcagagaaggtacgagatataccacttccagaagagctcattttcattgtggatgagaaagttttaaatgacatcaaccaagctaaagcccagtatctcagggaggcatctgatctacagattgcggcttatgcctttacatcttttggcaaaaagctaaccaagaacaagatgcttcacccggatacgtttattcagcttgcacttcagctggcctattacagacttcatggacaccctggttgttgctatgaaacagctatgacaagacatttttatcatggccgtacagagactatgcgatcatgcacagttgaagcagtgaggtggtgccagtccatgcaggatccttctgtcaatcttcgtgagcggcagcaaaagatgttacaagcttttgcaaagcataataaaatgatgaaagattgttcagctggaaaaggatttgatcgtcaccttttaggtctcttactcatagcaaaagaggaaggtcttcctgttccagaactctttacggacccacttttttccaaaagcggaggaggtggaaattttgttctctcaacaagtctggttggctatttacgagtccagggagtggtagttcccatggtacacaatggttatggatttttctaccatatcagagatgacaggtttgttgtggcctgttcagcctggaaatcctgtcccgagactgatgcggaaaagctagttcagctgactttttgtgcttttcatgatatgatacagctgatgaactctactcatctttagagatgaatcatctattaagcacttaccaaaacatatcattaaactgagtgctgggagtgagttggtaatatgagatgggaaggaatgttgacttgctaacattcctttaacaagttaagaaaacttgttaaatgtagaaattagtagaatcatgctctctaaatttattctgccatagaaggtagaaatatttttaagctcctctgatgcagcagcaatgcaaattatgacatagtgaatatagaactatgcagtatttaagcctcaacaatccaaatctacaaactttaacaatgcaagtcttactctaatttttaagtatttttgttggtacttacatgggttataaatcctctctctggacatcaatgtagagtccatctttcaagcactttaatttttttagctgccaaagggtatgaattacattattgtatgctaatttccctgaaatcaatgccttctatgttcaccacagggatacaagcctgttatgtttgatgggaaagaccactacaatctaatggtgatctaaaataacttttttgggctgggtgcagtggctcatgcctataatcttagcactttgggaggccaaggtaggaggattgcttgaagctaggagtttgagaccagcctgggcaacagggtaaggtcctgtctctacaagatcaaaaacttagccgggtatggtggtgcatgtgtgcctgtagtccaagctacttgaaggctgagacaggaggatcggttgagcccaggaggttgtggctgcagtgagctgtgatgtgcccttatgctatagcctgggcaagagcgtgagaccctgtctcaaagaagaaaaaaagagaaaaataacttgccgcggtttacaactctgacttggaaacctggcgttccccaattaatcgccttgaagaaattcccttttgcaggtgcgtaatacaagaaggcccaccgatcgc

SEQ ID NO: 335738 - DNA, 1067 bp, Homo sapiens
ctttgaggcccaagggggagcgagccggtgctgctgcaggctgaggctgcggcagaggcggcgaggcgcgggcggtgaggacggacagtcaccgacttagtccagttccctgtgatctcaaaacaattgttgcagcaggctcctggcagtctcaagcagttcatcttcttggtgtactggtttcctattgtgattttatcatggaaaatcaattggctaaatcaactgaagaacgaacatttcagtaccaggattctcttccatcactgcctgttccttcacttgaagaatcattaaaaaaataccttgaatcagtgaaaccatttgcaaatcaagaagaatataagaaaactgaagaaatagttcaaaaatttcaaagtgggattggagaaaaattgcaccagaaattgcttgaaagagcaaaaggaaaaagaaattggctggaagagtggtggctgaatgttgcctatctggatgttcgtataccatcacaattgaatgtcaactttgcgggtcctgcagctcattttgaacactactggcctccaaaggaagggactcaattagaaagaggaagtataactctttggcataacttgaactactggcagctattaagaaaagaaaaagtgcctgttcataaagttggaaatactcctctagatatgaatcaattccgaatgctattttctacctgcaaggttccaggaattactagagactccattatgaattattttaggactgagagtgaagggcgttccccaaaccacattgtagtgctgtgtcgaggccgagcttttgtctttgatgtaatacatgaaggatgtttggtcaccccgccagagcttctcaggttttcagactactttcttgagtttcattaggtcttatggtgttgcttgaattaaaatatacatgtttagaattgcctttcaaggtgatagtaagctgaaaaataagaattttatgcatgcttttttaaaaaaaaactatttgtattttttatttaaattatttttaaattttactagacatatataaatatgttcccttggaaaaaaaaa

SEQ ID NO: 335739 - DNA, 796 bp, Homo sapiens
cactatatatacatgtgtatatgcatgcaaacacatatataaaataggagtttcacagagcactaattacttttattgtctgtgaggtacactgatatttccagtctattttattctccttttttgtaaggaatattgattatgatgcactgagttaatttcatgatccattaataggccaaagtatacagtttgaaaaacaggtttagtaggaaacgaattcttaaaatatttcctcctaactagactttaatgactaaacttttatcaagatcttttatcctattcaagttacaaaacccttatcctctcaattctatgttctgtaaacattcatgaatattgtaccagcattttcttttctggtaggattttcttaacttgagattttgagaagcccctaaagtcagggccagaattactctctcttgactttgcatatcacatatcagtgttgctgatcataactatattatgattttattaaatttggttgacgtgaagaggaatggtgagatgatatatgtgtttaagatgtaaattcttacaaaccaatattaaacccttttaatttggaaaaattaaatttattttagattattgcagccatccttattggagatccaacagtacgctggggtgacaaatcctataacttgatttccttttctaatggagtatttggctgtaattgtgatgtaagtaaactactgaaatttttctcttttgatcttttaggttaaattaatgacaataaaccataaatacttgtgctggggaacagtgtaagtgaata

SEQ ID NO: 335740 - DNA, 3186 bp, Homo sapiens
ctttgaggcccaagggggagcgagccggtgctgctgcaggctgaggctgcggcagaggcggcgaggcgcgggcggtgaggacggacagtcaccgacttagtccagttccctgtgatctcaaaacaattgttgcagcaggctcctggcagtctcaagcagttcatcttcttggtgtactggtttcctattgtgattttatcatggaaaatcaattggctaaatcaactgaagaacgaacatttcagtaccaggattctcttccatcactgcctgttccttcacttgaagaatcattaaaaaaataccttgaatcagtgaaaccatttgcaaatcaagaagaatataagaaaactgaagaaatagttcaaaaatttcaaagtgggattggagaaaaattgcaccagaaattgcttgaaagagcaaaaggaaaaagaaattggctggaagagtggtggctgaatgttgcctatctggatgttcgtataccatcacaattgaatgtcaactttgcgggtcctgcagctcattttgaacactactggcctccaaaggaagggactcaattagaaagaggaagtataactctttggcataacttgaactactggcagctattaagaaaagaaaaagtgcctgttcataaagttggaaatactcctctagatatgaatcaattccgaatgctattttctacctgcaaggttccaggaattactagagactccattatgaattattttaggactgagagtgaagggcgttccccaaaccacattgtagtgctgtgtcgaggccgagcttttgtctttgatgtaatacatgaaggatgtttggtcaccccgccagagcttctcagacaactgacatatatccacaagaagtgccatagtgaacctgatggacctgggattgcagcattaactagtgaggagcgaactcgatgggctaaggcacgagaatatctgattggtcttgatccagagaacttggctttgttagaaaaaattcagagtagtttactggtatattccatggaggatagcagtccacatgtaacaccagaggattattctgagattattgcagccatccttattggagatccaacagtacgctggggtgacaaatcctataacttgatttccttttctaatggagtatttggctgtaattgtgatcatgctccttttgatgcaatgattatggtgaacatcagttattatgtggatgagaaaatttttcagaatgaaggaagatggaagggttcagagaaggtacgagatataccacttccagaagagctcattttcattgtggatgagaaagttttaaatgacatcaaccaagctaaagcccagtatctcagggaggcatctgatctacagattgcggcttatgcctttacatcttttggcaaaaagctaaccaagaacaagatgcttcacccggatacgtttattcagcttgcacttcagctggcctattacagacttcatggacaccctggttgttgctatgaaacagctatgacaagacatttttatcatggccgtacagagactatgcgatcatgcacagttgaagcagtgaggtggtgccagtccatgcaggatccttctgtcaatcttcgtgagcggcagcaaaagatgttacaagcttttgcaaagcataataaaatgatgaaagattgttcagctggaaaaggatttgatcgtcaccttttaggtctcttactcatagcaaaagaggaaggtcttcctgttccagaactctttacggacccacttttttccaaaagcggaggaggtggaaattttgttctctcaacaagtctggttggctatttacgagtccagggagtggtagttcccatggtacacaatggttatggatttttctaccatatcagagatgacaggtttgttgtggcctgttcagcctggaaatcctgtcccgagactgatgcggaaaagctagttcagctgactttttgtgcttttcatgatatgatacagctgatgaactctactcatctttagagatgaatcatctattaagcacttaccaaaacatatcattaaactgagtgctgggagtgagttggtaatatgagatgggaaggaatgttgacttgctaacattcctttaacaagttaagaaaacttgttaaatgtagaaattagtagaatcatgctctctaaatttattctgccatagaaggtagaaatatttttaagctcctctgatgcagcagcaatgcaaattatgacatagtgaatatagaactatgcagtatttaagcctcaacaatccaaatctacaaactttaacaatgcaagtcttactctaatttttaagtatttttgttggtacttacatgggttataaatcctctctctggacatcaatgtagagtccatctttcaagcactttaatttttttagctgccaaagggtatgaattacattattgtatgctaatttccctgaaatcaatgccttctatgttcaccacagggatacaagcctgttatgtttgatgggaaagaccactacaatctaatggtgatctaaaataacttttttgggctgggtgcagtggctcatgcctataatcttagcactttgggaggccaaggtaggaggattgcttgaagctaggagtttgagaccagcctgggcaacagggtaaggtcctgtctctacaagatcaaaaacttagccgggtatggtggtgcatgtgtgcctgtagtccaagctacttgaaggctgagacaggaggatcggttgagcccaggaggttgtggctgcagtgagctgtgatgtgcccttatgctatagcctgggcaagagcgtgagaccctgtctcaaagaagaaaaaaagagaaaaataactcttttgaacaaacagacaaattagctagtagtatggagatgtataccctctattacacacataaaaccgtaacaaaattcattgtggtgtattataattagttttgtgaatagaaaaataaagcacttatgtttaaatttgttacagtgacttttaaaggattaatgttgaatcacattgtcagaattttttcctcctcgctgttcaattttgtagtttttactctcaaaaaatgaaattctcaaaattatatagctttttgttttgtttgaataaatgattcattcctg

SEQ ID NO: 335741 - DNA, 1426 bp, Homo sapiens
ctttgaggcccaagggggagcgagccggtgctgctgcaggctgaggctgcggcagaggcggcgaggcgcgggcggtgaggacggacagtcaccgacttagtccagttccctgtgatctcaaaacaattgttgcagcaggctcctggcagtctcaagcagttcatcttcttggtgtactggtttcctattgtgattttatcatggaaaatcaattggctaaatcaactgaagaacgaacatttcagtaccaggattctcttccatcactgcctgttccttcacttgaagaatcattaaaaaaataccttgaatcagtgaaaccatttgcaaatcaagaagaatataagaaaactgaagaaatagttcaaaaatttcaaagtgggattggagaaaaattgcaccagaaattgcttgaaagagcaaaaggaaaaagaaattggctggaagagtggtggctgaatgttgcctatctggatgttcgtataccatcacaattgaatgtcaactttgcgggtcctgcagctcattttgaacactactggcctccaaaggaagggactcaattagaaagaggaagtataactctttggcataacttgaactactggcagctattaagaaaagaaaaagtgcctgttcataaagttggaaatactcctctagatatgaatcaattccgaatgctattttctacctgcaaggttccaggaattactagagactccattatgaattattttaggactgagagtgaagggcgttccccaaaccacattgtagtgctgtgtcgaggccgagcttttgtctttgatgtaatacatgaaggatgtttggtcaccccgccagagcttctcagacaactgacatatatccacaagaagtgccatagtgaacctgatggacctgggattgcagcattaactagtgaggagcgaactcgatgggctaaggcacgagaatatctgattggtcttgatccagagaacttggctttgttagaaaaaattcagagtagtttactggtatattccatggaggatagcagtccacatgtaacaccagaggattattctgagattattgcagccatccttattggagatccaacagtacgctggggtgacaaatcctataacttgatttccttttctaatggagtatttggctgtaattgtgatcatgctccttttgatgcaatgattatggtgaacatcagttattatgtggatgagaaaatttttcagaatgaaggaagatggaagggttcagagaaggtacgagatataccacttccagaagagctcattttcattgtggatgagaaagttttaaatgacatcaaccaagctaaagcccagtatctcagggaggtatatttttcacttttctcttaaataataatgattttttcttttaacaaccatat

SEQ ID NO: 335742 - DNA, 608 bp, Homo sapiens
tgggaggctgtgtaaataagaactttggtccctgggccccggctgtttatccattggcaactgatttccctctctggccacttcctcctgcacagagtttggcctgcctgcgtttccaaagctttgtttatactcttatttgggatatggagcctccatgggaaggaatgggtgttttggacgtgagaaaaaaaaaaatatttttcttcaggcaccaaaccaacatgtagctcaaatgaccagcccttttattcctagtcaataagctatgtgattagagatggaaagggggcaaatggaagagcagatactcatgtgagctaatctgtgagggtagggaagacttttccatgggttttctctctttctgctataaacgcttttctcattctcacactagctttagactaaagggaagcaatactgggtgagaggtggaagcagacgtaggcagagaaggcagtcaaatgctcattgcaaagagatgggaagattaaacactaacctcaggatagtgcttataccttggcagtgctggtaatggggtggggggctgggggagtgggagagaaagggtatgtgatcaaggaaagatgcccaagggggca

SEQ ID NO: 335743 - DNA, 514 bp, Homo sapiens
taggcaactatgtaggaatagttttcatggtactctgtctcataaatatgccccatttacaagaatcactgctctcagggaagcccccagatgtcacttcttatcagatgtcttaaaattttccagtcccaatagcaagctgccttgtgttataattgacatattgtcttaccagattaccagggttacagaattgagagagttaacagaagatcaaattctcatgtaaaagggaaaagctttgctcactgtttatccacacctgtacgttttattgtttttatttgtggtattcctgactgtgataggctaaataatggcccccaaagatatatccacgttctaacccctaaacctgggaatgttgcctttatatagaaaaagccttagcaggtgtgattaaattaagaattgtgagatggaggattatcctggattatctggtggcccctaaatacagtcacatgtatccttataagacagggatttgatgacacagacaaaagggaagact

SEQ ID NO: 335744 - DNA, 275 bp, Homo sapiens
gatgtggggatgtgtgtatgtgtgtatgatccagccacagagtgtcctctgactatgttgtggtaatgatgtggggatgtgtgtatgtgtgcatgatccagccacagagtgtgctctgactatactgtggtaacgatgtggggatgtctgtatgtgtgtatgatccagccacagagtgtgctctatgttgtggtaacgatgtggggatgtgtgtatgtgtgtgtgtgtgtgtgtgtgtgtgttctgtgacctcctgtccccgtggtcccacctct

SEQ ID NO: 335745 - DNA, 651 bp, Homo sapiens
gaaggatgaagcctgtagaaccctttggggtaggtgccagccacagctgaggccagggcactcagctcagcatcttaaggcctttggtggacctggctagggctggccactaggtcccagaagggacctctgatgcaggcccccccgcccccgccgaccacagagacctcctagacttggacatgggtccctcccgtatgatgggacacaagtggaggtggagcagggggccgtgggagcacagagggccccagtccagccctggggttgggaagcagttgctgagatgggtcttgcgggatgagcaggcatcaggggctgcagaagccagcattctaggcagagggacctggaggatgcagggccagcaagataactggcctcgtgttcacgaactattggctgaggtgtggtgtccagcatgtggactgggtagcaaagatgaggctggaggagttggaagtcaaactgagaaatgtcttgggaggcatgctggcagtaagtccagcgcaaaagtgacagggcaccatgtaaggttgtaaggagagagtgacttgcgtgtttgctttgtagaaaggtcactctggttgcatatggagcatggatggagaggggagattagagacagcgtggcccgtttggaagagagga

SEQ ID NO: 335746 - DNA, 515 bp, Homo sapiens
agtggcaaggaggcagagaaagcatctgtacccttacaatttggtgagacaagaatgtatgaattcccacaggtcaaattataatgaagaaaggaacctctcttgagtacaaagagctacctatggtggtctggagccggaggaccacagcatcaaaggatataagatgcatagccaactgaggaacctgagcaattaaagagatccacagttaagtcacacttaactggcacttgtggaagccccgcaaggcctgaaggagagctgacataggcaccccagagagccagaatctggatcccatcttaataaggccatgaacaccagtggagaagaggcagaaacaccaatggataaggaacattcacatctttcttcccatgtgcctctaagtgccagtgcaggccccacaggccaagctacagggagaaaggagatgacgcaaaggaacctaactggactttaatcactagaagtgagaagagaaatctattggaacctcccaagataatgcc

SEQ ID NO: 335747 - DNA, 732 bp, Homo sapiens
aagaggcagaggatgttgacacaaacttacagactgggactccaaggatcagccagatgaaatgctatgtgcagagtcttcatttcccagctcagtggtggacagcagaggactctaagaatcacctcataaatgaactaccttgacatgccctgacccaggctctttatttggaaacccaggctaggacaggaatgaagagaagccagaccttctgactcgaagatccagccacctcttgggatgcacacgtttctcttcaactgcgtgatgtgaactgcgtcacatggtcaaattataatgaagaaaggaacctctcttgagtacaaagagctacctatggtggtctggagccggaggaccacagcatcaaaggatataagatgcatagccaactgaggaacctgagcaattaaagagatccacagttaagtcacacttaactggcacttgtggaagccccgcaaggcctgaaggagagctgacataggcaccccagagagccagaatctggatcccatcttaataaggccatgaacaccagtggagaagaggcagaaacaccaatggataaggaacattcacatctttcttcccatgtgcctctaagtgccagtgcaggccccacaggccaagctacagggagaaaggagatgacgcaaaggaacctaactggactttaatcactagaagtgagaagagaaatctattggaacctcccaagataatgcc

SEQ ID NO: 335748 - DNA, 194 bp, Homo sapiens
aacaacaagaaaaaagtcctttctccagaacaggtagtgtggtgttactcagttatttagttattttagtttctttctttctttctttctttctttctttctttctttctttctttctttctttctctttctttctttttctttttctttccttcctcctttccttttctttctttctttctttctctttcttt

SEQ ID NO: 335749 - DNA, 99 bp, Homo sapiens
cattaggctaaacgctacaaaaaccaacttatggaagaacaaccagaagagtatagtgtttcttagaagattgggagtagttagcagtgttaggtgctg

SEQ ID NO: 335750 - DNA, 154 bp, Homo sapiens
atccctataatttcaataatcctagataccaccaaggcacaggggaaagggccatttcctcattcccatcaaacttttcttgatcaggacaagagctaaaaacccgggctaaatggagatacactgttccaaagtccctatctttgttaacgaa

SEQ ID NO: 335751 - DNA, 389 bp, Homo sapiens
tcctatcttaactagggttgcaacagaaacaatttaatttttactacttgcttatgttcccagcataacacttaagctaatatttaaaaacaactgcttacatattttaaaattatgagtttttaaaactcaggaaatattagtaactcattaacttacatgagtttgaaagacataatttgacaaatcaaatcatctgcagctgatagacttaatcccttagcactctcattttctcattttctatttctctcttaatattgttgccttctagtataaagacagacaaaccgatggaaacatgtatcaatatcaatctctccctgaactaactataagcagacatggtaagcttatctgagattaaactgtgtattccctctaaaaag

SEQ ID NO: 335752 - DNA, 330 bp, Homo sapiens
tgtacttctacaataagagcttcttgcacaggcaggaccaggtcaaaggaagaggacactgatgagggcctggaggctcttacgttgcagattagattaggaaaggccttgaatgccaaactgaggcctacagacttcattacgcaaggtaaacagttgagagaagcaggatgatccaagttgtgctgtagttaagtgtgctccagggcaaactggagtctggatgggagaatggaggtggagatgtaactgccataactaggcatgtagggctaagaaactgttctgggatggcagcctttgggactagaaagaagggatgcacaagga

SEQ ID NO: 335753 - DNA, 142 bp, Homo sapiens
ctggcagcttctatgtacctgcagaacccaaattggcatttgtcatcagggtcagaggtatcaatggcgtgagcccaaaggtccaaaaggtgttgcagcttcttcgccttcatcaaatcttcaatggaacccttgtgaagat

SEQ ID NO: 335754 - DNA, 181 bp, Homo sapiens
aggatacagtatgcccttttgtatttccaagagtgcattttttaaaaactgcccttcctttcctccattgttacacagagaatgtaactaatactttcttctgagaaacagccttctcctgaagtgatagccacacctcaccgccacccaacaccaccaccgagtatactgcccctcttcc

SEQ ID NO: 335755 - DNA, 625 bp, Homo sapiens
acacaggcacagctgctggggccatctcagcacagacctgggcaatcacatcctcatccctgggagaccccaggcctcctctgctcccacacttcaggactatctattcactgcaaaggacaccccactcaatcctcagtacttctcacacaccatgctctttctagcctcctggcctttgcaccacctgtgctgatctgacacgcttcaccttctctctaaagctgtcaccaagctaaggcctgcctggcctcagatcctgactgtcccctgagtatccacaggtagggtggtttaggtattcctgcctggctctgggcttcttgtcacatgctcacccgcctttgctttcttactggtccacagcctgtcccccatgacgttagccccattaggacaggaacttttcccattaggacaggaaccctaactctgagcctaacctctgtgaggattcatgaatgcaagaaaaattcgcttcaacaaattctaagagagtttccaaatctgttactgggaggagctttgctacaaaggtgttctgtgatttgcacacaaatattcatagcagcattattcttgatagctaagaggtggaagcaacccagatgtccatcaatggatg

SEQ ID NO: 335756 - DNA, 457 bp, Homo sapiens
cccagcaggtctctgggtgatgcctggtgtaagtcatctagtcagtgcagggagatgtgggtatgcaaggagaaggcagggctatgtggtccaaataggactgactgtgaatgggcaattccacctagaaggggaattaaaagtaataatgttgctgccgagcctgtctggtaccacacactgtattggacatacagctctgttaagttcctactcttaaaagagaagtaactaactgaatgccttacctagaatgggtttaatagataaggttggcaaatggcatgtatggggaggagagaagagtggaatctgcaaaggaaggaacctatacagcctttttactattagccttggcgctgaagcatgagctgtgtcccctgtatctagttctaatagaacagtattgagaagcttcagacattcaacttttcagtggcatttagggaaagctaaa

SEQ ID NO: 335757 - DNA, 509 bp, Homo sapiens
acagctaggaagtagctgaataagaacccaggttagacctttcacttcaaaatccatagaaagtgtaaaagcaacgtgaaggaagcaatcaacactgcagccaatttctgctgtttagtgctcaacacctctctcccttcttttgtgtatctggtggcactgtggagccctaatacctggagccactcctggcacagggatgggcaagtgagttaggcctgtccacccaagtactctacccttttggctgctccaaatgccgtcatgtagcccaaatgggattacacaaccctcccctatgatatattcataaccaactgactggaagaacaaaattaaaaaaacaaaatgtgagtaatgtattgaaaaatctctccattaaaaaaagtgaaaacaaatatacaggttataaaatatttttaaactatttttaataatatccaggtctatttttatccttttaaaattctaggccgggcacagtggctcacacctgtaatctcagcact

SEQ ID NO: 335758 - DNA, 438 bp, Homo sapiens
aggcgcccaccaccactcctggctaatttttgtatttttagtagagatggggtttcaccatgttgatcaggctggtctcaaactcctgacctcatgatctgcctgcctcggcctcttaaaatgctgggattacaggcgtgagccactgcacctggcctcaagcagtaatctttaagcatgtttagccctctgtgagtaatttctctttattaggtcagcaagtgaattcatattagaatgtggtttaagaatacaaatttccagttttagtaaatgtgctgctgaagcgagcacaagaatacaaattccataaagatcattataagacaaagtgggaggaacattttcaaaaaggttttaagtctttttttttttttaaataaaattcagggttgcctttcagttgataattgatggaggcgatcagaactcacttcc

SEQ ID NO: 335759 - DNA, 638 bp, Homo sapiens
  misc_feature (638)..(638): n is a, c, g, or t
caggatgttctgctctgattggcagggagagtttgaaggtgggttggcagagactgtgaccgcaactgactgcgttctgcagaattatggtaatgaaattggaagccaactttcgtgaagcagaaagcctcaagtttccaggtgctgtgctcagtccaggaatacaatgatgaatacgatcaaggcccttatttcagagctgacacacactatacataatgcatcaaaaattgcgttctcgctatatttctgtttatttggttttatctgcaagaatatagatagcatctgctttgatataaaacttttatgtgtcttatgtagttgatttgtaaatgtcctatctataaatataaaacaataaattactagttacagttaacttaggaaaacttttaatcatgtcctacattttacaccttgtaatttctaccaaatgtttgtatttttatgtcttattaaatataataaatatttgtcttaacatattttaatagaattcctcatatgttttgcagaaagctaattatggttttccatgtgatttttctttcatatatacagtattatttaaaataaatttgtataaaataaaaatctggcctcgttggcctcagcggtggagctctcggccggan

SEQ ID NO: 335760 - DNA, 487 bp, Homo sapiens
caggatgttctgctctgattggcagggagagtttgaaggtgggttggcagagactgtgaccgcaactgactgcgttctgcagaattatggtaatgaaattggaagccaactttcgtgaagcagaaagcctcaagtttccaggtgctgtgctcagtccaggaatacaatgatgaatacgatcaaggcccttatttcagagctgacacacactatacataatgcatcaaaaattgcgttctcgctatatttctgtttatttggttttatctgcaagaatatagatagcatctgctttgatataaaacttttatgtgtcttatgtagttgatttgtaaatgtcctatctataaatataaaacaataaattactagttacagttaacttaggaaaacttttaatcatgtcctacattttacaccttgtaatttctaccaaatgtttgtatttttatgtcttattaaatataataaatatttgtcttaacat

SEQ ID NO: 335761 - DNA, 880 bp, Homo sapiens
  misc_feature (880)..(880): n is a, c, g, or t
gtgaatcaggaccagtgcaataaatcaccctcaatacttcctgtgaatggcaactgctgaagggaagcttctgcctctcatcatacactgcctcaggggggaacaaaatagatcattacaatggaggccaaagagtgcttgaatgtctctgccgaaggctttcaataaatatttgttgaaaaagaaaggaagaaagaaaatgaagaaggaacgaaggaggaaaggaaagaaggaaagaaggaaggaaggagttaatgaagactcaagggagagtttgaaggtgggttggcagagactgtgaccgcaactgactgcgttctgcagaattatggtaatgaaattggaagccaactttcgtgaagcagaaagcctcaagtttccaggtgctgtgctcagtccaggaatacaatgatgaatacgatcaaggcccttatttcagagctgacacacactatacataatgcatcaaaaattgcgttctcgctatatttctgtttatttggttttatctgcaagaatatagatagcatctgctttgatataaaacttttatgtgtcttatgtagttgatttgtaaatgtcctatctataaatataaaacaataaattactagttacagttaacttaggaaaacttttaatcatgtcctacattttacaccttgtaatttctaccaaatgtttgtatttttatgtcttattaaatataataaatatttgtcttaacatattttaatagaattcctcatatgttttgcagaaagctaattatggttttccatgtgatttttctttcatatatacagtattatttaaaataaatttgtataaaataaaaatctggcctcgttggcctcagcggtggagctctcggccggan

SEQ ID NO: 335762 - DNA, 337 bp, Homo sapiens
cctagcttgcctggtggcacccacaaccggccctcagtgtccacttctgagtttagcctgggcaagagactggtccataaacgacttcctgcccagtggtaaacagtggaaggcaggctcctgtgtttctcgtggttggtggtaatcgctgcttttgcaaagtggcttttggggaggagaggttttaggaagtgtgttaaatgaggggggaagtgttacttgggggtttcccagcactcaacacgcacactgcaggggctgccctcccccgcagcacactgggagagcctgtcctccagcgctgcccacgcccggccgtgggtctcattccccactg

SEQ ID NO: 335763 - DNA, 99 bp, Homo sapiens
ctgggaaaggccaactcctgaggatggagctactttagaaaacatggttagaaaattctctctgggcgtggtggctcacatccataattccagcacttt

SEQ ID NO: 335764 - DNA, 215 bp, Homo sapiens
gtaaattgcccagtttggagtatgtctttatcagcagtgtgaaaacagactaatacacttcctataacacaattctgcaaggatagtctaccaatacacagaccttcaattcaacatgcacaaagcaccatcttcctgaccccaactcccaatcactcaggttcacaacttcaacctgacttaagactctctttttttttttttttttttttttt

SEQ ID NO: 335765 - DNA, 624 bp, Homo sapiens
taaacacctacattcagaaaaaaagaaagatctctaatgaacaacctaactttacacctaagcccaaagttagcagaaggaagaaaataaagattagaacagaaataaatgaaatagatactagaagaacaaaagaaaatatcaacaaaactgagataataaaaacagagaaaagactcacataaataaaattatagataagggagatataacaactgatatcacagaaatacaaaggatcataagagactactatgaaaattatattccaacaagttggataacctaaaagaaatgaagaaattcctagaaacatacagctgactatcttagtttgttttctgttgtttataatagaatatctgaaactgggtaatttagaaagaataggaatttattttctaccattatggaggctgagaagtccaggatcaagggggtgcatctgatgaaagtctccatggtggggactctgcagaattctgaagcagtacagcgcatcacatgaccagggtgctgagcatgctaggtccaatctctcttcttcttataaagccaccagtcccactcccatgataacccattaatccattaacccattagtagattaatccattcacaaag

SEQ ID NO: 335766 - DNA, 335 bp, Homo sapiens
aaaatcattattgtgccctctttgctacattatgttttctgctttgagtagagctcttactgatgctttcaggtcttctcctcacctgtttttttcaccttcttcctcattgtccatgggtgctgccgaaatttactaatgtataaatgctccatctccacctccttacactgaaaagacaactttacctattctacagagaaaatataggctagtgtgccacccccctccaattttaactatttttctacgcttttttttttttctttgagacagagttgtccaggctggagtgaggtggcaccatctcggctcactgcaacctcagcctccca

SEQ ID NO: 335767 - DNA, 335 bp, Homo sapiens
ttatctttttccttcaaagctcgggggttagacacttcatagacaaggaacccaactgcatatccataaaatagaagaatttgcgtacaccttcctgccttaaatcctggtgctcatttctcttccttactaataaatgtcctttgtgacattttttccaaaacaggtcactttcatcagcattaaaagcttgttcagggctgctctgcctatggtgtagccattcttttattcttttgctttcttaataaacttgcttttacaaaaaaacacccactcaggaagatatatttaatactttctcctcaatgattttctgaatggtgtttgggaac

SEQ ID NO: 335768 - DNA, 143 bp, Homo sapiens
caaaaattatagtagtttggagatatttcacaatataaggtcaataatcctacaagccatgagagttcatcctacaaatgccattttagtataatgaggcatcataaggatactgaatcattcataaaaggcaaattacattg

SEQ ID NO: 335769 - DNA, 284 bp, Homo sapiens
gtccttcaacctcatgtacttctcgagtcactgtgtcacccaagttcaaatcttctggtgtcctaatgctgcctgtgaaagtaagaactccttagtagactacacaatgccctccacaggagcacggacagtgagctcttgggaccacacaaggccatgacctgacccctagctgtctttccagttttaccttcctctgctcccagctcctttgggacttaacatatgctctcctgcagtatatataatacaccagaaattatgtgcattttagaattagataa

SEQ ID NO: 335770 - DNA, 482 bp, Homo sapiens
cccatggtgccaaacccatatactctcctatcctcaataccttcctccacaactcactattccattcttgatgttaaagatgcttttttcactattccccttcaccccttatcccagcctctctttgcttttacctggactgacgctgacacccatcagtcccagcagctgtactgccacaaggcttcagggacaggcctctttacttcagccaagctctttctcatgatttactttatttccacccctttgcttctcatcttattcaatatactgatgaccttctactttgtagcccctcctttgagtcttctcaataagatatcctcctgctccttcaacatttactctccaaaggatatcaagtatccccctccaaagctcaaatttcttctccatcggttacctgctttggcataagtcttcatgaaaacacgtatgctctccctgacaatcgcgtccagctgatctctcaaacccca

SEQ ID NO: 335771 - DNA, 515 bp, Homo sapiens
agctctctggaagtctgtggcgtcaggtctcatcttggcgacaggatctgtcccgctgctgattctggggatgtgtttagaagtggtcatgaggatagagatggggaccatgagaataagccaagcaaggccatcaccaccatcactgccaagctacacgaattactgacaaacttcaagtctgacacccactgtgctcacgaagactctatcttataggggataaagccgcccctatatccacagccaatgcacagtgactcaggcacaccacctagtaaaatactgaaatacctccagtgagtctagatccacagccccacctccacaggtccagctccaccactaatctctggggtctctccctagatctgccacccaccccgcagaatgactgactgcccaggatccatccagccaatgattgactcttctttttttttttaagacatagtctcgctgtgtcacccaggctggagtgcagtcacgcaatctcagctcactgcaacccccac

SEQ ID NO: 335772 - DNA, 559 bp, Homo sapiens
agcactaggttcccgcgagataaagcttgctgaccacaagacacccttgttcctaggaggggagttcagggccattgcaaagcacaggaggcatttgtccaagtggactcagccccatgtgcctttcaccctgaggcccagggactggggacaggaccccaggcaggtagtgccctgatctcctgctcagagataatgctactctgggtgtgtgggacagagtgtgggaaaaatggagagtctgacaacatgtatgcttggcacttcccttctgtttctttgtcctccttcacgttttctgaatgttgaccaagtgcctactcagacccagggaaaatgaaaggcatttaggggagagacgagaggcacagccctgactattgaagggttccggcctcaggagggagcagatagagcagtggcccatcacaggtcatggccatatgtgctgggtgagaggcatgagaaaaaaacctctgaccccatattacttccttcctgttcccctaatctgtcctcgctgatcttcagtgtcccaagagaggattggcgacttgct

SEQ ID NO: 335773 - DNA, 562 bp, Homo sapiens
aaacttttgaatcatccttgctacctccctctccatcaaccatatccaaataatcaccaccttcttgctgattttaactacaaacccaatctcactcaatctcaatcctcacctgtcattaagcgttatccagtgctgctacgccatcactggttgactgcaaaagcactgtttgttcacatccaccctcctcctccccagggtggccacatgattgcacaggctgtgcctgcgtaacaagtctggctcagggggctgaagccttttgacctggcctagctgggacacagtggtgcattttttctaattggtccacacagaatagaagcctttcttgggtttgcacaaagacaccaaacgtgccagcaggacctacctctctaaactattctctacacagcaacagcgatcattttacaaactcaaattaggccaggtgcggtggctcacacctgtaatcctaggactttgggaggccgaggtgagaggatcacttgaggtcaggagttcaagaccagcctggccaatatgctgaaaccccgtctctactaaaaatacaaaa

SEQ ID NO: 335774 - DNA, 156 bp, Homo sapiens
gatggaatgtaggttttatcccctaaggaatttgatctattgctattgccttcctggagcatcctgttgagaagatgcaggataaagattgctgagactgataagtgatttctgcctttagcaagggacctggggcacttttagcagttatttgcc

SEQ ID NO: 335775 - DNA, 304 bp, Homo sapiens
tggcgcgaggacttctgagtggggaacaattccagagctgaggaaggtgccaggctgggcgtgcaaggacaggaggagccccaaacaggcctcggagtaaggagctagggtggcaggtctcagcctccaggctgagtggggacagcagcagagtcatcttgaggctggtgcagtgagacagggtcctaaggccagagcaccaggacgatgccctgggagcggggagtccgcctcgcacccttctcagaagaaatgctatcaagcaacagctccctccactccacatcacagaaagacccctgcc

SEQ ID NO: 335776 - DNA, 875 bp, Homo sapiens
gacatgtctctctcctgtgctaaacaaaagtgtgaagcatttgcaagctgtgacaaaggtgtctttagttgcacttgcttgaccctaacctagattatttccagaaatacttttaaggaattctgtagagaggacatctattagtggaaagattttgggggctggtacacatcccctgtttgtgttttattgtcttcagtgtgggccgttggtccttatagttagcagagtggaaactgcagcaggctgcaagcaggctgacacagttagttgttcattaacttacctttgaggagaagccagaggctgacagctcagggaatccactcaggtgctataggggcaaggaagaaggaatatttaatgtatctacttaatagtgaaaggcatgcattttatgtattattgaaataactgctaaggtcctattttgaatttgaagactaagagggagggatgttctttatttcttatagatggaatcaaatttttataaacatgaaaggagtatagcgattgtaacaagacttcttgccatggttatttggagctattaagattaactgccttttaaagagtgggtatttttctgattttcaatattagtttgtggctacattcctttttctactgcaagaatgtttgctctcctttatgaaaagttcaagttggtggagaaactaaatgttttgtacataagtatataactttcttcattcaggaagtagttactgagcgcctactgttttggcttttgtaccaggagtctataaattaatcgttttccacctggcaagtagtctcattggcaaaattttggcttctttatctgtttaaactagatcaaaataaagacagttaaaaggtgatgcact

SEQ ID NO: 335777 - DNA, 914 bp, Homo sapiens
gacatgtctctctcctgtgctaaacaaaagtgtgaagcatttgcaagctgtgacaaaggtgtctttagttgcacttgcttgaccctaacctagattatttccagaaatacttttaaggaattctgtagagaggacatctattagtggaaagattttgggggctggtacacatcccctgtttgtgttttattgtcttcagtgtgggccgttggtccttatagttagcagagtggaaactgcagcaggctgcaagcaggctgacacagttagttgttcattaacttacctttgaggagaagccagaggctgacagctcagggaatccactcaggtgctataggggcaaggaagaaggaatatttaatgtatctacttaatagtgaaaggcatgcattttatgtattattgaaataactgctaaggtcctattttgaatttgaagactaagagggagggatgttctttatttcttatagatggaatcaaatttttataaacatgaaaggagtatagcgattgtaacaagacttcttgccatggttatttggagctattaagattaactgccttttaaagagtgggtatttttctgattttcaatattagtttgtggctacattcctttttctactgcaagaatgtttgctctcctttatgaaaagttcaagttggtggagaaactaaatgttttgtacataagtatataactttcttcattcaggaagtagttactgagcgcctactgttttggcttttgtaccaggagtctataactttcttcattcaggaagtagttactgagcgcctactgttttggcttttgtaccaggagtctataaattaatcgtttgccaatgagactacttgccaggtggaaaacggtcgacgcggccgcgaatttagtagtagtagta

SEQ ID NO: 335778 - DNA, 208 bp, Homo sapiens
gatgacagatcatgagataatacatgtgcagcatttcagatcagtagagccctaggcagccattggttgccataggcagccatgagttgagaaggccagtgccacaggagcacaggggcctaagaacgctggccatacgtgctagatgctgacaaagaccaggggaaagcagagtgtgactgggaccggcacaggaaagggtggctaa

SEQ ID NO: 335779 - DNA, 6011 bp, Homo sapiens
  misc_feature (2924)..(2924): n is a, c, g, or t
  misc_feature (2938)..(2939): n is a, c, g, or t
  misc_feature (2980)..(2980): n is a, c, g, or t
  misc_feature (3021)..(3022): n is a, c, g, or t
  misc_feature (3207)..(3207): n is a, c, g, or t
  misc_feature (3246)..(3246): n is a, c, g, or t
  misc_feature (3264)..(3264): n is a, c, g, or t
  misc_feature (3279)..(3279): n is a, c, g, or t
  misc_feature (3287)..(3287): n is a, c, g, or t
  misc_feature (3317)..(3317): n is a, c, g, or t
  misc_feature (3319)..(3319): n is a, c, g, or t
  misc_feature (3334)..(3334): n is a, c, g, or t
  misc_feature (3345)..(3345): n is a, c, g, or t
  misc_feature (3397)..(3397): n is a, c, g, or t
  misc_feature (5437)..(5437): n is a, c, g, or t
attgaacacaaccatgactcaggcactgggctaggtgcttgggatacatccgtgagccacacaaagttccccaccccagaggagctcttacctggcccagaatctggatctctgcccccagcccctatcctcaaggtagagtcccaaagatgtcctaaatctcacacaggctgagttgtgcttaatccatttctgcagacacaactcatgtacaaatgggccaagccgaaaatctgtagcgaggaccttgagggggcagtgaagctgcctgcctctggtgtgaagacccactgcccaccctgcaacccaggcttcttcaaaaccaacaacagcacctgccagccctgcccatatggttcctactccaatggctcagactgtacccgctgccctgcagggactgaacctgctgtgggatttgaatacaaatggtggaacacgctgcccacaaacatggaaacgaccgttctcagtgggatcaacttcgagtacaagggcatgacaggctgggaggtggctggtgatcacatttacacagctgctggagcctcagacaatgacttcatgattctcactctggttgtgccaggatttagacctccgcagtcggtgatggcagacacagagaataaagaggtggccagaatcacatttgtctttgagaccctctgttctgtgaactgtgagctctacttcatggtgggtgtgaattctaggaccaacactcctgtggagacgtggaaaggttccaaaggcaaacagtcctatacctacatcattgaggagaacactaccacgagcttcacctgggccttccagaggaccacttttcatgaggcaagcaggaagtacaccaatgacgttgccaagatctactccatcaatgtcaccaatgttatgaatggcgtggcctcctactgccgtccctgtgccctagaagcctctgatgtgggctcctcctgcacctcttgtcctgctggttactatattgaccgagattcaggaacctgccactcctgcccccctaacacaattctgaaagcccaccagccttatggtgtccaggcctgtgtgccctgtggtccagggaccaagaacaacaagatccactctctgtgctacaatgattgcaccttctcacgcaacactccaaccaggactttcaactacaacttctccgctttggcaaacaccgtcactcttgctggagggccaagcttcacttccaaagggttgaaatacttccatcactttaccctcagtctctgtggaaaccagggtaggaaaatgtctgtgtgcaccgacaatgtcactgacctccggattcctgagggtgagtcagggttctccaaatctatcacagcctacgtctgccaggcagtcatcatccccccagaggtgacaggctacaaggccggggtttcctcacagcctgtcagccttgctgatcgacttattggggtgacaacagatatgactctggatggaatcacctccccagctgaacttttccacctggagtccttgggaataccggacgtgatcttcttttataggtccaatgatgtgacccagtcctgcagttctgggagatcaaccaccatccgcgtcaggtgcagtccacagaaaactgtccctggaagtttgctgctgccaggaacgtgctcagatgggacctgtgatggctgcaacttccacttcctgtgggagagcgcggctgcttgcccgctctgctcagtggctgactaccatgctatcgtcagcagctgtgtggctgggatccagaagactacttacgtgtggcgagaacccaagctatgctctggtggcatttctctgcctgagcagagagtcaccatctgcaaaaccatagatttctggctgaaagtgggcatctctgcaggcacctgtactgccatcctgctcaccgtcttgacctgctacttttggaaaaagaatcaaaaactagagtacaagtactccaagctggtgatgaatgctactctcaaggactgtgacctgccagcagctgacagctgcgccatcatggaaggcgaggatgtagaggacgacctcatctttaccagcaagaagtcactctttgggaagatcaaatcatttacctccaagcagccagctcctgtcaccatctctctttcagaggactcctgatggatttgactcagtgccgctgaagacatcctcaggaggcccagacatggacctgtgagaggcactgcctgcctcacctgcctcctcaccttgcatagcacctttgcaagcctgcggcgatttgggtgccagcatcctgcaacacccactgctggaaatctcttcattgtggccttatcagatgtttgaatttcagatctttttttatagagtacccaaaccctcctttctgcttgcctcaaacctgccaaatatacccacactttgtttgtaaattaaaaaaaatgcccttgcttgtatcttgtttcccaaaatggcccatccgccagagccatagcttcgtctgctcataattcttatagctttggaatgaaaatatttctatcttcttaagtatagaaactatttcctctgtcctctaacttaagggcagaaacagctgggagttttcctcgcatgccctcagctcatgatctcttcaggagagaggctgggtgaggagggtgtcggggttccctggtggataatcttcatagcagcctggatccatttcccctggataaccagctcaaagggagtgaaaatggtagtctgagggcaaggggagcaaggcctgggtaagaaaagccttgaaaagcataaaaagaggccgggcgcggtggctcacgcctgtaatcccagcactttgggaggccgaggcgggcagatcatgaggtcgggagattgagaccatcctggctaacacggtgaanccccgtctctactnnaaatacaaaaaattagccgggcgtggtggcgggtgcctgtngtcccagctactcgggaggctgaggcgggagaatagcgtgnncctggaaggcggagcttgcagtgagccgagatcgcgccactgcactccatccagcctgggtgacagagtgagactctgcctcaaaaaaaaaaaaaaaaaagaaaagcacaaagagaggcaacaaggaatgtttttgtttttgagacaggctctcactctgtcacctaggctggagtgcagtggcntaatcactgttcagtgcagcctcaagctcttgggctcangctatcctcccatctcancctctcaagtagctnggactacnagtgtgcaccaccaggctcactaatttttntnttttttgtagacacngggtttcaccntgttgcccaggctggtctccaactcctgggctcaagtgatctgtccgcctcngcctcccaaactgctgggattacaggcataagccactgcactcagccttttatttgttttttaaaccacgtagctcattgccttctcttaagtaaatgatagatattctcactgaagccaaaggaataagttcatcaagaaaatgcccaaagccctggtggatacatcctccctatcttttttttaaaccttccactatcactctatgacactgaaaagaaccaggtaagccccaaacccagatgttccagccttatcctctattgggtttacccacagacatagcaaaccctgtcagtgaggaaaattccccatccttgagtgcccccgtcctagaagtttgggccatattatggaacaggggtctcttatttgaaaagagcacaaggaggccaagattttaatggggcactttaggggatacagcccacaatggcatgggcctgaggtggccgtgatgtctgcttctaagcttaacgcatctgctcaggcacagaataaacgtctaggctggccaaaaaaggaactgaatcccaggcccatacgccagcaccagaatcaaaccagtcttcaaggaaggaaggctaggagagtttaacaagattttcactgggcccagcatggtggctcacacctgtaatcccaaggcagaatggtggcttgagctcaggagttcaagaccagcctgggcaacacagtgagaccctgtctctaaaaaatttaaaaataaacaaggtgttcaccaagctgggatacttctcactattaagcccctatctttctctttttttcattctcaattgctttgtgtgataaaaaactaaagagacttctggtccaatttctggcaacatcccttctgaaaggtgagtagagtgggtgtcttctatgcccattttccccaattttacacaaactattatcaatgaacttttaagtacctagaatgggtaaaaccagagcaagactttaaattaccttcttctttcttctactggcagttctgcctccatcactatcaggctagggtgaccttcccttggtcaagccccaattgcccatgatttgtgcctgtgccctttctccagtgaccatttggtgaccagatggtagatatagaaaggggatggcatttgcaagtgactagtctgccacaaaatgctcatctgattagccactgctgccctggcaatggctttgtaagagtcaatgagaactagagccaggctgtggtccctggccatcaacagtgttggtgacggcagggagtccctttggtttaataaatccagtttttctttgggtatccaaattctcccctccttttgtaggagtcaggctctcagaacctgtgtccatgttggaacttcccccagtgtggatgcagatacgcagctcctgagctccagcctaaagtcttctgtagcctcagcaatacttgggcacctgctgtctcactgaatagctttcttttgtgacaaaggccacagacagcccttagactattccggaaacagtaggaaaaattacatatgtctttgacttctttattctgactccactgattttagccataatactttaaggagctactttttactaccccttaccgtgctgacttctgcaggtctgccctgtgacctgtcaggaactcctgagttacgctactggggtcacctgttgctcccctagcaagttaggcatgtcatatatttttaacagctttattgagatataattcacatattatacaattcacctttaaaacatacgattcaatggttttcagcaaactcacagagttgtccgcccacttgagagcaaacacatgttcaattttcttttcctttttttttttgagacagagtcagctttgttgcccaggctggagtgcagtgccatgatcttggctcactgcagcctccccatcctgggttcaagtgatccttctgcttcagcctccccagtagctgggattacaggcatgcgccaccacgcctagctaatttttgtgtttttagtagagatggggtttcaccntgttggccaggctggtctcaaactcctggactcaagtgatccacccacctcggcctcccaaagtgctgggattacaggtgtaagccaccgtgcctggcctacatgttcaattttctatgaacaaaggctttagtccttgacccagggctaaagtggtctgtccaagctgttgttggtagagggagtatgataaaatgtttaaatctcatttggttaccttgagtcctggaacacgcagtaactgtcatgctatagtcatcatctgtatttggctgggaatacaaatgaagattgtggtgtattcaagcagtagggtttttgcttttgtttttgttttagtgccaacaaaacttttttttgtctgactacattaaagataagactgactatatttatacaacagaaactttgtaatagattttttcagctttgtgaaatcgaattttttttcatcagggctggttggatttcctttttaccctgtaatccaagcgttaatagtttgttagaagatgggttattgcatgtcactttttttttttgtaaaataaaaacataccttacaaaaaaaaaa

SEQ ID NO: 335780 - DNA, 5980 bp, Homo sapiens
  misc_feature (2893)..(2893): n is a, c, g, or t
  misc_feature (2907)..(2908): n is a, c, g, or t
  misc_feature (2949)..(2949): n is a, c, g, or t
  misc_feature (2990)..(2991): n is a, c, g, or t
  misc_feature (3176)..(3176): n is a, c, g, or t
  misc_feature (3215)..(3215): n is a, c, g, or t
  misc_feature (3233)..(3233): n is a, c, g, or t
  misc_feature (3248)..(3248): n is a, c, g, or t
  misc_feature (3256)..(3256): n is a, c, g, or t
  misc_feature (3286)..(3286): n is a, c, g, or t
  misc_feature (3288)..(3288): n is a, c, g, or t
  misc_feature (3303)..(3303): n is a, c, g, or t
  misc_feature (3314)..(3314): n is a, c, g, or t
  misc_feature (3366)..(3366): n is a, c, g, or t
  misc_feature (5406)..(5406): n is a, c, g, or t
attgaacacaaccatgactcaggcactgggctaggtgcttgggatacatccgtgagccacacaaagttccccaccccagaggagctcttacctggcccagaatctggatctctgcccccagcccctatcctcaaggtagagtcccaaagatgtcctaaatctcacacaggctgagttgtgcttaatccatttctgcagacacaactcatgtacaaatgggccaagccgaaaatctgtagcgaggaccttgagggggcagtgaagctgcctgcctctggtgtgaagacccactgcccaccctgcaacccaggcttcttcaaaaccaacaacagcacctgccagccctgcccatatggttcctactccaatggctcagactgtacccgctgccctgcagggactgaacctgctgtgggatttgaatacaaatggtggaacacgctgcccacaaacatggaaacgaccgttctcagtgggatcaacttcgagtacaagggcatgacaggctgggaggtggctggtgatcacatttacacagctgctggagcctcagacaatgacttcatgattctcactctggttgtgccaggatttagacctccgcagtcggtgatggcagacacagagaataaagaggtggccagaatcacatttgtctttgagaccctctgttctgtgaactgtgagctctacttcatggtgggtgtgaattctaggaccaacactcctgtggagacgtggaaaggttccaaaggcaaacagtcctatacctacatcattgaggagaacactaccacgagcttcacctgggccttccagaggaccacttttcatgaggcaagcaggaagtacaccaatgacgttgccaagatctactccatcaatgtcaccaatgttatgaatggcgtggcctcctactgccgtccctgtgccctagaagcctctgatgtgggctcctcctgcacctcttgtcctgctggttactatattgaccgagattcaggaacctgccactcctgcccccctaacacaattctgaaagcccaccagccttatggtgtccaggcctgtgtgccctgtggtccagggaccaagaacaacaagatccactctctgtgctacaatgattgcaccttctcacgcaacactccaaccaggactttcaactacaacttctccgctttggcaaacaccgtcactcttgctggagggccaagcttcacttccaaagggttgaaatacttccatcactttaccctcagtctctgtggaaaccagggtaggaaaatgtctgtgtgcaccgacaatgtcactgacctccggattcctgagggtgagtcagggttctccaaatctatcacagcctacgtctgccaggcagtcatcatccccccagaggtgacaggctacaaggccggggtttcctcacagcctgtcagccttgctgatcgacttattggggtgacaacagatatgactctggatggaatcacctccccagctgaacttttccacctggagtccttgggaataccggacgtgatcttcttttataggtccaatgatgtgacccagtcctgcagttctgggagatcaaccaccatccgcgtcaggtgcagtccacagaaaactgtccctggaagtttgctgctgccaggaacgtgctcagatgggacctgtgatggctgcaacttccacttcctgtgggagagcgcggctgcttgcccgctctgctcagtggctgactaccatgctatcgtcagcagctgtgtggctgggatccagaagactacttacgtgtggcgagaacccaagctatgctctggtggcatttctctgcctgagcagagagtcaccatctgcaaaaccatagatttctggctgaaagtgggcatctctgcaggcacctgtactgccatcctgctcaccgtcttgacctgctacttttggaaaaagaatcaaaaactagagtacaagtactccaagctggtgatgaatgctactctcaaggactgtgacctgccagcagctgacagctgcgccatcatggaaggcgaggatgtagaggacgacctcatctttaccagcaagaagtcactctttgggaagatcaaatcatttacctccaagaggactcctgatggatttgactcagtgccgctgaagacatcctcaggaggcccagacatggacctgtgagaggcactgcctgcctcacctgcctcctcaccttgcatagcacctttgcaagcctgcggcgatttgggtgccagcatcctgcaacacccactgctggaaatctcttcattgtggccttatcagatgtttgaatttcagatctttttttatagagtacccaaaccctcctttctgcttgcctcaaacctgccaaatatacccacactttgtttgtaaattaaaaaaaatgcccttgcttgtatcttgtttcccaaaatggcccatccgccagagccatagcttcgtctgctcataattcttatagctttggaatgaaaatatttctatcttcttaagtatagaaactatttcctctgtcctctaacttaagggcagaaacagctgggagttttcctcgcatgccctcagctcatgatctcttcaggagagaggctgggtgaggagggtgtcggggttccctggtggataatcttcatagcagcctggatccatttcccctggataaccagctcaaagggagtgaaaatggtagtctgagggcaaggggagcaaggcctgggtaagaaaagccttgaaaagcataaaaagaggccgggcgcggtggctcacgcctgtaatcccagcactttgggaggccgaggcgggcagatcatgaggtcgggagattgagaccatcctggctaacacggtgaanccccgtctctactnnaaatacaaaaaattagccgggcgtggtggcgggtgcctgtngtcccagctactcgggaggctgaggcgggagaatagcgtgnncctggaaggcggagcttgcagtgagccgagatcgcgccactgcactccatccagcctgggtgacagagtgagactctgcctcaaaaaaaaaaaaaaaaaagaaaagcacaaagagaggcaacaaggaatgtttttgtttttgagacaggctctcactctgtcacctaggctggagtgcagtggcntaatcactgttcagtgcagcctcaagctcttgggctcangctatcctcccatctcancctctcaagtagctnggactacnagtgtgcaccaccaggctcactaatttttntnttttttgtagacacngggtttcaccntgttgcccaggctggtctccaactcctgggctcaagtgatctgtccgcctcngcctcccaaactgctgggattacaggcataagccactgcactcagccttttatttgttttttaaaccacgtagctcattgccttctcttaagtaaatgatagatattctcactgaagccaaaggaataagttcatcaagaaaatgcccaaagccctggtggatacatcctccctatcttttttttaaaccttccactatcactctatgacactgaaaagaaccaggtaagccccaaacccagatgttccagccttatcctctattgggtttacccacagacatagcaaaccctgtcagtgaggaaaattccccatccttgagtgcccccgtcctagaagtttgggccatattatggaacaggggtctcttatttgaaaagagcacaaggaggccaagattttaatggggcactttaggggatacagcccacaatggcatgggcctgaggtggccgtgatgtctgcttctaagcttaacgcatctgctcaggcacagaataaacgtctaggctggccaaaaaaggaactgaatcccaggcccatacgccagcaccagaatcaaaccagtcttcaaggaaggaaggctaggagagtttaacaagattttcactgggcccagcatggtggctcacacctgtaatcccaaggcagaatggtggcttgagctcaggagttcaagaccagcctgggcaacacagtgagaccctgtctctaaaaaatttaaaaataaacaaggtgttcaccaagctgggatacttctcactattaagcccctatctttctctttttttcattctcaattgctttgtgtgataaaaaactaaagagacttctggtccaatttctggcaacatcccttctgaaaggtgagtagagtgggtgtcttctatgcccattttccccaattttacacaaactattatcaatgaacttttaagtacctagaatgggtaaaaccagagcaagactttaaattaccttcttctttcttctactggcagttctgcctccatcactatcaggctagggtgaccttcccttggtcaagccccaattgcccatgatttgtgcctgtgccctttctccagtgaccatttggtgaccagatggtagatatagaaaggggatggcatttgcaagtgactagtctgccacaaaatgctcatctgattagccactgctgccctggcaatggctttgtaagagtcaatgagaactagagccaggctgtggtccctggccatcaacagtgttggtgacggcagggagtccctttggtttaataaatccagtttttctttgggtatccaaattctcccctccttttgtaggagtcaggctctcagaacctgtgtccatgttggaacttcccccagtgtggatgcagatacgcagctcctgagctccagcctaaagtcttctgtagcctcagcaatacttgggcacctgctgtctcactgaatagctttcttttgtgacaaaggccacagacagcccttagactattccggaaacagtaggaaaaattacatatgtctttgacttctttattctgactccactgattttagccataatactttaaggagctactttttactaccccttaccgtgctgacttctgcaggtctgccctgtgacctgtcaggaactcctgagttacgctactggggtcacctgttgctcccctagcaagttaggcatgtcatatatttttaacagctttattgagatataattcacatattatacaattcacctttaaaacatacgattcaatggttttcagcaaactcacagagttgtccgcccacttgagagcaaacacatgttcaattttcttttcctttttttttttgagacagagtcagctttgttgcccaggctggagtgcagtgccatgatcttggctcactgcagcctccccatcctgggttcaagtgatccttctgcttcagcctccccagtagctgggattacaggcatgcgccaccacgcctagctaatttttgtgtttttagtagagatggggtttcaccntgttggccaggctggtctcaaactcctggactcaagtgatccacccacctcggcctcccaaagtgctgggattacaggtgtaagccaccgtgcctggcctacatgttcaattttctatgaacaaaggctttagtccttgacccagggctaaagtggtctgtccaagctgttgttggtagagggagtatgataaaatgtttaaatctcatttggttaccttgagtcctggaacacgcagtaactgtcatgctatagtcatcatctgtatttggctgggaatacaaatgaagattgtggtgtattcaagcagtagggtttttgcttttgtttttgttttagtgccaacaaaacttttttttgtctgactacattaaagataagactgactatatttatacaacagaaactttgtaatagattttttcagctttgtgaaatcgaattttttttcatcagggctggttggatttcctttttaccctgtaatccaagcgttaatagtttgttagaagatgggttattgcatgtcactttttttttttgtaaaataaaaacataccttacaaaaaaaaaa

SEQ ID NO: 335781 - DNA, 3300 bp, Homo sapiens
attgaacacaaccatgactcaggcactgggctaggtgcttgggatacatccgtgagccacacaaagttccccaccccagaggagctcttacctggcccagaatctggatctctgcccccagcccctatcctcaaggtagagtcccaaagatgtcctaaatctcacacaggctgagttgtgcttaatccatttctgcagacacaactcatgtacaaatgggccaagccgaaaatctgtagcgaggaccttgagggggcagtgaagctgcctgcctctggtgtgaagacccactgcccaccctgcaacccaggcttcttcaaaaccaacaacagcacctgccagccctgcccatatggttcctactccaatggctcagactgtacccgctgccctgcagggactgaacctgctgtgggatttgaatacaaatggtggaacacgctgcccacaaacatggaaacgaccgttctcagtgggatcaacttcgagtacaagggcatgacaggctgggaggtggctggtgatcacatttacacagctgctggagcctcagacaatgacttcatgattctcactctggttgtgccaggatttagacctccgcagtcggtgatggcagacacagagaataaagaggtggccagaatcacatttgtctttgagaccctctgttctgtgaactgtgagctctacttcatggtgggtgtgaattctaggaccaacactcctgtggagacgtggaaaggttccaaaggcaaacagtcctatacctacatcattgaggagaacactaccacgagcttcacctgggccttccagaggaccacttttcatgaggcaagcaggaagtacaccaatgacgttgccaagatctactccatcaatgtcaccaatgttatgaatggcgtggcctcctactgccgtccctgtgccctagaagcctctgatgtgggctcctcctgcacctcttgtcctgctggttactatattgaccgagattcaggaacctgccactcctgcccccctaacacaattctgaaagcccaccagccttatggtgtccaggcctgtgtgccctgtggtccagggaccaagaacaacaagatccactctctgtgctacaatgattgcaccttctcacgcaacactccaaccaggactttcaactacaacttctccgctttggcaaacaccgtcactcttgctggagggccaagcttcacttccaaagggttgaaatacttccatcactttaccctcagtctctgtggaaaccagggtaggaaaatgtctgtgtgcaccgacaatgtcactgacctccggattcctgagggtgagtcagggttctccaaatctatcacagcctacgtctgccaggcagtcatcatccccccagaggtgacaggctacaaggccggggtttcctcacagcctgtcagccttgctgatcgacttattggggtgacaacagatatgactctggatggaatcacctccccagctgaacttttccacctggagtccttgggaataccggacgtgatcttcttttataggtccaatgatgtgacccagtcctgcagttctgggagatcaaccaccatccgcgtcaggtgcagtccacagaaaactgtccctggaagtttgctgctgccaggaacgtgctcagatgggacctgtgatggctgcaacttccacttcctgtgggagagcgcggctgcttgcccgctctgctcagtggctgactaccatgctatcgtcagcagctgtgtggctgggatccagaagactacttacgtgtggcgagaacccaagctatgctctggtggcatttctctgcctgagcagagagtcaccatctgcaaaaccatagatttctggctgaaagtgggcatctctgcaggcacctgtactgccatcctgctcaccgtcttgacctgctacttttggaaaaagaatcaaaaactagagtacaagtactccaagctggtgatgaatgctactctcaaggactgtgacctgccagcagctgacagctgcgccatcatggaaggcgaggatgtagaggacgacctcatctttaccagcaagaagtcactctttgggaagatcaaatcatttacctccaagaggactcctgatggatttgactcagtgccgctgaagacatcctcaggaggcccagacatggacctgtgagaggcactgcctgcctcacctgcctcctcaccttgcatagcacctttgcaagcctgcggcgatttgggtgccagcatcctgcaacacccactgctggaaatctcttcattgtggccttatcagatgtttgaatttcagatctttttttatagagtacccaaaccctcctttctgcttgcctcaaacctgccaaatatacccacactttgtttgtaaattaaaaaaaatgcccttgcttgtatcttgtttcccaaaatggcccatccgccagagccatagcttcgtctgctcataattcttatagctttggaatgaaaatatttctatcttcttaagtatagaaactatttcctctgtcctctaacttaagggcagaaacagctgggagttttcctcgcatgccctcagctcatgatctcttcaggagagaggctgggtgaggagggtgtcggggttccctggtggataatcttcatagcagcctggatccatttcccctggataaccagctcaaagggagtgaaaatggtagtctgagggcaaggggagcaaggcctgggtaagaaaagccttgaaaagcataaaaagagtgctgggattacaggtgtaagccaccgtgcctggcctacatgttcaattttctatgaacaaaggctttagtccttgacccagggctaaagtggtctgtccaagctgttgttggtagagggagtatgataaaatgtttaaatctcatttggttaccttgagtcctggaacacgcagtaactgtcatgctatagtcatcatctgtatttggctgggaatacaaatgaagattgtggtgtattcaagcagtagggtttttgcttttgtttttgttttagtgccaacaaaacttttttttgtctgactacattaaagataagactgactatatttatacaacagaaactttgtaatagattttttcagctttgtgaaatcgaattttttttcatcagggctggttggatttcctttttaccctgtaatccaagcgttaatagtttgttagaagatgggttattgcatgtcactttttttttttgtaaaataaaaacataccttacaaaaaaaaaa

SEQ ID NO: 335782 - DNA, 1989 bp, Homo sapiens
attgaacacaaccatgactcaggcactgggctaggtgcttgggatacatccgtgagccacacaaagttccccaccccagaggagctcttacctggcccagaatctggatctctgcccccagcccctatcctcaaggtagagtcccaaagatgtcctaaatctcacacaggctgagttgtgcttaatccatttctgcagacacaactcatgtacaaatgggccaagccgaaaatctgtagcgaggaccttgagggggcagtgaagctgcctgcctctggtgtgaagacccactgcccaccctgcaacccaggcttcttcaaaaccaacaacagcacctgccagccctgcccatatggttcctactccaatggctcagactgtacccgctgccctgcagggactgaacctgctgtgggatttgaatacaaatggtggaacacgctgcccacaaacatggaaacgaccgttctcagtgggatcaacttcgagtacaagggcatgacaggctgggaggtggctggtgatcacatttacacagctgctggagcctcagacaatgacttcatgattctcactctggttgtgccaggatttagacctccgcagtcggtgatggcagacacagagaataaagaggtggccagaatcacatttgtctttgagaccctctgttctgtgaactgtgagctctacttcatggtgggtgtgaattctaggaccaacactcctgtggagacgtggaaaggttccaaaggcaaacagtcctatacctacatcattgaggagaacactaccacgagcttcacctgggccttccagaggaccacttttcatgaggcaagcaggaagtacaccaatgacgttgccaagatctactccatcaatgtcaccaatgttatgaatggcgtggcctcctactgccgtccctgtgccctagaagcctctgatgtgggctcctcctgcacctcttgtcctgctggttactatattgaccgagattcaggaacctgccactcctgcccccctaacacaattctgaaagcccaccagccttatggtgtccaggcctgtgtgccctgtggtccagggaccaagaacaacaagatccactctctgtgctacaatgattgcaccttctcacgcaacactccaaccaggactttcaactacaacttctccgctttggcaaacaccgtcactcttgctggagggccaagcttcacttccaaagggttgaaatacttccatcactttaccctcagtctctgtggaaaccagggtaggaaaatgtctgtgtgcaccgacaatgtcactgacctccggattcctgagggtgagtcagggttctccaaatctatcacagcctacgtctgccaggcagtcatcatccccccagaggtgacaggctacaaggccggggtttcctcacagcctgtcagccttgctgatcgacttattggggtgacaacagatatgactctggatggaatcacctccccagctgaacttttccacctggagtccttgggaataccggacgtgatcttcttttataggtccaatgatgtgacccagtcctgcagttctgggagatcaaccaccatccgcgtcaggtgcagtccacagaaaactgtccctggaagtttgctgctgccaggaacgtgctcagatgggacctgtgatggctgcaacttccacttcctgtgggagagcgcggctgcttgcccgctctgctcagtggctgactaccatgctatcgtcagcagctgtgtggctgggatccagaagactacttacgtgtggcgagaacccaagctatgctctggtggcatttctctgcctgagcagagagtcaccatctgcaaaaccatagatttctggctgaaagtgggcatctctgcaggcacctgtactgccatcctgctcaccgtcttgacctgctacttttggaaaaagaatcaaaagtacatgttgcggtattggagtgtg

SEQ ID NO: 335783 - DNA, 450 bp, Homo sapiens
gaagggagcaagcagaatagagggtatctcatttctgtgtttccacaaagccactgaaacaggaatttcataagggttccttctgtcacctattttccatttctctcctttgtccccaaacttgcccctgtgcagcagccagctcctgtcaccatctctctttcagaggactcctgatggatttgactcagtgccgctgaagacatcctcaggaggcccagacatggacctgtgagaggcactgcctgcctcacctgcctcctcaccttgcatagcacctttgcaagcctgcggcgatttgggtgccagcatcctgcaacacccactgctggaaatctcttcattgtggccttatcagatgtttgaatttcagatctttttttatagagtacccaaaccctcctttctgcttgcctcaaacctgccaaatatacccacactttgtttgta

SEQ ID NO: 335784 - DNA, 4461 bp, Homo sapiens
  misc_feature (2893)..(2893): n is a, c, g, or t
  misc_feature (2907)..(2908): n is a, c, g, or t
  misc_feature (2949)..(2949): n is a, c, g, or t
  misc_feature (2990)..(2991): n is a, c, g, or t
  misc_feature (3176)..(3176): n is a, c, g, or t
  misc_feature (3215)..(3215): n is a, c, g, or t
  misc_feature (3233)..(3233): n is a, c, g, or t
  misc_feature (3248)..(3248): n is a, c, g, or t
  misc_feature (3256)..(3256): n is a, c, g, or t
  misc_feature (3286)..(3286): n is a, c, g, or t
  misc_feature (3288)..(3288): n is a, c, g, or t
  misc_feature (3303)..(3303): n is a, c, g, or t
  misc_feature (3314)..(3314): n is a, c, g, or t
  misc_feature (3366)..(3366): n is a, c, g, or t
attgaacacaaccatgactcaggcactgggctaggtgcttgggatacatccgtgagccacacaaagttccccaccccagaggagctcttacctggcccagaatctggatctctgcccccagcccctatcctcaaggtagagtcccaaagatgtcctaaatctcacacaggctgagttgtgcttaatccatttctgcagacacaactcatgtacaaatgggccaagccgaaaatctgtagcgaggaccttgagggggcagtgaagctgcctgcctctggtgtgaagacccactgcccaccctgcaacccaggcttcttcaaaaccaacaacagcacctgccagccctgcccatatggttcctactccaatggctcagactgtacccgctgccctgcagggactgaacctgctgtgggatttgaatacaaatggtggaacacgctgcccacaaacatggaaacgaccgttctcagtgggatcaacttcgagtacaagggcatgacaggctgggaggtggctggtgatcacatttacacagctgctggagcctcagacaatgacttcatgattctcactctggttgtgccaggatttagacctccgcagtcggtgatggcagacacagagaataaagaggtggccagaatcacatttgtctttgagaccctctgttctgtgaactgtgagctctacttcatggtgggtgtgaattctaggaccaacactcctgtggagacgtggaaaggttccaaaggcaaacagtcctatacctacatcattgaggagaacactaccacgagcttcacctgggccttccagaggaccacttttcatgaggcaagcaggaagtacaccaatgacgttgccaagatctactccatcaatgtcaccaatgttatgaatggcgtggcctcctactgccgtccctgtgccctagaagcctctgatgtgggctcctcctgcacctcttgtcctgctggttactatattgaccgagattcaggaacctgccactcctgcccccctaacacaattctgaaagcccaccagccttatggtgtccaggcctgtgtgccctgtggtccagggaccaagaacaacaagatccactctctgtgctacaatgattgcaccttctcacgcaacactccaaccaggactttcaactacaacttctccgctttggcaaacaccgtcactcttgctggagggccaagcttcacttccaaagggttgaaatacttccatcactttaccctcagtctctgtggaaaccagggtaggaaaatgtctgtgtgcaccgacaatgtcactgacctccggattcctgagggtgagtcagggttctccaaatctatcacagcctacgtctgccaggcagtcatcatccccccagaggtgacaggctacaaggccggggtttcctcacagcctgtcagccttgctgatcgacttattggggtgacaacagatatgactctggatggaatcacctccccagctgaacttttccacctggagtccttgggaataccggacgtgatcttcttttataggtccaatgatgtgacccagtcctgcagttctgggagatcaaccaccatccgcgtcaggtgcagtccacagaaaactgtccctggaagtttgctgctgccaggaacgtgctcagatgggacctgtgatggctgcaacttccacttcctgtgggagagcgcggctgcttgcccgctctgctcagtggctgactaccatgctatcgtcagcagctgtgtggctgggatccagaagactacttacgtgtggcgagaacccaagctatgctctggtggcatttctctgcctgagcagagagtcaccatctgcaaaaccatagatttctggctgaaagtgggcatctctgcaggcacctgtactgccatcctgctcaccgtcttgacctgctacttttggaaaaagaatcaaaaactagagtacaagtactccaagctggtgatgaatgctactctcaaggactgtgacctgccagcagctgacagctgcgccatcatggaaggcgaggatgtagaggacgacctcatctttaccagcaagaagtcactctttgggaagatcaaatcatttacctccaagaggactcctgatggatttgactcagtgccgctgaagacatcctcaggaggcccagacatggacctgtgagaggcactgcctgcctcacctgcctcctcaccttgcatagcacctttgcaagcctgcggcgatttgggtgccagcatcctgcaacacccactgctggaaatctcttcattgtggccttatcagatgtttgaatttcagatctttttttatagagtacccaaaccctcctttctgcttgcctcaaacctgccaaatatacccacactttgtttgtaaattaaaaaaaatgcccttgcttgtatcttgtttcccaaaatggcccatccgccagagccatagcttcgtctgctcataattcttatagctttggaatgaaaatatttctatcttcttaagtatagaaactatttcctctgtcctctaacttaagggcagaaacagctgggagttttcctcgcatgccctcagctcatgatctcttcaggagagaggctgggtgaggagggtgtcggggttccctggtggataatcttcatagcagcctggatccatttcccctggataaccagctcaaagggagtgaaaatggtagtctgagggcaaggggagcaaggcctgggtaagaaaagccttgaaaagcataaaaagaggccgggcgcggtggctcacgcctgtaatcccagcactttgggaggccgaggcgggcagatcatgaggtcgggagattgagaccatcctggctaacacggtgaanccccgtctctactnnaaatacaaaaaattagccgggcgtggtggcgggtgcctgtngtcccagctactcgggaggctgaggcgggagaatagcgtgnncctggaaggcggagcttgcagtgagccgagatcgcgccactgcactccatccagcctgggtgacagagtgagactctgcctcaaaaaaaaaaaaaaaaaagaaaagcacaaagagaggcaacaaggaatgtttttgtttttgagacaggctctcactctgtcacctaggctggagtgcagtggcntaatcactgttcagtgcagcctcaagctcttgggctcangctatcctcccatctcancctctcaagtagctnggactacnagtgtgcaccaccaggctcactaatttttntnttttttgtagacacngggtttcaccntgttgcccaggctggtctccaactcctgggctcaagtgatctgtccgcctcngcctcccaaactgctgggattacaggcataagccactgcactcagccttttatttgttttttaaaccacgtagctcattgccttctcttaagtaaatgatagatattctcactgaagccaaaggaataagttcatcaagaaaatgcccaaagccctggtggatacatcctccctatcttttttttaaaccttccactatcactctatgacactgaaaagaaccaggtaagccccaaacccagatgttccagccttatcctctattgggtttacccacagacatagcaaaccctgtcagtgaggaaaattccccatccttgagtgcccccgtcctagaagtttgggccatattatggaacaggggtctcttatttgaaaagagcacaaggaggccaagattttaatggggcactttaggggatacagcccacaatggcatgggcctgaggtggccgtgatgtctgcttctaagcttaacgcatctgctcaggcacagaataaacgtctaggctggccaaaaaaggaactgaatcccaggcccatacgccagcaccagaatcaaaccagtcttcaaggaaggaaggctaggagagtttaacaagattttcacgtgcctggcctacatgttcaattttctatgaacaaaggctttagtccttgacccagggctaaagtggtctgtccaagctgttgttggtagagggagtatgataaaatgtttaaatctcatttggttaccttgagtcctggaacacgcagtaactgtcatgctatagtcatcatctgtatttggctgggaatacaaatgaagattgtggtgtattcaagcagtagggtttttgcttttgtttttgttttagtgccaacaaaacttttttttgtctgactacattaaagataagactgactatatttatacaacagaaactttgtaatagattttttcagctttgtgaaatcgaattttttttcatcagggctggttggatttcctttttaccctgtaatccaagcgttaatagtttgttagaagatgggttattgcatgtcactttttttttttgtaaaataaaaacataccttacaaaaaaaaaa

SEQ ID NO: 335785 - DNA, 6065 bp, Homo sapiens
  misc_feature (2978)..(2978): n is a, c, g, or t
  misc_feature (2992)..(2993): n is a, c, g, or t
  misc_feature (3034)..(3034): n is a, c, g, or t
  misc_feature (3075)..(3076): n is a, c, g, or t
  misc_feature (3261)..(3261): n is a, c, g, or t
  misc_feature (3300)..(3300): n is a, c, g, or t
  misc_feature (3318)..(3318): n is a, c, g, or t
  misc_feature (3333)..(3333): n is a, c, g, or t
  misc_feature (3341)..(3341): n is a, c, g, or t
  misc_feature (3371)..(3371): n is a, c, g, or t
  misc_feature (3373)..(3373): n is a, c, g, or t
  misc_feature (3388)..(3388): n is a, c, g, or t
  misc_feature (3399)..(3399): n is a, c, g, or t
  misc_feature (3451)..(3451): n is a, c, g, or t
  misc_feature (5491)..(5491): n is a, c, g, or t
attgaacacaaccatgactcaggcactgggctaggtgcttgggatacatccgtgagccacacaaagttccccaccccagaggagctcttacctggcccagaatctggatctctgcccccagcccctatcctcaaggtagagtcccaaagatgtcctaaatctcacacaggctgagttgtgcttaatccatttctgcagacacaactcatgtacaaatgggccaagccgaaaatctgtagcgaggaccttgagggggcagtgaagctgcctgcctctggtgtgaagacccactgcccaccctgcaacccaggcttcttcaaaaccaacaacagcacctgccagccctgcccatatggttcctactccaatggctcagactgtacccgctgccctgcagggactgaacctgctgtgggatttgaatacaaatggtggaacacgctgcccacaaacatggaaacgaccgttctcagtgggatcaacttcgagtacaagggcatgacaggctgggaggtggctggtgatcacatttacacagctgctggagcctcagacaatgacttcatgattctcactctggttgtgccaggatttagacctccgcagtcggtgatggcagacacagagaataaagaggtggccagaatcacatttgtctttgagaccctctgttctgtgaactgtgagctctacttcatggtgggtgtgaattctaggaccaacactcctgtggagacgtggaaaggttccaaaggcaaacagtcctatacctacatcattgaggagaacactaccacgagcttcacctgggccttccagaggaccacttttcatgaggcaagcaggaagtacaccaatgacgttgccaagatctactccatcaatgtcaccaatgttatgaatggcgtggcctcctactgccgtccctgtgccctagaagcctctgatgtgggctcctcctgcacctcttgtcctgctggttactatattgaccgagattcaggaacctgccactcctgcccccctaacacaattctgaaagcccaccagccttatggtgtccaggcctgtgtgccctgtggtccagggaccaagaacaacaagacgggggagaaaactgctactcttggctgcaggccctcaaggcccttcctgaccagctggcccgacccgtccctctccccctcagatccactctctgtgctacaatgattgcaccttctcacgcaacactccaaccaggactttcaactacaacttctccgctttggcaaacaccgtcactcttgctggagggccaagcttcacttccaaagggttgaaatacttccatcactttaccctcagtctctgtggaaaccagggtaggaaaatgtctgtgtgcaccgacaatgtcactgacctccggattcctgagggtgagtcagggttctccaaatctatcacagcctacgtctgccaggcagtcatcatccccccagaggtgacaggctacaaggccggggtttcctcacagcctgtcagccttgctgatcgacttattggggtgacaacagatatgactctggatggaatcacctccccagctgaacttttccacctggagtccttgggaataccggacgtgatcttcttttataggtccaatgatgtgacccagtcctgcagttctgggagatcaaccaccatccgcgtcaggtgcagtccacagaaaactgtccctggaagtttgctgctgccaggaacgtgctcagatgggacctgtgatggctgcaacttccacttcctgtgggagagcgcggctgcttgcccgctctgctcagtggctgactaccatgctatcgtcagcagctgtgtggctgggatccagaagactacttacgtgtggcgagaacccaagctatgctctggtggcatttctctgcctgagcagagagtcaccatctgcaaaaccatagatttctggctgaaagtgggcatctctgcaggcacctgtactgccatcctgctcaccgtcttgacctgctacttttggaaaaagaatcaaaaactagagtacaagtactccaagctggtgatgaatgctactctcaaggactgtgacctgccagcagctgacagctgcgccatcatggaaggcgaggatgtagaggacgacctcatctttaccagcaagaagtcactctttgggaagatcaaatcatttacctccaagaggactcctgatggatttgactcagtgccgctgaagacatcctcaggaggcccagacatggacctgtgagaggcactgcctgcctcacctgcctcctcaccttgcatagcacctttgcaagcctgcggcgatttgggtgccagcatcctgcaacacccactgctggaaatctcttcattgtggccttatcagatgtttgaatttcagatctttttttatagagtacccaaaccctcctttctgcttgcctcaaacctgccaaatatacccacactttgtttgtaaattaaaaaaaatgcccttgcttgtatcttgtttcccaaaatggcccatccgccagagccatagcttcgtctgctcataattcttatagctttggaatgaaaatatttctatcttcttaagtatagaaactatttcctctgtcctctaacttaagggcagaaacagctgggagttttcctcgcatgccctcagctcatgatctcttcaggagagaggctgggtgaggagggtgtcggggttccctggtggataatcttcatagcagcctggatccatttcccctggataaccagctcaaagggagtgaaaatggtagtctgagggcaaggggagcaaggcctgggtaagaaaagccttgaaaagcataaaaagaggccgggcgcggtggctcacgcctgtaatcccagcactttgggaggccgaggcgggcagatcatgaggtcgggagattgagaccatcctggctaacacggtgaanccccgtctctactnnaaatacaaaaaattagccgggcgtggtggcgggtgcctgtngtcccagctactcgggaggctgaggcgggagaatagcgtgnncctggaaggcggagcttgcagtgagccgagatcgcgccactgcactccatccagcctgggtgacagagtgagactctgcctcaaaaaaaaaaaaaaaaaagaaaagcacaaagagaggcaacaaggaatgtttttgtttttgagacaggctctcactctgtcacctaggctggagtgcagtggcntaatcactgttcagtgcagcctcaagctcttgggctcangctatcctcccatctcancctctcaagtagctnggactacnagtgtgcaccaccaggctcactaatttttntnttttttgtagacacngggtttcaccntgttgcccaggctggtctccaactcctgggctcaagtgatctgtccgcctcngcctcccaaactgctgggattacaggcataagccactgcactcagccttttatttgttttttaaaccacgtagctcattgccttctcttaagtaaatgatagatattctcactgaagccaaaggaataagttcatcaagaaaatgcccaaagccctggtggatacatcctccctatcttttttttaaaccttccactatcactctatgacactgaaaagaaccaggtaagccccaaacccagatgttccagccttatcctctattgggtttacccacagacatagcaaaccctgtcagtgaggaaaattccccatccttgagtgcccccgtcctagaagtttgggccatattatggaacaggggtctcttatttgaaaagagcacaaggaggccaagattttaatggggcactttaggggatacagcccacaatggcatgggcctgaggtggccgtgatgtctgcttctaagcttaacgcatctgctcaggcacagaataaacgtctaggctggccaaaaaaggaactgaatcccaggcccatacgccagcaccagaatcaaaccagtcttcaaggaaggaaggctaggagagtttaacaagattttcactgggcccagcatggtggctcacacctgtaatcccaaggcagaatggtggcttgagctcaggagttcaagaccagcctgggcaacacagtgagaccctgtctctaaaaaatttaaaaataaacaaggtgttcaccaagctgggatacttctcactattaagcccctatctttctctttttttcattctcaattgctttgtgtgataaaaaactaaagagacttctggtccaatttctggcaacatcccttctgaaaggtgagtagagtgggtgtcttctatgcccattttccccaattttacacaaactattatcaatgaacttttaagtacctagaatgggtaaaaccagagcaagactttaaattaccttcttctttcttctactggcagttctgcctccatcactatcaggctagggtgaccttcccttggtcaagccccaattgcccatgatttgtgcctgtgccctttctccagtgaccatttggtgaccagatggtagatatagaaaggggatggcatttgcaagtgactagtctgccacaaaatgctcatctgattagccactgctgccctggcaatggctttgtaagagtcaatgagaactagagccaggctgtggtccctggccatcaacagtgttggtgacggcagggagtccctttggtttaataaatccagtttttctttgggtatccaaattctcccctccttttgtaggagtcaggctctcagaacctgtgtccatgttggaacttcccccagtgtggatgcagatacgcagctcctgagctccagcctaaagtcttctgtagcctcagcaatacttgggcacctgctgtctcactgaatagctttcttttgtgacaaaggccacagacagcccttagactattccggaaacagtaggaaaaattacatatgtctttgacttctttattctgactccactgattttagccataatactttaaggagctactttttactaccccttaccgtgctgacttctgcaggtctgccctgtgacctgtcaggaactcctgagttacgctactggggtcacctgttgctcccctagcaagttaggcatgtcatatatttttaacagctttattgagatataattcacatattatacaattcacctttaaaacatacgattcaatggttttcagcaaactcacagagttgtccgcccacttgagagcaaacacatgttcaattttcttttcctttttttttttgagacagagtcagctttgttgcccaggctggagtgcagtgccatgatcttggctcactgcagcctccccatcctgggttcaagtgatccttctgcttcagcctccccagtagctgggattacaggcatgcgccaccacgcctagctaatttttgtgtttttagtagagatggggtttcaccntgttggccaggctggtctcaaactcctggactcaagtgatccacccacctcggcctcccaaagtgctgggattacaggtgtaagccaccgtgcctggcctacatgttcaattttctatgaacaaaggctttagtccttgacccagggctaaagtggtctgtccaagctgttgttggtagagggagtatgataaaatgtttaaatctcatttggttaccttgagtcctggaacacgcagtaactgtcatgctatagtcatcatctgtatttggctgggaatacaaatgaagattgtggtgtattcaagcagtagggtttttgcttttgtttttgttttagtgccaacaaaacttttttttgtctgactacattaaagataagactgactatatttatacaacagaaactttgtaatagattttttcagctttgtgaaatcgaattttttttcatcagggctggttggatttcctttttaccctgtaatccaagcgttaatagtttgttagaagatgggttattgcatgtcactttttttttttgtaaaataaaaacataccttacaaaaaaaaaa

SEQ ID NO: 335786 - DNA, 1200 bp, Homo sapiens
attgaacacaaccatgactcaggcactgggctaggtgcttgggatacatccgtgagccacacaaagttccccaccccagaggagctcttacctggcccagaatctggatctctgcccccagcccctatcctcaaggtagagtcccaaagatgtcctaaatctcacacaggctgagttgtgcttaatccatttctgcagacacaactcatgtacaaatgggccaagccgaaaatctgtagcgaggaccttgagggggcagtgaagctgcctgcctctggtgtgaagacccactgcccaccctgcaacccaggcttcttcaaaaccaacaacagcacctgccagccctgcccatatggttcctactccaatggctcagactgtacccgctgccctgcagggactgaacctgctgtgggatttgaatacaaatggtggaacacgctgcccacaaacatggaaacgaccgttctcagtgggatcaacttcgagtacaagggcatgacaggctgggaggtggctggtgatcacatttacacagctgctggagcctcagacaatgacttcatgattctcactctggttgtgccaggatttagacctccgcagtcggtgatggcagacacagagaataaagaggtggccagaatcacatttgtctttgagaccctctgttctgtgaactgtgagctctacttcatggtgggtgtgaattctaggaccaacactcctgtggagacgtggaaaggttccaaaggcaaacagtcctatacctacatcattgaggagaacactaccacgagcttcacctgggccttccagaggaccacttttcatgaggcaagcaggaagtacaccaatgacgttgccaagatctactccatcaatgtcaccaatgttatgaatggcgtggcctcctactgccgtccctgtgccctagaagcctctgatgtgggctcctcctgcacctcttgtcctgctggttactatattgaccgagattcaggaacctgccactcctgcccccctaacacaattctgaaagcccaccagccttatggtgtccaggcctgtgtgccctgtggtccagggaccaagaacaacaagatcacttttgggctcaggattgacttttaagcaaactcaaccaggatttactacactttccgtttggaataacgttcgttttcgccgaccggaccg

SEQ ID NO: 335787 - DNA, 529 bp, Homo sapiens
tagtattggcattaacactgacctttatttaaggttctaatttgttcatgttgggcacttagaacatcggtttgttgttttttttttgtgagattctggaaacattccaattttaccttttccccttgactccagactttttaacactggtctgctactgttaagttgtatgccattttgttaggccttctcaagtgggaatcaggaacgctgctgtgctctagagatgttttgttcttcctgtagggctgaagcagtgcctactcgatagaatcagtcatcatgcaaataaaagccacctgagtcaaaggcaaagccagagtgcagcttggagcaaagaagttaaaagcatattggcagaggaagagccctggcattccagcaggagctttatatttgtaactgcctacccgcattaagaaaattaaaattttttaaattccgttgactccataattttttcccccttgagggggggggcccgggtccccaaaaatagggccctattatggggagttctatattttag

SEQ ID NO: 335788 - DNA, 578 bp, Homo sapiens
tagtattggcattaacactgacctttatttaaggttctaatttgttcatgttgggcacttagaacatcggtttgttgttttttttttgtgagattctggaaacattccaattttaccttttccccttgactccagactttttaacactggtctgctactgttaagttgtatgccattttgttaggccttctcaagtgggaatcaggaacgctgctgtgctctagagatgttttgttcttcctgtagggctgaagcagtgcctactcgatagaatcagtcatcatgcaaataaaagccacctgagtcaaaggcaaagccagagtgcagcttggagcaaagaagttaaaagcatattggcagaggaagagccctggcattccagcaggagctaacaggaaaaagaaaatcaatggcagtagccctgacacagccacttctggtggttaccactcacctggggattcagcaacaggtatctacggggagggccgtgcatcctctactaccctggaggatctggagagccagtaccaagaactatcagtggccctggattcaagctccgcaataatcagtca

SEQ ID NO: 335789 - DNA, 180 bp, Homo sapiens
gtaaaccagtaaaataacattgtgcttggtgctgaacctatgctagtattggcattaacactgacctttatttaaggttctaatttgttcatgttgggcacttagaacatcggtttgttgttttttttttgtgagattctggaaacattccaattttaccttttccccttgactccagac

SEQ ID NO: 335790 - DNA, 194 bp, Homo sapiens
aacagattgtaaggacagaaataaataaataaaaagaatttctaaatgattttgttaaatgcaataacaactttatgtaaactacagatgaactgataatagagcacatgtaagaaaatgtctaaaaaatgttattggaaataaaattagagctgtaaatcattaacaaggaaaaaacattaacttatatacaa

SEQ ID NO: 335791 - DNA, 766 bp, Homo sapiens
acagatgggacaccaaacatttgatagaagattattaatatgagtggtagtaggacagaaagactgtcacatatttttgagggattttagaaaatataattttaaagggggcagcagttcaatactactttaaaaataatactccctggccgggtgtggtggctcatgactgtaatcccagcactttgggaggccgagacgagcggatcatgaggtcaggaaatcaagaccatcctggctaacacgacaaattatacctatttttctcaataacacatggctacagtgaaagacttccatttattgatcactttttggcctttggctgagatcaagagcactacctgaagatgaaagatgaaaggagctgatttgcagattctctccctatacatttttgttgtattgaatttcagtttcattttattctcttatctttcatggaatgttacaattacctaaattatacactaatatagaagcttttgagcaaaagggtgtatgtgctgtgaaggtcaacattttaaacgatcctaaaacataattgttttagaacgggcacttgtctgggtcccactgaatgactcatttcacggcatcacattcaaaatggattctatcaaaggaaaaccaactcattctcaagatgaaattcatcctttgcatattatgtatcaatgatatcactcttccagtgccagttgtggaaaaataggtttcaacatagagtggcttgtactgtgtatttaataaagctttcagaatg

SEQ ID NO: 335792 - DNA, 752 bp, Homo sapiens
ctttgctgcaacgactctcttaatttccaccgctacacggattttagaaaatataattttaaagacaaattatacctatttttctcaataacacatggctacagtgaaagacttccatttattgacggagtcttgccctgtcactcaggctggagtgcagtggcacaatctctgctcactgccagcctctgcctcccgggttccagtggttcttctgcctcagcctcctggacagctgggattaaaggtacccgccaccaaacctcagcctcctggacagctgggattacagatcactttttggcctttggctgagatcaagagcactacctgaagatgaaagatgaaaggagctgatttgcagattctctccctatacatttttgttgtattgaatttcagtttcattttattctcttatctttcatggaatgttacaattacctaaattatacactaatatagaagcttttgagcaaaagggtgtatgtgctgtgaaggtcaacattttaaacgatcctaaaacataattgttttagaacgggcacttgtctgggtcccactgaatgactcatttcacggcatcacattcaaaatggattctatcaaaggaaaaccaactcattctcaagatgaaattcatcctttgcatattatgtatcaatgatatcactcttccagtgccagttgtggaaaaataggtttcaacatagagtggcttgtactgtgtatttaataaagctttcagaatg

SEQ ID NO: 335793 - DNA, 175 bp, Homo sapiens
cctgatcccttctatctcaggccataaccagcggctgaccaatcgcttctttgatgctttagtgacttactcttttccagctgtttggtgatttagaatgaatggagctctggggtttccatgcattactatatttgaaaatcttggctgctccttctcaagtcctttagacttg

SEQ ID NO: 335794 - DNA, 178 bp, Homo sapiens
cctcctgagtagctgggattacagccatgcaccatcacacccagctaatttttgtatttttagtagagacaggtttttgccatgttagccaggctggtcttgaactcctggcctcaagtgatccaccacacccaacctatctcaaacttttaaagcatacaaccaaaataggaaattt

SEQ ID NO: 335795 - DNA, 156 bp, Homo sapiens
tcctccttgctggcccacccttttagagcccctcctaggagccaagagcagcttccagccaacaacaagcagaggccctcagtcttgtggctgcaagaacctgaattctgccaacaacccgagtgagcttggaagcagattcttccccaactgagc

SEQ ID NO: 335796 - DNA, 102 bp, Homo sapiens
gaacatgaagaaaataggtgagagtcacattgtaaaacttggggtaatattttaggaagtttatcagctagtctggaaactacacggaaggaaagaaaaaaa

SEQ ID NO: 335797 - DNA, 398 bp, Homo sapiens
tttgtgcccaaagcaattgagaaaatgaaggggccattagcaggtatgcaatatattgtgggaagacttggggaagaaagggatggatatcaggagctccttttggacttgttcactttgggataccagttaagacatctgaatacagatatcaaggaggcagctgaacatgcagatgtgaggctgacggggaagaggtcaggccaaaaaatgtaaactaggagttagcatacggatggaatttaaaaccataacattgaatgagataattttggaaatctctgtagacagaaaagaacccaagatcagagcgctgaggtgctccagtattaaagaatcaatatttataaaatgaatgaattaatgaatcctgattttttgttttcaactttcagaat

SEQ ID NO: 335798 - DNA, 248 bp, Homo sapiens
ttgcggtgatgaggatagtttttaatcaggttcctgatgttttctcttaaggttgtgcacatagaaaccacttctgttagaaataacgaatgataacagctaccaggagcatgagtacaaagaagtgtgaagctttagtctaaattacaactaggttacaattatttatgtactgttcagagatgataaaaatagtctccccttctaaacctagaaacatcatattgtacaaaacatttattatttaa

SEQ ID NO: 335799 - DNA, 2474 bp, Homo sapiens
ccgcagaggagcctcggccaggcttgccagggcgcccccagcccctccccaggccgcgagcgcccctgccgcggtgcctggcctcccctcccagactgcagggacagcacccggtaactgcgagtggagcggaggacccgagcggctgaggagagaggaggcggcggcttagctgctacggggtccggccggcgccctcccgaggggggctcaggaggaggaaggaggacccgtgcgagaatgcctctgccctggagccttgcgctcccgctgctgctctcctgggtggcaggtggtttcgggaacgcggccagtgcaaggcatcacgggttgttagcatcggcacgtcagcctggggtctgtcactatggaactaaactggcctgctgctacggctggagaagaaacagcaagggagtctgtgaagctacatgcgaacctggatgtaagtttggtgagtgcgtgggaccaaacaaatgcagatgctttccaggatacaccgggaaaacctgcagtcaagatgtgaatgagtgtggaatgaaaccccggccatgccaacacagatgtgtgaatacacacggaagctacaagtgcttttgcctcagtggccacatgctcatgccagatgctacgtgtgtgaactctaggacatgtgccatgataaactgtcagtacagctgtgaagacacagaagaagggccacagtgcctgtgtccatcctcaggactccgcctggccccaaatggaagagactgtctagatattgatgaatgtgcctctggtaaagtcatctgtccctacaatcgaagatgtgtgaacacatttggaagctactactgcaaatgtcacattggtttcgaactgcaatatatcagtggacgatatgactgtatagatataaatgaatgtactatggatagccatacgtgcagccaccatgccaattgcttcaatacccaagggtccttcaagtgtaaatgcaagcagggatataaaggcaatggacttcggtgttctgctatccctgaaaattctgtgaaggaagtcctcagagcacctggtaccatcaaagacagaatcaagaagttgcttgctcacaaaaacagcatgaaaaagaaggcaaaaattaaaaatgttaccccagaacccaccaggactcctacccctaaggtgaacttgcagcccttcaactatgaagagatagtttccagaggcgggaactctcatggaggtaaaaaagggaatgaagagaaaatgaaagaggggcttgaggatgagaaaagagaagagaaagccctgaagaatgacatagaggagcgaagcctgcgaggagatgtgtttttccctaaggtgaatgaagcaggtgaattcggcctgattctggtccaaaggaaagcgctaacttccaaactggaacataaagatttaaatatctcggttgactgcagcttcaatcatgggatctgtgactggaaacaggatagagaagatgattttgactggaatcctgctgatcgagataatgctattggcttctatatggcagttccggccttggcaggtcacaagaaagacattggccgattgaaacttctcctacctgacctgcaaccccaaagcaacttctgtttgctctttgattaccggctggccggagacaaagtcgggaaacttcgagtgtttgtgaaaaacagtaacaatgccctggcatgggagaagaccacgagtgaggatgaaaagtggaagacagggaaaattcagttgtatcaaggaactgatgctaccaaaagcatcatttttgaagcagaacgtggcaagggcaaaaccggcgaaatcgcagtggatggcgtcttgcttgtttcaggcttatgtccagatagccttttatctgtggatgactgaatgttactatctttatatttgactttgtatgtcagttccctggtttttttgatattgcatcataggacctctggcattttagaattactagctgaaaaattgtaatgtaccaacagaaatattattgtaagatgcctttcttgtataagatatgccaatatttgctttaaatatcatatcactgtatcttctcagtcatttctgaatctttccacattatattataaaatatggaaatgtcagtttatctcccctcctcagtatatctgatttgtataagtaagttgatgagcttctctctacaacatttctagaaaatagaaaaaaaagcacagagaaatgtttaactgtttgactcttatgatacttcttggaaactatgacatcaaagatagacttttgcctaagtggcttagctgggtctttcatagccaaacttgtatatttaaattctttgtaataataatatccaaatcatcatcttgtgtcatggtttaatttttctaggtaagaaaatatgttcttgattctgtgtttacttatgtaaatgattatttgcttttctgaaaaat

SEQ ID NO: 335800 - DNA, 747 bp, Homo sapiens
  misc_feature (322)..(322): n is a, c, g, or t
  misc_feature (327)..(329): n is a, c, g, or t
  misc_feature (333)..(333): n is a, c, g, or t
  misc_feature (342)..(342): n is a, c, g, or t
  misc_feature (351)..(351): n is a, c, g, or t
  misc_feature (357)..(357): n is a, c, g, or t
  misc_feature (359)..(359): n is a, c, g, or t
  misc_feature (361)..(364): n is a, c, g, or t
  misc_feature (368)..(369): n is a, c, g, or t
  misc_feature (375)..(375): n is a, c, g, or t
  misc_feature (393)..(393): n is a, c, g, or t
  misc_feature (404)..(404): n is a, c, g, or t
  misc_feature (418)..(418): n is a, c, g, or t
  misc_feature (425)..(425): n is a, c, g, or t
  misc_feature (447)..(448): n is a, c, g, or t
  misc_feature (452)..(452): n is a, c, g, or t
  misc_feature (460)..(460): n is a, c, g, or t
  misc_feature (473)..(473): n is a, c, g, or t
  misc_feature (496)..(497): n is a, c, g, or t
  misc_feature (514)..(514): n is a, c, g, or t
  misc_feature (516)..(516): n is a, c, g, or t
  misc_feature (530)..(530): n is a, c, g, or t
  misc_feature (533)..(534): n is a, c, g, or t
  misc_feature (538)..(538): n is a, c, g, or t
  misc_feature (550)..(550): n is a, c, g, or t
  misc_feature (552)..(554): n is a, c, g, or t
  misc_feature (556)..(556): n is a, c, g, or t
  misc_feature (559)..(561): n is a, c, g, or t
  misc_feature (564)..(567): n is a, c, g, or t
  misc_feature (569)..(571): n is a, c, g, or t
  misc_feature (586)..(586): n is a, c, g, or t
  misc_feature (590)..(591): n is a, c, g, or t
  misc_feature (593)..(595): n is a, c, g, or t
  misc_feature (598)..(598): n is a, c, g, or t
  misc_feature (600)..(602): n is a, c, g, or t
  misc_feature (605)..(606): n is a, c, g, or t
  misc_feature (608)..(608): n is a, c, g, or t
  misc_feature (611)..(612): n is a, c, g, or t
  misc_feature (614)..(614): n is a, c, g, or t
  misc_feature (617)..(618): n is a, c, g, or t
  misc_feature (621)..(621): n is a, c, g, or t
  misc_feature (629)..(629): n is a, c, g, or t
  misc_feature (643)..(643): n is a, c, g, or t
  misc_feature (650)..(650): n is a, c, g, or t
  misc_feature (655)..(655): n is a, c, g, or t
  misc_feature (669)..(669): n is a, c, g, or t
  misc_feature (677)..(677): n is a, c, g, or t
  misc_feature (737)..(737): n is a, c, g, or t
ccgcagaggagcctcggccaggcttgccagggcgcccccagcccctccccaggccgcgagcgcccctgccgcggtgcctggcctcccctcccagactgcagggacagcacccggtaactgcgagtggagcggaggacccgagcggctgaggagagaggaggcggcggcttagctgctacggggtccggccggcgccctcccgaggggggctcaggaggaggaaggaggacccgtgcgagaatgcctctgccctggagccttgcgctcccgctgctgctctcctgggtggcaggtggtttcgggaacgcggccagtccaaccnataannncttnttacaatcnccacgtcancttggncncnnnnaatnngcaacnaaattcccttctttcttnccctgctttanaaaaactcaagtcntactctngtgaactgacatccccacaccnnccanctaacatntcgctcactctcnccccactaaacaaagctcacagnngggtccacctagacacncnccaataaccgtcanttnnccancttcaagctctntnnntnttnnnatnnnncnnnatttttttttttttntttnntnnntanannnttnntnttnntnctnnggnccgcacgncccacaggcgcagnccacagncgacngcgcgcaacgcgancacagcgnccagcagaaacgcgcacgacaccgcgcaacacacacaacaacccccacacgcccgcgcgncagccgcacc

SEQ ID NO: 335801 - DNA, 2677 bp, Homo sapiens
ccgcagaggagcctcggccaggcttgccagggcgcccccagcccctccccaggccgcgagcgcccctgccgcggtgcctggcctcccctcccagactgcagggacagcacccggtaactgcgagtggagcggaggacccgagcggctgaggagagaggaggcggcggcttagctgctacggggtccggccggcgccctcccgaggggggctcaggaggaggaaggaggacccgtgcgagaatgcctctgccctggagccttgcgctcccgctgctgctctcctgggtggcaggtggtttcgggaacgcggccagtgcaaggcatcacgggttgttagcatcggcacgtcagcctggggtctgtcactatggaactaaactggcctgctgctacggctggagaagaaacagcaagggagtctgtgaagctacatgcgaacctggatgtaagtttggtgagtgcgtgggaccaaacaaatgcagatgctttccaggatacaccgggaaaacctgcagtcaagatgtgaatgagtgtggaatgaaaccccggccatgccaacacagatgtgtgaatacacacggaagctacaagtgcttttgcctcagtggccacatgctcatgccagatgctacgtgtgtgaactctaggacatgtgccatgataaactgtcagtacagctgtgaagacacagaagaagggccacagtgcctgtgtccatcctcaggactccgcctggccccaaatggaagagactgtctagatattgatgaatgtgcctctggtaaagtcatctgtccctacaatcgaagatgtgtgaacacatttggaagctactactgcaaatgtcacattggtttcgaactgcaatatatcagtggacgatatgactgtatagatataaatgaatgtactatggatagccatacgtgcagccaccatgccaattgcttcaatacccaagggtccttcaagtgtaaatgcaagcagggatataaaggcaatggacttcggtgttctgctatccctgaaaattctgtgaaggaagtcctcagagcacctggtaccatcaaagacagaatcaagaagttgcttgctcacaaaaacagcatgaaaaagaaggcaaaaattaaaaatgttaccccagaacccaccaggactcctacccctaaggtgaacttgcagcccttcaactatgaagagatagtttccagaggcgggaactctcatggaggtaaaaaagggaatgaagagaaaatgaaagaggggcttgaggatgagaaaagagaagagaaagccctgaagaatgacatagaggagcgaagcctgcgaggagatgtgtttttccctaaggtgaatgaagcaggtgaattcggcctgattctggtccaaaggaaagcgctaacttccaaactggaacataaagatttaaatatctcggttgactgcagcttcaatcatgggatctgtgactggaaacaggatagagaagatgattttgactggaatcctgctgatcgagataatgagctatatcatattgggagcccataggttattccaggacctccacagctgatataaggttatgttaagtcttaagttgagtcttctgtccaagggaagttccctatttacaaacactcaattcacaaataaccccagggttctcagcttctgcatcattcaaatcatacccctgctcctcctgcacctccattggatttctagctattggcttctatatggcagttccggccttggcaggtcacaagaaagacattggccgattgaaacttctcctacctgacctgcaaccccaaagcaacttctgtttgctctttgattaccggctggccggagacaaagtcgggaaacttcgagtgtttgtgaaaaacagtaacaatgccctggcatgggagaagaccacgagtgaggatgaaaagtggaagacagggaaaattcagttgtatcaaggaactgatgctaccaaaagcatcatttttgaagcagaacgtggcaagggcaaaaccggcgaaatcgcagtggatggcgtcttgcttgtttcaggcttatgtccagatagccttttatctgtggatgactgaatgttactatctttatatttgactttgtatgtcagttccctggtttttttgatattgcatcataggacctctggcattttagaattactagctgaaaaattgtaatgtaccaacagaaatattattgtaagatgcctttcttgtataagatatgccaatatttgctttaaatatcatatcactgtatcttctcagtcatttctgaatctttccacattatattataaaatatggaaatgtcagtttatctcccctcctcagtatatctgatttgtataagtaagttgatgagcttctctctacaacatttctagaaaatagaaaaaaaagcacagagaaatgtttaactgtttgactcttatgatacttcttggaaactatgacatcaaagatagacttttgcctaagtggcttagctgggtctttcatagccaaacttgtatatttaaattctttgtaataataatatccaaatcatcatcttgtgtcatggtttaatttttctaggtaagaaaatatgttcttgattctgtgtttacttatgtaaatgattatttgcttttctgaaaaat

SEQ ID NO: 335802 - DNA, 2610 bp, Homo sapiens
ccgcagaggagcctcggccaggcttgccagggcgcccccagcccctccccaggccgcgagcgcccctgccgcggtgcctggcctcccctcccagactgcagggacagcacccggtaactgcgagtggagcggaggacccgagcggctgaggagagaggaggcggcggcttagctgctacggggtccggccggcgccctcccgaggggggctcaggaggaggaaggaggacccgtgcgagaatgcctctgccctggagccttgcgctcccgctgctgctctcctgggtggcaggtggtttcgggaacgcggccagtgcaaggcatcacgggttgttagcatcggcacgtcagcctggggtctgtcactatggaactaaactggcctgctgctacggctggagaagaaacagcaagggagtctgtgaagctacatgcgaacctggatgtaagtttggtgagtgcgtgggaccaaacaaatgcagatgctttccaggatacaccgggaaaacctgcagtcaagatgtgaatgagtgtggaatgaaaccccggccatgccaacacagatgtgtgaatacacacggaagctacaagtgcttttgcctcagtggccacatgctcatgccagatgctacgtgtgtgaactctaggacatgtgccatgataaactgtcagtacagctgtgaagacacagaagaagggccacagtgcctgtgtccatcctcaggactccgcctggccccaaatggaagagactgtctagatattgatgaatgtgcctctggtaaagtcatctgtccctacaatcgaagatgtgtgaacacatttggaagctactactgcaaatgtcacattggtttcgaactgcaatatatcagtggacgatatgactgtatagatataaatgaatgtactatggatagccatacgtgcagccaccatgccaattgcttcaatacccaagggtccttcaagtgtaaatgcaagcagggatataaaggcaatggacttcggtgttctgctatccctgaaaattctgtgaaggaagtcctcagagcacctggtaccatcaaagacagaatcaagaagttgcttgctcacaaaaacagcatgaaaaagaaggcaaaaattaaaaatgttaccccagaacccaccaggactcctacccctaaggtgaacttgcagcccttcaactatgaagagatagtttccagaggcgggaactctcatggaggtaaaaaagggaatgaagagaaaatgaaagaggggcttgaggatgagaaaagagaagagaaagccctgaagaatgacatagaggagcgaagcctgcgaggagatgtgtttttccctaaggtgaatgaagcaggtgaattcggcctgattctggtccaaaggaaagcgctaacttccaaactggaacataaagatttaaatatctcggttgactgcagcttcaatcatgggatctgtgactggaaacaggatagagaagatgattttgactggaatcctgctgatcgagataatgctattggcttctatatggcagttccggccttggcaggtcacaagaaagacattggccgattgaaacttctcctacctgacctgcaaccccaaagcaacttctgtttgctctttgattaccggctggccggagacaaagtcgggaaacttcgagtgtttgtgaaaaacagtaacaatgccctggcatgggagaagaccacgagtgaggatgaaaagtggaagacagggaaaattcagttgtatcaaggaactgatgctaccaaaagcacatgcccccaaagagcctggccagcaatcacactggaacacagcagtgctttcataagaggcattctcagacccaggcatctgttccttgaattcttcagttctaggggaaatcttgatggggggatattgaaggatcatttttgaagcagaacgtggcaagggcaaaaccggcgaaatcgcagtggatggcgtcttgcttgtttcaggcttatgtccagatagccttttatctgtggatgactgaatgttactatctttatatttgactttgtatgtcagttccctggtttttttgatattgcatcataggacctctggcattttagaattactagctgaaaaattgtaatgtaccaacagaaatattattgtaagatgcctttcttgtataagatatgccaatatttgctttaaatatcatatcactgtatcttctcagtcatttctgaatctttccacattatattataaaatatggaaatgtcagtttatctcccctcctcagtatatctgatttgtataagtaagttgatgagcttctctctacaacatttctagaaaatagaaaaaaaagcacagagaaatgtttaactgtttgactcttatgatacttcttggaaactatgacatcaaagatagacttttgcctaagtggcttagctgggtctttcatagccaaacttgtatatttaaattctttgtaataataatatccaaatcatcatcttgtgtcatggtttaatttttctaggtaagaaaatatgttcttgattctgtgtttacttatgtaaatgattatttgcttttctgaaaaat

SEQ ID NO: 335803 - DNA, 231 bp, Homo sapiens
aatacaggagcttctccaggatcagttctaatacctcatatattctcactttttactactttatccactctttactgcttagacccttcaaatcaatatatccaagtgcctaccagatatacagacttagatacttcaaaggcatcaaactcattctattcaagatcaatttttctcttctgccagcattttctctctctttactagacacctctgtggaaataaacagag

SEQ ID NO: 335804 - DNA, 325 bp, Homo sapiens
tgtcagggagagaagtttgtttgaaatgcagtttcaagggactccaacccagagagtctgtttcactcagtctatggtaggatacaaaagtatactttttaaaaggagcatcccaggtggttctgacataggggtgatctgtttaccaccatcctgagaaagaaagactgccacaggccagtgctttcccgtttttaatgtctatacagatcttctgaaggtcttgtttaaatgcagattcttagtttgtagacctgggtgggacctaagattctgcattttggttgctttttcagattgcatgtgggaattatatgtgatttgg

SEQ ID NO: 335805 - DNA, 455 bp, Homo sapiens
ctgggattacaggtgtgagccactgcacccagccttattatgcagactttcaataaaagttcttagttctgagtcttatctcaattccctgccatgcctggggtacctaaatctggagcttcttaggttcaatttttccagacttcaaatttaactacacaggtgagggttctagggaaccaagtgatagacagtgatctgttctctttttaccagatagatcaccctattttatcccttaatgacaaaaggactttctataatgtctcaaacatagggttgccagatttaataagtaaaaatacaaaatgtctggttaaatttgaatttcagattttcagatgaacaatgcaatatgtcggatatacttatactaaaagtaatttgtttctttgaaattcatatttgaccaatagcctttatttatttatttatttatttatttattttgagat

SEQ ID NO: 335806 - DNA, 351 bp, Homo sapiens
ggaatattggagtttcataatggctttggattaaggcctcgtcactattgactgacttggttgaaaactgctggcttcttaaaggtcaagcattattattcaccaacttttatagtcatttgtaatatgggatgatatgcagaatcaggatctccctggattctcttctgaatacctaaggagtcagagtttatcaagagcaggcgggtacagtatattattgattccttcttatgaacttgcagagtttttgtagaagatcagctgcaccctagctgaaatacacatggattctgaaaataaacatacatatgggaaaacataatccactgcggatgaaagatttatcag

SEQ ID NO: 335807 - DNA, 448 bp, Homo sapiens
agagtgagtgaactaggacgatgttcagaagcccccaagttagtgggcaacatatcttcctgctcctactgtgtaggagacaatcatttctgctgcaagtcccgtccagtagtctctcagtatctcaggacccctacctctgctttacccaactatgagccatacccagcctccattccttcacccacactgcccttggcacactagacatcaaagtttccacactttatcacacccttttaaattctgagagacagtgtctcactctgctatctaggctagactgtatttggtgttctaccttcaatgtagccctcaccccccttttaaaaatactaaacttataggaaaataaaatattttaagggctgtggtgtgaacacagctcactggagcctcaaactcctgggcccactggctcaggcaatccctcttgcctcagcctccc

SEQ ID NO: 335808 - DNA, 695 bp, Homo sapiens
tcagcgggaatgcacatgtgctgtctgtgtctgggtgggtttgtgttcaggttcttgggtggggtaactcctcttgcagcacagagagtgtccctcttctcgcctctccctcccggttcccctcctgtggttctagtccaggtccccacacttctgtttacataaaggcatttggctttgacctagtcatggctctccagtcgcccacctgacccctgccaaggccctggggttttaaactgagctcacatagggccttgtggaagaagtactgggtgctggagggagagctcggggcccagcccatgccccacacgggcaagcagcccactgatctgttttgtagctgaggttttgcatacggttttgtttggaggatggcttctgctgctaaaaatacaaaagtttggaaaccgctgctcttggaggatgaggtttcttggcatttctcaagattgggagctgtttgaaaggttgcccatcctcttccctcatgccttggggagtgagggacctctgctgtccttattggctgagtgagggtgttgattggccgtggaggggtccctttcagccctgatcatctaaggtgggggaggtggcttcatgatgaggggagaagtcagcaccagagtgacccccagtacccccactgactaaactgtgatcctaccctcaccaggcctcagttgccc

SEQ ID NO: 335809 - DNA, 1840 bp, Homo sapiens
ccaggggcactttgtgtgtgtgtgtgtgtgtgtgtgtgtgtgtgtgtacgcgcgtgtgcgtgtgacggggtactcgcgtggcccgaagatccgagggtcacactacgtgacttctgggtgtctgtgggtactgctgtgggaacagctgctgggggagtgtgtgtggaactggagtgttcctttcaggacctgtctgactgcagatgaaattagtaactggtggggtcgtggggtgtgaatggtgggcgggagcagctatgtcagttggtgtgtttctgcttatgttagggtaattgggcacggcctttgtgtaactggtgaatatctctgaacctgggcatgaaacagagagatgtcctaactctggtaaaagcagtctgggcgcaggctggggacccagatggaattcaaacttatgcctgctctcaaggtgctcacggttgctgataaacagctggataaaatgaagagtctatgagtgagggatgcagagccagggaaggctggtggagtgatgccaccagcacaggggtatgagtttgcagctgccaaggggccaagggatgagctggggccctccttcccaatggcatctccccctggtctggaactgaagacactgagcaatggtccccaagccccaaggagatcagctcccctgggcccagtggccccaaccagggagggtgtggagaatgcctgcttctcctcagaggagcatgagacccatttccagaaccctgggaacacgagactgggcagctcacccagtccccctgggggtgtctcctcactgccccgatcccagcgggatgatctgtcccttcattcagaggaggggccagccctggagcccgtgagccgcccggtggattatggctttgtttccgccctcgttttcctggtgagtgggattcttctggtggtgacagcatacgccatcccccgtgaggctcgagtcaatccggacacagtgacagcgcgggagatggaacgactggagatgtactacgcccgcctaggctcccacctggacaggtgcatcatcgcaggcctcgggctgctcacggtgggcggcatgctcttgtcggtgctgctcatggtctccctgtgcaagggcgagctgtaccgccggaggaccttcgtccccggcaagggctccaggaagacctacggctccattaacctgcgcatgagacagctcaatggggatgggggccaggccctggtggagaatgaagttgtccaggtctcagagactagccacaccctccagaggtcttaagaactagcccaccttatctggctgctttagctccagtgctacaaggtccaccccctgctcccgcccacctgacccctgccaaggccctggggttttaaactgagctcacatagggccttgtggaagaagtactgggtgctggagggagagctcggggcccagcccatgccccacacgggcaagcagcccactgatctgttttgtagctgaggttttgcatacggttttgtttggaggatggcttctgctgctaaaaatacaaaagtttggaaaccgctgctcttggaggatgaggtttcttggcatttctcaagattgggagctgtttgaaaggttgcccatcctcttccctcatgccttggggagtgagggacctctgctgtccttattggctgagtgagggtgttgattggccgtggaggggtccctttcagccctgatcatctaaggtgggggaggtggcttcatgatgaggggagaagtcagcaccagagtgacccccagtacccccactgactaaactgtgatcctaccctcaccaggcctcagttgccc

SEQ ID NO: 335810 - DNA, 1168 bp, Homo sapiens
ccaggggcactttgtgtgtgtgtgtgtgtgtgtgtgtgtgtgtgtgtacgcgcgtgtgcgtgtgacggggtactcgcgtggcccgaagatccgagggtcacactacgtgacttctgggtgtctgtgggtactgctgtgggaacagctgctgggggagtgtgtgtggaactggagtgttcctttcaggacctgtctgactgcagatgaaattagtaactggtggggtcgtggggtgtgaatggtgggcgggagcagctatgtcagttggtgtgtttctgcttatgttagggtaattgggcacggcctttgtgtaactggtgaatatctctgaacctgggcatgaaacagagagatgtcctaactctgggtgagaggaatcctcatttttctctgccctctcactgtggcatcctaagaaaaaagttttgggttcctgcagcatgaaggagagctctgctcccagaatttgggagctccagatttcttccagggtgtggaggcatcaatatatcagtctgggaaaggggttcctgggccactccaggagctgagttgggtggaaggtgctgagagtgtgggtgggggccacttctgagcacccatgtggcacccactgctggtccctgtttgtggctgggcactcaggaaaatgtttttggtgctaagagtaaaaacgcccacctgacccctgccaaggccctggggttttaaactgagctcacatagggccttgtggaagaagtactgggtgctggagggagagctcggggcccagcccatgccccacacgggcaagcagcccactgatctgttttgtagctgaggttttgcatacggttttgtttggaggatggcttctgctgctaaaaatacaaaagtttggaaaccgctgctcttggaggatgaggtttcttggcatttctcaagattgggagctgtttgaaaggttgcccatcctcttccctcatgccttggggagtgagggacctctgctgtccttattggctgagtgagggtgttgattggccgtggaggggtccctttcagccctgatcatctaaggtgggggaggtggcttcatgatgaggggagaagtcagcaccagagtgacccccagtacccccactgactaaactgtgatcctaccctcaccaggcctcagttgccc

SEQ ID NO: 335811 - DNA, 2193 bp, Homo sapiens
ccaggggcactttgtgtgtgtgtgtgtgtgtgtgtgtgtgtgtgtgtacgcgcgtgtgcgtgtgacggggtactcgcgtggcccgaagatccgagggtcacactacgtgacttctgggtgtctgtgggtactgctgtgggaacagctgctgggggagtgtgtgtggaactggagtgttcctttcaggacctgtctgactgcagatgaaattagtaactggtggggtcgtggggtgtgaatggtgggcgggagcagctatgtcagttggtgtgtttctgcttatgttagggtaattgggcacggcctttgtgtaactggtgaatatctctgaacctgggcatgaaacagagagatgtcctaactctgggtgagaggaatcctcatttttctctgccctctcactgtggcatcctaagaaaaaagttttgggttcctgcagcatgaaggagagctctgctcccagaatttgggagctccagatttcttccagggtgtggaggcatcaatatatcagtctgggaaaggggttcctgggccactccaggagctgagttgggtggaaggtgctgagagtgtgggtgggggccacttctgagcacccatgtggcacccactgctggtccctgtttgtggctgggcactcaggaaaatgtttttggtgctaagagtaaaaagccaaccaacaaacacatctcttttttctgtctattcactggaaagtaaaagcagtctgggcgcaggctggggacccagatggaattcaaacttatgcctgctctcaaggtgctcacggttgctgataaacagctggataaaatgaagagtctatgagtgagggatgcagagccagggaaggctggtggagtgatgccaccagcacaggggtatgagtttgcagctgccaaggggccaagggatgagctggggccctccttcccaatggcatctccccctggtctggaactgaagacactgagcaatggtccccaagccccaaggagatcagctcccctgggcccagtggccccaaccagggagggtgtggagaatgcctgcttctcctcagaggagcatgagacccatttccagaaccctgggaacacgagactgggcagctcacccagtccccctgggggtgtctcctcactgccccgatcccagcgggatgatctgtcccttcattcagaggaggggccagccctggagcccgtgagccgcccggtggattatggctttgtttccgccctcgttttcctggtgagtgggattcttctggtggtgacagcatacgccatcccccgtgaggctcgagtcaatccggacacagtgacagcgcgggagatggaacgactggagatgtactacgcccgcctaggctcccacctggacaggtgcatcatcgcaggcctcgggctgctcacggtgggcggcatgctcttgtcggtgctgctcatggtctccctgtgcaagggcgagctgtaccgccggaggaccttcgtccccggcaagggctccaggaagacctacggctccattaacctgcgcatgagacagctcaatggggatgggggccaggccctggtggagaatgaagttgtccaggtctcagagactagccacaccctccagaggtcttaagaactagcccaccttatctggctgctttagctccagtgctacaaggtccaccccctgctcccgcccacctgacccctgccaaggccctggggttttaaactgagctcacatagggccttgtggaagaagtactgggtgctggagggagagctcggggcccagcccatgccccacacgggcaagcagcccactgatctgttttgtagctgaggttttgcatacggttttgtttggaggatggcttctgctgctaaaaatacaaaagtttggaaaccgctgctcttggaggatgaggtttcttggcatttctcaagattgggagctgtttgaaaggttgcccatcctcttccctcatgccttggggagtgagggacctctgctgtccttattggctgagtgagggtgttgattggccgtggaggggtccctttcagccctgatcatctaaggtgggggaggtggcttcatgatgaggggagaagtcagcaccagagtgacccccagtacccccactgactaaactgtgatcctaccctcaccaggcctcagttgccc

SEQ ID NO: 335812 - DNA, 1591 bp, Homo sapiens
gcggccgccaccgccgccgtacagctccgcgcggcgcgagtaggtacgtgcgcctcggcagtggctccgggccgggccgggaagggggcgggagaccgggagggcgaggcggtggcggccgggcccgcgccctccgggctgcgccgcaggagagagacccccgcaggcgagacccccgcaggcgtacgccggctgcaggaaggcggacgggcaccggagaggacgcaccctcgcccgccggcggccgggcgcccttcgccccagcgtggtgaggcggggagggaggcccggcacagctgccaaggggccaagggatgagctggggccctccttcccaatggcatctccccctggtctggaactgaagacactgagcaatggtccccaagccccaaggagatcagctcccctgggcccagtggccccaaccagggagggtgtggagaatgcctgcttctcctcagaggagcatgagacccatttccagaaccctgggaacacgagactgggcagctcacccagtccccctgggggtgtctcctcactgccccgatcccagcgggatgatctgtcccttcattcagaggaggggccagccctggagcccgtgagccgcccggtggattatggctttgtttccgccctcgttttcctggtgagtgggattcttctggtggtgacagcatacgccatcccccgtgaggctcgagtcaatccggacacagtgacagcgcgggagatggaacgactggagatgtactacgcccgcctaggctcccacctggacaggtgcatcatcgcaggcctcgggctgctcacggtgggcggcatgctcttgtcggtgctgctcatggtctccctgtgcaagggcgagctgtaccgccggaggaccttcgtccccggcaagggctccaggaagacctacggctccattaacctgcgcatgagacagctcaatggggatgggggccaggccctggtggagaatgaagttgtccaggtctcagagactagccacaccctccagaggtcttaagaactagcccaccttatctggctgctttagctccagtgctacaaggtccaccccctgctcccgcccacctgacccctgccaaggccctggggttttaaactgagctcacatagggccttgtggaagaagtactgggtgctggagggagagctcggggcccagcccatgccccacacgggcaagcagcccactgatctgttttgtagctgaggttttgcatacggttttgtttggaggatggcttctgctgctaaaaatacaaaagtttggaaaccgctgctcttggaggatgaggtttcttggcatttctcaagattgggagctgtttgaaaggttgcccatcctcttccctcatgccttggggagtgagggacctctgctgtccttattggctgagtgagggtgttgattggccgtggaggggtccctttcagccctgatcatctaaggtgggggaggtggcttcatgatgaggggagaagtcagcaccagagtgacccccagtacccccactgactaaactgtgatcctaccctcaccaggcctcagttgccc

SEQ ID NO: 335813 - DNA, 717 bp, Homo sapiens
catggtggcagatgcctgtaatcccagctactgtgggaggctgaggcaggggaatcacttgaacctaggaggcagaggttgccatgagccgagatcatgccactgcactccagcctgggcgacagagtgagactcaatctcaaaaaaaataaataaataaaaatattaataatttgaaaaaaaaagctatacagaatgcaatgtatatgcctaaacaacgttaatttagaaatttaaaaagataatttttaaaatggtttcacttttttggatttactccaggtaagtgatttgattttttgttctacctaaacagcactggatataattatttcccagggcttcaaaattctgaaaatcctaattccctattgaagcactttttttttctaaaatagctaattactaaattataacaaacatagaagttgaatttggcaagttatggtagtttgcttctaggtcctcctttgatataaatatgttttccatatttgcctcatactcaatagttttctaaatttagcccaggaaacataccactattattattattattactgttattattttgttaaaggtttttctgtatttatcatgttttgaaaaagaaaaacggtcaaattctagatcctttaaaatccagtccattattattccatttattttaataataataataaatatttaaacctggtaagttttccgagtatatca

SEQ ID NO: 335814 - DNA, 612 bp, Homo sapiens
gtgcaatgaagaaattgcacacaagaacaagctacggtctgtcctctatgctgatgttggcagcctgcttctgcagaacatgcttaactggctatctgaggaccagaggggaagacagccgaccccaccacttctgagaccctatcttgcagccttatgaaaggagaagttatgcttaattcttggggaaacaaaggaatggctacaccagtaagttagccttaccattgacttgggactctgagaagtggagatggggacaacagtaatggggacagatgaacaatgtctcttgctttaggttcagcagggactcttgagaagtggagatggggacaacagtaatggggacagatgaacaatgtctcttgctttaggttcagcagtcagagacccaggcaccaagcgagaaggaactcagcctactgaaataacttcttaggtcaattcctggatccagtatttcctcagtgccatccattctacagtccagattaatcctccctaaaaacctttccaacatgccactgaagtactctaattggctcctcctgatatcctatcaaaatgggcttctaattcgacctaacttattttacagaagaagctgag

SEQ ID NO: 335815 - DNA, 5787 bp, Homo sapiens
tagtcatagccgatacctagaggtcaccccgtctatctactgaatacgtctttaagctttagcgtaacagattcttttcaatcaagtactggaatcagttgtccaggtggagtaatacagaaaagctaaggtctagaaaccaggggaccattttagatacaaagcagaattgcggaattgccagattataacttgaggtttgttcgggggattttttttaaccatctaaaataaatgtatataagatggactgagtcttctaaagagattctaaaactatattcttacttaagtctgaacaggaattaagaataactcaaagtgaatttgatcgtcaagcagagattaccagacttctgctagagggaatcagcagtacacatgcccatcaccttcgctgtctgaatgactttgtagaagcccagatgacttactatgcacagtgttaccagtatatgttggacctccagaaacaactgggaagttttccatccaattatcttagtaacaacaatcagacttctgtgacacctgtaccatcagttttaccaaatgcgattggttcttctgccatggcttcaacaagtggcctagtaatcacctctccttccaacctcagtgaccttaaggagtgtagtggcagcagaaaggccagggttctctatgattatgatgcagcaaacagtactgaattatcacttctggcagatgaggtgatcactgtgttcagtgttgttggaatggattcagactggctaatgggggaaaggggaaaccagaagggcaaggtgccaattacctacttagaactgctcaattaagtaggtggactatggaaaggttgcccatcatgactttgtatttatatacaattaactctaaataaagcaggttaagtatcttccatgttaatgtgttaagagactgaaaataccagccatcagaaactggcctttctgccaataaagttgcatggtaaatatttcattacagaatttatgttagagctttcatgccaagaatgttttcttacaaaattctctttttattgaggtttcactaataagcagcttctacttttgagcctcaacttaaagcagaactgttttctactggatttttcattaacagcaagctttttcttttatgtaaaataaatctattgtgaattgatatcagcgactcatttattaggtataaataatagccaaagaataaaattaaaatttattttaaactttcggtcttaaaaagagctgtaggatataaacctcttttgtgaaaagtagaattttctgaatgctttcatagacaaaaacgcatttaaactatgtttacctggttttccaacagaaatcaaatgattttaatattatgttttgatgggttattttcagagttgtttggttttttaaacactactgaatggtttcttttaaatttaagaacaactagttcttgaaaagcaataccgtatttctctgataaatttgtagttaaggttctagaaaatctaggacaaatttacttcattaaacataaagtttttaagattattcagttggcacaatttaatgcataattgggattggatccatttactgtactgtggtacagtaaagagaatgtgttcttattgaacagcagatttgtatacaaatacggaataatgcaactacattataaattgtatacgaacaaaataaattgggtcactctgagcttactattaaaacattgaaaatttattaatgaacacaggctatcttgatgaggatctctgcttatgaaacacatactaatgaaattattagtgacacattggaagctagaaaattgctgttggggccattgctataaatcattgtttccatgttaagacttctgttctaattcattcattcaacaaacatttgttgagggccagatactgtgctggtcaactggggatactgtcctgaacaatatgcacacagttcttgcccctgcagagcttaaagaccattaaaggatacagaaaattaagcaattatcctatagtaggattcgtggtgtgatggggaaaatacaaggtactgtatttgggagtcatgtaactccagttttgggagtgagagagggtctggggaagaactgttccagataaaaagatgtgtaaccaagatagcatagcacattctgacaactaaagcaatttactctaacttaagcatgaagtacaaaagtatagttcatttattgagggaatgttaagctattaaaatgatactttttggtacttttaaaaaaatgaatacttaaacaccgttttaaaattttgtgttaagagctcctaataagaacttggtaaacatgttgacaatttaactcacagtctaaactttaaaagtagtagttacccttttatttctgtgccatgagacaaattcttctgcagttttatagttgtacaagatgttttgactcactctcaattgccatattcttaaagaaaccctgaaaagctgctcaagctggtcagttttctgtaaaaccaagtaaatgaaattttctctcccctcagaaaggaagttctacagcctagagtaccatctattgtgttttataagtccagatttaggctttgaaagatcataccaaaacttcagatcgacttaaacagcaactatgaattaggtttatgggaaatgtagtaatacaggggaaagaatatcggtaatggagtgaaatggtcctgggttcaaatccagtcttcctcacatattgtgctctttaagcttcaaatgagatgtataactgccttttccttaccagtaaaatgaggacaataattatgacaccatagggtggttgtgaggattagcaaatgttatcttgtatttcaggtgcctttcagggaaaggcttggcacatagtaaacacatcctgtaaatatcagtttccccttgttagcccctgtagcatcctgacctaccaagtctataggccttgcatatcactgtgcaccagagatacctcttttacatctgggctctgttttctctctatcaatcctatcctccaccctctttaaatcagaccccaggtttaaccttcccacagtcagtataaatcatttttcagaactttcagctttccatcaagtgaaagttgattttagttacccagtaatgtacagaaaccttcaataatgttaagcttcaaaggcttctggtacgtttgtctaccacagaaccaccacaatatatatgcttgttcttaggtttattgctttttattttaatggggtttggttgtttgggttttattttggttttggcttattttaaagtcaagtttagtttttactcaggtaaaggcctgaagtttcttgggcgtggaagaaaaagcttgggaagcctattaattcatggtgcagttcagaattgtttaaataagctctgtgccactgagcttaatctgaaagtatagtgacatgtgaaggatgcacatatgaatgaaaaactaaaataattgtaggctcttctataaatgaaaaaaaaagtgattggattgtgtctacctttttcctcaaagtaatctaacctaaacggtcatggtgttaaaactttttatggtgctaatcagaaaaattgatgttgcaagaaatgaggtctcaaaaatgggaatgtgcctcctcactctgcgtcacatgggaaataaatcctgaggccaggatcaccagtggggtagagtcatcttcatagtctcctgttatcctccccctgaacaaagaacaaagtgagactgggaagctagtgttggggaaacatttctgggataaactgtggagtggagaagacaatggagggcaaggcaaaaacccacagacttgtttacccatagaggccccactcacctccatgctgacagaattccagaaaaattccttccctatctcccaaacacctgaaattctgaaatattgccctactatttagcactttaagcttcagtgaggtgctgtaatggagagatagcttcatagtttagcctatagccaactttgcctcaagacctccagataagatgaagtggcttttacctcatgtgagtctcaaacgctggagagagagttccacaaccacccctgccctttctcccatattacgctcattagaaagtctactcagggctgggtgccgtggctcatgcctgtaatcccagcactttggaggctgaggcgggtggatcatctgaggtcaggagttcgagaccagcctggccaacatggggaaaccctgtctctactgaaaatataaaaattagccgggcatggtggcgtgcacctgtaattccagctactcgggaggctgaggcaggagaatcacttgaaccccagaggcagaggctacagtgagccaagattgcaccactgcactccaacctgggtgatagaataagactcttgtctcaaggaaagaaaaaatgtctactcagtagagcagtgattggcaaagtgtgagaccccagaccggcaatattggcatctcctggagacttgtttaaaatgctgattactattttcaagaactttctaccttcatttttacttattttttgttttcaagggctcatggaatcagtcttccatgtgacagctttttaaatattttaagacaaaaactgagtcttctaatcttaattgtgttctagcagtagtcattgtaattatagttatttttataatttatttgtttagtgtatatctgtcactctagaatgtaggctccctgagataaaaactataattcttttgatggcagttacattcccaactcttagcacaagatctaggacatagtatgaactcaataaatttttgttgaatgaaagaaaaatgcaaatttataagccttttcagagacctactgaatcaaactctgagagtggagcccagcaatctgttgtaaaagctgtttgagtaatactgttgcactctaagcttgagaaccactgcaatagaactaagagaacattcatttcaccttcaggcctattctctgacatcacttgaaaaatcctctctgccttctgtaacccttaaccaacaacagtgccctgtccatgtaggggaaacttctgggctgtattacaagtgggtaggaaggtataaggatatcatagtgggaagtattgcttagaatgccagtacttgtttgctgtggaaggtttctaggaatggattgcttagtctaaagtaagcactaccaccatccacgttttcactcaacacagtgccttttaattggtgactaacatcaaaacaccttgacaaaccgttaaaacagtatcagaaaccatgtgtacatccctgtgcctcttagattgctaagttctgctctcattcttacttcaaaggacactttttaaagaattgttaatgcttttttataatacaagtcatagccctgttggcaaaaagaaaaaagattcagtgagaaagaaaaatcactgataattccatcatccagggagaaccactgttatttaagtatatggccttccagacttttctgtgcatttatagatatttttaatgggatcaaagtgtacatactgttttgtaactttttttcactcaacaataccatgactgtcttgctgtgtcaagtatatttctacatctcttaatggctgcatgatattccatcatatgtgccacattttattaaactactgttcaatttttaggtttccaactttcattaataaagtgctttaaagaacattgtgttgctaaatctc

SEQ ID NO: 335816 - DNA, 1805 bp, Homo sapiens
cgcttgtttttcccttgggacccgggtccacacggcggggtcgcccgtccatctccggctcgcccgcggggcccatcgtcgacgttagcggccgttctccgagccgactgacccatccttggcgctgccgccgcgcgcttgttctcctccctcgccccgccttcatcctccccgttcacggaaacgacagctgcggctgcggggctggcgccgcctccctccacctaccacgtctgccctcgccgctctagccctgcgccccagcccggccgcggcacctccgcctcgccgccgctaggtcggccggctccgcccggctgccgcctaggatgaatatcatggacttcaacgtgaagaagctggcggccgacgcaggcaccttcctcagtcgcgccgtgcagttcacagaagaaaagcttggccaggctgagaagacagaattggatgctcacttagagaacctccttagcaaagctgaatgtaccaaaatatggacagaaaaaataatgaaacaaactgaagtgttattgcagccaaatccaaatgccaggatagaagaatttgtttatgagaaactggatagaaaagctccaagtcgtataaacaacccagaacttttgggacaatatatgattgatgcagggactgagtttggcccaggaacagcttatggtaatgcccttattaaatgtggagaaacccaaaaaagaattggaacagcagacagagaactgattcaaacgtcagccttaaattttcttactcctttaagaaactttatagaaggagattacaaaacaattgctaaagaaaggaaactattgcaaaataagagactggatttggatgctgcaaaaacgagactaaaaaaggcaaaagctgcagaaactagaaattcatctgaacaggaattaagaataactcaaagtgaatttgatcgtcaagcagagattaccagacttctgctagagggaatcagcagtacacatgcccatcaccttcgctgtctgaatgactttgtagaagcccagatgacttactatgcacagtgttaccagtatatgttggacctccagaaacaactgggaagttttccatccaattatcttagtaacaacaatcagacttctgtgacacctgtaccatcagttttaccaaatgcgattggttcttctgccatggcttcaacaagtggcctagtaatcacctctccttccaacctcagtgaccttaaggagtgtagtggcagcagaaaggccagggttctctatgattatgatgcagcaaacagtactgaattatcacttctggcagatgaggtgatcactgtgttcagtgttgttggaatggattcagactggctaatgggggaaaggggaaaccagaagggcaaggtgccaattacctacttagaactgctcaattaagtaggtggactatggaaaggttgcccatcatgactttgtatttatatacaattaactctaaataaagcaggttaagtatcttccatgttaatgtgttaagagactgaaaataccagccatcagaaactggcctttctgccaataaagttgcatggtaaatatttcattacagaatttatgttagagctttcatgccaagaatgttttcttacaaaattctctttttattgaggtttcactaataagcagcttctacttttgagcctcaacttaaagcagaactgttttctactggatttttcattaacagcaagctttttcttttatgtaaaataaatctattgtgaaaaaaaaaaaaaaaagagaattttgtaagaa

SEQ ID NO: 335817 - DNA, 1402 bp, Homo sapiens
tagaggaatgaagaatgtcttacatcagataagaccagtgacttgggtaagatgatgattaccaggccagtagcgagcagagtacttcggggcactctaacacttgtagagtttgctaatcactgctcgtactatacgaatctggcgacagaaactggtgccggagccttttcagtgtttaaacttctagttctcattgctctgacaccgggctacactggcaattgctgactaccactgtgacagacatatttcaacctgaagtttcctcgcacaaaaactgagtcttctaatcttaattgtgttctagcagtagtcattgtaattatagttatttttataatttatttgtttagtgtatatctgtcactctagaatgtaggctccctgagataaaaactataattcttttgatggcagttacattcccaactcttagcacaagatctaggacatagtatgaactcaataaatttttgttgaatgaaagaaaaatgcaaatttataagccttttcagagacctactgaatcaaactctgagagtggagcccagcaatctgttgtaaaagctgtttgagtaatactgttgcactctaagcttgagaaccactgcaatagaactaagagaacattcatttcaccttcaggcctattctctgacatcacttgaaaaatcctctctgccttctgtaacccttaaccaacaacagtgccctgtccatgtaggggaaacttctgggctgtattacaagtgggtaggaaggtataaggatatcatagtgggaagtattgcttagaatgccagtacttgtttgctgtggaaggtttctaggaatggattgcttagtctaaagtaagcactaccaccatccacgttttcactcaacacagtgccttttaattggtgactaacatcaaaacaccttgacaaaccgttaaaacagtatcagaaaccatgtgtacatccctgtgcctcttagattgctaagttctgctctcattcttacttcaaaggacactttttaaagaattgttaatgcttttttataatacaagtcatagccctgttggcaaaaagaaaaaagattcagtgagaaagaaaaatcactgataattccatcatccagggagaaccactgttatttaagtatatggccttccagacttttctgtgcatttatagatatttttaatgggatcaaagtgtacatactgttttgtaactttttttcactcaacaataccatgactgtcttgctgtgtcaagtatatttctacatctcttaatggctgcatgatattccatcatatgtgccacattttattaaactactgttcaatttttaggtttccaactttcattaataaagtgctttaaagaacattgtgttgctaaatctc

SEQ ID NO: 335818 - DNA, 4237 bp, Homo sapiens
cgcttgtttttcccttgggacccgggtccacacggcggggtcgcccgtccatctccggctcgcccgcggggcccatcgtcgacgttagcggccgttctccgagccgactgacccatccttggcgctgccgccgcgcgcttgttctcctccctcgccccgccttcatcctccccgttcacggaaacgacagctgcggctgcggggctggcgccgcctccctccacctaccacgtctgccctcgccgctctagccctgcgccccagcccggccgcggcacctccgcctcgccgccgctaggtcggccggctccgcccggctgccgcctaggatgaatatcatggacttcaacgtgaagaagctggcggccgacgcaggcaccttcctcagtcgcgccgtgcagttcacagaagaaaagcttggccaggctgagaagacagaattggatgctcacttagagaacctccttagcaaagctgaatgtaccaaaatatggacagaaaaaataatgaaacaaactgaagtgttattgcagccaaatccaaatgccaggatagaagaatttgtttatgagaaactggatagaaaagctccaagtcgtataaacaacccagaacttttgggacaatatatgattgatgcagggactgagtttggcccaggaacagcttatggtaatgcccttattaaatgtggagaaacccaaaaaagaattggaacagcagacagagaactgattcaaacgtcagccttaaattttcttactcctttaagaaactttatagaaggagattacaaaacaattgctaaagaaaggaaactattgcaaaataagagactggatttggatgctgcaaaaacgagactaaaaaaggcaaaagctgcagaaactagaaattcatctgaacaggaattaagaataactcaaagtgaatttgatcgtcaagcagagattaccagacttctgctagagggaatcagcagtacacatgcccatcaccttcgctgtctgaatgactttgtagaagcccagatgacttactatgcacagtgttaccagtatatgttggacctccagaaacaactgggaagttttccatccaattatcttagtaacaacaatcagacttctgtgacacctgtaccatcagttttaccaaatgcgattggttcttctgccatggcttcaacaagtggcctagtaatcacctctccttccaacctcagtgaccttaaggagtgtagtggcagcagaaaggccagggttctctatgattatgatgcagcaaacagtactgaattatcacttctggcagatgaggtgatcactgtgttcagtgttgttggaatggattcagactggctaatgggggaaaggggaaaccagaagggcaaggtgccaattacctacttagaactgctcaattaagtaggtggactatggaaaggttgcccatcatgactttgtatttatatacaattaactctaaataaagcaggttaagtatcttccatgttaatgtgttaagagactgaaaataccagccatcagaaactggcctttctgccaataaagttgcatggtaaatatttcattacagaatttatgttagagctttcatgccaagaatgttttcttacaaaattctctttttattgaggtttcactaataagcagcttctacttttgagcctcaacttaaagcagaactgttttctactggatttttcattaacagcaagctttttcttttatgtaaaataaatctattgtgaattgatatcagcgactcatttattaggtataaataatagccaaagaataaaattaaaatttattttaaactttcggtcttaaaaagagctgtaggatataaacctcttttgtgaaaagtagaattttctgaatgctttcatagacaaaaacgcatttaaactatgtttacctggttttccaacagaaatcaaatgattttaatattatgttttgatgggttattttcagagttgtttggttttttaaacactactgaatggtttcttttaaatttaagaacaactagttcttgaaaagcaataccgtatttctctgataaatttgtagttaaggttctagaaaatctaggacaaatttacttcattaaacataaagtttttaagattattcagttggcacaatttaatgcataattgggattggatccatttactgtactgtggtacagtaaagagaatgtgttcttattgaacagcagatttgtatacaaatacggaataatgcaactacattataaattgtatacgaacaaaataaattgggtcactctgagcttactattaaaacattgaaaatttattaatgaacacaggctatcttgatgaggatctctgcttatgaaacacatactaatgaaattattagtgacacattggaagctagaaaattgctgttggggccattgctataaaagcttcatagtttagcctatagccaactttgcctcaagacctccagataagatgaagtggcttttacctcatgtgagtctcaaacgctggagagagagttccacaaccacccctgccctttctcccatattacgctcattagaaagtctactcagggctgggtgccgtggctcatgcctgtaatcccagcactttggaggctgaggcgggtggatcatctgaggtcaggagttcgagaccagcctggccaacatggggaaaccctgtctctactgaaaatataaaaattagccgggcatggtggcgtgcacctgtaattccagctactcgggaggctgaggcaggagaatcacttgaaccccagaggcagaggctacagtgagccaagattgcaccactgcactccaacctgggtgatagaataagactcttgtctcaaggaaagaaaaaatgtctactcagtagagcagtgattggcaaagtgtgagaccccagaccggcaatattggcatctcctggagacttgtttaaaatgctgattactattttcaagaactttctaccttcatttttacttattttttgttttcaagggctcatggaatcagtcttccatgtgacagctttttaaatattttaagacaaaaactgagtcttctaatcttaattgtgttctagcagtagtcattgtaattatagttatttttataatttatttgtttagtgtatatctgtcactctagaatgtaggctccctgagataaaaactataattcttttgatggcagttacattcccaactcttagcacaagatctaggacatagtatgaactcaataaatttttgttgaatgaaagaaaaatgcaaatttataagccttttcagagacctactgaatcaaactctgagagtggagcccagcaatctgttgtaaaagctgtttgagtaatactgttgcactctaagcttgagaaccactgcaatagaactaagagaacattcatttcaccttcaggcctattctctgacatcacttgaaaaatcctctctgccttctgtaacccttaaccaacaacagtgccctgtccatgtaggggaaacttctgggctgtattacaagtgggtaggaaggtataaggatatcatagtgggaagtattgcttagaatgccagtacttgtttgctgtggaaggtttctaggaatggattgcttagtctaaagtaagcactaccaccatccacgttttcactcaacacagtgccttttaattggtgactaacatcaaaacaccttgacaaaccgttaaaacagtatcagaaaccatgtgtacatccctgtgcctcttagattgctaagttctgctctcattcttacttcaaaggacactttttaaagaattgttaatgcttttttataatacaagtcatagccctgttggcaaaaagaaaaaagattcagtgagaaagaaaaatcactgataattccatcatccagggagaaccactgttatttaagtatatggccttccagacttttctgtgcatttatagatatttttaatgggatcaaagtgtacatactgttttgtaactttttttcactcaacaataccatgactgtcttgctgtgtcaagtatatttctacatctcttaatggctgcatgatattccatcatatgtgccacattttattaaactactgttcaatttttaggtttccaactttcattaataaagtgctttaaagaacattgtgttgctaaatctc

SEQ ID NO: 335819 - DNA, 6251 bp, Homo sapiens
cgcttgtttttcccttgggacccgggtccacacggcggggtcgcccgtccatctccggctcgcccgcggggcccatcgtcgacgttagcggccgttctccgagccgactgacccatccttggcgctgccgccgcgcgcttgttctcctccctcgccccgccttcatcctccccgttcacggaaacgacagctgcggctgcggggctggcgccgcctccctccacctaccacgtctgccctcgccgctctagccctgcgccccagcccggccgcggcacctccgcctcgccgccgctaggtcggccggctccgcccggctgccgcctaggatgaatatcatggacttcaacgtgaagaagctggcggccgacgcaggcaccttcctcagtcgcgccgtgcagatgccaggatagaagaatttgtttatgagaaactggatagaaaagctccaagtcgtataaacaacccagaacttttgggacaatatatgattgatgcagggactgagtttggcccaggaacagcttatggtaatgcccttattaaatgtggagaaacccaaaaaagaattggaacagcagacagagaactgattcaaacgtcagccttaaattttcttactcctttaagaaactttatagaaggagattacaaaacaattgctaaagaaaggaaactattgcaaaataagagactggatttggatgctgcaaaaacgagactaaaaaaggcaaaagctgcagaaactagaaattcatctgaacaggaattaagaataactcaaagtgaatttgatcgtcaagcagagattaccagacttctgctagagggaatcagcagtacacatgcccatcaccttcgctgtctgaatgactttgtagaagcccagatgacttactatgcacagtgttaccagtatatgttggacctccagaaacaactgggaagttttccatccaattatcttagtaacaacaatcagacttctgtgacacctgtaccatcagttttaccaaatgcgattggttcttctgccatggcttcaacaagtggcctagtaatcacctctccttccaacctcagtgaccttaaggagtgtagtggcagcagaaaggccagggttctctatgattatgatgcagcaaacagtactgaattatcacttctggcagatgaggtgatcactgtgttcagtgttgttggaatggattcagactggctaatgggggaaaggggaaaccagaagggcaaggtgccaattacctacttagaactgctcaattaagtaggtggactatggaaaggttgcccatcatgactttgtatttatatacaattaactctaaataaagcaggttaagtatcttccatgttaatgtgttaagagactgaaaataccagccatcagaaactggcctttctgccaataaagttgcatggtaaatatttcattacagaatttatgttagagctttcatgccaagaatgttttcttacaaaattctctttttattgaggtttcactaataagcagcttctacttttgagcctcaacttaaagcagaactgttttctactggatttttcattaacagcaagctttttcttttatgtaaaataaatctattgtgaattgatatcagcgactcatttattaggtataaataatagccaaagaataaaattaaaatttattttaaactttcggtcttaaaaagagctgtaggatataaacctcttttgtgaaaagtagaattttctgaatgctttcatagacaaaaacgcatttaaactatgtttacctggttttccaacagaaatcaaatgattttaatattatgttttgatgggttattttcagagttgtttggttttttaaacactactgaatggtttcttttaaatttaagaacaactagttcttgaaaagcaataccgtatttctctgataaatttgtagttaaggttctagaaaatctaggacaaatttacttcattaaacataaagtttttaagattattcagttggcacaatttaatgcataattgggattggatccatttactgtactgtggtacagtaaagagaatgtgttcttattgaacagcagatttgtatacaaatacggaataatgcaactacattataaattgtatacgaacaaaataaattgggtcactctgagcttactattaaaacattgaaaatttattaatgaacacaggctatcttgatgaggatctctgcttatgaaacacatactaatgaaattattagtgacacattggaagctagaaaattgctgttggggccattgctataaatcattgtttccatgttaagacttctgttctaattcattcattcaacaaacatttgttgagggccagatactgtgctggtcaactggggatactgtcctgaacaatatgcacacagttcttgcccctgcagagcttaaagaccattaaaggatacagaaaattaagcaattatcctatagtaggattcgtggtgtgatggggaaaatacaaggtactgtatttgggagtcatgtaactccagttttgggagtgagagagggtctggggaagaactgttccagataaaaagatgtgtaaccaagatagcatagcacattctgacaactaaagcaatttactctaacttaagcatgaagtacaaaagtatagttcatttattgagggaatgttaagctattaaaatgatactttttggtacttttaaaaaaatgaatacttaaacaccgttttaaaattttgtgttaagagctcctaataagaacttggtaaacatgttgacaatttaactcacagtctaaactttaaaagtagtagttacccttttatttctgtgccatgagacaaattcttctgcagttttatagttgtacaagatgttttgactcactctcaattgccatattcttaaagaaaccctgaaaagctgctcaagctggtcagttttctgtaaaaccaagtaaatgaaattttctctcccctcagaaaggaagttctacagcctagagtaccatctattgtgttttataagtccagatttaggctttgaaagatcataccaaaacttcagatcgacttaaacagcaactatgaattaggtttatgggaaatgtagtaatacaggggaaagaatatcggtaatggagtgaaatggtcctgggttcaaatccagtcttcctcacatattgtgctctttaagcttcaaatgagatgtataactgccttttccttaccagtaaaatgaggacaataattatgacaccatagggtggttgtgaggattagcaaatgttatcttgtatttcaggtgcctttcagggaaaggcttggcacatagtaaacacatcctgtaaatatcagtttccccttgttagcccctgtagcatcctgacctaccaagtctataggccttgcatatcactgtgcaccagagatacctcttttacatctgggctctgttttctctctatcaatcctatcctccaccctctttaaatcagaccccaggtttaaccttcccacagtcagtataaatcatttttcagaactttcagctttccatcaagtgaaagttgattttagttacccagtaatgtacagaaaccttcaataatgttaagcttcaaaggcttctggtacgtttgtctaccacagaaccaccacaatatatatgcttgttcttaggtttattgctttttattttaatggggtttggttgtttgggttttattttggttttggcttattttaaagtcaagtttagtttttactcaggtaaaggcctgaagtttcttgggcgtggaagaaaaagcttgggaagcctattaattcatggtgcagttcagaattgtttaaataagctctgtgccactgagcttaatctgaaagtatagtgacatgtgaaggatgcacatatgaatgaaaaactaaaataattgtaggctcttctataaatgaaaaaaaaagtgattggattgtgtctacctttttcctcaaagtaatctaacctaaacggtcatggtgttaaaactttttatggtgctaatcagaaaaattgatgttgcaagaaatgaggtctcaaaaatgggaatgtgcctcctcactctgcgtcacatgggaaataaatcctgaggccaggatcaccagtggggtagagtcatcttcatagtctcctgttatcctccccctgaacaaagaacaaagtgagactgggaagctagtgttggggaaacatttctgggataaactgtggagtggagaagacaatggagggcaaggcaaaaacccacagacttgtttacccatagaggccccactcacctccatgctgacagaattccagaaaaattccttccctatctcccaaacacctgaaattctgaaatattgccctactatttagcactttaagcttcagtgaggtgctgtaatggagagatagcttcatagtttagcctatagccaactttgcctcaagacctccagataagatgaagtggcttttacctcatgtgagtctcaaacgctggagagagagttccacaaccacccctgccctttctcccatattacgctcattagaaagtctactcagggctgggtgccgtggctcatgcctgtaatcccagcactttggaggctgaggcgggtggatcatctgaggtcaggagttcgagaccagcctggccaacatggggaaaccctgtctctactgaaaatataaaaattagccgggcatggtggcgtgcacctgtaattccagctactcgggaggctgaggcaggagaatcacttgaaccccagaggcagaggctacagtgagccaagattgcaccactgcactccaacctgggtgatagaataagactcttgtctcaaggaaagaaaaaatgtctactcagtagagcagtgattggcaaagtgtgagaccccagaccggcaatattggcatctcctggagacttgtttaaaatgctgattactattttcaagaactttctaccttcatttttacttattttttgttttcaagggctcatggaatcagtcttccatgtgacagctttttaaatattttaagacaaaaactgagtcttctaatcttaattgtgttctagcagtagtcattgtaattatagttatttttataatttatttgtttagtgtatatctgtcactctagaatgtaggctccctgagataaaaactataattcttttgatggcagttacattcccaactcttagcacaagatctaggacatagtatgaactcaataaatttttgttgaatgaaagaaaaatgcaaatttataagccttttcagagacctactgaatcaaactctgagagtggagcccagcaatctgttgtaaaagctgtttgagtaatactgttgcactctaagcttgagaaccactgcaatagaactaagagaacattcatttcaccttcaggcctattctctgacatcacttgaaaaatcctctctgccttctgtaacccttaaccaacaacagtgccctgtccatgtaggggaaacttctgggctgtattacaagtgggtaggaaggtataaggatatcatagtgggaagtattgcttagaatgccagtacttgtttgctgtggaaggtttctaggaatggattgcttagtctaaagtaagcactaccaccatccacgttttcactcaacacagtgccttttaattggtgactaacatcaaaacaccttgacaaaccgttaaaacagtatcagaaaccatgtgtacatccctgtgcctcttagattgctaagttctgctctcattcttacttcaaaggacactttttaaagaattgttaatgcttttttataatacaagtcatagccctgttggcaaaaagaaaaaagattcagtgagaaagaaaaatcactgataattccatcatccagggagaaccactgttatttaagtatatggccttccagacttttctgtgcatttatagatatttttaatgggatcaaagtgtacatactgttttgtaactttttttcactcaacaataccatgactgtcttgctgtgtcaagtatatttctacatctcttaatggctgcatgatattccatcatatgtgccacattttattaaactactgttcaatttttaggtttccaactttcattaataaagtgctttaaagaacattgtgttgctaaatctc

SEQ ID NO: 335820 - DNA, 6041 bp, Homo sapiens
aagaatcctttgaatgaacctaaaaactggtgctagcaacaagtgtttggcaactaaacgcaaggtgaaaatcctatggcttcactctaaagtcttttgcatttgagactgaagactctttaacttcaaagtaaaaactgtagtaataattgagaatttttgcagcaatattactttatacttgtaaaactggtcatcttaaaattttgtaaaatagtaaaatttagcaaaattgatactagaaaatttatgaaaatatcttggctttctcttagtagtttttgtaggctcttaagagtgtatcattaagctttagcgtaacagattcttttcaatcaagtactggaatcagttgtccaggtggagtaatacagaaaagctaaggtctagaaaccaggggaccattttagatacaaagcagaattgcggaattgccagattataacttgaggtttgttcgggggattttttttaaccatctaaaataaatgtatataagatggactgagtcttctaaagagattctaaaactatattcttacttaagtctgaacaggaattaagaataactcaaagtgaatttgatcgtcaagcagagattaccagacttctgctagagggaatcagcagtacacatgcccatcaccttcgctgtctgaatgactttgtagaagcccagatgacttactatgcacagtgttaccagtatatgttggacctccagaaacaactgggaagttttccatccaattatcttagtaacaacaatcagacttctgtgacacctgtaccatcagttttaccaaatgcgattggttcttctgccatggcttcaacaagtggcctagtaatcacctctccttccaacctcagtgaccttaaggagtgtagtggcagcagaaaggccagggttctctatgattatgatgcagcaaacagtactgaattatcacttctggcagatgaggtgatcactgtgttcagtgttgttggaatggattcagactggctaatgggggaaaggggaaaccagaagggcaaggtgccaattacctacttagaactgctcaattaagtaggtggactatggaaaggttgcccatcatgactttgtatttatatacaattaactctaaataaagcaggttaagtatcttccatgttaatgtgttaagagactgaaaataccagccatcagaaactggcctttctgccaataaagttgcatggtaaatatttcattacagaatttatgttagagctttcatgccaagaatgttttcttacaaaattctctttttattgaggtttcactaataagcagcttctacttttgagcctcaacttaaagcagaactgttttctactggatttttcattaacagcaagctttttcttttatgtaaaataaatctattgtgaattgatatcagcgactcatttattaggtataaataatagccaaagaataaaattaaaatttattttaaactttcggtcttaaaaagagctgtaggatataaacctcttttgtgaaaagtagaattttctgaatgctttcatagacaaaaacgcatttaaactatgtttacctggttttccaacagaaatcaaatgattttaatattatgttttgatgggttattttcagagttgtttggttttttaaacactactgaatggtttcttttaaatttaagaacaactagttcttgaaaagcaataccgtatttctctgataaatttgtagttaaggttctagaaaatctaggacaaatttacttcattaaacataaagtttttaagattattcagttggcacaatttaatgcataattgggattggatccatttactgtactgtggtacagtaaagagaatgtgttcttattgaacagcagatttgtatacaaatacggaataatgcaactacattataaattgtatacgaacaaaataaattgggtcactctgagcttactattaaaacattgaaaatttattaatgaacacaggctatcttgatgaggatctctgcttatgaaacacatactaatgaaattattagtgacacattggaagctagaaaattgctgttggggccattgctataaatcattgtttccatgttaagacttctgttctaattcattcattcaacaaacatttgttgagggccagatactgtgctggtcaactggggatactgtcctgaacaatatgcacacagttcttgcccctgcagagcttaaagaccattaaaggatacagaaaattaagcaattatcctatagtaggattcgtggtgtgatggggaaaatacaaggtactgtatttgggagtcatgtaactccagttttgggagtgagagagggtctggggaagaactgttccagataaaaagatgtgtaaccaagatagcatagcacattctgacaactaaagcaatttactctaacttaagcatgaagtacaaaagtatagttcatttattgagggaatgttaagctattaaaatgatactttttggtacttttaaaaaaatgaatacttaaacaccgttttaaaattttgtgttaagagctcctaataagaacttggtaaacatgttgacaatttaactcacagtctaaactttaaaagtagtagttacccttttatttctgtgccatgagacaaattcttctgcagttttatagttgtacaagatgttttgactcactctcaattgccatattcttaaagaaaccctgaaaagctgctcaagctggtcagttttctgtaaaaccaagtaaatgaaattttctctcccctcagaaaggaagttctacagcctagagtaccatctattgtgttttataagtccagatttaggctttgaaagatcataccaaaacttcagatcgacttaaacagcaactatgaattaggtttatgggaaatgtagtaatacaggggaaagaatatcggtaatggagtgaaatggtcctgggttcaaatccagtcttcctcacatattgtgctctttaagcttcaaatgagatgtataactgccttttccttaccagtaaaatgaggacaataattatgacaccatagggtggttgtgaggattagcaaatgttatcttgtatttcaggtgcctttcagggaaaggcttggcacatagtaaacacatcctgtaaatatcagtttccccttgttagcccctgtagcatcctgacctaccaagtctataggccttgcatatcactgtgcaccagagatacctcttttacatctgggctctgttttctctctatcaatcctatcctccaccctctttaaatcagaccccaggtttaaccttcccacagtcagtataaatcatttttcagaactttcagctttccatcaagtgaaagttgattttagttacccagtaatgtacagaaaccttcaataatgttaagcttcaaaggcttctggtacgtttgtctaccacagaaccaccacaatatatatgcttgttcttaggtttattgctttttattttaatggggtttggttgtttgggttttattttggttttggcttattttaaagtcaagtttagtttttactcaggtaaaggcctgaagtttcttgggcgtggaagaaaaagcttgggaagcctattaattcatggtgcagttcagaattgtttaaataagctctgtgccactgagcttaatctgaaagtatagtgacatgtgaaggatgcacatatgaatgaaaaactaaaataattgtaggctcttctataaatgaaaaaaaaagtgattggattgtgtctacctttttcctcaaagtaatctaacctaaacggtcatggtgttaaaactttttatggtgctaatcagaaaaattgatgttgcaagaaatgaggtctcaaaaatgggaatgtgcctcctcactctgcgtcacatgggaaataaatcctgaggccaggatcaccagtggggtagagtcatcttcatagtctcctgttatcctccccctgaacaaagaacaaagtgagactgggaagctagtgttggggaaacatttctgggataaactgtggagtggagaagacaatggagggcaaggcaaaaacccacagacttgtttacccatagaggccccactcacctccatgctgacagaattccagaaaaattccttccctatctcccaaacacctgaaattctgaaatattgccctactatttagcactttaagcttcagtgaggtgctgtaatggagagatagcttcatagtttagcctatagccaactttgcctcaagacctccagataagatgaagtggcttttacctcatgtgagtctcaaacgctggagagagagttccacaaccacccctgccctttctcccatattacgctcattagaaagtctactcagggctgggtgccgtggctcatgcctgtaatcccagcactttggaggctgaggcgggtggatcatctgaggtcaggagttcgagaccagcctggccaacatggggaaaccctgtctctactgaaaatataaaaattagccgggcatggtggcgtgcacctgtaattccagctactcgggaggctgaggcaggagaatcacttgaaccccagaggcagaggctacagtgagccaagattgcaccactgcactccaacctgggtgatagaataagactcttgtctcaaggaaagaaaaaatgtctactcagtagagcagtgattggcaaagtgtgagaccccagaccggcaatattggcatctcctggagacttgtttaaaatgctgattactattttcaagaactttctaccttcatttttacttattttttgttttcaagggctcatggaatcagtcttccatgtgacagctttttaaatattttaagacaaaaactgagtcttctaatcttaattgtgttctagcagtagtcattgtaattatagttatttttataatttatttgtttagtgtatatctgtcactctagaatgtaggctccctgagataaaaactataattcttttgatggcagttacattcccaactcttagcacaagatctaggacatagtatgaactcaataaatttttgttgaatgaaagaaaaatgcaaatttataagccttttcagagacctactgaatcaaactctgagagtggagcccagcaatctgttgtaaaagctgtttgagtaatactgttgcactctaagcttgagaaccactgcaatagaactaagagaacattcatttcaccttcaggcctattctctgacatcacttgaaaaatcctctctgccttctgtaacccttaaccaacaacagtgccctgtccatgtaggggaaacttctgggctgtattacaagtgggtaggaaggtataaggatatcatagtgggaagtattgcttagaatgccagtacttgtttgctgtggaaggtttctaggaatggattgcttagtctaaagtaagcactaccaccatccacgttttcactcaacacagtgccttttaattggtgactaacatcaaaacaccttgacaaaccgttaaaacagtatcagaaaccatgtgtacatccctgtgcctcttagattgctaagttctgctctcattcttacttcaaaggacactttttaaagaattgttaatgcttttttataatacaagtcatagccctgttggcaaaaagaaaaaagattcagtgagaaagaaaaatcactgataattccatcatccagggagaaccactgttatttaagtatatggccttccagacttttctgtgcatttatagatatttttaatgggatcaaagtgtacatactgttttgtaactttttttcactcaacaataccatgactgtcttgctgtgtcaagtatatttctacatctcttaatggctgcatgatattccatcatatgtgccacattttattaaactactgttcaatttttaggtttccaactttcattaataaagtgctttaaagaacattgtgttgctaaatctc

SEQ ID NO: 335821 - DNA, 6211 bp, Homo sapiens
cgcttgtttttcccttgggacccgggtccacacggcggggtcgcccgtccatctccggctcgcccgcggggcccatcgtcgacgttagcggccgttctccgagccgactgacccatccttggcgctgccgccgcgcgcttgttctcctccctcgccccgccttcatcctccccgttcacggaaacgacagctgcggctgcggggctggcgccgcctccctccacctaccacgtctgccctcgccgctctagccctgcgccccagcccggccgcggcacctccgcctcgccgccgctaggtcggccggctccgcccggctgccgcctaggatgaatatcatggacttcaacgtgaagaagctggcggccgacgcaggcaccttcctcagtcgcgccgtgcagttcacagaagaaaagcttggccaggctgagaagacagaattggatgctcacttagagaacctccttagcaaagctgaatgtaccaaaatatggacagaaaaaataatgaaacaaactgaagtgttattgcagccaaatccaaatgccaggatagaagaatttgtttatgagaaactggatagaaaagctccaagtcgtataaacaacccagaacttttgggacaatatatgattgatgcagggactgagtttggcccaggaacagcttatggtaatgcccttattaaatgtggagaaacccaaaaaagaattggaacagcagacagagaactgattcaaacgtcagccttaaattttcttactcctttaagaaactttatagaaggagattacaaaacaattgctaaagaaaggaaactattgcaaaataagagactggatttggatgctgcaaaaacgagactaaaaaaggcaaaagctgcagaaactagaaattcatctgaacaggaattaagaataactcaaagtgaatttgatcgtcaagcagagattaccagacttctgctagagggaatcagcagtacacatgcccatcaccttcgctgtctgaatgactttgtagaagcccagatgacttactatgcacagtgttaccagtatatgttggacctccagaaacaactgggaagttttccatccaattatcttagtaacaacaatcagacttctgtgacacctgtaccatcagttttaccaaatgcgattggattcagactggctaatgggggaaaggggaaaccagaagggcaaggtgccaattacctacttagaactgctcaattaagtaggtggactatggaaaggttgcccatcatgactttgtatttatatacaattaactctaaataaagcaggttaagtatcttccatgttaatgtgttaagagactgaaaataccagccatcagaaactggcctttctgccaataaagttgcatggtaaatatttcattacagaatttatgttagagctttcatgccaagaatgttttcttacaaaattctctttttattgaggtttcactaataagcagcttctacttttgagcctcaacttaaagcagaactgttttctactggatttttcattaacagcaagctttttcttttatgtaaaataaatctattgtgaattgatatcagcgactcatttattaggtataaataatagccaaagaataaaattaaaatttattttaaactttcggtcttaaaaagagctgtaggatataaacctcttttgtgaaaagtagaattttctgaatgctttcatagacaaaaacgcatttaaactatgtttacctggttttccaacagaaatcaaatgattttaatattatgttttgatgggttattttcagagttgtttggttttttaaacactactgaatggtttcttttaaatttaagaacaactagttcttgaaaagcaataccgtatttctctgataaatttgtagttaaggttctagaaaatctaggacaaatttacttcattaaacataaagtttttaagattattcagttggcacaatttaatgcataattgggattggatccatttactgtactgtggtacagtaaagagaatgtgttcttattgaacagcagatttgtatacaaatacggaataatgcaactacattataaattgtatacgaacaaaataaattgggtcactctgagcttactattaaaacattgaaaatttattaatgaacacaggctatcttgatgaggatctctgcttatgaaacacatactaatgaaattattagtgacacattggaagctagaaaattgctgttggggccattgctataaatcattgtttccatgttaagacttctgttctaattcattcattcaacaaacatttgttgagggccagatactgtgctggtcaactggggatactgtcctgaacaatatgcacacagttcttgcccctgcagagcttaaagaccattaaaggatacagaaaattaagcaattatcctatagtaggattcgtggtgtgatggggaaaatacaaggtactgtatttgggagtcatgtaactccagttttgggagtgagagagggtctggggaagaactgttccagataaaaagatgtgtaaccaagatagcatagcacattctgacaactaaagcaatttactctaacttaagcatgaagtacaaaagtatagttcatttattgagggaatgttaagctattaaaatgatactttttggtacttttaaaaaaatgaatacttaaacaccgttttaaaattttgtgttaagagctcctaataagaacttggtaaacatgttgacaatttaactcacagtctaaactttaaaagtagtagttacccttttatttctgtgccatgagacaaattcttctgcagttttatagttgtacaagatgttttgactcactctcaattgccatattcttaaagaaaccctgaaaagctgctcaagctggtcagttttctgtaaaaccaagtaaatgaaattttctctcccctcagaaaggaagttctacagcctagagtaccatctattgtgttttataagtccagatttaggctttgaaagatcataccaaaacttcagatcgacttaaacagcaactatgaattaggtttatgggaaatgtagtaatacaggggaaagaatatcggtaatggagtgaaatggtcctgggttcaaatccagtcttcctcacatattgtgctctttaagcttcaaatgagatgtataactgccttttccttaccagtaaaatgaggacaataattatgacaccatagggtggttgtgaggattagcaaatgttatcttgtatttcaggtgcctttcagggaaaggcttggcacatagtaaacacatcctgtaaatatcagtttccccttgttagcccctgtagcatcctgacctaccaagtctataggccttgcatatcactgtgcaccagagatacctcttttacatctgggctctgttttctctctatcaatcctatcctccaccctctttaaatcagaccccaggtttaaccttcccacagtcagtataaatcatttttcagaactttcagctttccatcaagtgaaagttgattttagttacccagtaatgtacagaaaccttcaataatgttaagcttcaaaggcttctggtacgtttgtctaccacagaaccaccacaatatatatgcttgttcttaggtttattgctttttattttaatggggtttggttgtttgggttttattttggttttggcttattttaaagtcaagtttagtttttactcaggtaaaggcctgaagtttcttgggcgtggaagaaaaagcttgggaagcctattaattcatggtgcagttcagaattgtttaaataagctctgtgccactgagcttaatctgaaagtatagtgacatgtgaaggatgcacatatgaatgaaaaactaaaataattgtaggctcttctataaatgaaaaaaaaagtgattggattgtgtctacctttttcctcaaagtaatctaacctaaacggtcatggtgttaaaactttttatggtgctaatcagaaaaattgatgttgcaagaaatgaggtctcaaaaatgggaatgtgcctcctcactctgcgtcacatgggaaataaatcctgaggccaggatcaccagtggggtagagtcatcttcatagtctcctgttatcctccccctgaacaaagaacaaagtgagactgggaagctagtgttggggaaacatttctgggataaactgtggagtggagaagacaatggagggcaaggcaaaaacccacagacttgtttacccatagaggccccactcacctccatgctgacagaattccagaaaaattccttccctatctcccaaacacctgaaattctgaaatattgccctactatttagcactttaagcttcagtgaggtgctgtaatggagagatagcttcatagtttagcctatagccaactttgcctcaagacctccagataagatgaagtggcttttacctcatgtgagtctcaaacgctggagagagagttccacaaccacccctgccctttctcccatattacgctcattagaaagtctactcagggctgggtgccgtggctcatgcctgtaatcccagcactttggaggctgaggcgggtggatcatctgaggtcaggagttcgagaccagcctggccaacatggggaaaccctgtctctactgaaaatataaaaattagccgggcatggtggcgtgcacctgtaattccagctactcgggaggctgaggcaggagaatcacttgaaccccagaggcagaggctacagtgagccaagattgcaccactgcactccaacctgggtgatagaataagactcttgtctcaaggaaagaaaaaatgtctactcagtagagcagtgattggcaaagtgtgagaccccagaccggcaatattggcatctcctggagacttgtttaaaatgctgattactattttcaagaactttctaccttcatttttacttattttttgttttcaagggctcatggaatcagtcttccatgtgacagctttttaaatattttaagacaaaaactgagtcttctaatcttaattgtgttctagcagtagtcattgtaattatagttatttttataatttatttgtttagtgtatatctgtcactctagaatgtaggctccctgagataaaaactataattcttttgatggcagttacattcccaactcttagcacaagatctaggacatagtatgaactcaataaatttttgttgaatgaaagaaaaatgcaaatttataagccttttcagagacctactgaatcaaactctgagagtggagcccagcaatctgttgtaaaagctgtttgagtaatactgttgcactctaagcttgagaaccactgcaatagaactaagagaacattcatttcaccttcaggcctattctctgacatcacttgaaaaatcctctctgccttctgtaacccttaaccaacaacagtgccctgtccatgtaggggaaacttctgggctgtattacaagtgggtaggaaggtataaggatatcatagtgggaagtattgcttagaatgccagtacttgtttgctgtggaaggtttctaggaatggattgcttagtctaaagtaagcactaccaccatccacgttttcactcaacacagtgccttttaattggtgactaacatcaaaacaccttgacaaaccgttaaaacagtatcagaaaccatgtgtacatccctgtgcctcttagattgctaagttctgctctcattcttacttcaaaggacactttttaaagaattgttaatgcttttttataatacaagtcatagccctgttggcaaaaagaaaaaagattcagtgagaaagaaaaatcactgataattccatcatccagggagaaccactgttatttaagtatatggccttccagacttttctgtgcatttatagatatttttaatgggatcaaagtgtacatactgttttgtaactttttttcactcaacaataccatgactgtcttgctgtgtcaagtatatttctacatctcttaatggctgcatgatattccatcatatgtgccacattttattaaactactgttcaatttttaggtttccaactttcattaataaagtgctttaaagaacattgtgttgctaaatctc

SEQ ID NO: 335822 - DNA, 1512 bp, Homo sapiens
cgcttgtttttcccttgggacccgggtccacacggcggggtcgcccgtccatctccggctcgcccgcggggcccatcgtcgacgttagcggccgttctccgagccgactgacccatccttggcgctgccgccgcgcgcttgttctcctccctcgccccgccttcatcctccccgttcacggaaacgacagctgcggctgcggggctggcgccgcctccctccacctaccacgtctgccctcgccgctctagccctgcgccccagcccggccgcggcacctccgcctcgccgccgctaggtcggccggctccgcccggctgccgcctaggatgaatatcatggacttcaacgtgaagaagctggcggccgacgcaggcaccttcctcagtcgcgccgtgcagttcacagaagaaaagcttggccaggctgagaagacagaattggatgctcacttagagaacctccttagcaaagctgaatgtaccaaaatatggacagaaaaaataatgaaacaaactgaagtgttattgcagccaaatccaaatgccaggatagaagaatttgtttatgagaaactggatagaaaagctccaagtcgtataaacaacccagaacttttgggacaatatatgattgatgcagggactgagtttggcccaggaacagcttatggtaatgcccttattaaatgtggagaaacccaaaaaagaattggaacagcagacagagaactgattcaaacgtcagccttaaattttcttactcctttaagaaactttatagaaggagattacaaaacaattgctaaagaaaggaaactattgcaaaataagagactggatttggatgctgcaaaaacgagactaaaaaaggcaaaagctgcagaaactagaaattcatctgaacaggaattaagaataactcaaagtgaatttgatcgtcaagcagagattaccagacttctgctagagggaatcagcagtacacatgcccatcaccttcgctgtctgaatgactttgtagaagcccagatgacttactatgcacagtgttaccagtatatgttggacctccagaaacaactgggaagttttccatccaattatcttagtaacaacaatcagacttctgtgacacctgtaccatcagttttaccaaatgcgattggttcttctgccatggcttcaacaagtggcctagtaatcacctctccttccaacctcagtgaccttaaggagtgtagtggcagcagaaaggccagggttctctatgattatgatgcagcaaacagtactgaattatcacttctggcagatgaggtgatcactgtgttcagtgttgttggaatggattcagactggctaatgggggaaaggggaaaccagaagggcaaggtgccaattacctacttagaactgctcaattaagtaggtggactatggaaaggttgcccatcatgactttgtatttatatacaattaactctaaataaagcaggttaagtatcttcca

SEQ ID NO: 335823 - DNA, 936 bp, Homo sapiens
cgcttgtttttcccttgggacccgggtccacacggcggggtcgcccgtccatctccggctcgcccgcggggcccatcgtcgacgttagcggccgttctccgagccgactgacccatccttggcgctgccgccgcgcgcttgttctcctccctcgccccgccttcatcctccccgttcacggaaacgacagctgcggctgcggggctggcgccgcctccctccacctaccacgtctgccctcgccgctctagccctgcgccccagcccggccgcggcacctccgcctcgccgccgctaggtcggccggctccgcccggctgccgcctaggatgaatatcatggacttcaacgtgaagaagctggcggccgacgcaggcaccttcctcagtcgcgccgtgcagttcacagaagaaaagcttggccaggctgagaagacagaattggatgctcacttagagaacctccttagcaaagctgaatgtaccaaaatatggacagaaaaaataatgaaacaaactgaagtgttattgcagccaaatccaaatgccaggatagaagaatttgtttatgagaaactggatagaaaagctccaagtcgtataaacaacccagaacttttgggacaatatatgattgatgcagggactgagtttggcccaggaacagcttatggtaatgcccttattaaatgtggagaaacccaaaaaagaattggaacagcagacagagaactgattcaaacgtcagccttaaattttcttactcctttaagaaactttatagaaggagattacaaaacaattgctaaagaaaggaaactattgcaaaataagagactggatttggatgctgcaaaaacgagactaaaaaaggcaaagcttgcgaaccttaaatttatttgacagaatttaaattacctcagggaattttttcggc

SEQ ID NO: 335824 - DNA, 196 bp, Homo sapiens
gtaagtgaaatgcaaaaagttctaataagggatatctttatgtttagatttattagagatgtcattaacatattagtaggccgggtgcagtggctcacacctgtaatcccagcactttgggtggttgaggtgggcggatcatgaggtcaggagatcgagactatcctggctaacatggtgaaaccccgtctctact

SEQ ID NO: 335825 - DNA, 826 bp, Homo sapiens
cttgaggccaggagttcaagaccagcctgggcaacatagcgacacctcatctctacaaaaaatatgaaaaattagctgggcatggtggtgtgcgcctgtagtcccagctactcaggaggctaaggtgggaggatcgtttgaacacgaaaggtcaaggctgcagtgagccgtgatcatgctgctgcactacagcctgggcaacagagtgagaccctgcctcaaaaaactaataataataaataaatcctttgtttttcagcacaattgataataacgtttaaagtccttttggtgaataatttaaacaaattaaatacaaatctgattggttttctacttgtttatttttttaatgtagttaataactggaagtattttattttgcaggtgatcactgtgttcagtgttgttggaatggattcagactggctaatgggggaaaggggaaaccagaagggcaaggtgccaattacctacttagaactgctcaattaagtaggtggactatggaaaggttgcccatcatgactttgtatttatatacaattaactctaaataaagcaggttaagtatcttccatgttaatgtgttaagagactgaaaataccagccatcagaaactggcctttctgccaataaagttgcatggtaaatatttcattacagaatttatgttagagctttcatgccaagaatgttttcttacaaaattctctttttattgaggtttcactaataagcagcttctacttttgagcctcaacttaaagcagaactgttttctactggatttttcattaacagcaagctttttcttttatgtaa

SEQ ID NO: 335826 - DNA, 1035 bp, Homo sapiens
  misc_feature (944)..(944): n is a, c, g, or t
  misc_feature (964)..(964): n is a, c, g, or t
  misc_feature (982)..(982): n is a, c, g, or t
  misc_feature (997)..(997): n is a, c, g, or t
  misc_feature (1029)..(1029): n is a, c, g, or t
cgcttgtttttcccttgggacccgggtccacacggcggggtcgcccgtccatctccggctcgcccgcggggcccatcgtcgacgttagcggccgttctccgagccgactgacccatccttggcgctgccgccgcgcgcttgttctcctccctcgccccgccttcatcctccccgttcacggaaacgacagctgcggctgcggggctggcgccgcctccctccacctaccacgtctgccctcgccgctctagccctgcgccccagcccggccgcggcacctccgcctcgccgccgctaggtcggccggctccgcccggctgccgcctaggatgaatatcatggacttcaacgtgaagaagctggcggccgacgcaggcaccttcctcagtcgcgccgtgcagttcacagaagaaaagcttggccaggctgagaagacagaattggatgctcacttagagaacctccttagcaaagctgaatgtaccaaaatatggacagaaaaaataatgaaacaaactgaagtgttattgcagccaaatccaaatgccaggatagaagaatttgtttatgagaaactggatagaaaagctccaagtcgtataaacaacccagaacttttgggacaatatatgattgatgcagggactgagtttggcccaggaacagcttatggtaatgcccttattaaatgtggagaaacccaaaaaagaattggaacagcagacagagaactgattcaaacgtcagccttaaattttcttactcctttaagaaactttatagaaggagattacaaaacaattgctaaagaaaggaaactattgcaaaataagagactggatttggatgctgcaaaaacgagactaaaaaaggcaaaagctgcagaaactagaaattcatctggaacaaggaattaagaataactcaaaaggtggaatttgatnggtcaaagcaagaggattancaagactttctgcctaanagggggaaatcaagnaagttacaacaatggcccaatcaaaccttcgnctggtc

SEQ ID NO: 335827 - DNA, 6393 bp, Homo sapiens
cgcttgtttttcccttgggacccgggtccacacggcggggtcgcccgtccatctccggctcgcccgcggggcccatcgtcgacgttagcggccgttctccgagccgactgacccatccttggcgctgccgccgcgcgcttgttctcctccctcgccccgccttcatcctccccgttcacggaaacgacagctgcggctgcggggctggcgccgcctccctccacctaccacgtctgccctcgccgctctagccctgcgccccagcccggccgcggcacctccgcctcgccgccgctaggtcggccggctccgcccggctgccgcctaggatgaatatcatggacttcaacgtgaagaagctggcggccgacgcaggcaccttcctcagtcgcgccgtgcagttcacagaagaaaagcttggccaggctgagaagacagaattggatgctcacttagagaacctccttagcaaagctgaatgtaccaaaatatggacagaaaaaataatgaaacaaactgaagtgttattgcagccaaatccaaatgccaggatagaagaatttgtttatgagaaactggatagaaaagctccaagtcgtataaacaacccagaacttttgggacaatatatgattgatgcagggactgagtttggcccaggaacagcttatggtaatgcccttattaaatgtggagaaacccaaaaaagaattggaacagcagacagagaactgattcaaacgtcagccttaaattttcttactcctttaagaaactttatagaaggagattacaaaacaattgctaaagaaaggaaactattgcaaaataagagactggatttggatgctgcaaaaacgagactaaaaaaggcaaaagctgcagaaactagaaattcatctgaacaggaattaagaataactcaaagtgaatttgatcgtcaagcagagattaccagacttctgctagagggaatcagcagtacacatgcccatcaccttcgctgtctgaatgactttgtagaagcccagatgacttactatgcacagtgttaccagtatatgttggacctccagaaacaactgggaagttttccatccaattatcttagtaacaacaatcagacttctgtgacacctgtaccatcagttttaccaaatgcgattggttcttctgccatggcttcaacaagtggcctagtaatcacctctccttccaacctcagtgaccttaaggagtgtagtggcagcagaaaggccagggttctctatgattatgatgcagcaaacagtactgaattatcacttctggcagatgaggtgatcactgtgttcagtgttgttggaatggattcagactggctaatgggggaaaggggaaaccagaagggcaaggtgccaattacctacttagaactgctcaattaagtaggtggactatggaaaggttgcccatcatgactttgtatttatatacaattaactctaaataaagcaggttaagtatcttccatgttaatgtgttaagagactgaaaataccagccatcagaaactggcctttctgccaataaagttgcatggtaaatatttcattacagaatttatgttagagctttcatgccaagaatgttttcttacaaaattctctttttattgaggtttcactaataagcagcttctacttttgagcctcaacttaaagcagaactgttttctactggatttttcattaacagcaagctttttcttttatgtaaaataaatctattgtgaattgatatcagcgactcatttattaggtataaataatagccaaagaataaaattaaaatttattttaaactttcggtcttaaaaagagctgtaggatataaacctcttttgtgaaaagtagaattttctgaatgctttcatagacaaaaacgcatttaaactatgtttacctggttttccaacagaaatcaaatgattttaatattatgttttgatgggttattttcagagttgtttggttttttaaacactactgaatggtttcttttaaatttaagaacaactagttcttgaaaagcaataccgtatttctctgataaatttgtagttaaggttctagaaaatctaggacaaatttacttcattaaacataaagtttttaagattattcagttggcacaatttaatgcataattgggattggatccatttactgtactgtggtacagtaaagagaatgtgttcttattgaacagcagatttgtatacaaatacggaataatgcaactacattataaattgtatacgaacaaaataaattgggtcactctgagcttactattaaaacattgaaaatttattaatgaacacaggctatcttgatgaggatctctgcttatgaaacacatactaatgaaattattagtgacacattggaagctagaaaattgctgttggggccattgctataaatcattgtttccatgttaagacttctgttctaattcattcattcaacaaacatttgttgagggccagatactgtgctggtcaactggggatactgtcctgaacaatatgcacacagttcttgcccctgcagagcttaaagaccattaaaggatacagaaaattaagcaattatcctatagtaggattcgtggtgtgatggggaaaatacaaggtactgtatttgggagtcatgtaactccagttttgggagtgagagagggtctggggaagaactgttccagataaaaagatgtgtaaccaagatagcatagcacattctgacaactaaagcaatttactctaacttaagcatgaagtacaaaagtatagttcatttattgagggaatgttaagctattaaaatgatactttttggtacttttaaaaaaatgaatacttaaacaccgttttaaaattttgtgttaagagctcctaataagaacttggtaaacatgttgacaatttaactcacagtctaaactttaaaagtagtagttacccttttatttctgtgccatgagacaaattcttctgcagttttatagttgtacaagatgttttgactcactctcaattgccatattcttaaagaaaccctgaaaagctgctcaagctggtcagttttctgtaaaaccaagtaaatgaaattttctctcccctcagaaaggaagttctacagcctagagtaccatctattgtgttttataagtccagatttaggctttgaaagatcataccaaaacttcagatcgacttaaacagcaactatgaattaggtttatgggaaatgtagtaatacaggggaaagaatatcggtaatggagtgaaatggtcctgggttcaaatccagtcttcctcacatattgtgctctttaagcttcaaatgagatgtataactgccttttccttaccagtaaaatgaggacaataattatgacaccatagggtggttgtgaggattagcaaatgttatcttgtatttcaggtgcctttcagggaaaggcttggcacatagtaaacacatcctgtaaatatcagtttccccttgttagcccctgtagcatcctgacctaccaagtctataggccttgcatatcactgtgcaccagagatacctcttttacatctgggctctgttttctctctatcaatcctatcctccaccctctttaaatcagaccccaggtttaaccttcccacagtcagtataaatcatttttcagaactttcagctttccatcaagtgaaagttgattttagttacccagtaatgtacagaaaccttcaataatgttaagcttcaaaggcttctggtacgtttgtctaccacagaaccaccacaatatatatgcttgttcttaggtttattgctttttattttaatggggtttggttgtttgggttttattttggttttggcttattttaaagtcaagtttagtttttactcaggtaaaggcctgaagtttcttgggcgtggaagaaaaagcttgggaagcctattaattcatggtgcagttcagaattgtttaaataagctctgtgccactgagcttaatctgaaagtatagtgacatgtgaaggatgcacatatgaatgaaaaactaaaataattgtaggctcttctataaatgaaaaaaaaagtgattggattgtgtctacctttttcctcaaagtaatctaacctaaacggtcatggtgttaaaactttttatggtgctaatcagaaaaattgatgttgcaagaaatgaggtctcaaaaatgggaatgtgcctcctcactctgcgtcacatgggaaataaatcctgaggccaggatcaccagtggggtagagtcatcttcatagtctcctgttatcctccccctgaacaaagaacaaagtgagactgggaagctagtgttggggaaacatttctgggataaactgtggagtggagaagacaatggagggcaaggcaaaaacccacagacttgtttacccatagaggccccactcacctccatgctgacagaattccagaaaaattccttccctatctcccaaacacctgaaattctgaaatattgccctactatttagcactttaagcttcagtgaggtgctgtaatggagagatagcttcatagtttagcctatagccaactttgcctcaagacctccagataagatgaagtggcttttacctcatgtgagtctcaaacgctggagagagagttccacaaccacccctgccctttctcccatattacgctcattagaaagtctactcagggctgggtgccgtggctcatgcctgtaatcccagcactttggaggctgaggcgggtggatcatctgaggtcaggagttcgagaccagcctggccaacatggggaaaccctgtctctactgaaaatataaaaattagccgggcatggtggcgtgcacctgtaattccagctactcgggaggctgaggcaggagaatcacttgaaccccagaggcagaggctacagtgagccaagattgcaccactgcactccaacctgggtgatagaataagactcttgtctcaaggaaagaaaaaatgtctactcagtagagcagtgattggcaaagtgtgagaccccagaccggcaatattggcatctcctggagacttgtttaaaatgctgattactattttcaagaactttctaccttcatttttacttattttttgttttcaagggctcatggaatcagtcttccatgtgacagctttttaaatattttaagacaaaaactgagtcttctaatcttaattgtgttctagcagtagtcattgtaattatagttatttttataatttatttgtttagtgtatatctgtcactctagaatgtaggctccctgagataaaaactataattcttttgatggcagttacattcccaactcttagcacaagatctaggacatagtatgaactcaataaatttttgttgaatgaaagaaaaatgcaaatttataagccttttcagagacctactgaatcaaactctgagagtggagcccagcaatctgttgtaaaagctgtttgagtaatactgttgcactctaagcttgagaaccactgcaatagaactaagagaacattcatttcaccttcaggcctattctctgacatcacttgaaaaatcctctctgccttctgtaacccttaaccaacaacagtgccctgtccatgtaggggaaacttctgggctgtattacaagtgggtaggaaggtataaggatatcatagtgggaagtattgcttagaatgccagtacttgtttgctgtggaaggtttctaggaatggattgcttagtctaaagtaagcactaccaccatccacgttttcactcaacacagtgccttttaattggtgactaacatcaaaacaccttgacaaaccgttaaaacagtatcagaaaccatgtgtacatccctgtgcctcttagattgctaagttctgctctcattcttacttcaaaggacactttttaaagaattgttaatgcttttttataatacaagtcatagccctgttggcaaaaagaaaaaagattcagtgagaaagaaaaatcactgataattccatcatccagggagaaccactgttatttaagtatatggccttccagacttttctgtgcatttatagatatttttaatgggatcaaagtgtacatactgttttgtaactttttttcactcaacaataccatgactgtcttgctgtgtcaagtatatttctacatctcttaatggctgcatgatattccatcatatgtgccacattttattaaactactgttcaatttttaggtttccaactttcattaataaagtgctttaaagaacattgtgttgctaaatctc

SEQ ID NO: 335828 - DNA, 6456 bp, Homo sapiens
cgcttgtttttcccttgggacccgggtccacacggcggggtcgcccgtccatctccggctcgcccgcggggcccatcgtcgacgttagcggccgttctccgagccgactgacccatccttggcgctgccgccgcgcgcttgttctcctccctcgccccgccttcatcctccccgttcacggaaacgacagctgcggctgcggggctggcgccgcctccctccacctaccacgtctgccctcgccgctctagccctgcgccccagcccggccgcggcacctccgcctcgccgccgctaggtcggccggctccgcccggctgccgcctaggatgaatatcatggacttcaacgtgaagaagctggcggccgacgcaggcaccttcctcagtcgcgccgtgcagttcacagaagaaaagcttggccaggctgagaagacagaattggatgctcacttagagaacctccttagcaaagctgaatgtaccaaaatatggacagaaaaaataatgaaacaaactgaagtgttattgcagccaaatccaaatgccaggatagaagaatttgtttatgagaaactggatagaaaagctccaagtcgtataaacaacccagaacttttgggacaatatatgattgatgcagggactgagtttggcccaggaacagcttatggtaatgcccttattaaatgtggagaaacccaaaaaagaattggaacagcagacagagaactgattcaaacgtcagccttaaattttcttactcctttaagaaactttatagaaggagattacaaaacaattgctaaagaaaggaaactattgcaaaataagagactggatttggatgctgcaaaaacgagactaaaaaaggcaaaagctgcagaaactagaaattcacaactaaactcagctcgccttgaaggagataacattatgatttgggcagaggaggtgacaaaatctgaacaggaattaagaataactcaaagtgaatttgatcgtcaagcagagattaccagacttctgctagagggaatcagcagtacacatgcccatcaccttcgctgtctgaatgactttgtagaagcccagatgacttactatgcacagtgttaccagtatatgttggacctccagaaacaactgggaagttttccatccaattatcttagtaacaacaatcagacttctgtgacacctgtaccatcagttttaccaaatgcgattggttcttctgccatggcttcaacaagtggcctagtaatcacctctccttccaacctcagtgaccttaaggagtgtagtggcagcagaaaggccagggttctctatgattatgatgcagcaaacagtactgaattatcacttctggcagatgaggtgatcactgtgttcagtgttgttggaatggattcagactggctaatgggggaaaggggaaaccagaagggcaaggtgccaattacctacttagaactgctcaattaagtaggtggactatggaaaggttgcccatcatgactttgtatttatatacaattaactctaaataaagcaggttaagtatcttccatgttaatgtgttaagagactgaaaataccagccatcagaaactggcctttctgccaataaagttgcatggtaaatatttcattacagaatttatgttagagctttcatgccaagaatgttttcttacaaaattctctttttattgaggtttcactaataagcagcttctacttttgagcctcaacttaaagcagaactgttttctactggatttttcattaacagcaagctttttcttttatgtaaaataaatctattgtgaattgatatcagcgactcatttattaggtataaataatagccaaagaataaaattaaaatttattttaaactttcggtcttaaaaagagctgtaggatataaacctcttttgtgaaaagtagaattttctgaatgctttcatagacaaaaacgcatttaaactatgtttacctggttttccaacagaaatcaaatgattttaatattatgttttgatgggttattttcagagttgtttggttttttaaacactactgaatggtttcttttaaatttaagaacaactagttcttgaaaagcaataccgtatttctctgataaatttgtagttaaggttctagaaaatctaggacaaatttacttcattaaacataaagtttttaagattattcagttggcacaatttaatgcataattgggattggatccatttactgtactgtggtacagtaaagagaatgtgttcttattgaacagcagatttgtatacaaatacggaataatgcaactacattataaattgtatacgaacaaaataaattgggtcactctgagcttactattaaaacattgaaaatttattaatgaacacaggctatcttgatgaggatctctgcttatgaaacacatactaatgaaattattagtgacacattggaagctagaaaattgctgttggggccattgctataaatcattgtttccatgttaagacttctgttctaattcattcattcaacaaacatttgttgagggccagatactgtgctggtcaactggggatactgtcctgaacaatatgcacacagttcttgcccctgcagagcttaaagaccattaaaggatacagaaaattaagcaattatcctatagtaggattcgtggtgtgatggggaaaatacaaggtactgtatttgggagtcatgtaactccagttttgggagtgagagagggtctggggaagaactgttccagataaaaagatgtgtaaccaagatagcatagcacattctgacaactaaagcaatttactctaacttaagcatgaagtacaaaagtatagttcatttattgagggaatgttaagctattaaaatgatactttttggtacttttaaaaaaatgaatacttaaacaccgttttaaaattttgtgttaagagctcctaataagaacttggtaaacatgttgacaatttaactcacagtctaaactttaaaagtagtagttacccttttatttctgtgccatgagacaaattcttctgcagttttatagttgtacaagatgttttgactcactctcaattgccatattcttaaagaaaccctgaaaagctgctcaagctggtcagttttctgtaaaaccaagtaaatgaaattttctctcccctcagaaaggaagttctacagcctagagtaccatctattgtgttttataagtccagatttaggctttgaaagatcataccaaaacttcagatcgacttaaacagcaactatgaattaggtttatgggaaatgtagtaatacaggggaaagaatatcggtaatggagtgaaatggtcctgggttcaaatccagtcttcctcacatattgtgctctttaagcttcaaatgagatgtataactgccttttccttaccagtaaaatgaggacaataattatgacaccatagggtggttgtgaggattagcaaatgttatcttgtatttcaggtgcctttcagggaaaggcttggcacatagtaaacacatcctgtaaatatcagtttccccttgttagcccctgtagcatcctgacctaccaagtctataggccttgcatatcactgtgcaccagagatacctcttttacatctgggctctgttttctctctatcaatcctatcctccaccctctttaaatcagaccccaggtttaaccttcccacagtcagtataaatcatttttcagaactttcagctttccatcaagtgaaagttgattttagttacccagtaatgtacagaaaccttcaataatgttaagcttcaaaggcttctggtacgtttgtctaccacagaaccaccacaatatatatgcttgttcttaggtttattgctttttattttaatggggtttggttgtttgggttttattttggttttggcttattttaaagtcaagtttagtttttactcaggtaaaggcctgaagtttcttgggcgtggaagaaaaagcttgggaagcctattaattcatggtgcagttcagaattgtttaaataagctctgtgccactgagcttaatctgaaagtatagtgacatgtgaaggatgcacatatgaatgaaaaactaaaataattgtaggctcttctataaatgaaaaaaaaagtgattggattgtgtctacctttttcctcaaagtaatctaacctaaacggtcatggtgttaaaactttttatggtgctaatcagaaaaattgatgttgcaagaaatgaggtctcaaaaatgggaatgtgcctcctcactctgcgtcacatgggaaataaatcctgaggccaggatcaccagtggggtagagtcatcttcatagtctcctgttatcctccccctgaacaaagaacaaagtgagactgggaagctagtgttggggaaacatttctgggataaactgtggagtggagaagacaatggagggcaaggcaaaaacccacagacttgtttacccatagaggccccactcacctccatgctgacagaattccagaaaaattccttccctatctcccaaacacctgaaattctgaaatattgccctactatttagcactttaagcttcagtgaggtgctgtaatggagagatagcttcatagtttagcctatagccaactttgcctcaagacctccagataagatgaagtggcttttacctcatgtgagtctcaaacgctggagagagagttccacaaccacccctgccctttctcccatattacgctcattagaaagtctactcagggctgggtgccgtggctcatgcctgtaatcccagcactttggaggctgaggcgggtggatcatctgaggtcaggagttcgagaccagcctggccaacatggggaaaccctgtctctactgaaaatataaaaattagccgggcatggtggcgtgcacctgtaattccagctactcgggaggctgaggcaggagaatcacttgaaccccagaggcagaggctacagtgagccaagattgcaccactgcactccaacctgggtgatagaataagactcttgtctcaaggaaagaaaaaatgtctactcagtagagcagtgattggcaaagtgtgagaccccagaccggcaatattggcatctcctggagacttgtttaaaatgctgattactattttcaagaactttctaccttcatttttacttattttttgttttcaagggctcatggaatcagtcttccatgtgacagctttttaaatattttaagacaaaaactgagtcttctaatcttaattgtgttctagcagtagtcattgtaattatagttatttttataatttatttgtttagtgtatatctgtcactctagaatgtaggctccctgagataaaaactataattcttttgatggcagttacattcccaactcttagcacaagatctaggacatagtatgaactcaataaatttttgttgaatgaaagaaaaatgcaaatttataagccttttcagagacctactgaatcaaactctgagagtggagcccagcaatctgttgtaaaagctgtttgagtaatactgttgcactctaagcttgagaaccactgcaatagaactaagagaacattcatttcaccttcaggcctattctctgacatcacttgaaaaatcctctctgccttctgtaacccttaaccaacaacagtgccctgtccatgtaggggaaacttctgggctgtattacaagtgggtaggaaggtataaggatatcatagtgggaagtattgcttagaatgccagtacttgtttgctgtggaaggtttctaggaatggattgcttagtctaaagtaagcactaccaccatccacgttttcactcaacacagtgccttttaattggtgactaacatcaaaacaccttgacaaaccgttaaaacagtatcagaaaccatgtgtacatccctgtgcctcttagattgctaagttctgctctcattcttacttcaaaggacactttttaaagaattgttaatgcttttttataatacaagtcatagccctgttggcaaaaagaaaaaagattcagtgagaaagaaaaatcactgataattccatcatccagggagaaccactgttatttaagtatatggccttccagacttttctgtgcatttatagatatttttaatgggatcaaagtgtacatactgttttgtaactttttttcactcaacaataccatgactgtcttgctgtgtcaagtatatttctacatctcttaatggctgcatgatattccatcatatgtgccacattttattaaactactgttcaatttttaggtttccaactttcattaataaagtgctttaaagaacattgtgttgctaaatctc

SEQ ID NO: 335829 - DNA, 5908 bp, Homo sapiens
tccctgaacgctgcctgctgaggtaaccagtggagacagaggctggagactccagggtttgggagcagtggagtaagcgagggagcagtcttggaggacatacaacaggattcaagatatagagaattaaataggagcaagaatggaggggttggggagagttacagacacagatgaatgagaggggagagaggaacagcaggcaaggaagctcttgctttaggggctgtcttctgtgaagtagacagtgagctcagtcatttgtggaggacaaagatggaggcatgggtggggaaaaaaaaagggatcaaaacaattgctaaagaaaggaaactattgcaaaataagagactggatttggatgctgcaaaaacgagactaaaaaaggcaaaagctgcagaaactagaaattcatctgaacaggaattaagaataactcaaagtgaatttgatcgtcaagcagagattaccagacttctgctagagggaatcagcagtacacatgcccatcaccttcgctgtctgaatgactttgtagaagcccagatgacttactatgcacagtgttaccagtatatgttggacctccagaaacaactgggaagttttccatccaattatcttagtaacaacaatcagacttctgtgacacctgtaccatcagttttaccaaatgcgattggttcttctgccatggcttcaacaagtggcctagtaatcacctctccttccaacctcagtgaccttaaggagtgtagtggcagcagaaaggccagggttctctatgattatgatgcagcaaacagtactgaattatcacttctggcagatgaggtgatcactgtgttcagtgttgttggaatggattcagactggctaatgggggaaaggggaaaccagaagggcaaggtgccaattacctacttagaactgctcaattaagtaggtggactatggaaaggttgcccatcatgactttgtatttatatacaattaactctaaataaagcaggttaagtatcttccatgttaatgtgttaagagactgaaaataccagccatcagaaactggcctttctgccaataaagttgcatggtaaatatttcattacagaatttatgttagagctttcatgccaagaatgttttcttacaaaattctctttttattgaggtttcactaataagcagcttctacttttgagcctcaacttaaagcagaactgttttctactggatttttcattaacagcaagctttttcttttatgtaaaataaatctattgtgaattgatatcagcgactcatttattaggtataaataatagccaaagaataaaattaaaatttattttaaactttcggtcttaaaaagagctgtaggatataaacctcttttgtgaaaagtagaattttctgaatgctttcatagacaaaaacgcatttaaactatgtttacctggttttccaacagaaatcaaatgattttaatattatgttttgatgggttattttcagagttgtttggttttttaaacactactgaatggtttcttttaaatttaagaacaactagttcttgaaaagcaataccgtatttctctgataaatttgtagttaaggttctagaaaatctaggacaaatttacttcattaaacataaagtttttaagattattcagttggcacaatttaatgcataattgggattggatccatttactgtactgtggtacagtaaagagaatgtgttcttattgaacagcagatttgtatacaaatacggaataatgcaactacattataaattgtatacgaacaaaataaattgggtcactctgagcttactattaaaacattgaaaatttattaatgaacacaggctatcttgatgaggatctctgcttatgaaacacatactaatgaaattattagtgacacattggaagctagaaaattgctgttggggccattgctataaatcattgtttccatgttaagacttctgttctaattcattcattcaacaaacatttgttgagggccagatactgtgctggtcaactggggatactgtcctgaacaatatgcacacagttcttgcccctgcagagcttaaagaccattaaaggatacagaaaattaagcaattatcctatagtaggattcgtggtgtgatggggaaaatacaaggtactgtatttgggagtcatgtaactccagttttgggagtgagagagggtctggggaagaactgttccagataaaaagatgtgtaaccaagatagcatagcacattctgacaactaaagcaatttactctaacttaagcatgaagtacaaaagtatagttcatttattgagggaatgttaagctattaaaatgatactttttggtacttttaaaaaaatgaatacttaaacaccgttttaaaattttgtgttaagagctcctaataagaacttggtaaacatgttgacaatttaactcacagtctaaactttaaaagtagtagttacccttttatttctgtgccatgagacaaattcttctgcagttttatagttgtacaagatgttttgactcactctcaattgccatattcttaaagaaaccctgaaaagctgctcaagctggtcagttttctgtaaaaccaagtaaatgaaattttctctcccctcagaaaggaagttctacagcctagagtaccatctattgtgttttataagtccagatttaggctttgaaagatcataccaaaacttcagatcgacttaaacagcaactatgaattaggtttatgggaaatgtagtaatacaggggaaagaatatcggtaatggagtgaaatggtcctgggttcaaatccagtcttcctcacatattgtgctctttaagcttcaaatgagatgtataactgccttttccttaccagtaaaatgaggacaataattatgacaccatagggtggttgtgaggattagcaaatgttatcttgtatttcaggtgcctttcagggaaaggcttggcacatagtaaacacatcctgtaaatatcagtttccccttgttagcccctgtagcatcctgacctaccaagtctataggccttgcatatcactgtgcaccagagatacctcttttacatctgggctctgttttctctctatcaatcctatcctccaccctctttaaatcagaccccaggtttaaccttcccacagtcagtataaatcatttttcagaactttcagctttccatcaagtgaaagttgattttagttacccagtaatgtacagaaaccttcaataatgttaagcttcaaaggcttctggtacgtttgtctaccacagaaccaccacaatatatatgcttgttcttaggtttattgctttttattttaatggggtttggttgtttgggttttattttggttttggcttattttaaagtcaagtttagtttttactcaggtaaaggcctgaagtttcttgggcgtggaagaaaaagcttgggaagcctattaattcatggtgcagttcagaattgtttaaataagctctgtgccactgagcttaatctgaaagtatagtgacatgtgaaggatgcacatatgaatgaaaaactaaaataattgtaggctcttctataaatgaaaaaaaaagtgattggattgtgtctacctttttcctcaaagtaatctaacctaaacggtcatggtgttaaaactttttatggtgctaatcagaaaaattgatgttgcaagaaatgaggtctcaaaaatgggaatgtgcctcctcactctgcgtcacatgggaaataaatcctgaggccaggatcaccagtggggtagagtcatcttcatagtctcctgttatcctccccctgaacaaagaacaaagtgagactgggaagctagtgttggggaaacatttctgggataaactgtggagtggagaagacaatggagggcaaggcaaaaacccacagacttgtttacccatagaggccccactcacctccatgctgacagaattccagaaaaattccttccctatctcccaaacacctgaaattctgaaatattgccctactatttagcactttaagcttcagtgaggtgctgtaatggagagatagcttcatagtttagcctatagccaactttgcctcaagacctccagataagatgaagtggcttttacctcatgtgagtctcaaacgctggagagagagttccacaaccacccctgccctttctcccatattacgctcattagaaagtctactcagggctgggtgccgtggctcatgcctgtaatcccagcactttggaggctgaggcgggtggatcatctgaggtcaggagttcgagaccagcctggccaacatggggaaaccctgtctctactgaaaatataaaaattagccgggcatggtggcgtgcacctgtaattccagctactcgggaggctgaggcaggagaatcacttgaaccccagaggcagaggctacagtgagccaagattgcaccactgcactccaacctgggtgatagaataagactcttgtctcaaggaaagaaaaaatgtctactcagtagagcagtgattggcaaagtgtgagaccccagaccggcaatattggcatctcctggagacttgtttaaaatgctgattactattttcaagaactttctaccttcatttttacttattttttgttttcaagggctcatggaatcagtcttccatgtgacagctttttaaatattttaagacaaaaactgagtcttctaatcttaattgtgttctagcagtagtcattgtaattatagttatttttataatttatttgtttagtgtatatctgtcactctagaatgtaggctccctgagataaaaactataattcttttgatggcagttacattcccaactcttagcacaagatctaggacatagtatgaactcaataaatttttgttgaatgaaagaaaaatgcaaatttataagccttttcagagacctactgaatcaaactctgagagtggagcccagcaatctgttgtaaaagctgtttgagtaatactgttgcactctaagcttgagaaccactgcaatagaactaagagaacattcatttcaccttcaggcctattctctgacatcacttgaaaaatcctctctgccttctgtaacccttaaccaacaacagtgccctgtccatgtaggggaaacttctgggctgtattacaagtgggtaggaaggtataaggatatcatagtgggaagtattgcttagaatgccagtacttgtttgctgtggaaggtttctaggaatggattgcttagtctaaagtaagcactaccaccatccacgttttcactcaacacagtgccttttaattggtgactaacatcaaaacaccttgacaaaccgttaaaacagtatcagaaaccatgtgtacatccctgtgcctcttagattgctaagttctgctctcattcttacttcaaaggacactttttaaagaattgttaatgcttttttataatacaagtcatagccctgttggcaaaaagaaaaaagattcagtgagaaagaaaaatcactgataattccatcatccagggagaaccactgttatttaagtatatggccttccagacttttctgtgcatttatagatatttttaatgggatcaaagtgtacatactgttttgtaactttttttcactcaacaataccatgactgtcttgctgtgtcaagtatatttctacatctcttaatggctgcatgatattccatcatatgtgccacattttattaaactactgttcaatttttaggtttccaactttcattaataaagtgctttaaagaacattgtgttgctaaatctc

SEQ ID NO: 335830 - DNA, 3860 bp, Homo sapiens
cgcttgtttttcccttgggacccgggtccacacggcggggtcgcccgtccatctccggctcgcccgcggggcccatcgtcgacgttagcggccgttctccgagccgactgacccatccttggcgctgccgccgcgcgcttgttctcctccctcgccccgccttcatcctccccgttcacggaaacgacagctgcggctgcggggctggcgccgcctccctccacctaccacgtctgccctcgccgctctagccctgcgccccagcccggccgcggcacctccgcctcgccgccgctaggtcggccggctccgcccggctgccgcctaggatgaatatcatggacttcaacgtgaagaagctggcggccgacgcaggcaccttcctcagtcgcgccgtgcagttcacagaagaaaagcttggccaggctgagaagacagaattggatgctcacttagagaacctccttagcaaagctgaatgtaccaaaatatggacagaaaaaataatgaaacaaactgaagtgttattgcagccaaatccaaatgccaggatagaagaatttgtttatgagaaactggatagaaaagctccaagtcgtataaacaacccagaacttttgggacaatatatgattgatgcagggactgagtttggcccaggaacagcttatggtaatgcccttattaaatgtggagaaacccaaaaaagaattggaacagcagacagagaactgattcaaacgtcagccttaaattttcttactcctttaagaaactttatagaaggagattacaaaacaattgctaaagaaaggaaactattgcaaaataagagactggatttggatgctgcaaaaacgagactaaaaaaggcaaaagctgcagaaactagaaattcatctgaacaggaattaagaataactcaaagtgaatttgatcgtcaagcagagattaccagacttctgctagagggaatcagcagtacacatgcccatcaccttcgctgtctgaatgactttgtagaacccctgtagcatcctgacctaccaagtctataggccttgcatatcactgtgcaccagagatacctcttttacatctgggctctgttttctctctatcaatcctatcctccaccctctttaaatcagaccccaggtttaaccttcccacagtcagtataaatcatttttcagaactttcagctttccatcaagtgaaagttgattttagttacccagtaatgtacagaaaccttcaataatgttaagcttcaaaggcttctggtacgtttgtctaccacagaaccaccacaatatatatgcttgttcttaggtttattgctttttattttaatggggtttggttgtttgggttttattttggttttggcttattttaaagtcaagtttagtttttactcaggtaaaggcctgaagtttcttgggcgtggaagaaaaagcttgggaagcctattaattcatggtgcagttcagaattgtttaaataagctctgtgccactgagcttaatctgaaagtatagtgacatgtgaaggatgcacatatgaatgaaaaactaaaataattgtaggctcttctataaatgaaaaaaaaagtgattggattgtgtctacctttttcctcaaagtaatctaacctaaacggtcatggtgttaaaactttttatggtgctaatcagaaaaattgatgttgcaagaaatgaggtctcaaaaatgggaatgtgcctcctcactctgcgtcacatgggaaataaatcctgaggccaggatcaccagtggggtagagtcatcttcatagtctcctgttatcctccccctgaacaaagaacaaagtgagactgggaagctagtgttggggaaacatttctgggataaactgtggagtggagaagacaatggagggcaaggcaaaaacccacagacttgtttacccatagaggccccactcacctccatgctgacagaattccagaaaaattccttccctatctcccaaacacctgaaattctgaaatattgccctactatttagcactttaagcttcagtgaggtgctgtaatggagagatagcttcatagtttagcctatagccaactttgcctcaagacctccagataagatgaagtggcttttacctcatgtgagtctcaaacgctggagagagagttccacaaccacccctgccctttctcccatattacgctcattagaaagtctactcagggctgggtgccgtggctcatgcctgtaatcccagcactttggaggctgaggcgggtggatcatctgaggtcaggagttcgagaccagcctggccaacatggggaaaccctgtctctactgaaaatataaaaattagccgggcatggtggcgtgcacctgtaattccagctactcgggaggctgaggcaggagaatcacttgaaccccagaggcagaggctacagtgagccaagattgcaccactgcactccaacctgggtgatagaataagactcttgtctcaaggaaagaaaaaatgtctactcagtagagcagtgattggcaaagtgtgagaccccagaccggcaatattggcatctcctggagacttgtttaaaatgctgattactattttcaagaactttctaccttcatttttacttattttttgttttcaagggctcatggaatcagtcttccatgtgacagctttttaaatattttaagacaaaaactgagtcttctaatcttaattgtgttctagcagtagtcattgtaattatagttatttttataatttatttgtttagtgtatatctgtcactctagaatgtaggctccctgagataaaaactataattcttttgatggcagttacattcccaactcttagcacaagatctaggacatagtatgaactcaataaatttttgttgaatgaaagaaaaatgcaaatttataagccttttcagagacctactgaatcaaactctgagagtggagcccagcaatctgttgtaaaagctgtttgagtaatactgttgcactctaagcttgagaaccactgcaatagaactaagagaacattcatttcaccttcaggcctattctctgacatcacttgaaaaatcctctctgccttctgtaacccttaaccaacaacagtgccctgtccatgtaggggaaacttctgggctgtattacaagtgggtaggaaggtataaggatatcatagtgggaagtattgcttagaatgccagtacttgtttgctgtggaaggtttctaggaatggattgcttagtctaaagtaagcactaccaccatccacgttttcactcaacacagtgccttttaattggtgactaacatcaaaacaccttgacaaaccgttaaaacagtatcagaaaccatgtgtacatccctgtgcctcttagattgctaagttctgctctcattcttacttcaaaggacactttttaaagaattgttaatgcttttttataatacaagtcatagccctgttggcaaaaagaaaaaagattcagtgagaaagaaaaatcactgataattccatcatccagggagaaccactgttatttaagtatatggccttccagacttttctgtgcatttatagatatttttaatgggatcaaagtgtacatactgttttgtaactttttttcactcaacaataccatgactgtcttgctgtgtcaagtatatttctacatctcttaatggctgcatgatattccatcatatgtgccacattttattaaactactgttcaatttttaggtttccaactttcattaataaagtgctttaaagaacattgtgttgctaaatctc

SEQ ID NO: 335831 - DNA, 1131 bp, Homo sapiens
cgcttgtttttcccttgggacccgggtccacacggcggggtcgcccgtccatctccggctcgcccgcggggcccatcgtcgacgttagcggccgttctccgagccgactgacccatccttggcgctgccgccgcgcgcttgttctcctccctcgccccgccttcatcctccccgttcacggaaacgacagctgcggctgcggggctggcgccgcctccctccacctaccacgtctgccctcgccgctctagccctgcgccccagcccggccgcggcacctccgcctcgccgccgctaggtcggccggctccgcccggctgccgcctaggatgaatatcatggacttcaacgtgaagaagctggcggccgacgcaggcaccttcctcagtcgcgccgtgcagttcacagaagaaaagcttggccaggctgagaagacagaattggatgctcacttagagaacctccttagcaaagctgaatgtaccaaaatatggacagaaaaaataatgaaacaaactgaagtgttattgcagccaaatccaaatgccaggatagaagaatttgtttatgagaaactggatagaaaagctccaagtcgtataaacaacccagaacttttgggacaatatatgattgatgcagggactgagtttggcccaggaacagcttatggtaatgcccttattaaatgtggagaaacccaaaaaagaattggaacagcagacagagaactgattcaaacgtcagccttaaattttcttactcctttaagaaactttatagaaggagattacaaaacaattgctaaagaaaggaaactattgcaaaataagagactggatttggatgctgcaaaaacgagactaaaaaaggcaaaagctgcagaaactagaaattcatctgaacaggaattaagaataactcaaagtgaatttgatcgtcaagcagagattaccagacttctgctagagggaatcagcagtacacatgcccatcaccttcgctgtctgaatgactttgtagaagcccagatgacttactatgcacagtgttaccagtatatgttggacctccagaaacaactgggaaggtgatcactgtgtcaggtgtggcactggtcagacgctaagg

SEQ ID NO: 335832 - DNA, 102 bp, Homo sapiens
caccacaaaggtagagattcttgtctgctttgttcactgctgtagctctagaacctaaaacagtgcccaggatatattaagaacttaaaaagtatttgcaaa

SEQ ID NO: 335833 - DNA, 177 bp, Homo sapiens
aagataggcagggatatgatggcatgggtgatgaaagtacaagtttagaaattattttctctggattttttttttaccttagagattccctaaggttaagtacaaagccagtctgattttcattcaattttactgatttcttgaataagtattataagaaagatgctaggaagggag

SEQ ID NO: 335834 - DNA, 449 bp, Homo sapiens
tctattcaagtaaattaatctggatacgggagaaaaaaagaaattgagaattttgtttaaatgtattgttcagagcagaatgcccaaggttttatttgaatctatgcatactgatagcaactaaaagtcattaccacccaattgcttcctggaagctgactaattctgagtgcacaagtctacacaggaaggtgagccagcatactcattctcttctgtcaggcaatcacccagtatatactgaccaaaaacatgtcctttaaaaaattaaaaccatgaacgagacagtatcataatatctgaactgtggtttctcatattttctaacctcttaataaaataaagggttcagcaaataagtctgagttcatcagatttgtttcaaccattcagcaatcatgttaaacttgagatgcattaaggagatcaagtaagggttaagaggctga

SEQ ID NO: 335835 - DNA, 189 bp, Homo sapiens
attgttacatctaaaactttagtagtgctgttttcattttattttagaacttgagtttcaggggtgggaaaaagtattctgggtttaggcctcctcagccttttattcctgtcctggagtgagagagaaccgggacttctgtatttgaatgcacagtgtcagagataaggattcccctgtgatggatta

SEQ ID NO: 335836 - DNA, 551 bp, Homo sapiens
tttgaggaagcgtttctttaaggctctgtgctatcctgaaaagactagatcatggtaggttgtcttattatgtaaataattatatcataagagagaaaaagacttgatatttaacatctaaagcacattatttaaacaagtttgtgtagtagggttctgaaatattcattttatgtgatgtgttcatatttttacaggaattgtttaaaatttttatgatgggctttgttcttttaatcgctatgcttatttaaaatattgtacataatatgaccaaaacttattgaatataaatctgtacctttcttggggtgcagagttgcatgctgctgctagtatatttagtgtcttaattaagagtcaagagccactcccaggcactcttttgtatgtgaagattcgactttttttttttttttttggagacaggttcttggtctgtcacccaggctggagtgcagtggcgcaatactggcccactgcaacctccaccttgcaggttcaagcaattctcccacctcagcctccctggtagctgggactacaggcat

SEQ ID NO: 335837 - DNA, 337 bp, Homo sapiens
atccaaataagtaatggctttactgtggcatagaaagactagagtaggccggcagctttttctgaggaatttctgcttccctttgaaacaagaccttcatttccaataaataaatcactattaggtcttgtgtacatttaatttttatgcatttcataaataaacctcctgcataattactaactccatttctaactggaaattttaaatgtttgtatcagtgaggtttaatttttcctaaggcaattataaacatggctttttgcatgacctaagtaactggcttaaattgtcataactggtattagaaatgaatccatcttttttatactctaat

SEQ ID NO: 335838 - DNA, 833 bp, Homo sapiens
atagttaacagtaaagcatttctctctttccctagacaggaccatggggtctgagttagtgtgaaagaatgcaaggatgtggaaatttgaacctcagggttgttcttactgctgctgtgtttcccggaaaacagccattgacttttcttctttctttttaacatggggaaggcatttatagcataatggagtattgtttgattatttatatgcatttccttgggtctttttgcttttagagttttgttgatttgttctttgctgtgtattgtggggaatagggtatgtgtatttgctgtgtattgtgtggggaatagggtatgaagcctatagggaagaagggtggatggagaggcactaaaagtacagggatttgacttattttaacaagaaaaaattctgatgactaaagataatttgtgaacatgtagttatggcttcataccttttgtcttagttcaggctggtataacaaattagtgtagatgaagtggcttgaacaacaaactttgatttctcacggttctggaggttgtaagttcaagatcagggtgccacccagtatggttgggctctggtgagtggcttattctgggttgtgtgctgctgatttcttgtatcctcacatggcagaaagagaactaggaagctccccggggtctctttttataagggcactaatcccattcatgaagactctgctgtcatgacctgtttcctcccaaaggccccaccttttaataccatcaagttgggggctaggatttcaacacatgaatttgacagtgggacacaaaaattcagtccatgcatcccttcaaataatatgagct

SEQ ID NO: 335839 - DNA, 159 bp, Homo sapiens
tcagtgaaataaataaatttctcagcctacaataaactcagcataaaggggggcaggcagtctttccaatgggccggcttagcagtcccctggtggtccagcagctgggattcaaatgggcctacttccatggaaaatagcgtggaaataaaccagtgg

SEQ ID NO: 335840 - DNA, 275 bp, Homo sapiens
tggccagcaaatgatggcccttggttcaaacccggcttacacctgcttttgtaaataaagttttattagcgtgcaaccaggcccactctgttatgcattgctcaggggtgcttttacactgcaaaaggcagagttgagtggttgccacagagactgaagttgttagttaccatctagccctttagagaaacagctgggtggcccctgccctgtaacacgaataaatgcagcgtttagcagagcggtggctgccttcccactggcgctgcaggttc

SEQ ID NO: 335841 - DNA, 124 bp, Homo sapiens
ggagacatgttcacttaccagtagaagctaagatgttctttgctagtcccctgcagtgtttcatataaggtttttttttttggtattatagaaaatattatacttcagtttttgaggaaaaaag

SEQ ID NO: 335842 - DNA, 550 bp, Homo sapiens
caattctcctgcctcagcttcccgagtagctgggattacaggcatcctcaaccacgcccagctaatttttgtatttttaatagagacagggtttcaccatgttggtcaggctggtgtcgaactcctgacctcaggtgatccacccacctcggcctcccaaagtgctggattacaggtgtgagccaccgcgcccggcctcatttaacaagtatttatttggccccactctgtgctggatatagtgctgaatgctgagaacacaaaagcaaacaaaaccaacaaggtccagtcctcagaactttccaactagtgattgacactgagacaaagacaggcagatagaaggcagtgtaatcacaagctcttttccaggaaagcacagggcacagcactgtggaccgtgtaaccgggaccccacacagtcagagagtgtcaaggagaggcttctagggagtgagtaactcaggaactgagatctgaaggctgcttaggagtaagccccatgaaatgagaagggaagtagaggctaaacaggcagaggaaaggttcc

SEQ ID NO: 335843 - DNA, 273 bp, Homo sapiens
tccctcaagggccatacccactccactgagaaccactgctttccctgcattgctgggtagtgagtgattaaagtgccattgcaggcgtgggtgccgagatagcagggcaccggacatgtctaagccagccatcaggaatgcacttccgttgcttgctgtaggatggtagaggtcgagttagaaatcagaaaggttggtgctttgtgtgtgggggtgaagggccacaagggaactttgaggggtggcagaaatggtctacatcctgaagtattc

SEQ ID NO: 335844 - DNA, 423 bp, Homo sapiens
cctggcttaggacgccgtggaatcgccttttctggagatgcttaagaaaagttctgcctgaaggaaaggaaaaggagtggtttatagaactgcccactaattgatcacaactccgtcctgataaacatggccatggtcttggaatatttctcaacacagccctctaagaagttactaccagtcatttggagttggaatgccagttgcacctgtttaactccctgactgtggtctagagacctcatgtcagaactgggggctgctgttctgcttgaagccagcccagaaagggaggcattagcctctcttggtcattcttcacgctttgtgtgtggctccattttccaggccatatctcttttccctttaccctgccccattccttctctgctgttgagctgccttgtggctgagttctcgtct

SEQ ID NO: 335845 - DNA, 322 bp, Homo sapiens
caggcaatgtagctgttttcaccattagccctaattttgctagatggggtgaaggtacaaccgtacaacccattcccgtcatgccttaggaattttgatacaagacttagaaacatagttgcagggttttttgttttgttttgttttttttttttttgcttagaaatcatccctgctgttccagtacttgttgttgcaggcctggtcctggaccactgcatcaggtagaggagaaaaaataaattaaaaaaaaaatttttttgaggcgatttggggaagaaagaaaaaaaatatagtcattttaccagtgtattcctccttt

SEQ ID NO: 335846 - DNA, 3265 bp, Homo sapiens
  misc_feature (332)..(332): n is a, c, g, or t
ggctcagcctcaggtcctgcggggctgaccagtgtgcagagtgccctgaaagcgccaggcctggctgggtgcttcccatcttcacagcacctgagaggcagctaccaccacccttcttatagaagaggaagcagaggctttgtgaagtgtcccaccgaggaggccctgatcttgagcccggagccctgagccctgagacgatgcttgaggatcttatgaccatgacctggctaccttgagtctgtggggctacacagccttcagcctgcatctccagggctctgactctatccagctcctggaccagctcccaagtctactcctgaccccancctgggccaaggggacttctcaagctttgggacccagcaggacacagcagcagtcagggtgagcaagaggatgctggcggggggcgtgaggagcatgcccagccccctcctggcctgctggcagcccatcctcctgctggtgctgggctcagtgctgtcaggctcggccacgggctgcccgccccgctgcgagtgctccgcccaggaccgcgctgtgctgtgccaccgcaagcgctttgtggcagtccccgagggcatccccaccgagacgcgcctgctggacctaggcaagaaccgcatcaaaacgctcaaccaggacgagttcgccagcttcccgcacctggaggagctggagctcaacgagaacatcgtgagcgccgtggagcccggcgccttcaacaacctcttcaacctccggacgctgggtctccgcagcaaccgcctgaagctcatcccgctaggcgtcttcactggcctcagcaacctgaccaagctggacatcagcgagaacaagatcgttatcctactggactacatgtttcaggacctgtacaacctcaagtcactggaggttggcgacaatgacctcgtctacatctctcaccgcgccttcagcggcctcaacagcctggagcagctgacgctggagaaatgcaacctgacctccatccccaccgaggcgctgtcccacctgcacggcctcatcgtcctgaggctccggcacctcaacatcaatgccatccgggactactccttcaagaggctgtaccgactcaaggtcttggagatctcccactggccctacttggacaccatgacacccaactgcctctacggcctcaacctgacgtccctgtccatcacacactgcaatctgaccgctgtgccctacctggccgtccgccacctagtctatctccgcttcctcaacctctcctacaaccccatcagcaccattgagggctccatgttgcatgagctgctccggctgcaggagatccagctggtgggcgggcagctggccgtggtggagccctatgccttccgcggcctcaactacctgcgcgtgctcaatgtctctggcaaccagctgaccacactggaggaatcagtcttccactcggtgggcaacctggagacactcatcctggactccaacccgctggcctgcgactgtcggctcctgtgggtgttccggcgccgctggcggctcaacttcaaccggcagcagcccacgtgcgccacgcccgagtttgtccagggcaaggagttcaaggacttccctgatgtgctactgcccaactacttcacctgccgccgcgcccgcatccgggaccgcaaggcccagcaggtgtttgtggacgagggccacacggtgcagtttgtgtgccgggccgatggcgacccgccgcccgccatcctctggctctcaccccgaaagcacctggtctcagccaagagcaatgggcggctcacagtcttccctgatggcacgctggaggtgcgctacgcccaggtacaggacaacggcacgtacctgtgcatcgcggccaacgcgggcggcaacgactccatgcccgcccacctgcatgtgcgcagctactcgcccgactggccccatcagcccaacaagaccttcgctttcatctccaaccagccgggcgagggagaggccaacagcacccgcgccactgtgcctttccccttcgacatcaagaccctcatcatcgccaccaccatgggcttcatctctttcctgggcgtcgtcctcttctgcctggtgctgctgtttctctggagccggggcaagggcaacacaaagcacaacatcgagatcgagtatgtgccccgaaagtcggacgcaggcatcagctccgccgacgcgccccgcaagttcaacatgaagatgatatgaggccggggcggggggcagggacccccgggcggccgggcaggggaaggggcctggccgccacctgctcactctccagtccttcccacctcctccctacccttctacacacgttctctttctccctcccgcctccgtcccctgctgccccccgccagccctcaccacctgccctccttctaccaggacctcagaagcccagacctggggaccccacctacacaggggcattgacagactggagttgaaagccgacgaaccgacacgcggcagagtcaataattcaataaaaaagttacgaactttctctgtaacttgggtttcaataattatggatttttatgaaaacttgaaataataaaaagagaaaaaaactatttcctatagctagtcggaatgcaaacttttgacgtcctgattgctccagggccctcttccaactcagtttcttgtttttctcttcctcctcctcctcttcttcctcctttctcttctcttccccagtggggagggatcactcaggaaaacaggaaaggaggttccagccccacccacctgcccaccccgccccaggcaccatcaggagcaggctagggggcaggcctgggcccagctccgggctggctttttgcagggcgcaggtggaggggacaggtctgccgatgggggtgggagcctgtctgctgggctgccaggcggcaccactgcaaggggtgggagcctggcttgggtgtggctgagactctggacagaggctggggtcctcctgggggacagcacagtcagtggagagagccaggggctggaggtggggcccaccccagcctctggtcccagctctgctgctcacttgctgtgtggcctcaagcaggtcactggcctctctgggcctcagtctccacatctgtacaaatgggaacattaccccctgccctgcctacctcacagggctgttgtgaggaattgatgagatgatgtatgtgaaacactttgtaacctgtaaagcgctgtgcacacgtgt

SEQ ID NO: 335847 - DNA, 3311 bp, Homo sapiens
  misc_feature (292)..(292): n is a, c, g, or t
agcggattatacagagatatttagcctaatagaagccgacagatcattcagggcagtaatgtactccggcttcaagcgtgtagtttcctcagcctgaactcccagattaaaggctccttgcccagcccgccctgtgccggtgcctgtgaccttgactgcaatgatgggggatcttatgaccatgacctggctaccttgagtctgtggggctacacagccttcagcctgcatctccagggctctgactctatccagctcctggaccagctcccaagtctactcctgaccccancctgggccaaggggacttctcaagctttgggacccagcaggacacagcagcagtcaggtgcatgctgggaccgcgacggacaggctggcggaccccaggcccccagaggccagtctgtttgcctcccaacgccatctgacccaggtgagcaagaggatgctggcggggggcgtgaggagcatgcccagccccctcctggcctgctggcagcccatcctcctgctggtgctgggctcagtgctgtcaggctcggccacgggctgcccgccccgctgcgagtgctccgcccaggaccgcgctgtgctgtgccaccgcaagcgctttgtggcagtccccgagggcatccccaccgagacgcgcctgctggacctaggcaagaaccgcatcaaaacgctcaaccaggacgagttcgccagcttcccgcacctggaggagctggagctcaacgagaacatcgtgagcgccgtggagcccggcgccttcaacaacctcttcaacctccggacgctgggtctccgcagcaaccgcctgaagctcatcccgctaggcgtcttcactggcctcagcaacctgaccaagctggacatcagcgagaacaagatcgttatcctactggactacatgtttcaggacctgtacaacctcaagtcactggaggttggcgacaatgacctcgtctacatctctcaccgcgccttcagcggcctcaacagcctggagcagctgacgctggagaaatgcaacctgacctccatccccaccgaggcgctgtcccacctgcacggcctcatcgtcctgaggctccggcacctcaacatcaatgccatccgggactactccttcaagaggctgtaccgactcaaggtcttggagatctcccactggccctacttggacaccatgacacccaactgcctctacggcctcaacctgacgtccctgtccatcacacactgcaatctgaccgctgtgccctacctggccgtccgccacctagtctatctccgcttcctcaacctctcctacaaccccatcagcaccattgagggctccatgttgcatgagctgctccggctgcaggagatccagctggtgggcgggcagctggccgtggtggagccctatgccttccgcggcctcaactacctgcgcgtgctcaatgtctctggcaaccagctgaccacactggaggaatcagtcttccactcggtgggcaacctggagacactcatcctggactccaacccgctggcctgcgactgtcggctcctgtgggtgttccggcgccgctggcggctcaacttcaaccggcagcagcccacgtgcgccacgcccgagtttgtccagggcaaggagttcaaggacttccctgatgtgctactgcccaactacttcacctgccgccgcgcccgcatccgggaccgcaaggcccagcaggtgtttgtggacgagggccacacggtgcagtttgtgtgccgggccgatggcgacccgccgcccgccatcctctggctctcaccccgaaagcacctggtctcagccaagagcaatgggcggctcacagtcttccctgatggcacgctggaggtgcgctacgcccaggtacaggacaacggcacgtacctgtgcatcgcggccaacgcgggcggcaacgactccatgcccgcccacctgcatgtgcgcagctactcgcccgactggccccatcagcccaacaagaccttcgctttcatctccaaccagccgggcgagggagaggccaacagcacccgcgccactgtgcctttccccttcgacatcaagaccctcatcatcgccaccaccatgggcttcatctctttcctgggcgtcgtcctcttctgcctggtgctgctgtttctctggagccggggcaagggcaacacaaagcacaacatcgagatcgagtatgtgccccgaaagtcggacgcaggcatcagctccgccgacgcgccccgcaagttcaacatgaagatgatatgaggccggggcggggggcagggacccccgggcggccgggcaggggaaggggcctggccgccacctgctcactctccagtccttcccacctcctccctacccttctacacacgttctctttctccctcccgcctccgtcccctgctgccccccgccagccctcaccacctgccctccttctaccaggacctcagaagcccagacctggggaccccacctacacaggggcattgacagactggagttgaaagccgacgaaccgacacgcggcagagtcaataattcaataaaaaagttacgaactttctctgtaacttgggtttcaataattatggatttttatgaaaacttgaaataataaaaagagaaaaaaactatttcctatagctagtcggaatgcaaacttttgacgtcctgattgctccagggccctcttccaactcagtttcttgtttttctcttcctcctcctcctcttcttcctcctttctcttctcttccccagtggggagggatcactcaggaaaacaggaaaggaggttccagccccacccacctgcccaccccgccccaggcaccatcaggagcaggctagggggcaggcctgggcccagctccgggctggctttttgcagggcgcaggtggaggggacaggtctgccgatgggggtgggagcctgtctgctgggctgccaggcggcaccactgcaaggggtgggagcctggcttgggtgtggctgagactctggacagaggctggggtcctcctgggggacagcacagtcagtggagagagccaggggctggaggtggggcccaccccagcctctggtcccagctctgctgctcacttgctgtgtggcctcaagcaggtcactggcctctctgggcctcagtctccacatctgtacaaatgggaacattaccccctgccctgcctacctcacagggctgttgtgaggaattgatgagatgatgtatgtgaaacactttgtaacctgtaaagcgctgtgcacacgtgt

SEQ ID NO: 335848 - DNA, 2959 bp, Homo sapiens
ccaggctggtacgccccggaagtatgggatcccgagccccggccccggctccggctcggctcccgcccgcgcggggcggacagacggacagccagccccgcgagggcgcgcggactgccgggcggaggtgtcggaggaggaggaaacggaggagggggctgggcaggggctggggcctggtcgggccggctggagagacatgcgattggtgaccgagccgagcggaccgaaggcgcgcccgagatgcaggtgagcaagaggatgctggcggggggcgtgaggagcatgcccagccccctcctggcctgctggcagcccatcctcctgctggtgctgggctcagtgctgtcaggctcggccacgggctgcccgccccgctgcgagtgctccgcccaggaccgcgctgtgctgtgccaccgcaagcgctttgtggcagtccccgagggcatccccaccgagacgcgcctgctggacctaggcaagaaccgcatcaaaacgctcaaccaggacgagttcgccagcttcccgcacctggaggagctggagctcaacgagaacatcgtgagcgccgtggagcccggcgccttcaacaacctcttcaacctccggacgctgggtctccgcagcaaccgcctgaagctcatcccgctaggcgtcttcactggcctcagcaacctgaccaagctggacatcagcgagaacaagatcgttatcctactggactacatgtttcaggacctgtacaacctcaagtcactggaggttggcgacaatgacctcgtctacatctctcaccgcgccttcagcggcctcaacagcctggagcagctgacgctggagaaatgcaacctgacctccatccccaccgaggcgctgtcccacctgcacggcctcatcgtcctgaggctccggcacctcaacatcaatgccatccgggactactccttcaagaggctgtaccgactcaaggtcttggagatctcccactggccctacttggacaccatgacacccaactgcctctacggcctcaacctgacgtccctgtccatcacacactgcaatctgaccgctgtgccctacctggccgtccgccacctagtctatctccgcttcctcaacctctcctacaaccccatcagcaccattgagggctccatgttgcatgagctgctccggctgcaggagatccagctggtgggcgggcagctggccgtggtggagccctatgccttccgcggcctcaactacctgcgcgtgctcaatgtctctggcaaccagctgaccacactggaggaatcagtcttccactcggtgggcaacctggagacactcatcctggactccaacccgctggcctgcgactgtcggctcctgtgggtgttccggcgccgctggcggctcaacttcaaccggcagcagcccacgtgcgccacgcccgacatcctctggctctcaccccgaaagcacctggtctcagccaagagcaatgggcggctcacagtcttccctgatggcacgctggaggtgcgctacgcccaggtacaggacaacggcacgtacctgtgcatcgcggccaacgcgggcggcaacgactccatgcccgcccacctgcatgtgcgcagctactcgcccgactggccccatcagcccaacaagaccttcgctttcatctccaaccagccgggcgagggagaggccaacagcacccgcgccactgtgcctttccccttcgacatcaagaccctcatcatcgccaccaccatgggcttcatctctttcctgggcgtcgtcctcttctgcctggtgctgctgtttctctggagccggggcaagggcaacacaaagcacaacatcgagatcgagtatgtgccccgaaagtcggacgcaggcatcagctccgccgacgcgccccgcaagttcaacatgaagatgatatgaggccggggcggggggcagggacccccgggcggccgggcaggggaaggggcctggccgccacctgctcactctccagtccttcccacctcctccctacccttctacacacgttctctttctccctcccgcctccgtcccctgctgccccccgccagccctcaccacctgccctccttctaccaggacctcagaagcccagacctggggaccccacctacacaggggcattgacagactggagttgaaagccgacgaaccgacacgcggcagagtcaataattcaataaaaaagttacgaactttctctgtaacttgggtttcaataattatggatttttatgaaaacttgaaataataaaaagagaaaaaaactatttcctatagctagtcggaatgcaaacttttgacgtcctgattgctccagggccctcttccaactcagtttcttgtttttctcttcctcctcctcctcttcttcctcctttctcttctcttccccagtggggagggatcactcaggaaaacaggaaaggaggttccagccccacccacctgcccaccccgccccaggcaccatcaggagcaggctagggggcaggcctgggcccagctccgggctggctttttgcagggcgcaggtggaggggacaggtctgccgatgggggtgggagcctgtctgctgggctgccaggcggcaccactgcaaggggtgggagcctggcttgggtgtggctgagactctggacagaggctggggtcctcctgggggacagcacagtcagtggagagagccaggggctggaggtggggcccaccccagcctctggtcccagctctgctgctcacttgctgtgtggcctcaagcaggtcactggcctctctgggcctcagtctccacatctgtacaaatgggaacattaccccctgccctgcctacctcacagggctgttgtgaggaattgatgagatgatgtatgtgaaacactttgtaacctgtaaagcgctgtgcacacgtgt

SEQ ID NO: 335849 - DNA, 2934 bp, Homo sapiens
ccaggctggtacgccccggaagtatgggatcccgagccccggccccggctccggctcggctcccgcccgcgcggggcggacagacggacagccagccccgcgagggcgcgcggactgccgggcggaggtgtcggaggaggaggaaacggaggagggggctgggcaggggctggggcctggtcgggccggctggagagacatgcgattggtgaccgagccgagcggaccgaaggcgcgcccgagatgcaggtgagcaagaggatgctggcggggggcgtgaggagcatgcccagccccctcctggcctgctggcagcccatcctcctgctggtgctgggctcagtgctgtcaggctcggccacgggctgcccgccccgctgcgagtgctccgcccaggaccgcgctgtgctgtgccaccgcaagcgctttgtggcagtccccgagggcatccccaccgagacgcgcctgctggacctaggcaagaaccgcatcaaaacgctcaaccaggacgagttcgccagcttcccgcacctggaggagctggagctcaacgagaacatcgtgagcgccgtggagcccggcgccttcaacaacctcttcaacctccggacgctgggtctccgcagcaaccgcctgaagctcatcccgctaggcgtcttcactggcctcagcaacctgaccaagctggacatcagcgagaacaagatcgttatcctactggactacatgtttcaggacctgtacaacctcaagtcactggaggttggcgacaatgacctcgtctacatctctcaccgcgccttcagcggcctcaacagcctggagcagctgacgctggagaaatgcaacctgacctccatccccaccgaggcgctgtcccacctgcacggcctcatcgtcctgaggctccggcacctcaacatcaatgccatccgggactactccttcaagaggctgtaccgactcaaggtcttggagatctcccactggccctacttggacaccatgacacccaactgcctctacggcctcaacctgacgtccctgtccatcacacactgcaatctgaccgctgtgccctacctggccgtccgccacctagtctatctccgcttcctcaacctctcctacaaccccatcagcaccattgagggctccatgttgcatgagctgctccggctgcaggagatccagctggtgggcgggcagctggccgtggtggagccctatgccttccgcggcctcaactacctgcgcgtgctcaatgtctctggcaaccagctgaccacactggaggaatcagtcttccactcggtgggcaacctggagacactcatcctggactccaacccgctggcctgcgactgtcggctcctgtgggtgttccggcgccgctggcggctcaacttcaaccggcagcagcccacgtgcgccacgcccgagtttgtccagggcaaggagttcaaggacttccctgatgtgctactgcccaactacttcacctgccgccgcgcccgcatccgggaccgcaaggcccagcaggtgtttgtggacgagggccacacggtgcagtttgtgtgccgggccgatggcgacccgccgcccgccatcctctggctctcaccccgaaagcacctggtctcagccaagagcaatgggcggctcacagtcttccctgatggcacgctggaggtgcgctacgcccaggtacaggacaacggcacgtacctgtgcatcgcggccaacgcgggcggcaacgactccatgcccgcccacctgcatgtgcgcagctactcgcccgactggccccatcagcccaacaagaccttcgctttcatctccaaccagccgggcgagggagaggccaacagcacccgcgccactgtgcctttcccttcaacatgaagatgatatgaggccggggcggggggcagggacccccgggcggccgggcaggggaaggggcctggccgccacctgctcactctccagtccttcccacctcctccctacccttctacacacgttctctttctccctcccgcctccgtcccctgctgccccccgccagccctcaccacctgccctccttctaccaggacctcagaagcccagacctggggaccccacctacacaggggcattgacagactggagttgaaagccgacgaaccgacacgcggcagagtcaataattcaataaaaaagttacgaactttctctgtaacttgggtttcaataattatggatttttatgaaaacttgaaataataaaaagagaaaaaaactatttcctatagctagtcggaatgcaaacttttgacgtcctgattgctccagggccctcttccaactcagtttcttgtttttctcttcctcctcctcctcttcttcctcctttctcttctcttccccagtggggagggatcactcaggaaaacaggaaaggaggttccagccccacccacctgcccaccccgccccaggcaccatcaggagcaggctagggggcaggcctgggcccagctccgggctggctttttgcagggcgcaggtggaggggacaggtctgccgatgggggtgggagcctgtctgctgggctgccaggcggcaccactgcaaggggtgggagcctggcttgggtgtggctgagactctggacagaggctggggtcctcctgggggacagcacagtcagtggagagagccaggggctggaggtggggcccaccccagcctctggtcccagctctgctgctcacttgctgtgtggcctcaagcaggtcactggcctctctgggcctcagtctccacatctgtacaaatgggaacattaccccctgccctgcctacctcacagggctgttgtgaggaattgatgagatgatgtatgtgaaacactttgtaacctgtaaagcgctgtgcacacgtgt

SEQ ID NO: 335850 - DNA, 248 bp, Homo sapiens
ccagcggcagaggcggcggcggcggctccgggccggcccagggggcagaagcaggctcgcgcagcccctgtcccgcggcctgagcgcgcccgcccatccgcccgccggggccgcggcctcccgcctccccactcccgagccccggccccggctccggctcggctcccgcccgcgcggggcggacagacggacagccagccccgcgagggcgcgcggactgccgggcggaggtgtcggaggaggaggaa

SEQ ID NO: 335851 - DNA, 3124 bp, Homo sapiens
ccaggctggtacgccccggaagtatgggatcccgagccccggccccggctccggctcggctcccgcccgcgcggggcggacagacggacagccagccccgcgagggcgcgcggactgccgggcggaggtgtcggaggaggaggaaacggaggagggggctgggcaggggctggggcctggtcgggccggctggagagacatgcgattggtgaccgagccgagcggaccgaaggcgcgcccgagatgcaggtgagcaagaggatgctggcggggggcgtgaggagcatgcccagccccctcctggcctgctggcagcccatcctcctgctggtgctgggctcagtgctgtcaggctcggccacgggctgcccgccccgctgcgagtgctccgcccaggaccgcgctgtgctgtgccaccgcaagcgctttgtggcagtccccgagggcatccccaccgagacgcgcctgctggacctaggcaagaaccgcatcaaaacgctcaaccaggacgagttcgccagcttcccgcacctggaggagctggagctcaacgagaacatcgtgagcgccgtggagcccggcgccttcaacaacctcttcaacctccggacgctgggtctccgcagcaaccgcctgaagctcatcccgctaggcgtcttcactggcctcagcaacctgaccaagctggacatcagcgagaacaagatcgttatcctactggactacatgtttcaggacctgtacaacctcaagtcactggaggttggcgacaatgacctcgtctacatctctcaccgcgccttcagcggcctcaacagcctggagcagctgacgctggagaaatgcaacctgacctccatccccaccgaggcgctgtcccacctgcacggcctcatcgtcctgaggctccggcacctcaacatcaatgccatccgggactactccttcaagaggctgtaccgactcaaggtcttggagatctcccactggccctacttggacaccatgacacccaactgcctctacggcctcaacctgacgtccctgtccatcacacactgcaatctgaccgctgtgccctacctggccgtccgccacctagtctatctccgcttcctcaacctctcctacaaccccatcagcaccattgagggctccatgttgcatgagctgctccggctgcaggagatccagctggtgggcgggcagctggccgtggtggagccctatgccttccgcggcctcaactacctgcgcgtgctcaatgtctctggcaaccagctgaccacactggaggaatcagtcttccactcggtgggcaacctggagacactcatcctggactccaacccgctggcctgcgactgtcggctcctgtgggtgttccggcgccgctggcggctcaacttcaaccggcagcagcccacgtgcgccacgcccgagtttgtccagggcaaggagttcaaggacttccctgatgtgctactgcccaactacttcacctgccgccgcgcccgcatccgggaccgcaaggcccagcaggtgtttgtggacgagggccacacggtgcagtttgtgtgccgggccgatggcgacccgccgcccgccatcctctggctctcaccccgaaagcacctggtctcagccaagagcaatgggcggctcacagtcttccctgatggcacgctggaggtgcgctacgcccaggtacaggacaacggcacgtacctgtgcatcgcggccaacgcgggcggcaacgactccatgcccgcccacctgcatgtgcgcagctactcgcccgactggccccatcagcccaacaagaccttcgctttcatctccaaccagccgggcgagggagaggccaacagcacccgcgccactgtgcctttccccttcgacatcaagaccctcatcatcgccaccaccatgggcttcatctctttcctgggcgtcgtcctcttctgcctggtgctgctgtttctctggagccggggcaagggcaacacaaagcacaacatcgagatcgagtatgtgccccgaaagtcggacgcaggcatcagctccgccgacgcgccccgcaagttcaacatgaagatgatatgaggccggggcggggggcagggacccccgggcggccgggcaggggaaggggcctggccgccacctgctcactctccagtccttcccacctcctccctacccttctacacacgttctctttctccctcccgcctccgtcccctgctgccccccgccagccctcaccacctgccctccttctaccaggacctcagaagcccagacctggggaccccacctacacaggggcattgacagactggagttgaaagccgacgaaccgacacgcggcagagtcaataattcaataaaaaagttacgaactttctctgtaacttgggtttcaataattatggatttttatgaaaacttgaaataataaaaagagaaaaaaactatttcctatagctagtcggaatgcaaacttttgacgtcctgattgctccagggccctcttccaactcagtttcttgtttttctcttcctcctcctcctcttcttcctcctttctcttctcttccccagtggggagggatcactcaggaaaacaggaaaggaggttccagccccacccacctgcccaccccgccccaggcaccatcaggagcaggctagggggcaggcctgggcccagctccgggctggctttttgcagggcgcaggtggaggggacaggtctgccgatgggggtgggagcctgtctgctgggctgccaggcggcaccactgcaaggggtgggagcctggcttgggtgtggctgagactctggacagaggctggggtcctcctgggggacagcacagtcagtggagagagccaggggctggaggtggggcccaccccagcctctggtcccagctctgctgctcacttgctgtgtggcctcaagcaggtcactggcctctctgggcctcagtctccacatctgtacaaatgggaacattaccccctgccctgcctacctcacagggctgttgtgaggaattgatgagatgatgtatgtgaaacactttgtaacctgtaaagcgctgtgcacacgtgt

SEQ ID NO: 335852 - DNA, 2887 bp, Homo sapiens
ccaggctggtacgccccggaagtatgggatcccgagccccggccccggctccggctcggctcccgcccgcgcggggcggacagacggacagccagccccgcgagggcgcgcggactgccgggcggaggtgtcggaggaggaggaaacggaggagggggctgggcaggggctggggcctggtcgggccggctggagagacatgcgattggtgaccgagccgagcggaccgaaggcgcgcccgagatgcaggtgagcaagaggatgctggcggggggcgtgaggagcatgcccagccccctcctggcctgctggcagcccatcctcctgctggtgctgggctcagtgctgtcaggctcggccacgggctgcccgccccgctgcgagtgctccgcccaggaccgcgctgtgctgtgccaccgcaagcgctttgtggcagtccccgagggcatccccaccgagacgcgcctgctggacctaggcaagaaccgcatcaaaacgctcaaccaggacgagttcgccagcttcccgcacctggaggagctggagctcaacgagaacatcgtgagcgccgtggagcccggcgccttcaacaacctcttcaacctccggacgctgggtctccgcagcaaccgcctgaagctcatcccgctaggcgtcttcactggcctcagcaacctgaccaagctggacatcagcgagaacaagatcgttatcctactggactacatgtttcaggacctgtacaacctcaagtcactggaggttggcgacaatgacctcgtctacatctctcaccgcgccttcagcggcctcaacagcctggagcagctgacgctggagaaatgcaacctgacctccatccccaccgaggcgctgtcccacctgcacggcctcatcgtcctgaggctccggcacctcaacatcaatgccatccgggactactccttcaagaggctgtaccgactcaaggtcttggagatctcccactggccctacttggacaccatgacacccaactgcctctacggcctcaacctgacgtccctgtccatcacacactgcaatctgaccgctgtgccctacctggccgtccgccacctagtctatctccgcttcctcaacctctcctacaaccccatcagcaccattgagggctccatgttgcatgagctgctccggctgcaggagatccagctggtgggcgggcagctggccgtggtggagccctatgccttccgcggcctcaactacctgcgcgtgctcaatgtctctggcaaccagctgaccacactggaggaatcagtcttccactcggtgggcaacctggagacactcatcctggactccaacccgctggcctgcgactgtcggctcctgtgggtgttccggcgccgctggcggctcaacttcaaccggcagcagcccacgtgcgccacgcccgagtttgtccagggcaaggagttcaaggacttccctgatgtgctactgcccaactacttcacctgccgccgcgcccgcatccgggaccgcaaggcccagcaggtgtttgtggacgagggccacacggtgcagtttgtgtgccgggccgatggcgacccgccgcccgccatcctctggctctcaccccgaaagcacctggtctcagccaagagcaatgggcggctcacagtcttccctgatggcacgctggaggtgcgctacgcccaggtacaggacaacggcacgtacctgtgcatcgcggccaacgcgggcggcaacgactccatgcccgcccacctgcatgtgcgcagctactcgcccgactggccccatcagcccaacaagaccttcgctttcatctccaaccagccgggcgagggagaggccaacagcacccgcgccactgtgcctttccccttcgacatcaagaccctcatcatcgccaccaccatgggcttcatctctttcctgggcgtcgtcctcttctgcctggtgctgctgtttctctggagccggggcaagggcaacacaaagcacaacatcgagatcgagtatctgccctccttctaccaggacctcagaagcccagacctggggaccccacctacacaggggcattgacagactggagttgaaagccgacgaaccgacacgcggcagagtcaataattcaataaaaaagttacgaactttctctgtaacttgggtttcaataattatggatttttatgaaaacttgaaataataaaaagagaaaaaaactatttcctatagctagtcggaatgcaaacttttgacgtcctgattgctccagggccctcttccaactcagtttcttgtttttctcttcctcctcctcctcttcttcctcctttctcttctcttccccagtggggagggatcactcaggaaaacaggaaaggaggttccagccccacccacctgcccaccccgccccaggcaccatcaggagcaggctagggggcaggcctgggcccagctccgggctggctttttgcagggcgcaggtggaggggacaggtctgccgatgggggtgggagcctgtctgctgggctgccaggcggcaccactgcaaggggtgggagcctggcttgggtgtggctgagactctggacagaggctggggtcctcctgggggacagcacagtcagtggagagagccaggggctggaggtggggcccaccccagcctctggtcccagctctgctgctcacttgctgtgtggcctcaagcaggtcactggcctctctgggcctcagtctccacatctgtacaaatgggaacattaccccctgccctgcctacctcacagggctgttgtgaggaattgatgagatgatgtatgtgaaacactttgtaacctgtaaagcgctgtgcacacgtgt

SEQ ID NO: 335853 - DNA, 556 bp, Homo sapiens
ctactcgggaggctgaggcaggagaatcacttgaactcaggaggcaggggttgcagttagccgagatcatatcgctgtacttcagcctgggagacagagtgggactccatctcaaaacagcaacaacaacaaactattactaaatgagaacttagacatcatttactcataagtttaaggtatgacatcatttacatacaaaatttagctgttaattctaaattgttaagttttaaaaattttgttgtcagctaaattgaatgtagcataattctaaacaaatcttggattaatgtcattgaccccaagcatcctctagccctggaatattagcattggcctgttagtcccctgagctactactccctgggaggtggtcatcctttcttaactcattctttccagccctggggagcctcggaacttttgtctattcacttctttacaaagctgaggaccatcgttgagctgaggaccatcgttgagctgaggaccatcgttgagctgaggaccatcgttgagctgaggagcatcgtgaggctgaggaccatcgttg

SEQ ID NO: 335854 - DNA, 317 bp, Homo sapiens
cagtattggaatggtcatttgataattatttgttctgtaaactttgattttatcactgatggagcatttcttttggctttcctaaagttattttagcacctgccacctatagcttgtttgctttccgttttttctagtcctgcccttgtgggatgaagttctctgttgtataagtctcgtccatattgagaaacagaggagtctcaaagcccctccttgtgtctggtcttggtatctcacccctctcttgtcttgactttactggttatcttcaagtggaaacaagtagagaaaaatcttgtcagctaggcatgtat

SEQ ID NO: 335855 - DNA, 202 bp, Homo sapiens
aggcactcaatctttaagattttagaataactgtgcatttgtcagggttctccagacagacagaaccagtaggacatacgagaagggatttaatcagagaaatctgctcacatgatcacaaagacagagaaatcccacaacaggccatctgcaagctagtgaatcagaggtggcagcatgcctgggtccaagtctggaagcc

SEQ ID NO: 335856 - DNA, 458 bp, Homo sapiens
ggggaggaaggtgagtaaaaatcacacccagaacagaagggaccatggcaccaagatgttgggtttcatccagacagtgatgagtaggcactgaagagttccctgagaagtgataggactaatctgtgtttcataaggatcaaattctggccacaatgaggaggatttggatggcatgggaaggcaggaagacaagggagaaaacctctatttaccccatcacatattctgcaatggtgcttaggttaaagtatgaccttgtattgttgcacaagaagatccactcacccaacagctaattagcaaagaggcctaataataataacctagatttcatttaatcctcatagccatcctgggaagctccatcttacagaagaggtaactgaggttcagaaaggttaaatgacttgtgtaaaatgtcacagtgagtgaatgacagagtgggacttgcatta

SEQ ID NO: 335857 - DNA, 207 bp, Homo sapiens
tgcacctggcctaaatatcattttaatggttaagttctgttttcttagttctactctcacggggcctttatattctatagacgcttttgtttgggcaggaagatgtgagtgttcagtcttttggacagcattaatagatattgatattgcagtattgatagtggcaactctatattgagtgctcactgagggactggccctttgctc

SEQ ID NO: 335858 - DNA, 2089 bp, Homo sapiens
gacattggcagagctagctgaggttttattttggaccaaaaaaaaaaagcaattgaattgttttgtacctggaggcatgggcaaggggggtccccaggtagtaaactccccaggtgggctgagggctagggctgagcctcaggtgggtctcctgttcccagtgctaccctgcatagcggcctccttccggggcaagagccgcgccgcaggagaggcaggctggaccgggggctccccgggcccgcgacccccgccgtgaccccgcagcccccagctcgcccccaagatgatgaagaggcagctgcaccgcatgcggcagctggcccagacgggcagcttgggacgcaccccggagaccgctgagttcctgggtgaggacctgctgcaggtagaacagcggctggagccggccaagcgggcagcccacaacatccacaagcggctgcaggcctgtctgcagggccagagcggggcagacatggacaagcgggtgaagaagcttcccctcatggctctgtccaccacgatggctgagagcttcaaggagctggaccctgattccagcatggggaaggccttggagatgagctgtgccatccagaatcagctggcccgcatcctggccgagtttgagatgaccctggagagggacgtcctgcagccactcagcaggctgagtgaggaggagctgccagccatcctcaaacacaagaaaagcctccagaagctcgtgtccgactggaacacactcaagagcaggctcagtcaggcaaccaagaattcaggcagcagtcaaggcctaggaggcagcccgggtagtcacagccatacgaccatggccaacaaggtggagacgctgaaggaggaggaggaggagctgaagaggaaagtggagcaatgcagggacgagtacttggctgacctgtaccactttgttaccaaggaggactcctatgccaactacttcattcgtctcctggagattcaggccgattaccatcgcaggtcactgagctcgctggacacagccctggctgagctgagggagaaccacggccaagcagaccactccccttcgatgacagccacccacttccccagggtgtatggggtgtcgctggcaacccacctgcaagagctgggccgggagattgccctgcccatcgaggcctgcgtcatgatgctgctttctgagggcatgaaggaagagggtctcttccgtctggctgctggggcctcggtgctgaagcgtctcaagcagacaatggcctcggacccccacagcctggaggagttctgctccgacccgcacgctgtggcaggtgccctcaagtcctatctgcgggagctgccagagcctctgatgaccttcgacctctatgatgactggatgagggcagccagcctgaaggagccaggggcccggctgcaggccctccaagaggtgtgcagccgcctaccccccgagaacctcagcaacctcaggtacctgatgaagttcctggcacggctggccgaggagcaggaggtgaacaagatgacacccagcaacatcgccatagtcctgggacccaacttgctgtggccacctgagaaagaaggggaccaggcccagctggatgcagcctccgtgtcttccatccaggtggtgggcgtcgtcgaggcgctgatccagagcgcagacaccctcttccctggagacatcaacttcaacgtgtcaggcctcttctcagctgttaccctccaggacacagtcagtgacaggctggcctctgaggaacttccgtccactgccgtgcccaccccagccaccaccccggctccggctccggctccagctccagctccggccccagccttggcttcagcagctaccaaggaaaggacagagtctgaggtgcctcccagaccagcctcccccaaggtcaccaggagtcccccggagacagctgccccagtggaggacatggctcggaggagtcctaggggagccaccggaaggaaggagaggtttgcctgctcctacgggactgattcttctcttgccgacatgttttttgtaaggctggtaaataaattattttggaca

SEQ ID NO: 335859 - DNA, 554 bp, Homo sapiens
tggccacaccaggaggatgctgtggggtctgctgagtacagtgtgtgtacttgtgcacgcctggtccctaggagcacaggtggttagcgtatctgtgagggtgtgcccgcgtgtgtcacagctggtgctggggcaaccctaaagcctgggatcctgtaaacagtcctgcggcagccctgttctcccctctgtggagtggctgtgatcaccaaatctccctaagcagccctcagcaccccctccctccccacctggccctcccaggacagctctcgccccccacaaaggggcatgggcctccagcctttgcccacaagtgcctcagtgcccactgggtcggcccccatggccaggagggctcaggacaatcctctatttcctgaccttttcctcgtccaccctgggcttggggacccccccaccggactctccactctccggcaggtcctaggggagccaccggaaggaaggagaggtttgcctgctcctacgggactgattcttctcttgccgacatgttttttgtaaggctggtaaataaattattttggaca

SEQ ID NO: 335860 - DNA, 2743 bp, Homo sapiens
gacattggcagagctagctgaggttttattttggaccaaaaaaaaaaagcaattgaattgttttgtacctggaggcatgggcaaggggggtccccaggtagtaaactccccaggtgggctgagggctagggctgagcctcaggtgggtctcctgttcccagtgctaccctgcatagcggcctccttccggggcaagagccgcgccgcaggagaggcaggctggaccgggggctccccgggcccgcgacccccgccgtgaccccgcagcccccagctcgcccccaagatgatgaagaggcagctgcaccgcatgcggcagctggcccagacgggcagcttgggacgcaccccggagaccgctgagttcctgggtgaggacctgctgcaggtagaacagcggctggagccggccaagcgggcagcccacaacatccacaagcggctgcaggcctgtctgcagggccagagcggggcagacatggacaagcgggtgaagaagcttcccctcatggctctgtccaccacgatggctgagagcttcaaggagctggaccctgattccagcatggggaaggccttggagatgagctgtgccatccagaatcagctggcccgcatcctggccgagtttgagatgaccctggagagggacgtcctgcagccactcagcaggctgagtgaggaggagctgccagccatcctcaaacacaagaaaagcctccagaagctcgtgtccgactggaacacactcaagagcaggctcagtcaggcaaccaagaattcaggcagcagtcaaggcctaggaggcagcccgggtagtcacagccatacgaccatggccaacaaggtggagacgctgaaggaggaggaggaggagctgaagaggaaagtggagcaatgcagggacgagtacttggctgacctgtaccactttgttaccaaggaggactcctatgccaactacttcattcgtctcctggagattcaggccgattaccatcgcaggtcactgagctcgctggacacagccctggctgagctgagggagaaccacggccaagcagaccactccccttcgatgacagccacccacttccccagggtgtatggggtgtcgctggcaacccacctgcaagagctgggccgggagattgccctgcccatcgaggcctgcgtcatgatgctgctttctgagggcatgaaggaagagggtctcttccgtctggctgctggggcctcggtgctgaagcgtctcaagcagacaatggcctcggacccccacagcctggaggagttctgctccgacccgcacgctgtggcaggtgccctcaagtcctatctgcgggagctgccagagcctctgatgaccttcgacctctatgatgactggatgagggcagccagcctgaaggagccaggggcccggctgcaggccctccaagaggtgtgcagccgcctaccccccgagaacctcagcaacctcaggtacctgatgaagttcctggcacggctggccgaggagcaggaggtgaacaagatgacacccagcaacatcgccatagtcctgggacccaacttgctgtggccacctgagaaagaaggggaccaggcccagctggatgcagcctccgtgtcttccatccaggtggtgggcgtcgtcgaggcgctgatccagagcgcagacaccctcttccctggagacatcaacttcaacgtgtcaggcctcttctcagctgttaccctccaggacacagtcagtgacaggctggcctctgaggaacttccgtccactgccgtgcccaccccagccaccaccccggctccggctccggctccagctccagctccggccccagccttggcttcagcagctaccaaggaaaggacagagtctgaggtgcctcccagaccagcctcccccaaggtcaccaggagtcccccggagacagctgccccagtggaggacatggctcggaggaccaagcgcccggcgccagcccggcccaccatgccgcccccccaggtctccggctcccgctcctcccctccagccccgcccttgccccctggctctggcagccctgggaccccccaagccctgccccgacgtctggttggcagcagcctccgagcccccacagtgccacccccgttaccccccacaccccctcagcctgcccggcgccaaagccggcgttcaccagcctcccccagcccggcctccccaggtccagcctcccccagcccagtctctttgagtaaccctgcacaggtggacctgggggctgccacagcagagggaggagcccctgaggctatcagtggggtccccactcccccagctatcccccctcagccccgccccaggagccttgcctcagagaccaactgagtggctggtttctccctaagcagccctcagcaccccctccctccccacctggccctcccaggacagctctcgccccccacaaaggggcatgggcctccagcctttgcccacaagtgcctcagtgcccactgggtcggcccccatggccaggagggctcaggacaatcctctatttcctgaccttttcctcgtccaccctgggcttggggacccccccaccggactctccactctccggcaggtcctaggggagccaccggaaggaaggagaggtttgcctgctcctacgggactgattcttctcttgccgacatgttttttgtaaggctggtaaataaattattttggaca

SEQ ID NO: 335861 - DNA, 2075 bp, Homo sapiens
  misc_feature (21)..(22): n is a, c, g, or t
  misc_feature (27)..(27): n is a, c, g, or t
aaacttaggctagtagaggcnngtgtnaatcggccgaggacaagaaaagcctccagaagctcgtgtccgactggaacacactcaagagcaggctcagtcaggcaaccaagaattcaggcagcagtcaaggcctaggaggcagcccgggtagtcacagccatacgaccatggccaacaaggtggagacgctgaaggaggaggaggaggagctgaagaggaaagtggagcaatgcagggacgagtacttggctgacctgtaccactttgttaccaaggaggactcctatgccaactacttcattcgtctcctggagattcaggccgattaccatcgcaggtcactgagctcgctggacacagccctggctgagctgagggagaaccacggccaagcagaccactccccttcgatgacagccacccacttccccagggtgtatggggtgtcgctggcaacccacctgcaagagctgggccgggagattgccctgcccatcgaggcctgcgtcatgatgctgctttctgagggcatgaaggaagagggtctcttccgtctggctgctggggcctcggtgctgaagcgtctcaagcagacaatggcctcggacccccacagcctggaggagttctgctccgacccgcacgctgtggcaggtgccctcaagtcctatctgcgggagctgccagagcctctgatgaccttcgacctctatgatgactggatgagggcagccagcctgaaggagccaggggcccggctgcaggccctccaagaggtgtgcagccgcctaccccccgagaacctcagcaacctcaggtacctgatgaagttcctggcacggctggccgaggagcaggaggtgaacaagatgacacccagcaacatcgccatagtcctgggacccaacttgctgtggccacctgagaaagaaggggaccaggcccagctggatgcagcctccgtgtcttccatccaggtggtgggcgtcgtcgaggcgctgatccagagcgcagacaccctcttccctggagacatcaacttcaacgtgtcaggcctcttctcagctgttaccctccaggacacagtcagtgacaggctggcctctgaggaacttccgtccactgccgtgcccaccccagccaccaccccggctccggctccggctccagctccagctccggccccagccttggcttcagcagctaccaaggaaaggacagagtctgaggtgcctcccagaccagcctcccccaaggtcaccaggagtcccccggagacagctgccccagtggaggacatggctcggaggaccaagcgcccggcgccagcccggcccaccatgccgcccccccaggtctccggctcccgctcctcccctccagccccgcccttgccccctggctctggcagccctgggaccccccaagccctgccccgacgtctggttggcagcagcctccgagcccccacagtgccacccccgttaccccccacaccccctcagcctgcccggcgccaaagccggcgttcaccagcctcccccagcccggcctccccaggtccagcctcccccagcccagtctctttgagtaaccctgcacaggtggacctgggggctgccacagcagagggaggagcccctgaggctatcagtggggtccccactcccccagctatcccccctcagccccgccccaggagccttgcctcagagaccaactgagtggctggtttctccctaagcagccctcagcaccccctccctccccacctggccctcccaggacagctctcgccccccacaaaggggcatgggcctccagcctttgcccacaagtgcctcagtgcccactgggtcggcccccatggccaggagggctcaggacaatcctctatttcctgaccttttcctcgtccaccctgggcttggggacccccccaccggactctccactctccggcaggtcctaggggagccaccggaaggaaggagaggtttgcctgctcctacgggactgattcttctcttgccgacatgttttttgtaaggctggtaaataaattattttggaca

SEQ ID NO: 335862 - DNA, 2825 bp, Homo sapiens
gacattggcagagctagctgaggttttattttggaccaaaaaaaaaaagcaattgaattgttttgtacctggaggcatgggcaaggggggtccccaggtagtaaactccccaggtgggctgagggctagggctgagcctcaggtgggtctcctgttcccagtgctaccctgcatagcggcctccttccggggcaagagccgcgccgcaggagaggcaggctggaccgggggctccccgggcccgcgacccccgccgtgaccccgcagcccccagctcgcccccaagatgatgaagaggcagctgcaccgcatgcggcagctggcccagacgggcagcttgggacgcaccccggagaccgctgagttcctgggtgaggacctgctgcaggtagaacagcggctggagccggccaagcgggcagcccacaacatccacaagcggctgcaggcctgtctgcagggccagagcggggcagacatggacaagcgggtgaagaagcttcccctcatggctctgtccaccacgatggctgagagcttcaaggagctggaccctgattccagcatggggaaggccttggagatgagctgtgccatccagaatcagctggcccgcatcctggccgagtttgagatgaccctggagagggacgtcctgcagccactcagcaggctgagtgaggaggagctgccagccatcctcaaacacaagaaaagcctccagaagctcgtgtccgactggaacacactcaagagcaggctcagtcaggcaaccaagaattcaggcagcagtcaaggcctaggaggcagcccgggtagtcacagccatacgaccatggccaacaaggtggagacgctgaaggaggaggaggaggagctgaagaggaaagtggagcaatgcagggacgagtacttggctgacctgtaccactttgttaccaaggaggactcctatgccaactacttcattcgtctcctggagattcaggccgattaccatcgcaggtcactgagctcgctggacacagccctggctgagctgagggagaaccacggccaagcagaccactccccttcgatgacagccacccacttccccagggtgtatggggtgtcgctggcaacccacctgcaagagctgggccgggagattgccctgcccatcgaggcctgcgtcatgatgctgctttctgagggcatgaaggaagagggtctcttccgtctggctgctggggcctcggtgctgaagcgtctcaagcagacaatggcctcggacccccacagcctggaggagttctgctccgacccgcacgctgtggcaggtgccctcaagtcctatctgcgggagctgccagagcctctgatgaccttcgacctctatgatgactggatgagggcagccagcctgaaggagccaggggcccggctgcaggccctccaagaggtgtgcagccgcctaccccccgagaacctcagcaacctcaggtacctgatgaagttcctggcacggctggccgaggagcaggaggtgaacaagatgacacccagcaacatcgccatagtcctgggacccaacttgctgtggccacctgagaaagaaggggaccaggcccagctggatgcagcctccgtgtcttccatccaggtggtgggcgtcgtcgaggcgctgatccagagcgcagacaccctcttccctggagacatcaacttcaacgtgtcaggcctcttctcagctgttaccctccaggacacagtcagtgacaggctggcctctgaggaacttccgtccactgccgtgcccaccccagccaccaccccggctccggctccggctccagctccagctccggccccagccttggcttcagcagctaccaaggaaaggacagagtctgaggtgcctcccagaccagcctcccccaaggtcaccaggagtcccccggagacagctgccccagtggaggacatggctcggaggaccaagcgcccggcgccagcccggcccaccatgccgcccccccaggtctccggctcccgctcctcccctccagccccgcccttgccccctggctctggcagccctgggaccccccaagccctgccccgacgtctggttggcagcagcctccgagcccccacagtgccacccccgttaccccccacaccccctcagcctgcccggcgccaaagccggcgttcaccagcctcccccagcccggcctccccaggtccagcctcccccagcccagtctctttgagtaaccctgcacaggtggacctgggggctgccacagcagagggaggagcccctgaggctatcagtggggtccccactcccccagctatcccccctcagccccgccccaggagccttgcctcagagaccaactgagtggctggtttctccctaagcagccctcagcaccccctccctccccacctggccctcccaggacagctctcgccccccacaaaggggcatgggcctccagcctttgcccacaagtgcctcagtgcccactgggtcggcccccatggccaggagggctcaggacaatcctctatttcctgaccttttcctcgtccaccctgggcttggggacccccccaccggactctccactctccggcaggtcctaggggagccaccggaaggaaggagaggtttgcctgctcctacgggactgattcttctcttgccgacatgttttttgtaaggctggtaaataaattattttggacaaaactggagcagctgcccaaatgatagttttattttctgtccttgaaataaagaagccaattttataaaggggaaaacaata

SEQ ID NO: 335863 - DNA, 1099 bp, Homo sapiens
  misc_feature (1045)..(1045): n is a, c, g, or t
  misc_feature (1049)..(1049): n is a, c, g, or t
  misc_feature (1051)..(1051): n is a, c, g, or t
tggccacaccaggaggatgctgtggggtctgctgagtacagtgtgtgtacttgtgcacgcctggtccctaggagcacaggtggttagcgtatctgtgagggtgtgcccgcgtgtgtcacagctggtgctggggcaaccctaaagcctgggatcctgtaaacagtcctgcggcagccctgttctcccctctgtggagtggctgtgatcaccaaatctgccaccaggggcaacccagagcactcatggcccagcctgggcagaggccccggccagtggagctctcagatctgcagctctaaatcctagaatcccatgtggtctgctgtatggaggggacacttggctctggacatgcaacagggcaggtgaccagctcaccttgggatcatctccaggctcagtcaggcaaccaagaattcaggcagcagtcaaggcctaggaggcagcccgggtagtcacagccatacgaccatggccaacaaggtggagacgctgaaggaggaggaggaggagctgaagaggaaagtggagcaatgcagggacgagtacttggctgacctgtaccactttgttaccaaggaggactcctatgccaactacttcattcgtctcctggagattcaggccgattaccatcgcaggtcactgagctcgctggacacagccctggctgagctgagggagaaccacggccaagcagaccactccccttcgatgacagccacccacttccccagggtgtatggggtgtcgctggcaacccacctgcaagagctgggccgggagattgccctgcccatcgaggcctgcgtcatgatgctgctttctgagggcatgaaggaagagggtctcttccgtctggctgctggggcctcggtgctgaagcgtctcaagcagacaatggcctcggacccccacagcctggaggagttctgctccgacccgcacgctgtggcaggtgccctcaagtcctatctgcgggagctgccagagcctctgatgaccttcgacctctatgatgactggatgagggcagccagctganggancnaggggcacggtgcaggcctcaaaaaggtgttcacgcaacccccgaaaa

SEQ ID NO: 335864 - DNA, 777 bp, Homo sapiens
ctgccctgcccacccctctgtgacccttgcctgcctcctctcgaacccagggtctcttccgtctggctgctggggcctcggtgctgaagcgtctcaagcagacaatggcctcggacccccacagcctggaggagttctgctccgacccgcacgctgtggcaggtgccctcaagtcctatctgcgggagctgccagagcctctgatgaccttcgacctctatgatgactggatgagggcagccagcctgaaggagccaggggcccggctgcaggccctccaagaggtgtgcagccgcctaccccccgagaacctcagcaacctcaggtacctgatgaagttcctggcacggctggccgaggagcaggaggtgaacaagatgacacccagcaacatcgccatagtcctgggacccaacttgctgtggccacctgagaaagaaggggaccaggcccagctggatgcagcctccgtgtcttccatccaggtggtgggcgtcgtcgaggcgctgatccagagcgcagacaccctcttccctggagacatcaacttcaacgtgtcaggcctcttctcagctgttaccctccaggacacagtcagtgacaggctggcctctgaggaacttccgtccactgccgtgcccaccccagccaccaccccggctccggctccggctccagctccagctccggccccagccttggcttcagcagctaccaaggaaaggtgaggactgaggggcttgaatggctcctgtggtactcccacaatcagcctgc

SEQ ID NO: 335865 - DNA, 2379 bp, Homo sapiens
tggccacaccaggaggatgctgtggggtctgctgagtacagtgtgtgtacttgtgcacgcctggtccctaggagcacaggtggttagcgtatctgtgagggtgtgcccgcgtgtgtcacagctggtgctggggcaaccctaaagcctgggatcctgtaaacagtcctgcggcagccctgttctcccctctgtggagtggctgtgatcaccaaatctgccaccaggggcaacccagagcactcatggcccagcctgggcagaggccccggccagtggagctctcagatctgcagctctaaatcctagaatcccatgtggtctgctgtatggaggggacacttggctctggacatgcaacagggcaggtgaccagctcaccttgggatcatctccaggctcagtcaggcaaccaagaattcaggcagcagtcaaggcctaggaggcagcccgggtagtcacagccatacgaccatggccaacaaggtggagacgctgaaggaggaggaggaggagctgaagaggaaagtggagcaatgcagggacgagtacttggctgacctgtaccactttgttaccaaggaggactcctatgccaactacttcattcgtctcctggagattcaggccgattaccatcgcaggtcactgagctcgctggacacagccctggctgagctgagggagaaccacggccaagcagaccactccccttcgatgacagccacccacttccccagggtgtatggggtgtcgctggcaacccacctgcaagagctgggccgggagattgccctgcccatcgaggcctgcgtcatgatgctgctttctgagggcatgaaggaagagggtctcttccgtctggctgctggggcctcggtgctgaagcgtctcaagcagacaatggcctcggacccccacagcctggaggagttctgctccgacccgcacgctgtggcaggtgccctcaagtcctatctgcgggagctgccagagcctctgatgaccttcgacctctatgatgactggatgagggcagccagcctgaaggagccaggggcccggctgcaggccctccaagaggtgtgcagccgcctaccccccgagaacctcagcaacctcaggtacctgatgaagttcctggcacggctggccgaggagcaggaggtgaacaagatgacacccagcaacatcgccatagtcctgggacccaacttgctgtggccacctgagaaagaaggggaccaggcccagctggatgcagcctccgtgtcttccatccaggtggtgggcgtcgtcgaggcgctgatccagagcgcagacaccctcttccctggagacatcaacttcaacgtgtcaggcctcttctcagctgttaccctccaggacacagtcagtgacaggctggcctctgaggaacttccgtccactgccgtgcccaccccagccaccaccccggctccggctccggctccagctccagctccggccccagccttggcttcagcagctaccaaggaaaggacagagtctgaggtgcctcccagaccagcctcccccaaggtcaccaggagtcccccggagacagctgccccagtggaggacatggctcggaggaccaagcgcccggcgccagcccggcccaccatgccgcccccccaggtctccggctcccgctcctcccctccagccccgcccttgccccctggctctggcagccctgggaccccccaagccctgccccgacgtctggttggcagcagcctccgagcccccacagtgccacccccgttaccccccacaccccctcagcctgcccggcgccaaagccggcgttcaccagcctcccccagcccggcctccccaggtccagcctcccccagcccagtctctttgagtaaccctgcacaggtggacctgggggctgccacagcagagggaggagcccctgaggctatcagtggggtccccactcccccagctatcccccctcagccccgccccaggagccttgcctcagagaccaactgagtggctggtttctccctaagcagccctcagcaccccctccctccccacctggccctcccaggacagctctcgccccccacaaaggggcatgggcctccagcctttgcccacaagtgcctcagtgcccactgggtcggcccccatggccaggagggctcaggacaatcctctatttcctgaccttttcctcgtccaccctgggcttggggacccccccaccggactctccactctccggcaggtcctaggggagccaccggaaggaaggagaggtttgcctgctcctacgggactgattcttctcttgccgacatgttttttgtaaggctggtaaataaattattttggaca

SEQ ID NO: 335866 - DNA, 2134 bp, Homo sapiens
  misc_feature (2016)..(2016): n is a, c, g, or t
gacattggcagagctagctgaggttttattttggaccaaaaaaaaaaagcaattgaattgttttgtacctggaggcatgggcaaggggggtccccaggtagtaaactccccaggtgggctgagggctagggctgagcctcaggtgggtctcctgttcccagtgctaccctgcatagcggcctccttccggggcaagagccgcgccgcaggagaggcaggctggaccgggggctccccgggcccgcgacccccgccgtgaccccgcagcccccagctcgcccccaagatgatgaagaggcagctgcaccgcatgcggcagctggcccagacgggcagcttgggacgcaccccggagaccgctgagttcctgggtgaggacctgctgcaggtagaacagcggctggagccggccaagcgggcagcccacaacatccacaagcggctgcaggcctgtctgcagggccagagcggggcagacatggacaagcgggtgaagaagcttcccctcatggctctgtccaccacgatggctgagagcttcaaggagctggaccctgattccagcatggggaaggccttggagatgagctgtgccatccagaatcagctggcccgcatcctggccgagtttgagatgaccctggagagggacgtcctgcagccactcagcaggctgagtgaggaggagctgccagccatcctcaaacacaagaaaagcctccagaagctcgtgtccgactggaacacactcaagagcaggctcagtcaggcaaccaagaattcaggcagcagtcaaggcctaggaggcagcccgggtagtcacagccatacgaccatggccaacaaggtggagacgctgaaggaggaggaggaggagctgaagaggaaagtggagcaatgcagggacgagtacttggctgacctgtaccactttgttaccaaggaggactcctatgccaactacttcattcgtctcctggagattcaggccgattaccatcgcaggtcactgagctcgctggacacagccctggctgagctgagggagaaccacggccaagcagaccactccccttcgatgacagccacccacttccccagggtgtatggggtgtcgctggcaacccacctgcaagagctgggccgggagattgccctgcccatcgaggcctgcgtcatgatgctgctttctgagggcatgaaggaagagggtctcttccgtctggctgctggggcctcggtgctgaagcgtctcaagcagacaatggcctcggacccccacagcctggaggagttctgctccgacccgcacgctgtggcaggtgccctcaagtcctatctgcgggagctgccagagcctctgatgaccttcgacctctatgatgactggatgagggcagccagcctgaaggagccaggggcccggctgcaggccctccaagaggtgtgcagccgcctaccccccgagaacctcagcaacctcaggtacctgatgaagttcctggcacggctggccgaggagcaggaggtgaacaagatgacacccagcaacatcgccatagtcctgggacccaacttgctgtggccacctgagaaagaaggggaccaggcccagctggatgcagcctccgtgtcttccatccaggtggtgggcgtcgtcgaggcgctgatccagagcgcagacaccctcttccctggagacatcaacttcaacgtgtcaggcctcttctcagctgttaccctccaggacacagtcagtgacaggctggcctctgaggaacttccgtccactgccgtgcccaccccagccaccaccccggctccggctccggctccagctccagctccggccccagccttggcttcagcagctaccaaggaaaggacagagtctgaggtgcctcccagaccagcctcccccaaggtcaccaggagtcccccggagacagctgccccagtggaggacatggctcggaggaccaagcgcccggcgccagcccggtccaccatgtccgncgcacgccaggtctccgagtcgcgttcgctcgtgtcgagggctgaggaaggcttgtgcatccggcagagctgggacacaagaagaggaggagatcataaggacgcggtggaggaaatg

SEQ ID NO: 335867 - DNA, 1159 bp, Homo sapiens
gacattggcagagctagctgaggttttattttggaccaaaaaaaaaaagcaattgaattgttttgtacctggaggcatgggcaaggggggtccccaggtagtaaactccccaggtgggctgagggctagggctgagcctcaggtgggtctcctgttcccagtgctaccctgcatagcggcctccttccggggcaagagccgcgccgcaggagaggcaggctggaccgggggctccccgggcccgcgacccccgccgtgaccccgcagcccccagctcgcccccaagatgatgaagaggcagctgcaccgcatgcggcagctggcccagacgggcagcttgggacgcaccccggagaccgctgagttcctgggtgaggacctgctgcaggtagaacagcggctggagccggccaagcgggcagcccacaacatccacaagcggctgcaggcctgtctgcagggccagagcggggcagacatggacaagcgggtgaagaagcttcccctcatggctctgtccaccacgatggctgagagcttcaaggagctggaccctgattccagcatggggaaggccttggagatgagctgtgccatccagaatcagctggcccgcatcctggccgagtttgagatgaccctggagagggacgtcctgcagccactcagcaggctgagtgaggaggagctgccagccatcctcaaacacaagaaaagcctccagaagctcgtgtccgactggaacacactcaagagcaggctcagtcaggcaaccaagaattcaggcagcagtcaaggcctaggaggcagcccgggtagtcacagccatacgaccatggccaacaaggtggagacgctgaaggaggaggaggaggagctgaagaggaaagtggagcaatgcagggacgagtacttggctgacctgtaccactttgttaccaaggaggactcctatgccaactacttcattcgtctcctggagattcaggccgattaccatcgcaggtcactgagctcgctggacacagccctggctgagctgagggagaaccacggccaagcaggtggggacataggcccggcgataccacacccctgaccctgccctgctcggggcttattgagaagctcgcacttcatcctgaaaggtagcaggaag

SEQ ID NO: 335868 - DNA, 597 bp, Homo sapiens
aatgtggctgtgtcaccaccaagaacacgctgggcatttgacagcaattcaacatgagcttcagagacacccacaacagccaatgaggcagatgtttcagctgagcaaagcagatgtcagacaaggacagctactgtgtccagttgtttacagcaagcagctatttctctctccaccaagaataatctcaagacaaagaacaggcccataaccatttttccagaaccactttaaagatcatggttccatgacaaaggcaaaagtatcacagcacatgcagtcagcactcaaaagcccaaacacaagttcctttcctttgcagaactgaaaaacttttacagtacttgagaagggctcacaatgcctcctaaaaataagttgagggcgaacagctgataggcaactattacacagaataagttttgtagtctgtccagaaaataccatggagtaagcctttctcctgaattccaaggcagatttcctgcaactcccccacaaattagtgttaattttttttttttttttttgagacggggcctagctgtgtcacccaggctggagtgcagtggcgcaatctccactcattgcaagctc

SEQ ID NO: 335869 - DNA, 404 bp, Homo sapiens
cactgcaacaagacactgagaaaacactgaaatagtaggggccctaaggtatttaatttgtagagcatgtccagtgcctgaatgatgctgaaaatattttttgatgttgatgaacctcagtgttcttaaacagaaagtttcttgacatgtggataagctatcagctcttttttccagtaagtccaaacaggattgtgtactaatagtataatatggagaggaatatggaacaaatattggggaagaatgagctcaattttcattaaatgtatttcatcttctaaactttccaaggacttttttttttttttttttttttttttttttttttttttaagacaattccttttgggggccgggctggggggtcccgccggtgtatccccgagacttgggggagaggc

SEQ ID NO: 335870 - DNA, 585 bp, Homo sapiens
aatgctgctatcaaatagaggtgttgcttttcttttattcccttgttcttgaccctcctctggatggagattctgacagtacctcaggtagtgttgttagggtaaaaataatcaatgttcagtttttaaatgtaattatattattttacttctgaaatataccttcaaaactaaaggaaggtatgaggagaacagagctctgagtttttgctaagacaattgttgggaaaaagctgagtgtcgggagaaactgaggcagggcttgcatgtctgacatgtcctctggaatgtatctagacttgctggctttttgcttctagccttcctaggctcctactcccattatctcaagtagcagaacatgttccatataaatgctaaaccattacagctgtaaatcatgtgcttaatgcaatgtgtcctttccacctccacattctcaccacttgtttctttgttggattaccaataaatagcatgggctcccagagctcagggccttcacagcctccacaatggtgatggccccctgggaagagtgtaagccctggctgatacagaactgcgtgaagttctacgcacgcg

SEQ ID NO: 335871 - DNA, 546 bp, Homo sapiens
ggccgtaaaaagagatgattaagttaaatgagagtgttacagtagaacaaaacccaatcttatggtgaacttattgactgctctatacctaattgactctgctatggccacactgatcttcttcttcctctccttctcattcttcttctccatttttatttttgaaagatatgcttagatttgtcctctatttatttttaaattttatatgtataaatatatgtggtgcaatggtaattttgttatgcgcatatattgcatactgagtaattcagggatttagggtatccataaccagaataacatagagtgcatttattaattaatgtctcactattacctctctcccacctcctcacccttccaagtctacattgactgtcattccactctctacatctatgtaaacgcattctttttttttttaacaccacgtgtatgagtgagaacatgttatatttgattttctgtgtctggcctgtttcacttaacacatcatctgtcatgcccagttccactcatattgctgcaaagtgagtgatttta

SEQ ID NO: 335872 - DNA, 391 bp, Homo sapiens
gctcactttctgccgttccactggggtttgctctggaacatgcccctgctgctgcccaggcctcaccatgccccatccacccccgtcccaccagcctcgcaggatccacttgctgtaccttccacggtaacagtctcactaatctgggccagtgagctaattagaaggtttgagttctccagagccctcccctgcctttccaagaacagccacattttaatgggaacagttttctgcccctttttttttgttgcctaagagaagtagatctaatgatagtgatttcatacagggttggcttcatgcatcggttcacgacgttcaccccaattgcctaccgtgtgcatggcctggcactggggctgccatgcccagcagaagggaagatgta

SEQ ID NO: 335873 - DNA, 489 bp, Homo sapiens
tgtccatatttatcaagccacattcaaggaaatcatgtcttaactattttggatgttgcctctccttcaacttgtacatgaaactccagcagatttaatattggcatgcatcatctagtcaaacctctcacatgttcttcaaatcaatcaaatttgggattctcaacattttctgtgtcaataaaaggaatggaattagtagattcgatgaataactgtttttccttgccacactggacttccagacgccatttggattgggtttagaagatggggaagtttagaagatgtttcttggcctgagtctcttaagaggagagatgtagaagagagagtaaggccgggcgcggtggctcacgcctgtaatcccagcactttgggaggccgaggcgggcggatcacgaggtcaggagatcgagaccatcccggctaaaacggtgaaaccccgtctctactaaaaatacaaaaaattagccgggcgtagtggcg

SEQ ID NO: 335874 - DNA, 467 bp, Homo sapiens
catgttaatatcttagctcagacgagttttctttcagtccctgttgattcctgcattatatattcatcagtctggtaattaacatccagtcatccttgttgctctccttatgaactggctgtgtttaagggttctccacaccagtgggatttatgggaagtctgcatgtccaggcattatcttttatctgaaaacgagaaacatatagagatcaattatgataatctcctgcatggcagatgcagctctcgagggatttgttaccccatgacagcaaaatcaagccaggggctgctcggctcaccacttggacgcttgagcggagtggaatgataagtcatagactggtatttgaagctggcatggtagaaggcaggatggcctgcaaataaattacttcattttaggggcatgaagcctttgccaggatagaaatgtttggcattcatttcctagaggctactgga

SEQ ID NO: 335875 - DNA, 236 bp, Homo sapiens
cccaaccagactgtggtcagctagttcctgcaccttccacatataggaaactcacaactgaggctgcagtacctagacaggaccccctaccccgccgccactgcttgggtgttttgttcttatactaagtcaggcatacaaaaattacgttttaggtctgtagtgaataaatccttttcttagaaactaaatgagactagaacctttagaagccttcaatgagccctaaaaaggtc

SEQ ID NO: 335876 - DNA, 336 bp, Homo sapiens
ctcctgggttcaggggattctcctgcctcagcttcccaggtagctgggattacaggtgcatgccaccatgcccagctaatttttgtatttttagtagagacgggatttcaccatgttggccaggctggtctcatactcctgacctcagatgatccgcccccctcagccttccaaagtgctggggattacaggcatgagccactgcacctggccaggagagtttttttctgataatagaagtaatactttctcactttagaaaatgtgaaaagttcagatatataaggaagtcaaacaaaacgtctcctatatatgaagaagaaaagaagcaagttt

SEQ ID NO: 335877 - DNA, 686 bp, Homo sapiens
tatttccctaatgattagtagtgataagtacatgaaagattccttacatcactaatgagtagggctatctagtatgttagaatgagagaaaatgtatagaaataaaaagtattagatttatttagcaataaacacacagaaaacaaaatgaacaaatagaaaacaagtattaactttgtgtgaaaatgttgttctggaaaataaaaataatgatagtatactatgtggttcaggtgtaaataagtttcagtggttacaatgaggtaaatcctgaccactgatctaaatacaattaaaatctgattatttggggaggattatggtgttggaatctttcatgtagtagtggagataggaagatagaaggaaagaaaactaacaaagagataaatcctcatctttcacaatgagaagttaactgatcatgacagctgcggaaaagtaaatacataaaaaaaaagagcaagaaaataaaaaaatgaaaaatacatagttagcaaaataaaaagcataaagtaagatggtaggacacaataaaactgatccattctaacaatctaagtcaatgaagtaaactcggtgaaaaaacaaacattgtcagactaaatttttttttcagctattagtggtttatttgcttcagtaccatatttaatttttttattttagttttcctttatttcttc

SEQ ID NO: 335878 - DNA, 459 bp, Homo sapiens
tatttccctaatgattagtagtgataagtacatgaaagattccttacatcactaatgagtagggctatctagtatgttagaatgagagaaaatgtatagaaataaaaagtattagatttatttagcaataaacacacagaaaacaaaatgaacaaatagaaaacaagtattaactttgtgtgaaaatgttgttctggaaaataaaaataatgatagtatactatgtggttcaggtgtaaataagtttcagtggttacaatgaggtaaatcctgaccactgatctaaatacaattaaaatctgattatttggggaggattatggtgttggaatctttcatgtagtagtggagataggaagatagaagtatgttaatttagagataaacatttatattttttaatgagaagtttattgagggtgaaagatggggtagagaaaattattatgagaaaagaac

SEQ ID NO: 335879 - DNA, 418 bp, Homo sapiens
tatttccctaatgattagtagtgataagtacatgaaagattccttacatcactaatgagtagggctatctagtatgttagaatgagagaaaatgtatagaaataaaaagtattagatttatttagcaataaacacacagaaaacaaaatgaacaaatagaaaacaagtattaactttgtgtgaaaatgttgttctggaaaataaaaataatgatagtatactatgtggttcaggtgtaaataagtttcagtggttacaatgaggtaaatcctgaccactgatctaaatacaattaaaatctgattatttggggaggattatggtgttggaatctttcatgtagtagtggagataggaagatagaagttaaccacaggactaacctctttccttagtgcaacatgtgggaaaagagcac

SEQ ID NO: 335880 - DNA, 501 bp, Homo sapiens
tatttccctaatgattagtagtgataagtacatgaaagattccttacatcactaatgagtagggctatctagtatgttagaatgagagaaaatgtatagaaataaaaagtattagatttatttagcaataaacacacagaaaacaaaatgaacaaatagaaaacaagtattaactttgtgtgaaaatgttgttctggaaaataaaaataatgatagtatactatgtggttcaggtgtaaataagtttcagtggttacaatgaggtaaatcctgaccactgatctaaatacaattaaaatctgattatttggggaggattatggtgatgtaaaacatcttatggcaacggaagaaaggaaagggcccaactgctagccagccccatgagataggcctgtcgcttgaggaacagagatacaccctttggaaaccttgggtaatgggaaggcaacaaataaggccccgtgtgggggttttttgaacaaaagtttttttcatttt

SEQ ID NO: 335881 - DNA, 503 bp, Homo sapiens
cgaagagccaagtcactggacagcaggaccacaaagccctccgtgacgcccgacctgctgaatttcaagaaaggctggctgactaagcagtatgaggacagccagtggaagaaacactggtttgtcctcgccgatcaaagcctgagatactacagggattcagtggctgaggaggcagccgacttggatggagaaattgacttgtctgcatgttacgatgtcacagagtatccagttcagagaaactatggcttccagatacatacaaaggagggcgagtttaccccgtcggccatgacatctgggattcggcggaactggatccagaccatcatgaagcatgtgcacccgaccaccgccccggatgtgaccagctggttgccagaggaaaaaaacaagagcagctgctcttttgagacctgcccgaggcctactgagaagcaagaggcagagccgggggagccggaccctgagcagaagaggagccgcacgtgggagcggag

SEQ ID NO: 335882 - DNA, 408 bp, Homo sapiens
ctgaatggatggcacggtgccaactcttctgccatccgcccttgcagctttttttcttttcggcctccctccgattcttctgctcctcctcccgtcgacttgacgttaattaacactcgggttaattgattttaaaagccgaagaattacagttaacttttcccacagggtacagacgccagccgcttggcacactctgcttttcgcactggtgcaggggaacagggaaagcccgcagcaaagctagcaactgctgagggagcgttgcctgcttattggagtagagccgatagaagtcgacgtggcattgcctcatcctttacaatatatgtatccattatatattttgttaaataatcaaaacaccaccctgtttttcttcttctccgttcctctttcaaaacagga

SEQ ID NO: 335883 - DNA, 323 bp, Homo sapiens
gagggggctctcagccttccacctcggtggcagccagggtagatctgctgtcatcctaggcttctactgagacataattaggcatgtaggggaaatatagcagttgttaagataatctggcttggcatagtggctcaggcctgtaatcccaacactttgggaggccaaggcgggcaggtcacctgaggtcaggagttcgagaccagcctgaccaacatggagaaaccccatctctactaaaaataaaaaattagctgggcgtggtggtacatgcctgtaatcccagctacttgggaggctgaggcaggagaatcacttgaatc

SEQ ID NO: 335884 - DNA, 141 bp, Homo sapiens
gggcagggttagagcaagctagaattacacactgtctaaaagtattcacattattttaaaacactgtgccataaagcatgtctacaggtagatttgtcttacaagctgccaatttgggacccagttaacacaccttcccca

SEQ ID NO: 335885 - DNA, 2380 bp, Homo sapiens
gcgactcgtcccgccttctggggcactagtttgactttgtgattggctactagtatcaaggaatcccggcgtggacagcgcgaggagaaagatggcggcgatggcggtcgggggtgctggtgggagccgcgtgtccagcgggagggacctgaattgcgtccccgaaatagctgacacactaggggctgtggccaagcaggggtttgatttcctctgcatgcctgtcttccatccgcgtttcaagagggagttcattcaggaacctgctaagaatcggcccggtccccagacacgatcagacctactgctgtcaggaagggactggaatacgctaattgtgggaaagctttctccatggattcgtccagactcaaaagtggagaagattcgcaggaactccgaggcggccatgttacaggagctgaattttggtgcatatttgggtcttccagctttcctgctgccccttaatcaggaagataacaccaacctggccagagttttgaccaaccacatccacactggccatcactcttccatgttctggatgcgggtacccttggtggcaccagaggacctgagagatgatataattgagaatgcaccaactacacacacagaggagtacagtggggaggagaaaacgtggatgtggtggcacaacttccggactttgtgtgactatagtaagaggattgcagtggctcttgaaattggggctgacctcccatctaatcatgtcattgatcgctggcttggggagcccatcaaagcagccattctccccactagcattttcctgaccaataagaagggatttcctgttctttctaagatgcaccagaggctcatcttccggctcctcaagttggaggtgcagttcatcatcacaggcaccaaccaccactcagagaaggagttctgctcctacctccaatacctggaatacttaagccagaaccgtcctccacctaatgcctatgaactctttgccaagggctatgaagactatctgcagtccccgcttcagccactgatggacaatctggaatctcagacatatgaagtgtttgaaaaggaccccatcaaatactctcagtaccagcaggccatctataaatgtctgctagaccgagtaccagaagaggagaaggataccaatgtccaggtactgatggtgctgggagcaggacggggacccctggtgaacgcttccctgcgggcagccaagcaggccgaccggcggataaagctgtatgctgtggagaaaaacccaaatgccgtggtgacgctagagaactggcagtttgaagaatggggaagccaagtgaccgtagtctcatcagacatgagggaatgggtggctccagagaaagcagacatcattgtcagtgagcttctgggctcatttgctgacaatgaattgtcgcctgagtgcctggatggagcccagcacttcctaaaagatgatggtgtgagcatccccggggagtacacttcctttctggctcccatctcttcctccaagctgtacaatgaggtccgagcctgtagggagaaggaccgtgaccctgaggcccagtttgagatgccttatgtggtacggctgcacaacttccaccagctctctgcaccccagccctgtttcaccttcagccatcccaacagagatcctatgattgacaacaaccgctattgcaccttggaatttcctgtggaggtgaacacagtactacatggctttgccggctactttgagactgtgctttatcaggacatcactctgagtatccgtccagagactcactctcctgggatgttctcatggtttcccatcctcttccctattaagcagcccataacggtacgtgaaggccaaaccatctgtgtgcgtttctggcgatgcagcaattccaagaaggtgtggtatgagtgggctgtgacagcaccagtctgttctgctattcataaccccacaggccgctcatataccattggcctctagccctgcgtgccaagtgtccagagccttggaagcagcttcaggttctgctcctgtagtacagaaggtgcagtacatctatgggctgtgattccccttgcccatcagagaggagcatttcaatctgctttcctgccttacatcaaggtgggcaagggattataattaattgcagggctcaagccaccaatctatgaagacctcaggccagggggtgaggaattagtgctggatttgaagctacgcactcagcctcaagaactccctggaatatccctgagaacatggggtttgaacggattttcagcctttttctgttcttgttttgatggttttgtgtaagaggaaatacaaataaagttatagccctttactgca

SEQ ID NO: 335886 - DNA, 2003 bp, Homo sapiens
gcgactcgtcccgccttctggggcactagtttgactttgtgattggctactagtatcaaggaatcccggcgtggacagcgcgaggagaaagatggcggcgatggcggtcgggggtgctggtgggagccgcgtgtccagcgggagggacctgaattgcgtccccgaaatagctgacacactaggggctgtggccaagcaggggtgagggccggacctccacgagcggaatgcggggtccgaactcggggacggagaagggcagactagtcatcccggagaagcaggggtttgatttcctctgcatgcctgtcttccatccgcgtttcaagagggagttcattcaggaacctgctaagaatcggcccggtccccagacacgatcagacctactgctgtcaggaagggactggaatacgctaattgtgggaaagctttctccatggattcgtccagactcaaaagtggagaagattcgcaggaactccgaggcgttggaggtgcagttcatcatcacaggcaccaaccaccactcagagaaggagttctgctcctacctccaatacctggaatacttaagccagaaccgtcctccacctaatgcctatgaactctttgccaagggctatgaagactatctgcagtccccgcttcagccactgatggacaatctggaatctcagacatatgaagtgtttgaaaaggaccccatcaaatactctcagtaccagcaggccatctataaatgtctgctagaccgagtaccagaagaggagaaggataccaatgtccaggtactgatggtgctgggagcaggacggggacccctggtgaacgcttccctgcgggcagccaagcaggccgaccggcggataaagctgtatgctgtggagaaaaacccaaatgccgtggtgacgctagagaactggcagtttgaagaatggggaagccaagtgaccgtagtctcatcagacatgagggaatgggtggctccagagaaagcagacatcattgtcagtgagcttctgggctcatttgctgacaatgaattgtcgcctgagtgcctggatggagcccagcacttcctaaaagatgatggtgtgagcatccccggggagtacacttcctttctggctcccatctcttcctccaagctgtacaatgaggtccgagcctgtagggagaaggaccgtgaccctgaggcccagtttgagatgccttatgtggtacggctgcacaacttccaccagctctctgcaccccagccctgtttcaccttcagccatcccaacagagatcctatgattgacaacaaccgctattgcaccttggaatttcctgtggaggtgaacacagtactacatggctttgccggctactttgagactgtgctttatcaggacatcactctgagtatccgtccagagactcactctcctgggatgttctcatggtttcccatcctcttccctattaagcagcccataacggtacgtgaaggccaaaccatctgtgtgcgtttctggcgatgcagcaattccaagaaggtgtggtatgagtgggctgtgacagcaccagtctgttctgctattcataaccccacaggccgctcatataccattggcctctagccctgcgtgccaagtgtccagagccttggaagcagcttcaggttctgctcctgtagtacagaaggtgcagtacatctatgggctgtgattccccttgcccatcagagaggagcatttcaatctgctttcctgccttacatcaaggtgggcaagggattataattaattgcagggctcaagccaccaatctatgaagacctcaggccagggggtgaggaattagtgctggatttgaagctacgcactcagcctcaagaactccctggaatatccctgagaacatggggtttgaacggattttcagcctttttctgttcttgttttgatggttttgtgtaagaggaaatacaaataaagttatagccctttactgca

SEQ ID NO: 335887 - DNA, 1754 bp, Homo sapiens
gcgactcgtcccgccttctggggcactagtttgactttgtgattggctactagtatcaaggaatcccggcgtggacagcgcgaggagaaagatggcggcgatggcggtcgggggtgctggtgggagccgcgtgtccagcgggagggacctgaattgcgtccccgaaatagctgacacactaggggctgtggccaagcaggggtgagggccggacctccacgagcggaatgcggggtcgcctgtagggagaaggaccgtgaccctgaggcccagtttgagatgccttatgtggtacggctgcacaacttccaccagctctctgcaccccagccctgtttcaccttcagccatcccaacagagatcctatgattgacaacaaccgctattgcaccttggaatttcctgtggaggtgaacacagtactacatggctttgccggctactttgagactgtgctttatcagcacttcctaaaagatgatggtgtgagcatccccggggagtacacttcctttctggctcccatctcttcctccaagctgtacaatgaggtccgagcctgtagggagaaggaccgtgaccctgaggcaccaaccaccactcagagaaggagttctgctcctacctccaatacctggaatacttaagccagaaccgtcctccacctaatgcctatgaactctttgccaagggctatgaagactatctgcagtccccgcttcagccactgatggacaatctggaatctcagacatatgaagtgtttgaaaaggaccccatcaaatactctcagtaccagcaggccatctataaatgtctgctagaccgagtaccagaagaggagaaggataccaatgtccaggtactgatggtgctgggagcaggacggggacccctggtgaacgcttccctgcgggcagccaagcaggccgaccggcggataaagctgtatgctgtggagaaaaacccaaatgccgtggtgacgctagagaactggcagtttgaagaatggggaagccaagtgaccgtagtctcatcagacatgagggaatgggtggctccagagaaagcagacatcattgtcagtgagcttctgggctcatttgctgacaatgaattgtcgcctgagtgcctggatggagcccagcacttcctaaaagtgttctcatggtttcccatcctcttccctattaagcagcccataacggtacgtgaaggccaaaccatctgtgtgcgtttctggcgatgcagcaattccaagaaggtgtggtatgagtgggctgtgacagcaccagtctgttctgctattcataaccccacaggccgctcatataccattggcctctagccctgcgtgccaagtgtccagagccttggaagcagcttcaggttctgctcctgtagtacagaaggtgcagtacatctatgggctgtgattccccttgcccatcagagaggagcatttcaatctgctttcctgccttacatcaaggtgggcaagggattataattaattgcagggctcaagccaccaatctatgaagacctcaggccagggggtgaggaattagtgctggatttgaagctacgcactcagcctcaagaactccctggaatatccctgagaacatggggtttgaacggattttcagcctttttctgttcttgttttgatggttttgtgtaagaggaaatacaaataaagttatagccctttactgcacgaaaacatgctgccccctgccactatttt

SEQ ID NO: 335888 - DNA, 2410 bp, Homo sapiens
gcgactcgtcccgccttctggggcactagtttgactttgtgattggctactagtatcaaggaatcccggcgtggacagcgcgaggagaaagatggcggcgatggcggtcgggggtgctggtgggagccgcgtgtccagcgggagggacctgaattgcgtccccgaaatagctgacacactaggggctgtggccaagcaggggtttgatttcctctgcatgcctgtcttccatccgcgtttcaagagggagttcattcaggaacctgctaagaatcggcccggtccccagacacgatcagacctactgctgtcaggaagggactggaatacgctaattgtgggaaagctttctccatggattcgtccagactcaaaagtggagaagattcgcaggaactccgaggcggccatgttacaggagctgaattttggtgcatatttgggtcttccagctttcctgctgccccttaatcaggaagataacaccaacctggccagagttttgaccaaccacatccacactggccatcactcttccatgttctggatgcgggtacccttggtggcaccagaggacctgagagatgatataattgagaatgcaccaactacacacacagaggagtacagtggggaggagaaaacgtggatgtggtggcacaacttccggactttgtgtgactatagtaagaggattgcagtggctcttgaaattggggctgacctcccatctaatcatgtcattgatcgctggcttggggagcccatcaaagcagccattctccccactagcattttcctgaccaataagaagggatttcctgttctttctaagatgcaccagaggctcatcttccggctcctcaagttggaggtgcagttcatcatcacaggcaccaaccaccactcagagaaggagttctgctcctacctccaatacctggaatacttaagccagaaccgtcctccacctaatgcctatgaactctttgccaagggctatgaagactatctgcagtccccgcttcagccactgatggacaatctggaatctcagacatatgaagtgtttgaaaaggaccccatcaaatactctcagtaccagcaggccatctataaatgtctgctagaccgagtaccagaagaggagaaggataccaatgtccaggtactgatggtgctgggagcaggacggggacccctggtgaacgcttccctgcgggcagccaagcaggccgaccggcggataaagctgtatgctgtggagaaaaacccaaatgccgtggtgacgctagagaactggcagtttgaagaatggggaagccaagtgaccgtagtctcatcagacatgagggaatgggtggctccagagaaagcagacatcattgtcagtgagcttctgggctcatttgctgacaatgaattgtcgcctgagtgcctggatggagcccagcacttcctaaaagatgatggtgtgagcatccccggggagtacacttcctttctggctcccatctcttcctccaagctgtacaatgaggtccgagcctgtagggagaaggaccgtgaccctgaggcccagtttgagatgccttatgtggtacggctgcacaacttccaccagctctctgcaccccagccctgtttcaccttcagccatcccaacagagatcctatgattgacaacaaccgctattgcaccttggaatttcctgtggaggtgaacacagtactacatggctttgccggctactttgagactgtgctttatcaggacatcactctgagtatccgtccagagactcactctcctgggatgttctcatggtttcccatcctcttccctattaagcagcccataacggtacgtgaaggccaaaccatctgtgtgcgtttctggcgatgcagcaattccaagaaggtgtggtatgagtgggctgtgacagcaccagtctgttctgctattcataaccccacaggccgctcatataccattggcctctagccctgcgtgccaagtgtccagagccttggaagcagcttcaggttctgctcctgtagtacagaaggtgcagtacatctatgggctgtgattccccttgcccatcagagaggagcatttcaatctgctttcctgccttacatcaaggtgggcaagggattataattaattgcagggctcaagccaccaatctatgaagacctcaggccagggggtgaggaattagtgctggatttgaagctacgcactcagcctcaagaactccctggaatatccctgagaacatggggtttgaacggattttcagcctttttctgttcttgttttgatggttttgtgtaagaggaaatacaaataaagttatagccctttactgcacgaaaacatgctgccccctgccactatttt

SEQ ID NO: 335889 - DNA, 2261 bp, Homo sapiens
gcgactcgtcccgccttctggggcactagtttgactttgtgattggctactagtatcaaggaatcccggcgtggacagcgcgaggagaaagatggcggcgatggcggtcgggggtgctggtgggagccgcgtgtccagcgggagggacctgaattgcgtccccgaaatagctgacacactaggggctgtggccaagcagggactggaatacgctaattgtgggaaagctttctccatggattcgtccagactcaaaagtggagaagattcgcaggaactccgaggcggccatgttacaggagctgaattttggtgcatatttgggtcttccagctttcctgctgccccttaatcaggaagataacaccaacctggccagagttttgaccaaccacatccacactggccatcactcttccatgttctggatgcgggtacccttggtggcaccagaggacctgagagatgatataattgagaatgcaccaactacacacacagaggagtacagtggggaggagaaaacgtggatgtggtggcacaacttccggactttgtgtgactatagtaagaggattgcagtggctcttgaaattggggctgacctcccatctaatcatgtcattgatcgctggcttggggagcccatcaaagcagccattctccccactagcattttcctgaccaataagaagggatttcctgttctttctaagatgcaccagaggctcatcttccggctcctcaagttggaggtgcagttcatcatcacaggcaccaaccaccactcagagaaggagttctgctcctacctccaatacctggaatacttaagccagaaccgtcctccacctaatgcctatgaactctttgccaagggctatgaagactatctgcagtccccgcttcagccactgatggacaatctggaatctcagacatatgaagtgtttgaaaaggaccccatcaaatactctcagtaccagcaggccatctataaatgtctgctagaccgagtaccagaagaggagaaggataccaatgtccaggtactgatggtgctgggagcaggacggggacccctggtgaacgcttccctgcgggcagccaagcaggccgaccggcggataaagctgtatgctgtggagaaaaacccaaatgccgtggtgacgctagagaactggcagtttgaagaatggggaagccaagtgaccgtagtctcatcagacatgagggaatgggtggctccagagaaagcagacatcattgtcagtgagcttctgggctcatttgctgacaatgaattgtcgcctgagtgcctggatggagcccagcacttcctaaaagatgatggtgtgagcatccccggggagtacacttcctttctggctcccatctcttcctccaagctgtacaatgaggtccgagcctgtagggagaaggaccgtgaccctgaggcccagtttgagatgccttatgtggtacggctgcacaacttccaccagctctctgcaccccagccctgtttcaccttcagccatcccaacagagatcctatgattgacaacaaccgctattgcaccttggaatttcctgtggaggtgaacacagtactacatggctttgccggctactttgagactgtgctttatcaggacatcactctgagtatccgtccagagactcactctcctgggatgttctcatggtttcccatcctcttccctattaagcagcccataacggtacgtgaaggccaaaccatctgtgtgcgtttctggcgatgcagcaattccaagaaggtgtggtatgagtgggctgtgacagcaccagtctgttctgctattcataaccccacaggccgctcatataccattggcctctagccctgcgtgccaagtgtccagagccttggaagcagcttcaggttctgctcctgtagtacagaaggtgcagtacatctatgggctgtgattccccttgcccatcagagaggagcatttcaatctgctttcctgccttacatcaaggtgggcaagggattataattaattgcagggctcaagccaccaatctatgaagacctcaggccagggggtgaggaattagtgctggatttgaagctacgcactcagcctcaagaactccctggaatatccctgagaacatggggtttgaacggattttcagcctttttctgttcttgttttgatggttttgtgtaagaggaaatacaaataaagttatagccctttactgca

SEQ ID NO: 335890 - DNA, 2465 bp, Homo sapiens
gcgactcgtcccgccttctggggcactagtttgactttgtgattggctactagtatcaaggaatcccggcgtggacagcgcgaggagaaagatggcggcgatggcggtcgggggtgctggtgggagccgcgtgtccagcgggagggacctgaattgcgtccccgaaatagctgacacactaggggctgtggccaagcaggggtgagggccggacctccacgagcggaatgcggggtccgaactcggggacggagaagggcagactagtcatcccggagaagcaggggtttgatttcctctgcatgcctgtcttccatccgcgtttcaagagggagttcattcaggaacctgctaagaatcggcccggtccccagacacgatcagacctactgctgtcaggaagggactggaatacgctaattgtgggaaagctttctccatggattcgtccagactcaaaagtggagaagattcgcaggaactccgaggcggccatgttacaggagctgaattttggtgcatatttgggtcttccagctttcctgctgccccttaatcaggaagataacaccaacctggccagagttttgaccaaccacatccacactggccatcactcttccatgttctggatgcgggtacccttggtggcaccagaggacctgagagatgatataattgagaatgcaccaactacacacacagaggagtacagtggggaggagaaaacgtggatgtggtggcacaacttccggactttgtgtgactatagtaagaggattgcagtggctcttgaaattggggctgacctcccatctaatcatgtcattgatcgctggcttggggagcccatcaaagcagccattctccccactagcattttcctgaccaataagaagggatttcctgttctttctaagatgcaccagaggctcatcttccggctcctcaagttggaggtgcagttcatcatcacaggcaccaaccaccactcagagaaggagttctgctcctacctccaatacctggaatacttaagccagaaccgtcctccacctaatgcctatgaactctttgccaagggctatgaagactatctgcagtccccgcttcagccactgatggacaatctggaatctcagacatatgaagtgtttgaaaaggaccccatcaaatactctcagtaccagcaggccatctataaatgtctgctagaccgagtaccagaagaggagaaggataccaatgtccaggtactgatggtgctgggagcaggacggggacccctggtgaacgcttccctgcgggcagccaagcaggccgaccggcggataaagctgtatgctgtggagaaaaacccaaatgccgtggtgacgctagagaactggcagtttgaagaatggggaagccaagtgaccgtagtctcatcagacatgagggaatgggtggctccagagaaagcagacatcattgtcagtgagcttctgggctcatttgctgacaatgaattgtcgcctgagtgcctggatggagcccagcacttcctaaaagatgatggtgtgagcatccccggggagtacacttcctttctggctcccatctcttcctccaagctgtacaatgaggtccgagcctgtagggagaaggaccgtgaccctgaggcccagtttgagatgccttatgtggtacggctgcacaacttccaccagctctctgcaccccagccctgtttcaccttcagccatcccaacagagatcctatgattgacaacaaccgctattgcaccttggaatttcctgtggaggtgaacacagtactacatggctttgccggctactttgagactgtgctttatcaggacatcactctgagtatccgtccagagactcactctcctgggatgttctcatggtttcccatcctcttccctattaagcagcccataacggtacgtgaaggccaaaccatctgtgtgcgtttctggcgatgcagcaattccaagaaggtgtggtatgagtgggctgtgacagcaccagtctgttctgctattcataaccccacaggccgctcatataccattggcctctagccctgcgtgccaagtgtccagagccttggaagcagcttcaggttctgctcctgtagtacagaaggtgcagtacatctatgggctgtgattccccttgcccatcagagaggagcatttcaatctgctttcctgccttacatcaaggtgggcaagggattataattaattgcagggctcaagccaccaatctatgaagacctcaggccagggggtgaggaattagtgctggatttgaagctacgcactcagcctcaagaactccctggaatatccctgagaacatggggtttgaacggattttcagcctttttctgttcttgttttgatggttttgtgtaagaggaaatacaaataaagttatagccctttactgca

SEQ ID NO: 335891 - DNA, 2589 bp, Homo sapiens
gcgactcgtcccgccttctggggcactagtttgactttgtgattggctactagtatcaaggaatcccggcgtggacagcgcgaggagaaagatggcggcgatggcggtcgggggtgctggtgggagccgcgtgtccagcgggagggacctgaattgcgtccccgaaatagctgacacactaggggctgtggccaagcaggggtttgatttcctctgcatgcctgtcttccatccgcgtttcaagagggagttcattcaggaacctgctaagaatcggcccggtccccagacacgatcagacctactgctgtcaggaagggactggaatacgctaattgtgggaaagctttctccatggattcgtccagactcaaaagtggagaagattcgcaggaactccgaggcggccatgttacaggagctgaattttggtgcatatttgggtcttccagctttcctgctgccccttaatcaggaagataacaccaacctggccagagttttgaccaaccacatccacactggccatcactcttccatgttctggatgcgggtacccttggtggcaccagaggacctgagagatgatataattgagaatgcaccaactacacacacagaggagtacagtggggaggagaaaacgtggatgtggtggcacaacttccggactttgtgtgactatagtaagaggattgcagtgggtgagtccatgagaatcctgggatgggtgtggcttctcttacctcctgtgaataagaatcaggaatttcatatatagtatacaattttgctacttcccctctgtctcagactggctttctcttaaagaagtaaacagattttgcgcaaaggagcaaggaagggtttcttgcctggcagtggttgacagtttttcttttgcctcatgtagctcttgaaattggggctgacctcccatctaatcatgtcattgatcgctggcttggggagcccatcaaagcagccattctccccactagcattttcctgaccaataagaagggatttcctgttctttctaagatgcaccagaggctcatcttccggctcctcaagttggaggtgcagttcatcatcacaggcaccaaccaccactcagagaaggagttctgctcctacctccaatacctggaatacttaagccagaaccgtcctccacctaatgcctatgaactctttgccaagggctatgaagactatctgcagtccccgcttcagccactgatggacaatctggaatctcagacatatgaagtgtttgaaaaggaccccatcaaatactctcagtaccagcaggccatctataaatgtctgctagaccgagtaccagaagaggagaaggataccaatgtccaggtactgatggtgctgggagcaggacggggacccctggtgaacgcttccctgcgggcagccaagcaggccgaccggcggataaagctgtatgctgtggagaaaaacccaaatgccgtggtgacgctagagaactggcagtttgaagaatggggaagccaagtgaccgtagtctcatcagacatgagggaatgggtggctccagagaaagcagacatcattgtcagtgagcttctgggctcatttgctgacaatgaattgtcgcctgagtgcctggatggagcccagcacttcctaaaagatgatggtgtgagcatccccggggagtacacttcctttctggctcccatctcttcctccaagctgtacaatgaggtccgagcctgtagggagaaggaccgtgaccctgaggcccagtttgagatgccttatgtggtacggctgcacaacttccaccagctctctgcaccccagccctgtttcaccttcagccatcccaacagagatcctatgattgacaacaaccgctattgcaccttggaatttcctgtggaggtgaacacagtactacatggctttgccggctactttgagactgtgctttatcaggacatcactctgagtatccgtccagagactcactctcctgggatgttctcatggtttcccatcctcttccctattaagcagcccataacggtacgtgaaggccaaaccatctgtgtgcgtttctggcgatgcagcaattccaagaaggtgtggtatgagtgggctgtgacagcaccagtctgttctgctattcataaccccacaggccgctcatataccattggcctctagccctgcgtgccaagtgtccagagccttggaagcagcttcaggttctgctcctgtagtacagaaggtgcagtacatctatgggctgtgattccccttgcccatcagagaggagcatttcaatctgctttcctgccttacatcaaggtgggcaagggattataattaattgcagggctcaagccaccaatctatgaagacctcaggccagggggtgaggaattagtgctggatttgaagctacgcactcagcctcaagaactccctggaatatccctgagaacatggggtttgaacggattttcagcctttttctgttcttgttttgatggttttgtgtaagaggaaatacaaataaagttatagccctttactgca

SEQ ID NO: 335892 - DNA, 2208 bp, Homo sapiens
gcgactcgtcccgccttctggggcactagtttgactttgtgattggctactagtatcaaggaatcccggcgtggacagcgcgaggagaaagatggcggcgatggcggtcgggggtgctggtgggagccgcgtgtccagcgggagggacctgaattgcgtccccgaaatagctgacacactaggggctgtggccaagcaggggtttgatttcctctgcatgcctgtcttccatccgcgtttcaagagggagttcattcaggaacctgctaagaatcggcccggtccccagacacgatcagacctactgctgtcaggaagggactggaatacgctaattgtgggaaagctttctccatggattcgtccagactcaaaagtggagaagattcgcaggaactccgaggcggccatgttacaggagctgaattttggtgcatatttgggtcttccagctttcctgctgccccttaatcaggaagataacaccaacctggccagagttttgaccaaccacatccacactggccatcactcttccatgttctggatgcgggtacccttggtggcaccagaggacctgagagatgatataattgagaatgcaccaactacacacacagaggagtacagtggggaggagaaaacgtggatgtggtggcacaacttccggactttgtgtgactatagtaagaggattgcagtggctcttgaaattggggctgacctcccatctaatcatgtcattgatcgctggcttggggagcccatcaaagcagccattctccccactagcattttcctgaccaataagaagggatttcctgttctttctaagatgcaccagaggctcatcttccggctcctcaagttggaggtgcagttcatcatcacaggcaccaaccaccactcagagaaggagttctgctcctacctccaatacctggaatacttaagccagaaccgtcctccacctaatgcctatgaactctttgccaagggctatgaagactatctgcagtccccgcttcagccactgatggacaatctggaatctcagacatatgaagtgtttgaaaaggaccccatcaaatactctcagtaccagcaggccatctataaatgtctgctagaccgagtaccagaagaggagaaggataccaatgtccaggtactgatggtgctgggagcaggacggggacccctggtgaacgcttccctgcgggcagccaagcaggccgaccggcggataaagctgtatgctgtggagaaaaacccaaatgccgtggtgacgctagagaactggcagtttgaagaatggggaagccaagtgaccgtagtcccatctcttcctccaagctgtacaatgaggtccgagcctgtagggagaaggaccgtgaccctgaggcccagtttgagatgccttatgtggtacggctgcacaacttccaccagctctctgcaccccagccctgtttcaccttcagccatcccaacagagatcctatgattgacaacaaccgctattgcaccttggaatttcctgtggaggtgaacacagtactacatggctttgccggctactttgagactgtgctttatcaggacatcactctgagtatccgtccagagactcactctcctgggatgttctcatggtttcccatcctcttccctattaagcagcccataacggtacgtgaaggccaaaccatctgtgtgcgtttctggcgatgcagcaattccaagaaggtgtggtatgagtgggctgtgacagcaccagtctgttctgctattcataaccccacaggccgctcatataccattggcctctagccctgcgtgccaagtgtccagagccttggaagcagcttcaggttctgctcctgtagtacagaaggtgcagtacatctatgggctgtgattccccttgcccatcagagaggagcatttcaatctgctttcctgccttacatcaaggtgggcaagggattataattaattgcagggctcaagccaccaatctatgaagacctcaggccagggggtgaggaattagtgctggatttgaagctacgcactcagcctcaagaactccctggaatatccctgagaacatggggtttgaacggattttcagcctttttctgttcttgttttgatggttttgtgtaagaggaaatacaaataaagttatagccctttactgca

SEQ ID NO: 335893 - DNA, 2333 bp, Homo sapiens
gcgactcgtcccgccttctggggcactagtttgactttgtgattggctactagtatcaaggaatcccggcgtggacagcgcgaggagaaagatggcggcgatggcggtcgggggtgctggtgggagccgcgtgtccagcgggagggacctgaattgcgtccccgaaatagctgacacactaggggctgtggccaagcaggggtgagggccggacctccacgagcggaatgcggggtccgaactcggggacggagaagggcagactagtcatcccggagaagcaggggtttgatttcctctgcatgcctgtcttccatccgcgtttcaagagggagttcattcaggaacctgctaagaatcggcccggtccccagacacgatcagacctactgctgtcaggaagggctttcctgctgccccttaatcaggaagataacaccaacctggccagagttttgaccaaccacatccacactggccatcactcttccatgttctggatgcgggtacccttggtggcaccagaggacctgagagatgatataattgagaatgcaccaactacacacacagaggagtacagtggggaggagaaaacgtggatgtggtggcacaacttccggactttgtgtgactatagtaagaggattgcagtggctcttgaaattggggctgacctcccatctaatcatgtcattgatcgctggcttggggagcccatcaaagcagccattctccccactagcattttcctgaccaataagaagggatttcctgttctttctaagatgcaccagaggctcatcttccggctcctcaagttggaggtgcagttcatcatcacaggcaccaaccaccactcagagaaggagttctgctcctacctccaatacctggaatacttaagccagaaccgtcctccacctaatgcctatgaactctttgccaagggctatgaagactatctgcagtccccgcttcagccactgatggacaatctggaatctcagacatatgaagtgtttgaaaaggaccccatcaaatactctcagtaccagcaggccatctataaatgtctgctagaccgagtaccagaagaggagaaggataccaatgtccaggtactgatggtgctgggagcaggacggggacccctggtgaacgcttccctgcgggcagccaagcaggccgaccggcggataaagctgtatgctgtggagaaaaacccaaatgccgtggtgacgctagagaactggcagtttgaagaatggggaagccaagtgaccgtagtctcatcagacatgagggaatgggtggctccagagaaagcagacatcattgtcagtgagcttctgggctcatttgctgacaatgaattgtcgcctgagtgcctggatggagcccagcacttcctaaaagatgatggtgtgagcatccccggggagtacacttcctttctggctcccatctcttcctccaagctgtacaatgaggtccgagcctgtagggagaaggaccgtgaccctgaggcccagtttgagatgccttatgtggtacggctgcacaacttccaccagctctctgcaccccagccctgtttcaccttcagccatcccaacagagatcctatgattgacaacaaccgctattgcaccttggaatttcctgtggaggtgaacacagtactacatggctttgccggctactttgagactgtgctttatcaggacatcactctgagtatccgtccagagactcactctcctgggatgttctcatggtttcccatcctcttccctattaagcagcccataacggtacgtgaaggccaaaccatctgtgtgcgtttctggcgatgcagcaattccaagaaggtgtggtatgagtgggctgtgacagcaccagtctgttctgctattcataaccccacaggccgctcatataccattggcctctagccctgcgtgccaagtgtccagagccttggaagcagcttcaggttctgctcctgtagtacagaaggtgcagtacatctatgggctgtgattccccttgcccatcagagaggagcatttcaatctgctttcctgccttacatcaaggtgggcaagggattataattaattgcagggctcaagccaccaatctatgaagacctcaggccagggggtgaggaattagtgctggatttgaagctacgcactcagcctcaagaactccctggaatatccctgagaacatggggtttgaacggattttcagcctttttctgttcttgttttgatggttttgtgtaagaggaaatacaaataaagttatagccctttactgca

SEQ ID NO: 335894 - DNA, 2319 bp, Homo sapiens
gcgactcgtcccgccttctggggcactagtttgactttgtgattggctactagtatcaaggaatcccggcgtggacagcgcgaggagaaagatggcggcgatggcggtcgggggtgctggtgggagccgcgtgtccagcgggagggacctgaattgcgtccccgaaatagctgacacactaggggctgtggccaagcaggggtttgatttcctctgcatgcctgtcttccatccgcgtttcaagagggagttcattcaggaacctgctaagaatcggcccggtccccagacacgatcagacctactgctgtcaggaagggactggaatacgctaattgtgggaaagctttctccatggattcgtccagactcaaaagtggagaagattcgcaggaactccgaggcggccatgttacaggagctgaattttggtgcatatttgggtcttccagctttcctgctgccccttaatcaggaagataacaccaacctggccagagttttgaccaaccacatccacactggccatcactcttccatgttctggatgcgggtacccttggtggcaccagaggacctgagagatgatataattgagaatgcaccaactacacacacagaggagtacagtggggaggagaaaacgtggatgtggtggcacaacttccggactttgtgtgactatagtaagaggattgcagtggctcttgaaattggggctgacctcccatctaatcatgtcattgatcgctggcttggggagcccatcaaagcagccattctccccactagcattttcctgaccaataagaagggatttcctgttctttctaagatgcaccagaggctcatcttccggctcctcaagttggaggtgcagttcatcatcacaggcaccaaccaccactcagagaaggagttctgctcctacctccaatacctggaatacttaagccagaaccgtcctccacctaatgcctatgaactctttgccaagggctatgaagactatctgcagtccccgcttcagccactgatggacaatctggaatctcagacatatgaagtgtttgaaaaggaccccatcaaatactctcagtaccagcaggccatctataaatgtctgctagaccgagtaccagaagaggagaaggataccaatgtccaggtactgatggtgctgggagcaggacggggacccctggtgaacgcttccctgcgggcagccaagcaggccgaccggcggataaagctgtatgctgtggagaaaaacccaaatgccgtggtgacgctagagaactggcagtttgaagaatggggaagccaagtgaccgtagtctcatcagacatgagggaatgggtggctccagagaaagcagacatcattgtcagtgagcttctgggctcatttgctgacaatgaattgtcgcctgagtgcctggatggagcccagcacttcctaaaagatgatggtgtgagcatccccggggagtacacttcctttctggctcccatctcttcctccaagctgtacaatgaggtccgagcctgtagggagaaggaccgtgaccctgaggcccagtttgagatgccttatgtggtacggctgcacaacttccaccagctctctgcaccccagccctgtttcaccttcagccatcccaacagagatcctatgattgacaacaaccgctattgcaccttggaatttcctgtggaggtgaacacagtactacatggctttgccggctactttgagactgtgctttatcaggacatcactctgagtatccgtccagagactcactctcctgggatgttctcatggtttcccatcctcttccctattaagccaagaaggtgtggtatgagtgggctgtgacagcaccagtctgttctgctattcataaccccacaggccgctcatataccattggcctctagccctgcgtgccaagtgtccagagccttggaagcagcttcaggttctgctcctgtagtacagaaggtgcagtacatctatgggctgtgattccccttgcccatcagagaggagcatttcaatctgctttcctgccttacatcaaggtgggcaagggattataattaattgcagggctcaagccaccaatctatgaagacctcaggccagggggtgaggaattagtgctggatttgaagctacgcactcagcctcaagaactccctggaatatccctgagaacatggggtttgaacggattttcagcctttttctgttcttgttttgatggttttgtgtaagaggaaatacaaataaagttatagccctttactgca

SEQ ID NO: 335895 - DNA, 2306 bp, Homo sapiens
gcgactcgtcccgccttctggggcactagtttgactttgtgattggctactagtatcaaggaatcccggcgtggacagcgcgaggagaaagatggcggcgatggcggtcgggggtgctggtgggagccgcgtgtccagcgggagggacctgaattgcgtccccgaaatagctgacacactaggggctgtggccaagcaggggtttgatttcctctgcatgcctgtcttccatccgcgtttcaagagggagttcattcaggaacctgctaagaatcggcccggtccccagacacgatcagacctactgctgtcaggaagggactggaatacgctaattgtgggaaagctttctccatggattcgtccagactcaaaagtggagaagattcgcaggaactccgaggcggccatgttacaggagctgaattttggtgcatatttgggtcttccagctttcctgctgccccttaatcaggaagataacaccaacctggccagagttttgaccaaccacatccacactggccatcactcttccatgttctggatgcgggtacccttggtggcaccagaggacctgagagatgatataattgagaatgcaccaactacacacacagaggagtacagtggggaggagaaaacgtggatgtggtggcacaacttccggactttgtgtgactatagtaagaggattgcagtggctcttgaaattggggctgacctcccatctaatcatgtcattgatcgctggcttggggagcccatcaaagcagccattctccccactagcattttcctgaccaataagaagggatttcctgttctttctaagatgcaccagaggctcatcttccggctcctcaagttggaggtgcagttcatcatcacaggcaccaaccaccactcagagaaggagttctgctcctacctccaatacctggaatacttaagccagaaccgtcctccacctaatgcctatgaactctttgccaagggctatgaagactatctgcagtccccgcttcagccactgatggacaatctggaatctcagacatatgaagtgtttgaaaaggaccccatcaaatactctcagtaccagcaggccatctataaatgtctgctagaccgagtaccagaagaggagaaggataccaatgtccaggtactgatggtgctgggagcaggacggggacccctggtgaacgcttccctgcgggcagccaagcaggccgaccggcggataaagctgtatgctgtggagaaaaacccaaatgccgtggtgacgctagagaactggcagtttgaagaatggggaagccaagtgaccgtagtctcatcagacatgagggaatgggtggctccagagaaagcagacatcattgtcagtgagcttctgggctcatttgctgacaatgaattgtcgcctgagtgcctggatggagcccagcacttcctaaaagatgatggtgtgagcatccccggggagtacacttcctttctggctcccatctcttcctccaagctgtacaatgaggtccgagcctgtagggagaaggaccgtgaccctgaggcccagtttgagatgccttatgtggtacggctgcacaacttccaccagctctctgcaccccagccctgtttcaccttcagccatcccaacagagatcctatgattgacaacaaccgctattgcaccttggaatttcctgtggaggtgaacacagtactacatggctttgccggctactttgagactgtgctttatcaggacatcactctgagtatccgtccagagactcactctcctgggatgttctcatggtttcccatcctcttccctattaagcagcccataacggtacgtgaaggccaaaccatctgtgtgcgtttctggcgatgcagcaattccaagaaggtgtggtatgagtgggctgtgacagcaccagtctgttctgctattcataaccccacaggccgctcatataccattggcctctagccctgcgtgccaagtgtccagagccttggaagcagcttcaggttctgctcctgtagtacagaaggtgcggctcaagccaccaatctatgaagacctcaggccagggggtgaggaattagtgctggatttgaagctacgcactcagcctcaagaactccctggaatatccctgagaacatggggtttgaacggattttcagcctttttctgttcttgttttgatggttttgtgtaagaggaaatacaaataaagttatagccctttactgcacgaaaacatgctgccccctgccactatttt

SEQ ID NO: 335896 - DNA, 2276 bp, Homo sapiens
gcgactcgtcccgccttctggggcactagtttgactttgtgattggctactagtatcaaggaatcccggcgtggacagcgcgaggagaaagatggcggcgatggcggtcgggggtgctggtgggagccgcgtgtccagcgggagggacctgaattgcgtccccgaaatagctgacacactaggggctgtggccaagcaggggtttgatttcctctgcatgcctgtcttccatccgcgtttcaagagggagttcattcaggaacctgctaagaatcggcccggtccccagacacgatcagacctactgctgtcaggaagggactggaatacgctaattgtgggaaagctttctccatggattcgtccagactcaaaagtggagaagattcgcaggaactccgaggcggccatgttacaggagctgaattttggtgcatatttgggtcttccagctttcctgctgccccttaatcaggaagataacaccaacctggccagagttttgaccaaccacatccacactggccatcactcttccatgttctggatgcgggtacccttggtggcaccagaggacctgagagatgatataattgagaatgcaccaactacacacacagaggagtacagtggggaggagaaaacgtggatgtggtggcacaacttccggactttgtgtgactatagtaagaggattgcagtggctcttgaaattggggctgacctcccatctaatcatgtcattgatcgctggcttggggagcccatcaaagcagccattctccccactagcattttcctgaccaataagaagggatttcctgttctttctaagatgcaccagaggctcatcttccggctcctcaagttggaggtgcagttcatcatcacaggcaccaaccaccactcagagaaggagttctgctcctacctccaatacctggaatacttaagccagaaccgtcctccacctaatgcctatgaactctttgccaagggctatgaagactatctgcagtccccgcttcagccactgatggacaatctggaatctcagacatatgaagtgtttgaaaaggaccccatcaaatactctcagtaccagcaggccatctataaatgtctgctagaccgagtaccagaagaggagaaggataccaatgtccaggtactgatggtgctgggagcaggacggggacccctggtgaacgcttccctgcgggcagccaagcaggccgaccggcggataaagctgtatgctgtggagaaaaacccaaatgccgtggtgacgctagagaactggcagtttgaagaatggggaagccaagtgaccgtagtctcatcagacatgagggaatgggtggctccagagaaagcagacatcattgtcagtgagcttctgggctcatttgctgacaatgaattgtcgcctgagtgcctggatggagcccagcacttcctaaaagatgatggtgtgagcatccccggggagtacacttcctttctggctcccatctcttcctccaagctgtacaatgaggtccgagcctgtagggagaaggaccgtgaccctgaggcccagtttgagatgccttatgtggtacggctgcacaacttccaccagctctctgcaccccagccctgtttcaccttcagccatcccaacagagatcctatgattgacaacaaccgctattgcaccttggaatttcctgtggaggtgaacacagtactacatggctttgccggctactttgagactgtgctttatcaggacatcactctgagtatccgtccagagactcactctcctgggatgttctcatggtttcccatcctcttccctattaagcagcccataacggtacgtgaaggccaaaccatctgtgtgcgtttctggcgatgcagcaattccaagaaggtgtggtatgagtgggctgtgacagcaccagtctgttctgctattcataaccccacaggccgctcatataccattggcctctagccctgcgtgccaagtgtccagagccttggaagcagcttcaggttctgctcctgtagtacagaaggtgcggctcaagccaccaatctatgaagacctcaggccagggggtgaggaattagtgctggatttgaagctacgcactcagcctcaagaactccctggaatatccctgagaacatggggtttgaacggattttcagcctttttctgttcttgttttgatggttttgtgtaagaggaaatacaaataaagttatagccctttactgca

SEQ ID NO: 335897 - DNA, 2116 bp, Homo sapiens
gcgactcgtcccgccttctggggcactagtttgactttgtgattggctactagtatcaaggaatcccggcgtggacagcgcgaggagaaagatggcggcgatggcggtcgggggtgctggtgggagccgcgtgtccagcgggagggacctgaattgcgtccccgaaatagctgacacactaggggctgtggccaagcaggggtttgatttcctctgcatgcctgtcttccatccgcgtttcaagagggagttcattcaggaacctgctaagaatcggcccggtccccagacacgatcagacctactgctgtcaggaagggactggaatacgctaattgtgggaaagctttctccatggattcgtccagactcaaaagtggagaagattcgcaggaactccgaggcggccatgttacaggagctgaattttggtgcatatttgggtcttccagctttcctgctgccccttaatcaggaagataacaccaacctggccagagttttgaccaaccacatccacactggccatcactcttccatgttctggatgcgggtacccttggtggcaccagaggacctgagagatgatataattgagaatgcaccaactacacacacagaggagtacagtggggaggagaaaacgtggatgtggtggcacaacttccggactttgtgtgactatagtaagaggattgcagtggctcttgaaattggggctgacctcccatctaatcatgtcattgatcgctggcttggggagcccatcaaagcagccattctccccactagcattttcctgaccaataagaagggatttcctgttctttctaagatgcaccagaggctcatcttccggctcctcaagttggaggtgcagttcatcatcacaggcaccaaccaccactcagagaaggagttctgctcctacctccaatacctggaatacttaagccagaaccgtcctccacctaatgcctatgaactctttgccaagggctatgaagactatctgcagtccccgcttcagccactgatggacaatctggaatctcagacatatgaagtgtttgaaaaggaccccatcaaatactctcagtaccagcaggccatctataaatgtctgctagaccgagtaccagaagaggagaaggataccaatgtccaggtactgatggtgctgggagcaggacggggacccctggtgaacgcttccctgcgggcagccaagcaggccgaccggcggataaagctgtatgctgtggagaaaaacccaaatgccgtggtgacgctagagaactggcagtttgaagaatggggaagccaagtgaccgtagtctcatcagacatgagggaatgggtggctccagagaaagcagacatcattgtcagtgagcttctgggctcatttgctgacaatgaattgtcgcctgagtgcctggatggagcccagcacttcctaaaagatgatggtgtgagcatccccggggagtacacttcctttctggctcccatctcttcctccaagctgtacaatgaggtccgagcctgtagggagaaggaccgtgaccctgaggcccagtttgagatgccttatgtggtacggctgcacaacttccaccagctctctgcaccccagccctgtttcaccttcagccatcccaacagagatcctatgattgacaacaaccgctattgcaccttggaatttcctgtggaggtgaacacagtactacatggctttgccggctactttgagactgtgctttatcaggacatcactctgagtatccgtccagagactcactctcctgggatgttctcatggtttcccatcctcttccctattaagcagcccataacggtacgtgaaggccaaaccatctgtgtgcgtttctggcgatgcagcaattggctcaagccaccaatctatgaagacctcaggccagggggtgaggaattagtgctggatttgaagctacgcactcagcctcaagaactccctggaatatccctgagaacatggggtttgaacggattttcagcctttttctgttcttgttttgatggttttgtgtaagaggaaatacaaataaagttatagccctttactgca

SEQ ID NO: 335898 - DNA, 2081 bp, Homo sapiens
gcgactcgtcccgccttctggggcactagtttgactttgtgattggctactagtatcaaggaatcccggcgtggacagcgcgaggagaaagatggcggcgatggcggtcgggggtgctggtgggagccgcgtgtccagcgggagggacctgaattgcgtccccgaaatagctgacacactaggggctgtggccaagcaggggtttgatttcctctgcatgcctgtcttccatccgcgtttcaagagggagttcattcaggaacctgctaagaatcggcccggtccccagacacgatcagacctactgctgtcaggaagggactggaatacgctaattgtgggaaagctttctccatggattcgtccagactcaaaagtggagaagattcgcaggaactccgaggcggccatgttacaggagctgaattttggtgcatatttgggtcttccagctttcctgctgccccttaatcaggaagataacaccaacctggccagagttttgaccaaccacatccacactggccatcactcttccatgttctggatgcgggtacccttggtggcaccagaggacctgagagatgatataattgagaatgcaccaactacacacacagaggagtacagtggggaggagaaaacgtggatgtggtggcacaacttccggactttgtgtgactatagtaagaggattgcagtggctcttgaaattggggctgacctcccatctaatcatgtcattgatcgctggcttggggagcccatcaaagcagccattctccccactagcattttcctgaccaataagaagggatttcctgttctttctaagatgcaccagaggctcatcttccggctcctcaagttggaggtgcagttcatcatcacaggcaccaaccaccactcagagaaggagttctgctcctacctccaatacctggaatacttaagccagaaccgtcctccacctaatgcctatgaactctttgccaagggctatgaagactatctgcagtccccgcttcagccactgatggacaatctggaatctcagacatatgaagtgtttgaaaaggaccccatcaaatactctcagtaccagcaggccatctataaatgtctgctagaccgagtaccagaagaggagaaggataccaatgtccaggtactgatggtgctgggagcaggacggggacccctggtgaacgcttccctgcgggcagccaagcaggccgaccggcggataaagctgtatgctgtggagaaaaacccaaatgccgtggtgacgctagagaactggcagtttgaagaatggggaagccaagtgaccgtagtctcatcagacatgagggaatgggtggctccagagaaagcagacatcattgtcagtgagcttctgggctcatttgctgacaatgaattgtcgcctgagtgcctggatggagcccagcacttcctaaaagatgatggtgtgagcatccccggggagtacacttcctttctggctcccatctcttcctccaagctgtacaatgaggtccgagcctgtagggagaaggaccgtgaccctgaggcccagtttgagatgccttatgtggtacggctgcacaacttccaccagctctctgcaccccagccctgtttcaccttcagccatcccaacagagatcctatgattgacaacaaccgctattgcaccttggaatttcctgtggaggtgaacacagtactacatggctttgccggctactttgagactgtgctttatcaggacatcactctgagtatccgtccagagactcactctcctgggacagcccataacggtacgtgaaggccaaaccatctgtgtgcgtttctggcgatgcagcaattccaagaaggtgtggtatgagtgggctgtgacagcaccagtctgttctgctattcataaccccacaggccgctcatataccattggcctctagccctgcgtgccaagtgtccagagccttggaagcagcttcaggttctgctcctgtagtacagaaggtgcaagggctataactttatttgtatttcctcttacacaaaccatc

SEQ ID NO: 335899 - DNA, 2491 bp, Homo sapiens
gcgactcgtcccgccttctggggcactagtttgactttgtgattggctactagtatcaaggaatcccggcgtggacagcgcgaggagaaagatggcggcgatggcggtcgggggtgctggtgggagccgcgtgtccagcgggagggacctgaattgcgtccccgaaatagctgacacactaggggctgtggccaagcaggggtttgatttcctctgcatgcctgtcttccatccgcgtttcaagagggagttcattcaggaacctgctaagaatcggcccggtccccagacacgatcagacctactgctgtcaggaagggactggaatacgctaattgtgggaaagctttctccatggattcgtccagactcaaaagtggagaagattcgcaggaactccgaggcggccatgttacaggagctgaattttggtgcatatttgggtcttccagctttcctgctgccccttaatcaggaagataacaccaacctggccagagttttgaccaaccacatccacactggccatcactcttccatgttctggatgcgggtacccttggtggcaccagaggacctgagagatgatataattgagaatgcaccaactacacacacagaggagtacagtggggaggagaaaacgtggatgtggtggcacaacttccggactttgtgtgactatagtaagaggattgcagtggctcttgaaattggggctgacctcccatctaatcatgtcattgatcgctggcttggggagcccatcaaagcagccattctccccactagcattttcctgaccaataagaagggatttcctgttctttctaagatgcaccagaggctcatcttccggctcctcaagttggaggtgcagttcatcatcacaggcaccaaccaccactcagagaaggagttctgctcctacctccaatacctggaatacttaagccagaaccgtcctccacctaatgcctatgaactctttgccaagggctatgaagactatctgcagtccccgcttcagccactgatggacaatctggaatctcagacatatgaagtgtttgaaaaggaccccatcaaatactctcagtaccagcaggccatctataaatgtctgctagaccgagtaccagaagaggagaaggataccaatgtccaggtactgatggtgctgggagcaggacggggacccctggtgaacgcttccctgcgggcagccaagcaggccgaccggcggataaagctgtatgctgtggagaaaaacccaaatgccgtggtgacgctagagaactggcagtttgaagaatggggaagccaagtgaccgtagtctcatcagacatgagggaatgggtggctccagagaaagcagacatcattgtcagtgagcttctgggctcatttgctgacaatgaattgtcgcctgagtgcctggatggagcccagcacttcctaaaagatgatggtgtgagcatccccggggagtacacttcctttctggctcccatctcttcctccaagctgtacaatgaggtccgagcctgtagggagaaggaccgtgaccctgaggcccagtttgagatgccttatgtggtacggctgcacaacttccaccagctctctgcaccccagccctgtttcaccttcagccatcccaacagagatcctatgattgacaacaaccgctattgcaccttggaatttcctgtggaggtgaacacagtactacatggctttgccggctactttgagactgtgctttatcaggacatcactctgagtatccgtccagagactcactctcctgggatgttctcatggtttcccatcctcttccctattaaggtaggaactgcttttaagactctctagttaagcagtaacctttgcctttggtgttgtgcttctttccttctcccaggaagatagttgactatgactcatgttctcctgatttcatatgctcttggatcccagtggtaggtgttgggagtatttggagtggccttctgcctggctttcccgcatctactctggctactcttctgtctgttctctactttgagcaagagtcatcttttaaaaactcaaatttgatcttatctctcttgctgtcttttttttttttttttttttaaagagacggagtctcactctgtcgcccaggctggagtgcagtggcacaatttcggctcactgcaagctccgcctcccgggttcatgccattctcctgcctcagcctccctgaggctgagattacaggtgccagccaccacacccggctaattcttgtatttttagtagagacggggttttaccgtgttagccaggatggtctcgatctcctgacctcatgatccgcccacctcagcctcccaaagtgctgggattacaggcgtgagccaccgcgcctggcctgatcttatctctcttttttgcttaaaactcttcaatgccttcccattgtctttaggataaaagtc

SEQ ID NO: 335900 - DNA, 1457 bp, Homo sapiens
catactgggggaagtcaggctctgacagcaagtgattcgttcactgagggtgcatatggcataacagctatgatggggagccgggcgtcaatatgcgtgcgtaccgtgcaccttccgcctcctaatattcccagtaacatgtataggtgtgcgagacagtagaatgttcgttaccggtatagttctttatactctactcgcatagataggggactgggataataataatattggttactagtcaatggatgctgtccagttgggtcggaaaaaaatagatattattcatcctatgtgggtaatagaggagtatgctaagactgggcagtagggtgggaaagaataagtcgggctcacctgccggttaggatgcataagattgagagaggtgagggaatgccaagtgagcgtaggtctcatcagacatgagggaatgggtggctccagagaaagcagacatcattgtcagtgagcttctgggctcatttgctgacaatgaattgtcgcctgagtgcctggatggagcccagcacttcctaaaagatgatggtgtgagcatccccggggagtacacttcctttctggctcccatctcttcctccaagctgtacaatgaggtccgagcctgtagggagaaggaccgtgaccctgaggcccagtttgagatgccttatgtggtacggctgcacaacttccaccagctctctgcaccccagccctgtttcaccttcagccatcccaacagagatcctatgattgacaacaaccgctattgcaccttggaatttcctgtggaggtgaacacagtactacatggctttgccggctactttgagactgtgctttatcaggacatcactctgagtatccgtccagagactcactctcctgggatgttctcatggtttcccatcctcttccctattaagcagcccataacggtacgtgaaggccaaaccatctgtgtgcgtttctggcgatgcagcaattccaagaaggtgtggtatgagtgggctgtgacagcaccagtctgttctgctattcataaccccacaggccgctcatataccattggcctctagccctgcgtgccaagtgtccagagccttggaagcagcttcaggttctgctcctgtagtacagaaggtgcagtacatctatgggctgtgattccccttgcccatcagagaggagcatttcaatctgctttcctgccttacatcaaggtgggcaagggattataattaattgcagggctcaagccaccaatctatgaagacctcaggccagggggtgaggaattagtgctggatttgaagctacgcactcagcctcaagaactccctggaatatccctgagaacatggggtttgaacggattttcagcctttttctgttcttgttttgatggttttgtgtaagaggaaatacaaataaagttatagccctttactgca

SEQ ID NO: 335901 - DNA, 837 bp, Homo sapiens
tcaagatgagcggcaccggcttacttgtattccagtgtattggtgcgtgggagcaaatcctccttctctgatctgttgctttgtgccgttgtttaaaatttgttatcccaaaaacttgaggagccggaagatgagcctctggtgcatcttagaaagaacaggaaatcccttcttattggtcaggaaaatgctagtggggagaacggctactttgagactgtgctttatcaggacatcactctgagtatccgtccagagactcactctcctgggatgttctcatggtttcccatcctcttccctattaagcagcccataacggtacgtgaaggccaaaccatctgtgtgcgtttctggcgatgcagcaattccaagaaggtgtggtatgagtgggctgtgacagcaccagtctgttctgctattcataaccccacaggccgctcatataccattggcctctagccctgcgtgccaagtgtccagagccttggaagcagcttcaggttctgctcctgtagtacagaaggtgcagtacatctatgggctgtgattccccttgcccatcagagaggagcatttcaatctgctttcctgccttacatcaaggtgggcaagggattataattaattgcagggctcaagccaccaatctatgaagacctcaggccagggggtgaggaattagtgctggatttgaagctacgcactcagcctcaagaactccctggaatatccctgagaacatggggtttgaacggattttcagcctttttctgttcttgttttgatggttttgtgtaagaggaaatacaaataaagttatagccctttactgca

SEQ ID NO: 335902 - DNA, 606 bp, Homo sapiens
atctccacacctaccttaatacattgccatgtataattcatagcttcaccctgaaccttcctgtctttcttcttacagcagcccataacggtacgtgaaggccaaaccatctgtgtgcgtttctggcgatgcagcaattccaagaaggtgtggtatgagtgggctgtgacagcaccagtctgttctgctattcataaccccacaggccgctcatataccattggcctctagccctgcgtgccaagtgtccagagccttggaagcagcttcaggttctgctcctgtagtacagaaggtgcagtacatctatgggctgtgattccccttgcccatcagagaggagcatttcaatctgctttcctgccttacatcaaggtgggcaagggattataattaattgcagggctcaagccaccaatctatgaagacctcaggccagggggtgaggaattagtgctggatttgaagctacgcactcagcctcaagaactccctggaatatccctgagaacatggggtttgaacggattttcagcctttttctgttcttgttttgatggttttgtgtaagaggaaatacaaataaagttatagccctttactgca

SEQ ID NO: 335903 - DNA, 425 bp, Homo sapiens
gcgactcgtcccgccttctggggcactagtttgactttgtgattggctactagtatcaaggaatcccggcgtggacagcgcgaggagaaagatggcggcgatggcggtcgggggtgctggtgggagccgcgtgtccagcgggagggacctgaattgcgtccccgaaatagctgacacactaggggctgtggccaagcaggggtttgatttcctctgcatgcctgtcttccatccgcgtttcaagagggagttcattcaggaacctgctaagaatcggcccggtccccagacacgatcagacctactgctgtcaggaaggggtagggaccatcccatatgccccttaattattagaggcaataacaacttctgctttatcggggccctcattctcctccttttctgacttggatatatttgttagt

SEQ ID NO: 335904 - DNA, 295 bp, Homo sapiens
caatgaggtccgagcctgtagggagaaggaccgtgaccctgaggtaaagaaccactctctctggaaagaagtggtactctttagtcctcttctttttctgtatttgcatcagctattttcttctgctggggatgaagaggtgaaggagaagttagggattggggaagcactaaagtaaaactttttttaatccttggggaagtagttctctcttgtgtgtcttccccaacactctctctctctttctgtctctgacaggcccagtttgagatgccttatgtggtacggctgcaca

SEQ ID NO: 335905 - DNA, 587 bp, Homo sapiens
agaagaggctaattttgacgggggaggcatgggcagaactggggcaaatctggatgtgatggtcttggaaacatactgacacctgaggagaaaaaaattctacttgtggatatccatcattttctccttactcatatgtcccatggctgtgttttagggagaaattgaggcacagtacagcagagttgatatcccccaaggtggtctgaactcagcagcctagtaggctgaactgatggcagctgaaagggctgtgcaaaatcaagatagcctaaatccagttgcttggctctctggcactgctgctgtctttacatgattctgggtctgtcgcggttgtaggtttgatttcctctgcatgcctgtcttccatccgcgtttcaagagggagttcattcaggaacctgctaagaatcggcccggtccccagacacgatcagacctactgctgtcaggaaggggtagggaccatcccatatgccccttaattattagaggcaataacaacttctgctttatcggggccctcattctcctccttttctgacttggatatatttgttagtccctgggatatagataacttg

SEQ ID NO: 335906 - DNA, 691 bp, Homo sapiens
gggattaacgaggtctggatgaagttttttttattgagggaaactttctggacccaatgagttcaaaagagagttctaaaagggtgactgttcatgtgcagttctggatgcgggtacccttggtggcaccagaggacctgagagatgatataattgagaatgcaccaactacacacacagaggagtacagtggggaggagaaaacgtggatgtggtatgtctccctttgctgctgtaccagggtgcaagggatagggtgaggggaagtacagggtgcaacctgtagggaggtctccttgagctgtggtgattggtcggccatatctagtttactgtacttttctgtatttgactgaacaggtggcacaacttccggactttgtgtgactatagtaagaggattgcagtgggtgagtccatgagaatcctgggatgggtgtggcttctcttacctcctgtgaataagaatcaggaatttcatatatagtatacaattttgctacttcccctctgtctcagactggctttctcttaaagaagtaaacagattttgcgcaaaggagcaaggaagggtttcttgcctggcagtggttgacagtttttcttttgcctcatgtagctcttgaaattggggctgacctcccatctaatcatgtcattgatcgctggcttggggagcccatcaaagcag

SEQ ID NO: 335907 - DNA, 2552 bp, Homo sapiens
gcgactcgtcccgccttctggggcactagtttgactttgtgattggctactagtatcaaggaatcccggcgtggacagcgcgaggagaaagatggcggcgatggcggtcgggggtgctggtgggagccgcgtgtccagcgggagggacctgaattgcgtccccgaaatagctgacacactaggggctgtggccaagcaggggtttgatttcctctgcatgcctgtcttccatccgcgtttcaagagggagttcattcaggaacctgctaagaatcggcccggtccccagacacgatcagacctactgctgtcaggaagggactggaatacgctaattgtgggaaagctttctccatggattcgtccagactcaaaagtggagaagattcgcaggaactccgaggcggccatgttacaggagctgaattttggtgcatatttgggtcttccagctttcctgctgccccttaatcaggaagataacaccaacctggccagagttttgaccaaccacatccacactggccatcactcttccatgttctggatgcgggtacccttggtggcaccagaggacctgagagatgatataattgagaatgcaccaactacacacacagaggagtacagtggggaggagaaaacgtggatgtggtggcacaacttccggactttgtgtgactatagtaagaggattgcagtggctcttgaaattggggctgacctcccatctaatcatgtcattgatcgctggcttggggagcccatcaaagcagccattctccccactagcattttcctgaccaataagaagggatttcctgttctttctaagatgcaccagaggctcatcttccggctcctcaagttggaggtgcagttcatcatcacaggcaccaaccaccactcagagaaggagttctgctcctacctccaatacctggaatacttaagccagaaccgtcctccacctaatgcctatgaactctttgccaagggctatgaagactatctgcagtccccgcttcagccactgatggacaatctggaatctcagacatatgaagtgtttgaaaaggaccccatcaaatactctcagtaccagcaggccatctataaatgtctgctagaccgagtaccagaagaggagaaggataccaatgtccaggtactgatggtgctgggagcaggacggggacccctggtgaacgcttccctgcgggcagccaagcaggccgaccggcggataaagctgtatgctgtggagaaaaacccaaatgccgtggtgacgctagagaactggcagtttgaagaatggggaagccaagtgaccgtagtctcatcagacatgagggaatgggtggctccagagaaagcagacatcattgtcagtgagcttctgggctcatttgctgacaatgaattgtcgcctgagtgcctggatggagcccagcacttcctaaaagatgatggtgtgagcatccccggggagtacacttcctttctggctcccatctcttcctccaagctgtacaatgaggtccgagcctgtagggagaaggaccgtgaccctgaggcccagtttgagatgccttatgtggtacggctgcacaacttccaccagctctctgcaccccagccctgtttcaccttcagccatcccaacagagatcctatgattgacaacaaccgctattgcaccttggaatttcctgtggaggtgaacacagtactacatggctttgccggctactttgagactgtgctttatcaggacatcactctgagtatccgtccagagactcactctcctgggatgttctcatggtttcccatcctcttccctattaagcagcccataacggtacgtgaaggccaaaccatctgtgtgcgtttctggcgatgcagcaattccaagaaggtgtggtatgagtgggctgtgacagcaccagtctgttctgctattcataaccccacaggccgctcatataccattggcctctagccctgcgtgccaagtgtccagagccttggaagcagcttcaggttctgctcctgtagtacagaaggtgcagtacatctatgggctgtgattccccttgcccatcagagaggagcatttcaatctgctttcctgccttacatcaaggtgggcaagggattataattaattgcagggctcaagccaccaatctatgaagacctcaggccagggggtgaggaattagtgctggatttgaagctacgcactcagcctcaagaactccctggaatatccctgagaacatggggtttgaacggaactccgccgttaacagcactggtcgaagcatacggggtacgacgggaacatccagataacaggagaagccgcattagacgtgcaaaaaaaacaacagagcgcgggcacataaaagacccccacgagggcccaaaactaacagtagcacagacatctgcatacaaggggcacaaaagcaggggaatataaacgaagaacgcaagacatagaaagaggacgaggaaaagcgacacaggaacaccgtgagaac

SEQ ID NO: 335908 - DNA, 2416 bp, Homo sapiens
gcgactcgtcccgccttctggggcactagtttgactttgtgattggctactagtatcaaggaatcccggcgtggacagcgcgaggagaaagatggcggcgatggcggtcgggggtgctggtgggagccgcgtgtccagcgggagggacctgaattgcgtccccgaaatagctgacacactaggggctgtggccaagcaggggtgagggccggacctccacgagcggaatgcggggtcgtttgatttcctctgcatgcctgtcttccatccgcgtttcaagagggagttcattcaggaacctgctaagaatcggcccggtccccagacacgatcagacctactgctgtcaggaagggactggaatacgctaattgtgggaaagctttctccatggattcgtccagactcaaaagtggagaagattcgcaggaactccgaggcggccatgttacaggagctgaattttggtgcatatttgggtcttccagctttcctgctgccccttaatcaggaagataacaccaacctggccagagttttgaccaaccacatccacactggccatcactcttccatgttctggatgcgggtacccttggtggcaccagaggacctgagagatgatataattgagaatgcaccaactacacacacagaggagtacagtggggaggagaaaacgtggatgtggtggcacaacttccggactttgtgtgactatagtaagaggattgcagtggctcttgaaattggggctgacctcccatctaatcatgtcattgatcgctggcttggggagcccatcaaagcagccattctccccactagcattttcctgaccaataagaagggatttcctgttctttctaagatgcaccagaggctcatcttccggctcctcaagttggaggtgcagttcatcatcacaggcaccaaccaccactcagagaaggagttctgctcctacctccaatacctggaatacttaagccagaaccgtcctccacctaatgcctatgaactctttgccaagggctatgaagactatctgcagtccccgcttcagccactgatggacaatctggaatctcagacatatgaagtgtttgaaaaggaccccatcaaatactctcagtaccagcaggccatctataaatgtctgctagaccgagtaccagaagaggagaaggataccaatgtccaggtactgatggtgctgggagcaggacggggacccctggtgaacgcttccctgcgggcagccaagcaggccgaccggcggataaagctgtatgctgtggagaaaaacccaaatgccgtggtgacgctagagaactggcagtttgaagaatggggaagccaagtgaccgtagtctcatcagacatgagggaatgggtggctccagagaaagcagacatcattgtcagtgagcttctgggctcatttgctgacaatgaattgtcgcctgagtgcctggatggagcccagcacttcctaaaagatgatggtgtgagcatccccggggagtacacttcctttctggctcccatctcttcctccaagctgtacaatgaggtccgagcctgtagggagaaggaccgtgaccctgaggcccagtttgagatgccttatgtggtacggctgcacaacttccaccagctctctgcaccccagccctgtttcaccttcagccatcccaacagagatcctatgattgacaacaaccgctattgcaccttggaatttcctgtggaggtgaacacagtactacatggctttgccggctactttgagactgtgctttatcaggacatcactctgagtatccgtccagagactcactctcctgggatgttctcatggtttcccatcctcttccctattaagcagcccataacggtacgtgaaggccaaaccatctgtgtgcgtttctggcgatgcagcaattccaagaaggtgtggtatgagtgggctgtgacagcaccagtctgttctgctattcataaccccacaggccgctcatataccattggcctctagccctgcgtgccaagtgtccagagccttggaagcagcttcaggttctgctcctgtagtacagaaggtgcagtacatctatgggctgtgattccccttgcccatcagagaggagcatttcaatctgctttcctgccttacatcaaggtgggcaagggattataattaattgcagggctcaagccaccaatctatgaagacctcaggccagggggtgaggaattagtgctggatttgaagctacgcactcagcctcaagaactccctggaatatccctgagaacatggggtttgaacggattttcagcctttttctgttcttgttttgatggttttgtgtaagaggaaatacaaataaagttatagccctttactgca

SEQ ID NO: 335909 - DNA, 2410 bp, Homo sapiens
gcgactcgtcccgccttctggggcactagtttgactttgtgattggctactagtatcaaggaatcccggcgtggacagcgcgaggagaaagatggcggcgatggcggtcgggggtgctggtgggagccgcgtgtccagcgggagggacctgaattgcgtccccgaaatagctgacacactaggggctgtggccaagcaggggtttgatttcctctgcatgcctgtcttccatccgcgtttcaagagggagttcattcaggaacctgctaagaatcggcccggtccccagacacgatcagacctactgctgtcaggaagggtatttgtctttcttgggtgggggagtgcagactggaatacgctaattgtgggaaagctttctccatggattcgtccagactcaaaagtggagaagattcgcaggaactccgaggcggccatgttacaggagctgaattttggtgcatatttgggtcttccagctttcctgctgccccttaatcaggaagataacaccaacctggccagagttttgaccaaccacatccacactggccatcactcttccatgttctggatgcgggtacccttggtggcaccagaggacctgagagatgatataattgagaatgcaccaactacacacacagaggagtacagtggggaggagaaaacgtggatgtggtggcacaacttccggactttgtgtgactatagtaagaggattgcagtggctcttgaaattggggctgacctcccatctaatcatgtcattgatcgctggcttggggagcccatcaaagcagccattctccccactagcattttcctgaccaataagaagggatttcctgttctttctaagatgcaccagaggctcatcttccggctcctcaagttggaggtgcagttcatcatcacaggcaccaaccaccactcagagaaggagttctgctcctacctccaatacctggaatacttaagccagaaccgtcctccacctaatgcctatgaactctttgccaagggctatgaagactatctgcagtccccgcttcagccactgatggacaatctggaatctcagacatatgaagtgtttgaaaaggaccccatcaaatactctcagtaccagcaggccatctataaatgtctgctagaccgagtaccagaagaggagaaggataccaatgtccaggtactgatggtgctgggagcaggacggggacccctggtgaacgcttccctgcgggcagccaagcaggccgaccggcggataaagctgtatgctgtggagaaaaacccaaatgccgtggtgacgctagagaactggcagtttgaagaatggggaagccaagtgaccgtagtctcatcagacatgagggaatgggtggctccagagaaagcagacatcattgtcagtgagcttctgggctcatttgctgacaatgaattgtcgcctgagtgcctggatggagcccagcacttcctaaaagatgatggtgtgagcatccccggggagtacacttcctttctggctcccatctcttcctccaagctgtacaatgaggtccgagcctgtagggagaaggaccgtgaccctgaggcccagtttgagatgccttatgtggtacggctgcacaacttccaccagctctctgcaccccagccctgtttcaccttcagccatcccaacagagatcctatgattgacaacaaccgctattgcaccttggaatttcctgtggaggtgaacacagtactacatggctttgccggctactttgagactgtgctttatcaggacatcactctgagtatccgtccagagactcactctcctgggatgttctcatggtttcccatcctcttccctattaagcagcccataacggtacgtgaaggccaaaccatctgtgtgcgtttctggcgatgcagcaattccaagaaggtgtggtatgagtgggctgtgacagcaccagtctgttctgctattcataaccccacaggccgctcatataccattggcctctagccctgcgtgccaagtgtccagagccttggaagcagcttcaggttctgctcctgtagtacagaaggtgcagtacatctatgggctgtgattccccttgcccatcagagaggagcatttcaatctgctttcctgccttacatcaaggtgggcaagggattataattaattgcagggctcaagccaccaatctatgaagacctcaggccagggggtgaggaattagtgctggatttgaagctacgcactcagcctcaagaactccctggaatatccctgagaacatggggtttgaacggattttcagcctttttctgttcttgttttgatggttttgtgtaagaggaaatacaaataaagttatagccctttactgca

SEQ ID NO: 335910 - DNA, 2248 bp, Homo sapiens
gcgactcgtcccgccttctggggcactagtttgactttgtgattggctactagtatcaaggaatcccggcgtggacagcgcgaggagaaagatggcggcgatggcggtcgggggtgctggtgggagccgcgtgtccagcgggagggacctgaattgcgtccccgaaatagctgacacactaggggctgtggccaagcaggggtttgatttcctctgcatgcctgtcttccatccgcgtttcaagagggagttcattcaggaacctgctaagaatcggcccggtccccagacacgatcagacctactgctgtcaggaagggctttcctgctgccccttaatcaggaagataacaccaacctggccagagttttgaccaaccacatccacactggccatcactcttccatgttctggatgcgggtacccttggtggcaccagaggacctgagagatgatataattgagaatgcaccaactacacacacagaggagtacagtggggaggagaaaacgtggatgtggtggcacaacttccggactttgtgtgactatagtaagaggattgcagtggctcttgaaattggggctgacctcccatctaatcatgtcattgatcgctggcttggggagcccatcaaagcagccattctccccactagcattttcctgaccaataagaagggatttcctgttctttctaagatgcaccagaggctcatcttccggctcctcaagttggaggtgcagttcatcatcacaggcaccaaccaccactcagagaaggagttctgctcctacctccaatacctggaatacttaagccagaaccgtcctccacctaatgcctatgaactctttgccaagggctatgaagactatctgcagtccccgcttcagccactgatggacaatctggaatctcagacatatgaagtgtttgaaaaggaccccatcaaatactctcagtaccagcaggccatctataaatgtctgctagaccgagtaccagaagaggagaaggataccaatgtccaggtactgatggtgctgggagcaggacggggacccctggtgaacgcttccctgcgggcagccaagcaggccgaccggcggataaagctgtatgctgtggagaaaaacccaaatgccgtggtgacgctagagaactggcagtttgaagaatggggaagccaagtgaccgtagtctcatcagacatgagggaatgggtggctccagagaaagcagacatcattgtcagtgagcttctgggctcatttgctgacaatgaattgtcgcctgagtgcctggatggagcccagcacttcctaaaagatgatggtgtgagcatccccggggagtacacttcctttctggctcccatctcttcctccaagctgtacaatgaggtccgagcctgtagggagaaggaccgtgaccctgaggcccagtttgagatgccttatgtggtacggctgcacaacttccaccagctctctgcaccccagccctgtttcaccttcagccatcccaacagagatcctatgattgacaacaaccgctattgcaccttggaatttcctgtggaggtgaacacagtactacatggctttgccggctactttgagactgtgctttatcaggacatcactctgagtatccgtccagagactcactctcctgggatgttctcatggtttcccatcctcttccctattaagcagcccataacggtacgtgaaggccaaaccatctgtgtgcgtttctggcgatgcagcaattccaagaaggtgtggtatgagtgggctgtgacagcaccagtctgttctgctattcataaccccacaggccgctcatataccattggcctctagccctgcgtgccaagtgtccagagccttggaagcagcttcaggttctgctcctgtagtacagaaggtgcagtacatctatgggctgtgattccccttgcccatcagagaggagcatttcaatctgctttcctgccttacatcaaggtgggcaagggattataattaattgcagggctcaagccaccaatctatgaagacctcaggccagggggtgaggaattagtgctggatttgaagctacgcactcagcctcaagaactccctggaatatccctgagaacatggggtttgaacggattttcagcctttttctgttcttgttttgatggttttgtgtaagaggaaatacaaataaagttatagccctttactgca

SEQ ID NO: 335911 - DNA, 2735 bp, Homo sapiens
gcgactcgtcccgccttctggggcactagtttgactttgtgattggctactagtatcaaggaatcccggcgtggacagcgcgaggagaaagatggcggcgatggcggtcgggggtgctggtgggagccgcgtgtccagcgggagggacctgaattgcgtccccgaaatagctgacacactaggggctgtggccaagcaggggtttgatttcctctgcatgcctgtcttccatccgcgtttcaagagggagttcattcaggaacctgctaagaatcggcccggtccccagacacgatcagacctactgctgtcaggaagggactggaatacgctaattgtgggaaagctttctccatggattcgtccagactcaaaagtggagaagattcgcaggaactccgaggcggccatgttacaggagctgaattttggtgcatatttgggtcttccagctttcctgctgccccttaatcaggaagataacaccaacctggccagagttttgaccaaccacatccacactggccatcactcttccatgttctggatgcgggtacccttggtggcaccagaggacctgagagatgatataattgagaatgcaccaactacacacacagaggagtacagtggggaggagaaaacgtggatgtggtatgtctccctttgctgctgtaccagggtgcaagggatagggtgaggggaagtacagggtgcaacctgtagggaggtctccttgagctgtggtgattggtcggccatatctagtttactgtacttttctgtatttgactgaacaggtggcacaacttccggactttgtgtgactatagtaagaggattgcagtgggtgagtccatgagaatcctgggatgggtgtggcttctcttacctcctgtgaataagaatcaggaatttcatatatagtatacaattttgctacttcccctctgtctcagactggctttctcttaaagaagtaaacagattttgcgcaaaggagcaaggaagggtttcttgcctggcagtggttgacagtttttcttttgcctcatgtagctcttgaaattggggctgacctcccatctaatcatgtcattgatcgctggcttggggagcccatcaaagcagccattctccccactagcattttcctgaccaataagaagggatttcctgttctttctaagatgcaccagaggctcatcttccggctcctcaagttggaggtgcagttcatcatcacaggcaccaaccaccactcagagaaggagttctgctcctacctccaatacctggaatacttaagccagaaccgtcctccacctaatgcctatgaactctttgccaagggctatgaagactatctgcagtccccgcttcagccactgatggacaatctggaatctcagacatatgaagtgtttgaaaaggaccccatcaaatactctcagtaccagcaggccatctataaatgtctgctagaccgagtaccagaagaggagaaggataccaatgtccaggtactgatggtgctgggagcaggacggggacccctggtgaacgcttccctgcgggcagccaagcaggccgaccggcggataaagctgtatgctgtggagaaaaacccaaatgccgtggtgacgctagagaactggcagtttgaagaatggggaagccaagtgaccgtagtctcatcagacatgagggaatgggtggctccagagaaagcagacatcattgtcagtgagcttctgggctcatttgctgacaatgaattgtcgcctgagtgcctggatggagcccagcacttcctaaaagatgatggtgtgagcatccccggggagtacacttcctttctggctcccatctcttcctccaagctgtacaatgaggtccgagcctgtagggagaaggaccgtgaccctgaggcccagtttgagatgccttatgtggtacggctgcacaacttccaccagctctctgcaccccagccctgtttcaccttcagccatcccaacagagatcctatgattgacaacaaccgctattgcaccttggaatttcctgtggaggtgaacacagtactacatggctttgccggctactttgagactgtgctttatcaggacatcactctgagtatccgtccagagactcactctcctgggatgttctcatggtttcccatcctcttccctattaagcagcccataacggtacgtgaaggccaaaccatctgtgtgcgtttctggcgatgcagcaattccaagaaggtgtggtatgagtgggctgtgacagcaccagtctgttctgctattcataaccccacaggccgctcatataccattggcctctagccctgcgtgccaagtgtccagagccttggaagcagcttcaggttctgctcctgtagtacagaaggtgcagtacatctatgggctgtgattccccttgcccatcagagaggagcatttcaatctgctttcctgccttacatcaaggtgggcaagggattataattaattgcagggctcaagccaccaatctatgaagacctcaggccagggggtgaggaattagtgctggatttgaagctacgcactcagcctcaagaactccctggaatatccctgagaacatggggtttgaacggattttcagcctttttctgttcttgttttgatggttttgtgtaagaggaaatacaaataaagttatagccctttactgca

SEQ ID NO: 335912 - DNA, 1807 bp, Homo sapiens
aagctgtgctgtcaagtccacgcagaccaaccttttggaattgctgcatccgcagaaacgcacacacgatggttagagcttcacgtaccgttatgggctgcttaatagggaagaggatgggaaaccatgagaacatcccaggagagtgagtctctggacggatactcagagtgatgtcctgataaagcacagtctcaaagtggccattctccccactagcattttcctgaccaataagaagggatttcctgttctttctaagatgcaccagaggctcatcttccggctcctcaagttggaggtgcagttcatcatcacaggcaccaaccaccactcagagaaggagttctgctcctacctccaatacctggaatacttaagccagaaccgtcctccacctaatgcctatgaactctttgccaagggctatgaagactatctgcagtccccgcttcagccactgatggacaatctggaatctcagacatatgaagtgtttgaaaaggaccccatcaaatactctcagtaccagcaggccatctataaatgtctgctagaccgagtaccagaagaggagaaggataccaatgtccaggtactgatggtgctgggagcaggacggggacccctggtgaacgcttccctgcgggcagccaagcaggccgaccggcggataaagctgtatgctgtggagaaaaacccaaatgccgtggtgacgctagagaactggcagtttgaagaatggggaagccaagtgaccgtagtctcatcagacatgagggaatgggtggctccagagaaagcagacatcattgtcagtgagcttctgggctcatttgctgacaatgaattgtcgcctgagtgcctggatggagcccagcacttcctaaaagatgatggtgtgagcatccccggggagtacacttcctttctggctcccatctcttcctccaagctgtacaatgaggtccgagcctgtagggagaaggaccgtgaccctgaggcccagtttgagatgccttatgtggtacggctgcacaacttccaccagctctctgcaccccagccctgtttcaccttcagccatcccaacagagatcctatgattgacaacaaccgctattgcaccttggaatttcctgtggaggtgaacacagtactacatggctttgccggctactttgagactgtgctttatcaggacatcactctgagtatccgtccagagactcactctcctgggatgttctcatggtttcccatcctcttccctattaagcagcccataacggtacgtgaaggccaaaccatctgtgtgcgtttctggcgatgcagcaattccaagaaggtgtggtatgagtgggctgtgacagcaccagtctgttctgctattcataaccccacaggccgctcatataccattggcctctagccctgcgtgccaagtgtccagagccttggaagcagcttcaggttctgctcctgtagtacagaaggtgcagtacatctatgggctgtgattccccttgcccatcagagaggagcatttcaatctgctttcctgccttacatcaaggtgggcaagggattataattaattgcagggctcaagccaccaatctatgaagacctcaggccagggggtgaggaattagtgctggatttgaagctacgcactcagcctcaagaactccctggaatatccctgagaacatggggtttgaacggattttcagcctttttctgttcttgttttgatggttttgtgtaagaggaaatacaaataaagttatagccctttactgca

SEQ ID NO: 335913 - DNA, 1918 bp, Homo sapiens
gcgactcgtcccgccttctggggcactagtttgactttgtgattggctactagtatcaaggaatcccggcgtggacagcgcgaggagaaagatggcggcgatggcggtcgggggtgctggtgggagccgcgtgtccagcgggagggacctgaattgcgtccccgaaatagctgacacactaggggctgtggccaagcaggggtttgatttcctctgcatgcctgtcttccatccgcgtttcaagagggagttcattcaggaacctgctaagaatcggcccggtccccagacacgatcagacctactgctgtcaggaagggactggaatacgctaattgtgggaaagctttctccatggattcgtccagactcaaaagtggagaagattcgcaggaactccgaggcgttggaggtgcagttcatcatcacaggcaccaaccaccactcagagaaggagttctgctcctacctccaatacctggaatacttaagccagaaccgtcctccacctaatgcctatgaactctttgccaagggctatgaagactatctgcagtccccgcttcagccactgatggacaatctggaatctcagacatatgaagtgtttgaaaaggaccccatcaaatactctcagtaccagcaggccatctataaatgtctgctagaccgagtaccagaagaggagaaggataccaatgtccaggtactgatggtgctgggagcaggacggggacccctggtgaacgcttccctgcgggcagccaagcaggccgaccggcggataaagctgtatgctgtggagaaaaacccaaatgccgtggtgacgctagagaactggcagtttgaagaatggggaagccaagtgaccgtagtctcatcagacatgagggaatgggtggctccagagaaagcagacatcattgtcagtgagcttctgggctcatttgctgacaatgaattgtcgcctgagtgcctggatggagcccagcacttcctaaaagatgatggtgtgagcatccccggggagtacacttcctttctggctcccatctcttcctccaagctgtacaatgaggtccgagcctgtagggagaaggaccgtgaccctgaggcccagtttgagatgccttatgtggtacggctgcacaacttccaccagctctctgcaccccagccctgtttcaccttcagccatcccaacagagatcctatgattgacaacaaccgctattgcaccttggaatttcctgtggaggtgaacacagtactacatggctttgccggctactttgagactgtgctttatcaggacatcactctgagtatccgtccagagactcactctcctgggatgttctcatggtttcccatcctcttccctattaagcagcccataacggtacgtgaaggccaaaccatctgtgtgcgtttctggcgatgcagcaattccaagaaggtgtggtatgagtgggctgtgacagcaccagtctgttctgctattcataaccccacaggccgctcatataccattggcctctagccctgcgtgccaagtgtccagagccttggaagcagcttcaggttctgctcctgtagtacagaaggtgcagtacatctatgggctgtgattccccttgcccatcagagaggagcatttcaatctgctttcctgccttacatcaaggtgggcaagggattataattaattgcagggctcaagccaccaatctatgaagacctcaggccagggggtgaggaattagtgctggatttgaagctacgcactcagcctcaagaactccctggaatatccctgagaacatggggtttgaacggattttcagcctttttctgttcttgttttgatggttttgtgtaagaggaaatacaaataaagttatagccctttactgca

SEQ ID NO: 335914 - DNA, 2146 bp, Homo sapiens
gcgactcgtcccgccttctggggcactagtttgactttgtgattggctactagtatcaaggaatcccggcgtggacagcgcgaggagaaagatggcggcgatggcggtcgggggtgctggtgggagccgcgtgtccagcgggagggacctgaattgcgtccccgaaatagctgacacactaggggctgtggccaagcaggggtttgatttcctctgcatgcctgtcttccatccgcgtttcaagagggagttcattcaggaacctgctaagaatcggcccggtccccagacacgatcagacctactgctgtcaggaagggactggaatacgctaattgtgggaaagctttctccatggattcgtccagactcaaaagtggagaagattcgcaggaactccgaggcggccatgttacaggagctgaattttggtgcatatttgggtcttccagctttcctgctgccccttaatcaggaagataacaccaacctggccagagttttgaccaaccacatccacactggccatcactcttccatgttctggatgcgggtacccttggtggcaccagaggacctgagagatgatataattgagaatgcaccaactacacacacagaggagtacagtggggaggagaaaacgtggatgtggtggcacaacttccggactttgtgtgactatagtaagaggattgcagtggctcttgaaattggggctgacctcccatctaatcatgtcattgatcgctggcttggggagcccatcaaagcagccattctccccactagcattttcctgaccaataagaagggatttcctgttctttctaagatgcaccagaggctcatcttccggctcctcaagttggaggtgcagttcatcatcacaggcaccaaccaccactcagagaaggagttctgctcctacctccaatacctggaatacttaagccagaaccgtcctccacctaatgcctatgaactctttgccaagggctatgaagactatctgcagtccccgcttcagccactgatggacaatctggaatctcagacatatgaagtgtttgaaaaggaccccatcaaatactctcagtaccagcaggccatctataaatgtctgctagaccgagtaccagaagaggagaaggataccaatgtccaggtactgatggtgctgggagcaggacggggacccctggtgaacgcttccctgcgggcagccaagcaggccgaccggcggataaagctgtatgctgtggagaaaaacccaaatgccgtggtgacgctagagaactggcagtttgaagaatggggaagccaagtgaccgtagtctcatcagacatgagggaatgggtggctccagagaaagcagacatcattgtcagtgagcttctgggctcatttgctgacaatgaattgtcgcctgagtgcctggatggagcccagcacttcctaaaagatgatggtgtgagcatccccggggagtacacttcctttctggctcccatctcttcctccaagctgtacaatgaggtccgagcctgtagggagaaggaccgtgaccctgaggcccagtttgagatgccttatgtggtacggctgcacaacttccaccagctctctgcaccccagccctgtttcaccttcagccatcccaacagagatcctatgattgacaacaaccgctattgcaccttggaatttcctgtggaggtgaacacagtactacatggctttgccggctactttgagactgtgctttatcaggacatcactctgagtatccgtccagagactcactctcctgggatgttctcatggtttcccatcctcttccctattaagcagcccataacggtacgtgaaggccaaaccatctgtgtgcgtttctggcgatgcagcaattggctcaagccaccaatctatgaagacctcaggccagggggtgaggaattagtgctggatttgaagctacgcactcagcctcaagaactccctggaatatccctgagaacatggggtttgaacggattttcagcctttttctgttcttgttttgatggttttgtgtaagaggaaatacaaataaagttatagccctttactgcacgaaaacatgctgccccctgccactatttt

SEQ ID NO: 335915 - DNA, 2189 bp, Homo sapiens
gcgactcgtcccgccttctggggcactagtttgactttgtgattggctactagtatcaaggaatcccggcgtggacagcgcgaggagaaagatggcggcgatggcggtcgggggtgctggtgggagccgcgtgtccagcgggagggacctgaattgcgtccccgaaatagctgacacactaggggctgtggccaagcaggggtttgatttcctctgcatgcctgtcttccatccgcgtttcaagagggagttcattcaggaacctgctaagaatcggcccggtccccagacacgatcagacctactgctgtcaggaagggactggaatacgctaattgtgggaaagctttctccatggattcgtccagactcaaaagtggagaagattcgcaggaactccgaggcggccatgttacaggagctgaattttggtgcatatttgggtcttccagctttcctgctgccccttaatcaggaagataacaccaacctggccagagttttgaccaaccacatccacactggccatcactcttccatgttctggatgcgggtacccttggtggcaccagaggacctgagagatgatataattgagaatgcaccaactacacacacagaggagtacagtggggaggagaaaacgtggatgtggtggcacaacttccggactttgtgtgactatagtaagaggattgcagtggctcttgaaattggggctgacctcccatctaatcatgtcattgatcgctggcttggggagcccatcaaagcagccattctccccactagcattttcctgaccaataagaagggatttcctgttctttctaagatgcaccagaggctcatcttccggctcctcaagttggaggtgcagttcatcatcacaggcaccaaccaccactcagagaaggagttctgctcctacctccaatacctggaatacttaagccagaaccgtcctccacctaatgcctatgaactctttgccaagggctatgaagactatctgcagtccccgcttcagccactgatggacaatctggaatctcagacatatgaagtgtttgaaaaggaccccatcaaatactctcagtaccagcaggccatctataaatgtctgctagaccgagtaccagaagaggagaaggataccaatgtccaggtactgatggtgctgggagcaggacggggacccctggtgaacgcttccctgcgggcagccaagcaggccgaccggcggataaagctgtatgctgtggagaaaaacccaaatgccgtggtgacgctagagaactggcagtttgaagaatggggaagccaagtgaccgtagtctcatcagacatgagggaatgggtggctccagagaaagcagacatcattgtcagtgagcttctgggctcatttgctgacaatgaattgtcgcctgagtgcctggatggagcccagcacttcctaaaagatgatggtgtgagcatccccggggagtacacttcctttctggctcccatctcttcctccaagctgtacaatgaggtccgagcctgtagggagaaggaccgtgaccctgaggcccagtttgagatgccttatgtggtacggctgcacaacttccaccagctctctgcaccccagccctgtttcaccttcagccatcccaacagagatcctatgattgacaacaaccgctattgcaccttggaatttcctgtggaggtgaacacagtactacatggctttgccggctactttgagactgtgctttatcaggacatcactctgagtatccgtccagagactcactctcctgggatgttctcatggtttcccatcctcttccctattaagaaccccacaggccgctcatataccattggcctctagccctgcgtgccaagtgtccagagccttggaagcagcttcaggttctgctcctgtagtacagaaggtgcggctcaagccaccaatctatgaagacctcaggccagggggtgaggaattagtgctggatttgaagctacgcactcagcctcaagaactccctggaatatccctgagaacatggggtttgaacggattttcagcctttttctgttcttgttttgatggttttgtgtaagaggaaatacaaataaagttatagccctttactgcacgaaaacatgctgccccctgccactatttt

SEQ ID NO: 335916 - DNA, 1169 bp, Homo sapiens
gattagactattttgggttctttcagttttaatctgtgtgactctgtaaattaacctagtagtggaatcctccatgacagtagttggaagcaggctggcttagtaatgtgacaacatgcatttgtctctttcttccatgcccatgccaacgttggttggttttgacatgggaggtttgatccttctgatccttcagttagtacagacataccatttccctccctctggaactaatttgactctcctgctgtgcagatgatggtgtgagcatccccggggagtacacttcctttctggctcccatctcttcctccaagctgtacaatgaggtccgagcctgtagggagaaggaccgtgaccctgaggcccagtttgagatgccttatgtggtacggctgcacaacttccaccagctctctgcaccccagccctgtttcaccttcagccatcccaacagagatcctatgattgacaacaaccgctattgcaccttggaatttcctgtggaggtgaacacagtactacatggctttgccggctactttgagactgtgctttatcaggacatcactctgagtatccgtccagagactcactctcctgggatgttctcatggtttcccatcctcttccctattaagcagcccataacggtacgtgaaggccaaaccatctgtgtgcgtttctggcgatgcagcaattccaagaaggtgtggtatgagtgggctgtgacagcaccagtctgttctgctattcataaccccacaggccgctcatataccattggcctctagccctgcgtgccaagtgtccagagccttggaagcagcttcaggttctgctcctgtagtacagaaggtgcagtacatctatgggctgtgattccccttgcccatcagagaggagcatttcaatctgctttcctgccttacatcaaggtgggcaagggattataattaattgcagggctcaagccaccaatctatgaagacctcaggccagggggtgaggaattagtgctggatttgaagctacgcactcagcctcaagaactccctggaatatccctgagaacatggggtttgaacggattttcagcctttttctgttcttgttttgatggttttgtgtaagaggaaatacaaataaagttatagccctttactgca

SEQ ID NO: 335917 - DNA, 948 bp, Homo sapiens
gcgactcgtcccgccttctggggcactagtttgactttgtgattggctactagtatcaaggaatcccggcgtggacagcgcgaggagaaagatggcggcgatggcggtcgggggtgctggtgggagccgcgtgtccagcgggagggacctgaattgcgtccccgaaatagctgacacactaggggctgtggccaagcaggggtttgatttcctctgcatgcctgtcttccatccgcgtttcaagagggagttcattcaggaacctgctaagaatcggcccggtccccagacacgatcagacctactgctgtcaggaagggactggaatacgctaattgtgggaaagctttctccatggattcgtccagactcaaaagtggagaagattcgcaggaactccgaggcggccatgttacaggagctgaattttggtgcatatttgggtcttccagctttcctgctgccccttaatcaggaagataacaccaacctggccagagttttgaccaaccacatccacactggccatcactcttccatgttctggatgcgggtacccttggtggcaccagaggacctgagagatgatataattgagaatgcaccaactacacacacagaggagtacagtggggaggagaaaacgtggatgtggtggcacaacttccggactttgtgtgactatagtaagaggattgcagtggctcttgaaattggggctgacctcccatctaatcatgtcattgatcgctggcttggggagcccatcaaagcagccattctccccactagcattttcctgaccaataagaagggatttcctgttctttctaagatgcaccagaggctcatcttccggctcctcaagccatgttacaggagctgaattttggtgcatatttgggtcttccagctttcctgctgccccttaatcaggaagcttgctag

SEQ ID NO: 335918 - DNA, 461 bp, Homo sapiens
atttgtaatgtgagctatgaaggaaaaggtagcgggaagaaagagggatgcgagcccttctactcttttaagggagggcctttggggaggtctttccagctgagggcacagcccaggcaaaggctcagaggcagaaagtgcaggagtgtgttgtgggtggggaggctaccaggcacctggtgtgtgcccggggagaagtcagaaaaaggcctggcctcggggggcccaggaagtggcttccagaggtggggagaaggcaaaagagaggactaaaccctttagtctgtttgagggaactccagcccccagcatgttgctctctgggggatccagcagggccaggtgggcagtgggagcaccctagccccaggtgctaccttccagcctggggccaagccttttccctttctctcatttgcagctttctgataggtgggaaagagaagcaggaaaaaagagca

SEQ ID NO: 335919 - DNA, 543 bp, Homo sapiens
tagagacggggtttcaccgtgttagccaggatggtctcgatctcctgaccttatgatctgcccgcctcggcctcccgaagtgctgggatgattacaggcgtgagccactgcgcctggccgcctgttgagggactttcatagtcatctcgtctgtggccttttgtgcctggctctcaccaggcattgcgtcttcggggtccatcgtgctgtggcatgatcagtgcttcatttggtttaaggctgaataatattccatgctctggccggacccttctcacctatagccatcgttagttgatgggcatctgggcgagttctgcttttcggctgttacaaatcatgctgctctgaacggccgcgtgtaagtttttgtgtggatgggtgtttcattcctcttgggtatatacctaggagtggagttgctgggacatatggtgactctgtgtttaaccttttgtggaactgccaagtattctctaaagtgtccccactgggggaaaaaaaagaaaatggaaaaaaaatcttgtggggaagggaatgatg

SEQ ID NO: 335920 - DNA, 170 bp, Homo sapiens
aacttaaaatgaaataaaataaaattttaaaaaactttattttgtctaaaattccaaaatgcagggattacaggcgtaagccaccgtgcctggccctgttttaacatatctgaacaagatttaagacatcagtttgaaaagagcccctctatggcagcaacatgaattct

SEQ ID NO: 335921 - DNA, 1192 bp, Homo sapiens
caggtttctacgtgacctctcagttattcccttacgccatgactcatcttttacgctcttgtccagaggcactatcagcagttttggataaagagccaaacagtaaatattttagactttacaggccacatatgatctctgtcacatagtcttaggtttttatatttttaaaggattgtttttaaaaaagattctctgctcatgggctggatttgggctgaatgctgtagtgtgtggaccccgtctagatcatcagaaggaaaaacattaaccttcagaatagggggtaattcgctgcaaaagtactatagaatggtctcatacataaattagtcaacatttgttatctcctgcaggtagaatattccgtggttgcttcttgaccaagggaaatacagtctggctgtgagagacttaaaatctcttgaggagcgctctggagaatggctgaaggagaggaaacaggagccttgagcagtgtaattacaaacaaataggttggcatagtcttaagtctttgagtctagagagatttgagttttgttttgcctgtggaggcaattgggggtttcaggtcaaagagagggtcagtggaaacaagggtgggccttgtgaggtgtggggaagccctgggaccctcactccccttccagtgtgtaactggattggctcccaccagcccagaagatttacgacgtgggaaatggtatacttggattaaaatatttcatccagatttgtttacatctagagagaaccccttgtaggttataaggaaactttttaacattcttccttgaatatattttctgtagctgaaaatgtttgtgaagtggctgtcaactacacatcgcatgagtagaggggctctgggtcggggtttcatatgcagcagagcagctcccttgctgccgtccatcaagagccctcaacacaagagtttgttataaatagaaataaacgacaaaaagtagaggggtatgtttaagtacactattagatgtgactgactaccttgaaacctgatttttttccatggggagaaacagtgcttgaattctgcatgccccccttgcatctagcaccttttggtaggggtggaaggagggtgtcagggagaatgattaggagataatggaggggaggggaaacttgcgttgtgtaatagcatttgaagagcacttaccacgtg

SEQ ID NO: 335922 - DNA, 981 bp, Homo sapiens
  misc_feature (920)..(920): n is a, c, g, or t
  misc_feature (927)..(928): n is a, c, g, or t
  misc_feature (931)..(931): n is a, c, g, or t
  misc_feature (933)..(933): n is a, c, g, or t
  misc_feature (935)..(935): n is a, c, g, or t
  misc_feature (946)..(946): n is a, c, g, or t
gaccacgaccgcgtccgggcgcgccacgtgtgcgtaggagcgcaccggaagcgcccggctggaggcgcggcggcagggctgggcggcggcggcggcggcggtcatggaacgccaagaggagtctctgtccgcgcggccggccctggagaccgaggggctgcgcttcctgcacaccacggtgggctccctgctggccacctatggctggtacatcgtcttcagctgcatccttctctacgtggtctttcagaagctttccgcccggctaagagccttgaggcagaggcagctggaccgagctgcggctgctgtggaacctgatgttgttgttaaacgacaagaagctttagcagctgctcgactgaaaatgcaagaagaactaaatgcgcaagttgaaaagcataaggaaaaactgaaacaacttgaagaagaaaaaaggagacagaagattgaaatgtgggacagcatgcaagaaggaaaaagttacaaaggaaatgcaaagaagccccaggaggaagacagtcctgggccttccacttcatctgtcctgaaacggaaatcggacagaaagcctttgcggggaggaggttataacccgttgtctggtgaaggaggcggagcttgctcctggagacctggacgcagaggcccgtcatctggcggatgaggctaagaatcttgttaggtagaatattccgtggttgcttcttgaccaagggaaatacagtctggctgtgagagacttaaaatctcttgaggagcgctctggagaatggctgaaggagaggaaacaggagccttgagcagtgtaattacaaacaaataggttggcatagtcttaagtctttgagtctagagagatttgagttttgttttgcctgtggaggcaattgggggtttcaggtcaaagagagggtcgnggacagnnggntntngtttgggaccnggactctccctcggggttgttgcccacacaaattg

SEQ ID NO: 335923 - DNA, 1197 bp, Homo sapiens
gaccacgaccgcgtccgggcgcgccacgtgtgcgtaggagcgcaccggaagcgcccggctggaggcgcggcggcagggctgggcggcggcggcggcggcggtcatggaacgccaagaggagtctctgtccgcgcggccggccctggagaccgaggggctgcgcttcctgcacaccacggtgggctccctgctggccacctatggctggtacatcgtcttcagctgcatccttctctacgtggtctttcagaagctttccgcccggctaagagccttgaggcagaggcagctggaccgagctgcggctgctgtggaacctgatgttgttgttaaacgacaagaagctttagcagctgctcgactgaaaatgcaagaagaactaaatgcgcaagttgaaaagcataaggaaaaactgaaacaacttgaagaagaaaaaaggagacagaagattgaaatgtgggacagcatgcaagaaggatccacttcatctgtcctgaaacggaaatcggacagaaagcctttgcggggaggaggttataacccgttgtctggtgaaggaggcggagcttgctcctggagacctggacgcagaggcccgtcatctggcggatgaggctaagaatcttgttagtgtcacttttgacattagcaagatgaacccttaaccctcgattcaattgccttacgcacgcttttcacagtgactagccaaggggaggtggggttgatttctgttcctaactacacctgcatatgtcagggctccagtcagcaaaaggtatagatgttgcctctaggcatgaggtcattggtcacattctacttggagacagtgattgcattcattgatttcatggttaattgctagttggtaggtaaaggcctctagatgattagcaatcttgataaaagaggcctagtaatgttcttttgaggttagaaatccttgctgctaggacagtctctgtgacaggttgcgttgaatgatgtcttccttatcaatggtgagcccaccagtgaggattactgatgtggacagttgatggggtttgtttctgtatatttatttttatgtacagaactttgtaaaaacgaaactatttaaaaaacaagaataacatttttagcatctttattcaaggagatttatggacttcaatttgtctatcaaacattaaatagctttttattacaacc

SEQ ID NO: 335924 - DNA, 920 bp, Homo sapiens
atcacaacagttttattaactaaagaaaacgagggtgaagtttgttctgaaagacatttaaattaagaattatcagagttagctttgtctttgagagaaatggcagcttctgaattctttctgtaaaatgtgattgtttctcagcttgaagaagaaaaaaggagacagaagattgaaatgtgggacagcatgcaagaaggatccacttcatctgtcctgaaacggaaatcggacagaaagcctttgcggggaggaggttataacccgttgtctggtgaaggaggcggagcttgctcctggagacctggacgcagaggcccgtcatctggcggatgaggctaagaatcttgttagtgtcacttttgacattagcaagatgaacccttaaccctcgattcaattgccttacgcacgcttttcacagtgactagccaaggggaggtggggttgatttctgttcctaactacacctgcatatgtcagggctccagtcagcaaaaggtatagatgttgcctctaggcatgaggtcattggtcacattctacttggagacagtgattgcattcattgatttcatggttaattgctagttggtaggtaaaggcctctagatgattagcaatcttgataaaagaggcctagtaatgttcttttgaggttagaaatccttgctgctaggacagtctctgtgacaggttgcgttgaatgatgtcttccttatcaatggtgagcccaccagtgaggattactgatgtggacagttgatggggtttgtttctgtatatttatttttatgtacagaactttgtaaaaacgaaactatttaaaaaacaagaataacatttttagcatctttattcaaggagatttatggacttcaatttgtctatcaaacattaaatagctttttattacaacc

SEQ ID NO: 335925 - DNA, 1196 bp, Homo sapiens
gaccacgaccgcgtccgggcgcgccacgtgtgcgtaggagcgcaccggaagcgcccggctggaggcgcggcggcagggctgggcggcggcggcggcggcggtcatggaacgccaagaggagtctctgtccgcgcggccggccctggagaccgaggggctgcgcttcctgcacaccacggtgggctccctgctggccacctatggctggtacatcgtcttcagctgcatccttctctacgtggtctttcagaagctttccgcccggctaagagccttgaggcagaggcagctggaccgagctgcggctgctgtggaacctgatgttgttgttaaacgacaagaagctttagcagctgctcgactgaaaatgcaagaagaactaaatgcgcaagttgaaaagcataaggaaaaactgaaacaacttgaagaagaaaaaaggagacagaagattgaaatgtgggacagcatgcaagaaggaaaaagttacaaaggaaatgcaaagaagccccaggaggaagacagtcctgggccttccacttcatctgtcctgaaacggaaatcggacagaaagcctttgcggggaggaggttataacccgttgtctggtgaaggaggcggagcttgctcctggagacctggacgcagaggcccgtcatctggcggatgaggctaagaatcttgttagtgtcacttttgacattagcaagatgaacccttaaccctcgattcaattgccttacgcacgcttttcacagtgactagccaaggggaggtggggttgatttctgttcctaactacacctgcatatgtcagggctccagtcagcaaaagtgattgcattcattgatttcatggttaattgctagttggtaggtaaaggcctctagatgattagcaatcttgataaaagaggcctagtaatgttcttttgaggttagaaatccttgctgctaggacagtctctgtgacaggttgcgttgaatgatgtcttccttatcaatggtgagcccaccagtgaggattactgatgtggacagttgatggggtttgtttctgtatatttatttttatgtacagaactttgtaaaaacgaaactatttaaaaaacaagaataacatttttagcatctttattcaaggagatttatggacttcaatttgtctatcaaacattaaatagctttttattacaacc

SEQ ID NO: 335926 - DNA, 1372 bp, Homo sapiens
cgccacttttgcgacgcgcagccatgatggtgggctccctgctggccacctatggctggtacatcgtcttcagctgcatccttctctacgtggtctttcagaagctttccgcccggctaagagccttgaggcagaggcagctggaccgagctgcggctgctgtggaacctgatgttgttgttaaacgacaagaagctttagcagctgctcgactgaaaatgcaagaagaactaaatgcgcaagttgaaaagcataaggaaaaactgaaacaacttgaagaagaaaaaaggagacagaagattgaaatgtgggacagcatgcaagaaggaaaaagttacaaaggaaatgcaaagaagccccaggaggaagacagtcctgggccttccacttcatctgtcctgaaacggaaatcggacagaaagcctttgcggggaggaggttataacccgttgtctggtgaaggaggcggagcttgctcctggagacctggacgcagaggcccgtcatctggcggatgaggctaagaatcttgttaggtagaatattccgtggttgcttcttgaccaagggaaatacagtctggctgtgagagacttaaaatctcttgaggagcgctctggagaatggctgaaggagaggaaacaggagccttgagcagtgtaattacaaacaaataggttggcatagtcttaagtctttgagtctagagagatttgagttttgttttgcctgtggaggcaattgggggtttcaggtcaaagagagggtcagtggaaacaagggtgggccttgtgaggtgtggggaagccctgggaccctcactccccttccagtgtgtaactggattggctcccaccagcccagaagatttacgacgtgggaaatggtatacttggattaaaatatttcatccagatttgtttacatctagagagaaccccttgtaggttataaggaaactttttaacattcttccttgaatatattttctgtagctgaaaatgtttgtgaagtggctgtcaactacacatcgcatgagtagaggggctctgggtcggggtttcatatgcagcagagcagctcccttgctgccgtccatcaagagccctcaacacaagagtttgttataaatagaaataaacgacaaaaagtagaggggtatgtttaagtacactattagatgtgactgactaccttgaaacctgatttttttccatggggagaaacagtgcttgaattctgcatgccccccttgcatctagcaccttttggtaggggtggaaggagggtgtcagggagaatgattaggagataatggaggggaggggaaacttgcgttgtgtaatagcatttgaagagcacttaccacgtg

SEQ ID NO: 335927 - DNA, 1251 bp, Homo sapiens
gaccacgaccgcgtccgggcgcgccacgtgtgcgtaggagcgcaccggaagcgcccggctggaggcgcggcggcagggctgggcggcggcggcggcggcggtcatggaacgccaagaggagtctctgtccgcgcggccggccctggagaccgaggggctgcgcttcctgcacaccacggtgggctccctgctggccacctatggctggtacatcgtcttcagctgcatccttctctacgtggtctttcagaagctttccgcccggctaagagccttgaggcagaggcagctggaccgagctgcggctgctgtggaacctgatgttgttgttaaacgacaagaagctttagcagctgctcgactgaaaatgcaagaagaactaaatgcgcaagttgaaaagcataaggaaaaactgaaacaacttgaagaagaaaaaaggagacagaagattgaaatgtgggacagcatgcaagaaggaaaaagttacaaaggaaatgcaaagaagccccaggaggaagacagtcctgggccttccacttcatctgtcctgaaacggaaatcggacagaaagcctttgcggggaggaggttataacccgttgtctggtgaaggaggcggagcttgctcctggagacctggacgcagaggcccgtcatctggcggatgaggctaagaatcttgttagtgtcacttttgacattagcaagatgaacccttaaccctcgattcaattgccttacgcacgcttttcacagtgactagccaaggggaggtggggttgatttctgttcctaactacacctgcatatgtcagggctccagtcagcaaaaggtatagatgttgcctctaggcatgaggtcattggtcacattctacttggagacagtgattgcattcattgatttcatggttaattgctagttggtaggtaaaggcctctagatgattagcaatcttgataaaagaggcctagtaatgttcttttgaggttagaaatccttgctgctaggacagtctctgtgacaggttgcgttgaatgatgtcttccttatcaatggtgagcccaccagtgaggattactgatgtggacagttgatggggtttgtttctgtatatttatttttatgtacagaactttgtaaaaacgaaactatttaaaaaacaagaataacatttttagcatctttattcaaggagatttatggacttcaatttgtctatcaaacattaaatagctttttattacaacc

SEQ ID NO: 335928 - DNA, 1291 bp, Homo sapiens
cgccacttttgcgacgcgcagccatgatgggtgggtcgtccgccgctgcaccgggcgccggagcctgggaggcctgggaacggtcgggcgttggcgcttacgcggaccttgggcagcaggcccggaccttgcgcggaggcttctcgggagccgcacttccctgggcggctcggctgtcccttgtttgcgcaagtcttttttgcgaaccaagcccttccttgggctccctgctggccacctatggctggtacatcgtcttcagctgcatccttctctacgtggtctttcagaagctttccgcccggctaagagccttgaggcagaggcagctggaccgagctgcggctgctgtggaacctgatgttgttgttaaacgacaagaagctttagcagctgctcgactgaaaatgcaagaagaactaaatgcgcaagttgaaaagcataaggaaaaactgaaacaacttgaagaagaaaaaaggagacagaagattgaaatgtgggacagcatgcaagaaggaaaaagttacaaaggaaatgcaaagaagccccaggaggaagacagtcctgggccttccacttcatctgtcctgaaacggaaatcggacagaaagcctttgcggggaggaggttataacccgttgtctggtgaaggaggcggagcttgctcctggagacctggacgcagaggcccgtcatctggcggatgaggctaagaatcttgttagtgtcacttttgacattagcaagatgaacccttaaccctcgattcaattgccttacgcacgcttttcacagtgactagccaaggggaggtggggttgatttctgttcctaactacacctgcatatgtcagggctccagtcagcaaaaggtatagatgttgcctctaggcatgaggtcattggtcacattctacttggagacagtgattgcattcattgatttcatggttaattgctagttggtaggtaaaggcctctagatgattagcaatcttgataaaagaggcctagtaatgttcttttgaggttagaaatccttgctgctaggacagtctctgtgacaggttgcgttgaatgatgtcttccttatcaatggtgagcccaccagtgaggattactgatgtggacagttgatggggtttgtttctgtatatttatttttatgtacagaactttgtaaaaacgaaactatttaaaaaacaagaataacatttttagcatctttattcaaggagatttatggacttcaatttgtctatcaaacattaaatagctttttattacaacc

SEQ ID NO: 335929 - DNA, 1302 bp, Homo sapiens
gaccacgaccgcgtccgggcgcgccacgtgtgcgtaggagcgcaccggaagcgcccggctggaggcgcggcggcagggctgggcggcggcggcggcggcggtcatggaacgccaagaggagtctctgtccgcgcggccggccctggagaccgaggggctgcgcttcctgcacaccacggtgggctccctgctggccacctatggctggtacatcgtcttcagctgcatccttctctacgtggtctttcagaagctttccgcccggctaagagccttgaggcagaggcagctggaccgagctgcggctgctgtggaacctgatgttgttgttaaacgacaagaagctttagcagctgctcgactgaaaatgcaagaagaactaaatgcgcaagttgaaaagcataaggaaaaactgaaacaacttgaagaagaaaaaaggagacagaagattgaaatgtgggacagcatgcaagaaggaaaaagttacaaaggaaatgcaaagaagccccaggaggaagacagtcctgggccttccacttcatctgtcctgaaacggaaatcggacagaaagcctttgcggggaggaggttataacccgttgtctggtgaaggaggcggagcttgctcctggagacctggacgcagaggcccgtcatctggcggatgaggctaagaatcttgttagtgtcacttttgacattagcaagatgaacccttaaccctcgattcaattgccttacgcacgcttttcacagtgactagccaaggggaggtggggttgatttctgttcctaactacacctgcatatgtcagggctccagtcagcaaaaggtatagatgttgcctctaggcatgaggtcattggtcacattctacttggagacagtgattgcattcattgatttcatggttaattgctagttggtaggtaaaggcctctagatgattagcaatcttgataaaagaggcctagtaatgttcttttgaggttagaaatccttgctgctaggacagtctctgtgacaggttgcgttgaatgatgtcttccttatcaatggtgagcccaccagtgaggattactgatgtggacagttgatggggtttgtttctgtatatttatttttatgtacagaactttgtaaaaacgaaactatttaaaaaacaagaataacatttttagcatctttatttaatgtttgatagacaaatagcagtccataaatctccttgaatagagattctaaaaatgttattcttgttttttgtcccacggccgtgtatttagtagtagtagcggccgc

SEQ ID NO: 335930 - DNA, 1207 bp, Homo sapiens
gaccacgaccgcgtccgggcgcgccacgtgtgcgtaggagcgcaccggaagcgcccggctggaggcgcggcggcagggctgggcggcggcggcggcggcggtcatggaacgccaagaggagtctctgtccgcgcggccggccctggagaccgaggggctgcgcttcctgcacaccacggtgggctccctgctggccacctatggctggtacatcgtcttcagctgcatccttctctacgtggtctttcagaagctttccgcccggctaagagccttgaggcagaggcagctggaccgagctgcggctgctgtggaacctgatgttgttgttaaacgacaagaagctttagcagctgctcgactgaaaatgcaagaagaactaaatgcgcaagttgaaaagcataaggaaaaactgaaacaacttgaagaagaaaaaaggagacagaagattgaaatgtgggacagcatgcaagaaggaaaaagttacaaaggaaatgcaaagaagccccaggaggaagacagtcctgggccttccacttcatctgtcctgaaacggaaatcggacagaaagcctttgcggggaggaggttataacccgttgtctggtgaaggaggcggagcttgctcctggagacctggactgtcacttttgacattagcaagatgaacccttaaccctcgattcaattgccttacgcacgcttttcacagtgactagccaaggggaggtggggttgatttctgttcctaactacacctgcatatgtcagggctccagtcagcaaaaggtatagatgttgcctctaggcatgaggtcattggtcacattctacttggagacagtgattgcattcattgatttcatggttaattgctagttggtaggtaaaggcctctagatgattagcaatcttgataaaagaggcctagtaatgttcttttgaggttagaaatccttgctgctaggacagtctctgtgacaggttgcgttgaatgatgtcttccttatcaatggtgagcccaccagtgaggattactgatgtggacagttgatggggtttgtttctgtatatttatttttatgtacagaactttgtaaaaacgaaactatttaaaaaacaagaataacatttttagcatctttattcaaggagatttatggacttcaatttgtctatcaaacattaaatagctttttattacaacc

SEQ ID NO: 335931 - DNA, 1521 bp, Homo sapiens
gaccacgaccgcgtccgggcgcgccacgtgtgcgtaggagcgcaccggaagcgcccggctggaggcgcggcggcagggctgggcggcggcggcggcggcggtcatggaacgccaagaggagtctctgtccgcgcggccggccctggagaccgaggggctgcgcttcctgcacaccacggtgggctccctgctggccacctatggctggtacatcgtcttcagctgcatccttctctacgtggtctttcagaagctttccgcccggctaagagccttgaggcagaggcagctggaccgagctgcggctgctgtggaacctgatgttgttgttaaacgacaagaagctttagcagctgctcgactgaaaatgcaagaagaactaaatgcgcaagttgaaaagcataaggaaaaactgaaacaacttgaagaagaaaaaaggagacagaagattgaaatgtgggacagcatgcaagaaggaaaaagttacaaaggaaatgcaaagaagccccaggaggaagacagtcctgggccttccacttcatctgtcctgaaacggaaatcggacagaaagcctttgcggggaggaggttataacccgttgtctggtgaaggaggcggagcttgctcctggagacctggacgcagaggcccgtcatctggcggatgaggctaagaatcttgttaggtagaatattccgtggttgcttcttgaccaagggaaatacagtctggctgtgagagacttaaaatctcttgaggagcgctctggagaatggctgaaggagaggaaacaggagccttgagcagtgtaattacaaacaaataggttggcatagtcttaagtctttgagtctagagagatttgagttttgttttgcctgtggaggcaattgggggtttcaggtcaaagagagggtcagtggaaacaagggtgggccttgtgaggtgtggggaagccctgggaccctcactccccttccagtgtgtaactggattggctcccaccagcccagaagatttacgacgtgggaaatggtatacttggattaaaatatttcatccagatttgtttacatctagagagaaccccttgtaggttataaggaaactttttaacattcttccttgaatatattttctgtagctgaaaatgtttgtgaagtggctgtcaactacacatcgcatgagtagaggggctctgggtcggggtttcatatgcagcagagcagctcccttgctgccgtccatcaagagccctcaacacaagagtttgttataaatagaaataaacgacaaaaagtagaggggtatgtttaagtacactattagatgtgactgactaccttgaaacctgatttttttccatggggagaaacagtgcttgaattctgcatgccccccttgcatctagcaccttttggtaggggtggaaggagggtgtcagggagaatgattaggagataatggaggggaggggaaacttgcgttgtgtaatagcatttgaagagcacttaccacgtg

SEQ ID NO: 335932 - DNA, 1050 bp, Homo sapiens
gaccacgaccgcgtccgggcgcgccacgtgtgcgtaggagcgcaccggaagcgcccggctggaggcgcggcggcagggctgggcggcggcggcggcggcggtcatggaacgccaagaggagtctctgtccgcgcggccggccctggagaccgaggggctgcgcttcctgcacaccacggtgggctccctgctggccacctatggctggtacatcgtcttcagctgcatccttctctacgtggtctttcagaagctttccgcccggctaagagccttgaggcagaggcagctggaccgagctgcggctgctgtggaacctgatgttgttgttaaacgacaagaagctttagcagctgctcgactgaaaatgcaagaagaactaaatgcgcaagttgaaaagcataaggaaaaactgaaacaacttgaagaagaaaaaaggaggttataacccgttgtctggtgaaggaggcggagcttgctcctggagacctggacgcagaggcccgtcatctggcggatgaggctaagaatcttgttagtgtcacttttgacattagcaagatgaacccttaaccctcgattcaattgccttacgcacgcttttcacagtgactagccaaggggaggtggggttgatttctgttcctaactacacctgcatatgtcagggctccagtcagcaaaagtgattgcattcattgatttcatggttaattgctagttggtaggtaaaggcctctagatgattagcaatcttgataaaagaggcctagtaatgttcttttgaggttagaaatccttgctgctaggacagtctctgtgacaggttgcgttgaatgatgtcttccttatcaatggtgagcccaccagtgaggattactgatgtggacagttgatggggtttgtttctgtatatttatttttatgtacagaactttgtaaaaacgaaactatttaaaaaacaagaataacatttttagcatctttattcaaggagatttatggacttcaatttgtctatcaaacattaaatagctttttattacaacc

SEQ ID NO: 335933 - DNA, 157 bp, Homo sapiens
ctcagttttctcccaactcatacttttgaaatgcaagcgggcagaattgggaagtcattttcaaaaactaaattagttcaactaatcccttctttaactgggtaatttcttttcacattttcctctgtgtatgcttctgcttgtttgttttaaataa

SEQ ID NO: 335934 - DNA, 4879 bp, Homo sapiens
tgctccccgcgccgccgccgccgccgcctccgccgctgctgccgcacctgccaccatgtcgccgccgccgggtcatgtctgactctctctggaccgcgctttctaatttctcgatgccctccttccccggcggcagtatgttccgccgcaccaagagctgccgcaccagtaatcggaaaagcctcatcctgaccagcacttcacccacgctaccgagaccccactccccgctgccaggtcacctaggcagcagtcccctggacagcccccgaaacttctcccccaacacccccgcccacttctcgtttgcctcctcccgaagggcggacggacgccggtggtctctggcctcgctcccttcatctggctatggcaccaacacgcccagttccaccgtctcgtcctcctgctcctcccaggagcgccttcaccagctgccctaccagcccacggtggacgagctccacttcctctccaaacacttcgggagcaccgagagcatcacagacgaggatggtggccgtcgctccccagccgtgcggccccgctcacggagcctcagccccgggcgctccccctcctcctacgacaacgagatcgtgatgatgaatcacgtctacaaggagaggttcccgaaggccactgcgcagatggaggagaagctgcgcgactttacccgcgcctacgaacccgacagcgttctgcctctggccgatggcgtgctcagcttcatccaccaccagatcatcgagctggcccgggactgcctgaccaagtcccgtgacggcctcatcaccacggtctacttctatgaattgcaggagaacctggagaagctccttcaagacgcctatgaacgctctgagagcttggaggtggccttcgttactcagctggtgaagaagttgcttattatcatctcacgccctgcgaggctgctggagtgcctggaattcaaccccgaggagttctaccacctgctggaggcggccgaaggacacgccaaggagggccaccttgtgaagacggacatcccccgctacatcatccgccagctgggcctcacccgtgacccctttccagatgtggtgcatctggaggaacaggacagtggtggttccaacacccctgagcaagacgatctctctgagggccgcagcagcaaggccaagaaaccgccgggggagaatgacttcgataccatcaagctcataagcaacggtgcctacggcgctgtctacctggtgcggcaccgcgacacgcggcagcgctttgccatgaaaaagatcaacaagcagaacttgatcctccgcaaccagatccagcaggcctttgtggagcgcgatatcctcaccttcgccgagaacccgtttgtggtcggcatgttctgctcctttgagactcggcgccacctctgcatggtcatggaatatgtggaaggcggcgactgtgccaccctgctgaagaatattggagcgctgcccgtagagatggcccgcatgtactttgctgagacggtgctagccctggagtatttgcacaactatggcatcgtgcaccgcgacctcaagcctgacaacctccttatcacctccatgggtcacatcaagctcacagatttcggcctctccaagatggggctcatgagcctcaccaccaacttatatgaaggccacatcgagaaggacgcccgagagttcctggacaaacaggtgtgtgggaccccagagtacatcgcgcccgaggtcatcctgcgtcaaggctacggcaagccagtggactggtgggctatggggatcatcctctacgagttcctggtgggctgtgtgcccttcttcggagacacaccagaggagctatttggacaggtcatcagtgatgacatcctgtggcccgagggggatgaggccctacctacggaggcccaactcctcatatccagcctcctgcagaccaaccctctggtcaggcttggggcaggcggcgcttttgaggtgaagcagcacagtttctttcgagacctggactggacagggctgctgaggcagaaggccgagttcatcccccacctagagtcggaagatgacactagctactttgacacccgctcagacaggtatcaccacgtgaactcctatgacgaggatgacacgacggaggaggagcccgtggaaatccgccagttctcttcctgctctccgcgcttcagcaaggtgtatagcagcatggagcagctgtcgcagcacgagcccaagaccccagtagcagctgcagggagcagcaagcgggagccgagcaccaagggccccgaggagaaggtggccggcaagcgggaggggctgggcggcctgaccctgcgtgagaagacctggagagggggctctccggagatcaagcgattctccgcgtccgaggccagtttcctggagggagaggccagtccccctttgggcgcccgccgccgtttctcggcgctgctggagcccagccgcttcagcgccccccaagaggacgaggatgaggcccggctgcgcaggcctccccggcccagctccgaccccgcgggatccctggatgcacgggcccccaaagaggagactcaaggggaaggcacctccagcgccggggactccgaggccactgaccgtccacgcccaggtgacctctgcccaccctcgaaggatggggatgcatcaggcccaagggctaccaatgacttggttctgcgccgggcgcggcaccagcagatgtcaggggatgtggcagtagagaagaggccttctcgaactgggggcaaagtcatcaaatcagcctcagccactgccttatctgtcatgattcctgcagtggacccacatggaagttcaccccttgctagtcccatgtctccacgatctctgtcctccaacccatcctcacgggactcctcacccagccgggactactcaccagctgtcagtgggctccgctcccccatcaccatccagcgctcgggcaagaagtatggcttcacactgcgtgccatccgtgtctacatgggtgacacggatgtctatagtgtccaccacattgtctggcatgtggaggaaggaggcccagcccaggaggcaggactctgtgctggggacctcatcacccacgtgaatggggagcctgtgcatggcatggtgcatcctgaggtcgtggagctgatccttaagagtggcaacaaggtagcagtgaccacaacgcccttcgaaaatacctctatccgcattggtcccgcaaggcgcagcagctacaaggctaaaatggctcggaggaacaagcgaccctccgccaaggagggccaggagagcaagaagcgcagctccctcttccggaagatcacgaagcagtcgaacctgctgcatactagccgctcgctgtcgtcgctgaaccgctcgctgtcatccagcgatagtctcccgggctcgcctacgcacgggctgccggcgcgctcgcccacgcacagctaccgctccacgcctgactccgcctacctaggcgcctcatcccagagcagctccccagcctcgagcacgcccaactcgcctgcgtcgtcggcgtcgcaccacattcggcccagcacgctgcacggactgtcgccaaagctccatcgccagtaccgctctgcgcgatgcaagtcggccggcaacatccctctatcgccgctggcacacacgccgtcccccacgcaggcgtcaccgccgccactgccgggccacacggtgggcagctcgcacactactcagagcttcccggccaaactgcactcatcgcctcccgtcgtgcgcccgcgccccaagagtgccgagccccctcgctcgccgctcctcaagcgcgtgcagtcggccgagaagctgggagcctctttgagtgcggacaagaagggcgcgctgcgcaaacacagcctcgaggtgggccacccggatttccgcaaggacttccatggcgagctggcgctgcatagccttgccgagtccgacggtgagacgcccccagtcgagggccttggcgcgccccggcaggtcgccgtccgccgcctgggccgacaggagtcacctttgagcctgggcgcggacccgttgctgcccgagggtgcctccaggccaccagtgtcgagcaaggagaaggaatccccggggggcgccgaggcgtgcaccccaccccgcgcgacgacccccggtggccggaccctggagcgggacgtcggctgcacgcggcatcagagcgtgcagacggaggatggcactggcgggatggccagggctgtggccaaggcggcgctgagcccggtgcaggaacacgagacaggccggcgcagcagctctggcgaggcgggcacacccctggtacccattgtcgtagagcctgcgcggcccggggctaaggctgtggtgcctcagcctctgggcgcggactccaaggggttgcaggaacccgcacccctggcgccttccgtgcccgaggccccccggggccgggagcgctgggtgttggaggtggtggaggagcgcaccacgctgagcggtcctcgctccaagcccgcctccccaaagctctccccggagccccagacaccctccctagccccagcgaagtgcagtgcacccagcagtgcagtgaccccagtcccacccgcatccctcttgggctcgggcaccaagcctcaagtggggctgacctcccggtgccctgctgaagctgtgcccccagcaggcctgaccaaaaaaggagtgtccagtcccgcacccccgggaccatagccaagggggtcatcggccccgcgctgtacagcctccgtatacatatgtacacatataaataaagtgcgtccgtgctgcgtgaaatttctggg

SEQ ID NO: 335935 - DNA, 406 bp, Homo sapiens
tgagctgttggggggcccatggtggctctgaccccggccctgcccctgtccccagtcctcctgctcctcccaggagcgccttcaccagctgccctaccagcccacggtggacgagctccacttcctctccaaacacttcgggagcaccgagagcatcacagacgaggatggtggccgtcgctccccagccgtgcggccccgctcacggagcctcagccccgggcgctccccctcctcctacgacaacgagatcgtgatgatgaatcacgtctacaaggagaggttcccgaaggtgaggtgggacccgaggcggtcacggggtgaccaggcggcctgcactctcgctcgccttatccccgcgcgccccctggcggcctcggtgcgcagcgcaggctcctggcggccg

SEQ ID NO: 335936 - DNA, 4844 bp, Homo sapiens
gccgctacctccctcctccctccccgggccgaagtcgccgccgctgccgccatggacgattcgggcctcatccgccgccggaggctgcagaaggatttgcccctgccccggaaaagcagcagctgccgcaccagtaatcggaaaagcctcatcctgaccagcacttcacccacgctaccgagaccccactccccgctgccaggtcacctaggcagcagtcccctggacagcccccgaaacttctcccccaacacccccgcccacttctcgtttgcctcctcccgaagggcggacggacgccggtggtctctggcctcgctcccttcatctggctatggcaccaacacgcccagttccaccgtctcgtcctcctgctcctcccaggagcgccttcaccagctgccctaccagcccacggtggacgagctccacttcctctccaaacacttcgggagcaccgagagcatcacagacgaggatggtggccgtcgctccccagccgtgcggccccgctcacggagcctcagccccgggcgctccccctcctcctacgacaacgagatcgtgatgatgaatcacgtctacaaggagaggttcccgaaggccactgcgcagatggaggagaagctgcgcgactttacccgcgcctacgaacccgacagcgttctgcctctggccgatggcgtgctcagcttcatccaccaccagatcatcgagctggcccgggactgcctgaccaagtcccgtgacggcctcatcaccacggtctacttctatgaattgcaggagaacctggagaagctccttcaagacgcctatgaacgctctgagagcttggaggtggccttcgttactcagctggtgaagaagttgcttattatcatctcacgccctgcgaggctgctggagtgcctggaattcaaccccgaggagttctaccacctgctggaggcggccgaaggacacgccaaggagggccaccttgtgaagacggacatcccccgctacatcatccgccagctgggcctcacccgtgacccctttccagatgtggtgcatctggaggaacaggacagtggtggttccaacacccctgagcaagacgatctctctgagggccgcagcagcaaggccaagaaaccgccgggggagaatgacttcgataccatcaagctcataagcaacggtgcctacggcgctgtctacctggtgcggcaccgcgacacgcggcagcgctttgccatgaaaaagatcaacaagcagaacttgatcctccgcaaccagatccagcaggcctttgtggagcgcgatatcctcaccttcgccgagaacccgtttgtggtcggcatgttctgctcctttgagactcggcgccacctctgcatggtcatggaatatgtggaaggcggcgactgtgccaccctgctgaagaatattggagcgctgcccgtagagatggcccgcatgtactttgctgagacggtgctagccctggagtatttgcacaactatggcatcgtgcaccgcgacctcaagcctgacaacctccttatcacctccatgggtcacatcaagctcacagatttcggcctctccaagatggggctcatgagcctcaccaccaacttatatgaaggccacatcgagaaggacgcccgagagttcctggacaaacaggtgtgtgggaccccagagtacatcgcgcccgaggtcatcctgcgtcaaggctacggcaagccagtggactggtgggctatggggatcatcctctacgagttcctggtgggctgtgtgcccttcttcggagacacaccagaggagctatttggacaggtcatcagtgatgacatcctgtggcccgagggggatgaggccctacctacggaggcccaactcctcatatccagcctcctgcagaccaaccctctggtcaggcttggggcaggcggcgcttttgaggtgaagcagcacagtttctttcgagacctggactggacagggctgctgaggcagaaggccgagttcatcccccacctagagtcggaagatgacactagctactttgacacccgctcagacaggtatcaccacgtgaactcctatgacgaggatgacacgacggaggaggagcccgtggaaatccgccagttctcttcctgctctccgcgcttcagcaaggtgtatagcagcatggagcagctgtcgcagcacgagcccaagaccccagtagcagctgcagggagcagcaagcgggagccgagcaccaagggccccgaggagaaggtggccggcaagcgggaggggctgggcggcctgaccctgcgtgagaagacctggagagggggctctccggagatcaagcgattctccgcgtccgaggccagtttcctggagggagaggccagtccccctttgggcgcccgccgccgtttctcggcgctgctggagcccagccgcttcagcgccccccaagaggacgaggatgaggcccggctgcgcaggcctccccggcccagctccgaccccgcgggatccctggatgcacgggcccccaaagaggagactcaaggggaaggcacctccagcgccggggactccgaggccactgaccgtccacgcccaggtgacctctgcccaccctcgaaggatggggatgcatcaggcccaagggctaccaatgacttggttctgcgccgggcgcggcaccagcagatgtcaggggatgtggcagtagagaagaggccttctcgaactgggggcaaagtcatcaaatcagcctcagccactgccttatctgtcatgattcctgcagtggacccacatggaagttcaccccttgctagtcccatgtctccacgatctctgtcctccaacccatcctcacgggactcctcacccagccgggactactcaccagctgtcagtgggctccgctcccccatcaccatccagcgctcgggcaagaagtatggcttcacactgcgtgccatccgtgtctacatgggtgacacggatgtctatagtgtccaccacattgtctggcatgtggaggaaggaggcccagcccaggaggcaggactctgtgctggggacctcatcacccacgtgaatggggagcctgtgcatggcatggtgcatcctgaggtcgtggagctgatccttaagagtggcaacaaggtagcagtgaccacaacgcccttcgaaaatacctctatccgcattggtcccgcaaggcgcagcagctacaaggctaaaatggctcggaggaacaagcgaccctccgccaaggagggccaggagagcaagaagcgcagctccctcttccggaagatcacgaagcagtcgaacctgctgcatactagccgctcgctgtcgtcgctgaaccgctcgctgtcatccagcgatagtctcccgggctcgcctacgcacgggctgccggcgcgctcgcccacgcacagctaccgctccacgcctgactccgcctacctaggcgcctcatcccagagcagctccccagcctcgagcacgcccaactcgcctgcgtcgtcggcgtcgcaccacattcggcccagcacgctgcacggactgtcgccaaagctccatcgccagtaccgctctgcgcgatgcaagtcggccggcaacatccctctatcgccgctggcacacacgccgtcccccacgcaggcgtcaccgccgccactgccgggccacacggtgggcagctcgcacactactcagagcttcccggccaaactgcactcatcgcctcccgtcgtgcgcccgcgccccaagagtgccgagccccctcgctcgccgctcctcaagcgcgtgcagtcggccgagaagctgggagcctctttgagtgcggacaagaagggcgcgctgcgcaaacacagcctcgaggtgggccacccggatttccgcaaggacttccatggcgagctggcgctgcatagccttgccgagtccgacggtgagacgcccccagtcgagggccttggcgcgccccggcaggtcgccgtccgccgcctgggccgacaggagtcacctttgagcctgggcgcggacccgttgctgcccgagggtgcctccaggccaccagtgtcgagcaaggagaaggaatccccggggggcgccgaggcgtgcaccccaccccgcgcgacgacccccggtggccggaccctggagcgggacgtcggctgcacgcggcatcagagcgtgcagacggaggatggcactggcgggatggccagggctgtggccaaggcggcgctgagcccggtgcaggaacacgagacaggccggcgcagcagctctggcgaggcgggcacacccctggtacccattgtcgtagagcctgcgcggcccggggctaaggctgtggtgcctcagcctctgggcgcggactccaaggggttgcaggaacccgcacccctggcgccttccgtgcccgaggccccccggggccgggagcgctgggtgttggaggtggtggaggagcgcaccacgctgagcggtcctcgctccaagcccgcctccccaaagctctccccggagccccagacaccctccctagccccagcgaagtgcagtgcacccagcagtgcagtgaccccagtcccacccgcatccctcttgggctcgggcaccaagcctcaagtggggctgacctcccggtgccctgctgaagctgtgcccccagcaggcctgaccaaaaaaggagtgtccagtcccgcacccccgggaccatagccaagggggtcatcggccccgcgctgtacagcctccgtatacatatgtacacatataaataaagtgcgtccgtgctgcgtgaaatttctggg

SEQ ID NO: 335937 - DNA, 5016 bp, Homo sapiens
tgctccccgcgccgccgccgccgccgcctccgccgctgctgccgcacctgccaccatgtcgccgccgccgggtcatgtctgactctctctggaccgcgctttctaatttctcgatgccctccttccccggcggcagtatgttccgccgcaccaagagctgccgcaccagtaatcggaaaagcctcatcctgaccagcacttcacccacgctaccgagaccccactccccgctgccaggtcacctaggcagcagtcccctggacagcccccgaaacttctcccccaacacccccgcccacttctcgtttgcctcctcccgaagggcggacggacgccggtggtctctggcctcgctcccttcatctggctatggcaccaacacgcccagttccaccgtctcgtcctcctgctcctcccaggagcgccttcaccagctgccctaccagcccacggtggacgagctccacttcctctccaaacacttcgggagcaccgagagcatcacagacgaggatggtggccgtcgctccccagccgtgcggccccgctcacggagcctcagccccgggcgctccccctcctcctacgacaacgagatcgtgatgatgaatcacgtctacaaggagaggttcccgaaggccactgcgcagatggaggagaagctgcgcgactttacccgcgcctacgaacccgacagcgttctgcctctggccgatggcgtgctcagcttcatccaccaccagatcatcgagctggcccgggactgcctgaccaagtcccgtgacggcctcatcaccacggtctacttctatgaattgcaggagaacctggagaagctccttcaagacgcctatgaacgctctgagagcttggaggtggccttcgttactcagctggtgaagaagttgcttattatcatctcacgccctgcgaggctgctggagtgcctggaattcaaccccgaggagttctaccacctgctggaggcggccgaaggacacgccaaggagggccaccttgtgaagacggacatcccccgctacatcatccgccagctgggcctcacccgtgacccctttccagatgtggtgcatctggaggaacaggacagtggtggttccaacacccctgagcaagacgatctctctgagggccgcagcagcaaggccaagaaaccgccgggggagaatgacttcgataccatcaagctcataagcaacggtgcctacggcgctgtctacctggtgcggcaccgcgacacgcggcagcgctttgccatgaaaaagatcaacaagcagaacttgatcctccgcaaccagatccagcaggcctttgtggagcgcgatatcctcaccttcgccgagaacccgtttgtggtcggcatgttctgctcctttgagactcggcgccacctctgcatggtcatggaatatgtggaaggcggcgactgtgccaccctgctgaagaatattggagcgctgcccgtagagatggcccgcatgtactttgctgagacggtgctagccctggagtatttgcacaactatggcatcgtgcaccgcgacctcaagcctgacaacctccttatcacctccatgggtcacatcaagctcacagatttcggcctctccaagatggggctcatgagcctcaccaccaacttatatgaaggccacatcgagaaggacgcccgagagttcctggacaaacaggtgtgtgtgcgggcatgggggtcgctgagggtggagtgaccctgcaggacctcgggaacccagggcctggtggggggcacagctctcccttgagggccctcctctggctggggcgtgggctgacagcctgcccccaggtgtgtgggaccccagagtacatcgcgcccgaggtcatcctgcgtcaaggctacggcaagccagtggactggtgggctatggggatcatcctctacgagttcctggtgggctgtgtgcccttcttcggagacacaccagaggagctatttggacaggtcatcagtgatgacatcctgtggcccgagggggatgaggccctacctacggaggcccaactcctcatatccagcctcctgcagaccaaccctctggtcaggcttggggcaggcggcgcttttgaggtgaagcagcacagtttctttcgagacctggactggacagggctgctgaggcagaaggccgagttcatcccccacctagagtcggaagatgacactagctactttgacacccgctcagacaggtatcaccacgtgaactcctatgacgaggatgacacgacggaggaggagcccgtggaaatccgccagttctcttcctgctctccgcgcttcagcaaggtgtatagcagcatggagcagctgtcgcagcacgagcccaagaccccagtagcagctgcagggagcagcaagcgggagccgagcaccaagggccccgaggagaaggtggccggcaagcgggaggggctgggcggcctgaccctgcgtgagaagacctggagagggggctctccggagatcaagcgattctccgcgtccgaggccagtttcctggagggagaggccagtccccctttgggcgcccgccgccgtttctcggcgctgctggagcccagccgcttcagcgccccccaagaggacgaggatgaggcccggctgcgcaggcctccccggcccagctccgaccccgcgggatccctggatgcacgggcccccaaagaggagactcaaggggaaggcacctccagcgccggggactccgaggccactgaccgtccacgcccaggtgacctctgcccaccctcgaaggatggggatgcatcaggcccaagggctaccaatgacttggttctgcgccgggcgcggcaccagcagatgtcaggggatgtggcagtagagaagaggccttctcgaactgggggcaaagtcatcaaatcagcctcagccactgccttatctgtcatgattcctgcagtggacccacatggaagttcaccccttgctagtcccatgtctccacgatctctgtcctccaacccatcctcacgggactcctcacccagccgggactactcaccagctgtcagtgggctccgctcccccatcaccatccagcgctcgggcaagaagtatggcttcacactgcgtgccatccgtgtctacatgggtgacacggatgtctatagtgtccaccacattgtctggcatgtggaggaaggaggcccagcccaggaggcaggactctgtgctggggacctcatcacccacgtgaatggggagcctgtgcatggcatggtgcatcctgaggtcgtggagctgatccttaagagtggcaacaaggtagcagtgaccacaacgcccttcgaaaatacctctatccgcattggtcccgcaaggcgcagcagctacaaggctaaaatggctcggaggaacaagcgaccctccgccaaggagggccaggagagcaagaagcgcagctccctcttccggaagatcacgaagcagtcgaacctgctgcatactagccgctcgctgtcgtcgctgaaccgctcgctgtcatccagcgatagtctcccgggctcgcctacgcacgggctgccggcgcgctcgcccacgcacagctaccgctccacgcctgactccgcctacctaggcgcctcatcccagagcagctccccagcctcgagcacgcccaactcgcctgcgtcgtcggcgtcgcaccacattcggcccagcacgctgcacggactgtcgccaaagctccatcgccagtaccgctctgcgcgatgcaagtcggccggcaacatccctctatcgccgctggcacacacgccgtcccccacgcaggcgtcaccgccgccactgccgggccacacggtgggcagctcgcacactactcagagcttcccggccaaactgcactcatcgcctcccgtcgtgcgcccgcgccccaagagtgccgagccccctcgctcgccgctcctcaagcgcgtgcagtcggccgagaagctgggagcctctttgagtgcggacaagaagggcgcgctgcgcaaacacagcctcgaggtgggccacccggatttccgcaaggacttccatggcgagctggcgctgcatagccttgccgagtccgacggtgagacgcccccagtcgagggccttggcgcgccccggcaggtcgccgtccgccgcctgggccgacaggagtcacctttgagcctgggcgcggacccgttgctgcccgagggtgcctccaggccaccagtgtcgagcaaggagaaggaatccccggggggcgccgaggcgtgcaccccaccccgcgcgacgacccccggtggccggaccctggagcgggacgtcggctgcacgcggcatcagagcgtgcagacggaggatggcactggcgggatggccagggctgtggccaaggcggcgctgagcccggtgcaggaacacgagacaggccggcgcagcagctctggcgaggcgggcacacccctggtacccattgtcgtagagcctgcgcggcccggggctaaggctgtggtgcctcagcctctgggcgcggactccaaggggttgcaggaacccgcacccctggcgccttccgtgcccgaggccccccggggccgggagcgctgggtgttggaggtggtggaggagcgcaccacgctgagcggtcctcgctccaagcccgcctccccaaagctctccccggagccccagacaccctccctagccccagcgaagtgcagtgcacccagcagtgcagtgaccccagtcccacccgcatccctcttgggctcgggcaccaagcctcaagtggggctgacctcccggtgccctgctgaagctgtgcccccagcaggcctgaccaaaaaaggagtgtccagtcccgcacccccgggaccatagccaagggggtcatcggccccgcgctgtacagcctccgtatacatatgtacacatataaataaagtgcgtccgtgctgcgtgaaatttctggg

SEQ ID NO: 335938 - DNA, 1187 bp, Homo sapiens
tgctccccgcgccgccgccgccgccgcctccgccgctgctgccgcacctgccaccatgtcgccgccgccgggtcatgtctgactctctctggaccgcgctttctaatttctcgatgccctccttccccggcggcagtatgttccgccgcaccaagagctgccgcaccagtaatcggaaaagcctcatcctgaccagcacttcacccacgctaccgagaccccactccccgctgccaggtcacctaggcagcagtcccctggacagcccccgaaacttctcccccaacacccccgcccacttctcgtttgcctcctcccgaagggcggacggacgccggtggtctctggcctcgctcccttcatctggctatggcaccaacacgcccagttccaccgtctcgtcctcctgctcctcccaggagcgccttcaccagctgccctaccagcccacggtggacgagctccacttcctctccaaacacttcgggagcaccgagagcatcacagacgaggatggtggccgtcgctccccagccgtgcggccccgctcacggagcctcagccccgggcgctccccctcctcctacgacaacgagatcgtgatgatgaatcacgtctacaaggagaggttcccgaaggccactgcgcagatggaggagaagctgcgcgactttacccgcgcctacgaacccgacagcgttctgcctctggccgatggcgtgctcagcttcatccaccaccagatcatcgagctggcccgggactgcctgaccaagtcccgtgacggcctcatcaccacggtctacttctatgaattgcaggagaacctggagaagctccttcaagacgcctatgaacgctctgagagcttggaggtggccttcgttactcagctggtgaagaagttgcttattatcatctcacgccctgcgaggctgctggagtgcctggaattcaaccccgaggagttctaccacctgctggaggcggccgaaggacacgccaaggagggccaccttgtgaagacggacatcccccgctacatcatccgccagctgggcctcacccgtgacccctttccagatgtggtgcatctggaggaacaggacagtggtggttccaacacccctgagcaagacgatctctctgaggtaatggaatgacatcactcaaaatctaaaactcta

SEQ ID NO: 335939 - DNA, 419 bp, Homo sapiens
gctgggattacaggcacctgccaccacgcctggctcattttgcgtttttagtggagatggggtttcaccatgttggccaggctggtttcaaacttttgacctcaagtgatccacccacctcagcctcccaaagtgctgggattacaggcatgagccaccgtgcccagcctcattatttttactgtgtggcttgggcttcagtctcctcacctgtaagatgggacagtagcagcagtatgtactctgaggggctgagagaggggccgggctgaggcagagtgcctatgagccctgtccctctgtgtcccctgccacaggcctatgaacgctctgagagcttggaggtggccttcgttactcagctggtgaagaagttgcttattatcatctcacgccctgcgaggctgctggagtgcctg

SEQ ID NO: 335940 - DNA, 547 bp, Homo sapiens
gtgggctatggggatcatcctctacgagttcctggtgggctgtgtgcccttcttcggagacacaccagaggagctatttggacaggtcatcagtggtacgtggcttggcagtgtacaggggcagagtgtggtgtgcacggagagatggacaggctcagggttccagggatttcaaaagcgaccccccagaggatcgcttgcactcaggaggtcaaggctgcagtgagccatgatcgtgccactgcactccagctgggtgacacagtgagatcctgtgtccaaacaacaacaacaacaaaaaccgcccctaagttccgttttgttttgcagatgacatcctgtggcccgagggggatgaggccctacctacggaggcccaactcctcatatccagcctcctgcagaccaaccctctggtcaggcttggggcaggtaagtccgccatgcagaggagctgagggcccactgatagagagcaggcctccaaaaccccaggcccagcctgtgctgtggccccggggcggaagacatggggggcggggctggg

SEQ ID NO: 335941 - DNA, 470 bp, Homo sapiens
cactccagctgggtgacacagtgagatcctgtgtccaaacaacaacaacaacaaaaaccgcccctaagttccgttttgttttgcagatgacatcctgtggcccgagggggatgaggccctacctacggaggcccaactcctcatatccagcctcctgcagaccaaccctctggtcaggcttggggcaggtaagtccgccatgcagaggagctgagggcccactgatagagagcaggcctccaaaaccccaggcccagcctgtgctgtggccccggggcggaagacatggggggcggggctgggctgctgggttggccatcagctgtggctggaatcccttccgtcccaggcggcgcttttgaggtgaagcagcacagtttctttcgagacctggactggacagggctgctgaggcagaaggccgagttcatcccccacctagagtcggaagatgacactagctactttga

SEQ ID NO: 335942 - DNA, 951 bp, Homo sapiens
tggccttggactaattcctaacacacttgctttctgttgcagctgaccgtccacgcccaggtgacctctgcccaccctcgaaggatggggatgcatcaggcccaagggctaccaatgacttggttctgcgccgggcgcggcaccagcagatgtcaggggatgtggcagtagagaagaggccttctcgaactgggggcaaagtcatcaaatcagcctcagccactgccttatctgtcatgattcctgcagtggacccacatggaagttcaccccttgctagtcccatgtctccacgatctctgtcctccaacccatcctcacgggactcctcacccagccgggactactcaccagctgtcagtgggctccgctcccccatcaccatccagcgctcgggcaagaagtatggcttcacactgcgtgccatccgtgtctacatgggtgacacggatgtctatagtgtccaccacattgtctggcatgtggaggaaggaggcccagcccaggaggcaggactctgtgctggggacctcatcacccacgtgaatggggagcctgtgcatggcatggtgcatcctgaggtcgtggagctgatccttaagagtggcaacaaggtagcagtgaccacaacgcccttcgaaaatacctctatccgcattggtcccgcaaggcgcagcagctacaaggctaaaatggctcggaggaacaagcgaccctccgccaaggagggccaggagagcaagaagcgcagctccctcttccggaagatcacgaagcagtcgaacctgctgcatactagccgctcgctgtcgtcgctgaaccgctcgctgtcatccagcgatagtctcccgggctcgcctacgcacgggctgccggcgcgctcgcccacgcacagctaccgctccacgcctgactccgcctacctaggtattacctcctgcacctgcgcgg

SEQ ID NO: 335943 - DNA, 4272 bp, Homo sapiens
gccccgcgcccctcctccgtccctcccgcaggccactgcgcagatggaggagaagctgcgcgactttacccgcgcctacgaacccgacagcgttctgcctctggccgatggcgtgctcagcttcatccaccaccagatcatcgagctggcccgggactgcctgaccaagtcccgtgacggcctcatcaccacggtctacttctatgaattgcaggagaacctggagaagctccttcaagacgcctatgaacgctctgagagcttggaggtggccttcgttactcagctggtgaagaagttgcttattatcatctcacgccctgcgaggctgctggagtgcctggaattcaaccccgaggagttctaccacctgctggaggcggccgaaggacacgccaaggagggccaccttgtgaagacggacatcccccgctacatcatccgccagctgggcctcacccgtgacccctttccagatgtggtgcatctggaggaacaggacagtggtggttccaacacccctgagcaagacgatctctctgagggccgcagcagcaaggccaagaaaccgccgggggagaatgacttcgataccatcaagctcataagcaacggtgcctacggcgctgtctacctggtgcggcaccgcgacacgcggcagcgctttgccatgaaaaagatcaacaagcagaacttgatcctccgcaaccagatccagcaggcctttgtggagcgcgatatcctcaccttcgccgagaacccgtttgtggtcggcatgttctgctcctttgagactcggcgccacctctgcatggtcatggaatatgtggaaggcggcgactgtgccaccctgctgaagaatattggagcgctgcccgtagagatggcccgcatgtactttgctgagacggtgctagccctggagtatttgcacaactatggcatcgtgcaccgcgacctcaagcctgacaacctccttatcacctccatgggtcacatcaagctcacagatttcggcctctccaagatggggctcatgagcctcaccaccaacttatatgaaggccacatcgagaaggacgcccgagagttcctggacaaacaggtgtgtgggaccccagagtacatcgcgcccgaggtcatcctgcgtcaaggctacggcaagccagtggactggtgggctatggggatcatcctctacgagttcctggtgggctgtgtgcccttcttcggagacacaccagaggagctatttggacaggtcatcagtgatgacatcctgtggcccgagggggatgaggccctacctacggaggcccaactcctcatatccagcctcctgcagaccaaccctctggtcaggcttggggcaggcggcgcttttgaggtgaagcagcacagtttctttcgagacctggactggacagggctgctgaggcagaaggccgagttcatcccccacctagagtcggaagatgacactagctactttgacacccgctcagacaggtatcaccacgtgaactcctatgacgaggatgacacgacggaggaggagcccgtggaaatccgccagttctcttcctgctctccgcgcttcagcaaggtgtatagcagcatggagcagctgtcgcagcacgagcccaagaccccagtagcagctgcagggagcagcaagcgggagccgagcaccaagggccccgaggagaaggtggccggcaagcgggaggggctgggcggcctgaccctgcgtgagaagacctggagagggggctctccggagatcaagcgattctccgcgtccgaggccagtttcctggagggagaggccagtccccctttgggcgcccgccgccgtttctcggcgctgctggagcccagccgcttcagcgccccccaagaggacgaggatgaggcccggctgcgcaggcctccccggcccagctccgaccccgcgggatccctggatgcacgggcccccaaagaggagactcaaggggaaggcacctccagcgccggggactccgaggccactgaccgtccacgcccaggtgacctctgcccaccctcgaaggatggggatgcatcaggcccaagggctaccaatgacttggttctgcgccgggcgcggcaccagcagatgtcaggggatgtggcagtagagaagaggccttctcgaactgggggcaaagtcatcaaatcagcctcagccactgccttatctgtcatgattcctgcagtggacccacatggaagttcaccccttgctagtcccatgtctccacgatctctgtcctccaacccatcctcacgggactcctcacccagccgggactactcaccagctgtcagtgggctccgctcccccatcaccatccagcgctcgggcaagaagtatggcttcacactgcgtgccatccgtgtctacatgggtgacacggatgtctatagtgtccaccacattgtctggcatgtggaggaaggaggcccagcccaggaggcaggactctgtgctggggacctcatcacccacgtgaatggggagcctgtgcatggcatggtgcatcctgaggtcgtggagctgatccttaagagtggcaacaaggtagcagtgaccacaacgcccttcgaaaatacctctatccgcattggtcccgcaaggcgcagcagctacaaggctaaaatggctcggaggaacaagcgaccctccgccaaggagggccaggagagcaagaagcgcagctccctcttccggaagatcacgaagcagtcgaacctgctgcatactagccgctcgctgtcgtcgctgaaccgctcgctgtcatccagcgatagtctcccgggctcgcctacgcacgggctgccggcgcgctcgcccacgcacagctaccgctccacgcctgactccgcctacctaggcgcctcatcccagagcagctccccagcctcgagcacgcccaactcgcctgcgtcgtcggcgtcgcaccacattcggcccagcacgctgcacggactgtcgccaaagctccatcgccagtaccgctctgcgcgatgcaagtcggccggcaacatccctctatcgccgctggcacacacgccgtcccccacgcaggcgtcaccgccgccactgccgggccacacggtgggcagctcgcacactactcagagcttcccggccaaactgcactcatcgcctcccgtcgtgcgcccgcgccccaagagtgccgagccccctcgctcgccgctcctcaagcgcgtgcagtcggccgagaagctgggagcctctttgagtgcggacaagaagggcgcgctgcgcaaacacagcctcgaggtgggccacccggatttccgcaaggacttccatggcgagctggcgctgcatagccttgccgagtccgacggtgagacgcccccagtcgagggccttggcgcgccccggcaggtcgccgtccgccgcctgggccgacaggagtcacctttgagcctgggcgcggacccgttgctgcccgagggtgcctccaggccaccagtgtcgagcaaggagaaggaatccccggggggcgccgaggcgtgcaccccaccccgcgcgacgacccccggtggccggaccctggagcgggacgtcggctgcacgcggcatcagagcgtgcagacggaggatggcactggcgggatggccagggctgtggccaaggcggcgctgagcccggtgcaggaacacgagacaggccggcgcagcagctctggcgaggcgggcacacccctggtacccattgtcgtagagcctgcgcggcccggggctaaggctgtggtgcctcagcctctgggcgcggactccaaggggttgcaggaacccgcacccctggcgccttccgtgcccgaggccccccggggccgggagcgctgggtgttggaggtggtggaggagcgcaccacgctgagcggtcctcgctccaagcccgcctccccaaagctctccccggagccccagacaccctccctagccccagcgaagtgcagtgcacccagcagtgcagtgaccccagtcccacccgcatccctcttgggctcgggcaccaagcctcaagtggggctgacctcccggtgccctgctgaagctgtgcccccagcaggcctgaccaaaaaaggagtgtccagtcccgcacccccgggaccatagccaagggggtcatcggccccgcgctgtacagcctccgtatacatatgtacacatataaataaagtgcgtccgtgctgcgtgaaatttctggg

SEQ ID NO: 335944 - DNA, 1988 bp, Homo sapiens
tgctccccgcgccgccgccgccgccgcctccgccgctgctgccgcacctgccaccatgtcgccgccgccgggtcatgtctgactctctctggaccgcgctttctaatttctcgatgccctccttccccggcggcagtatgttccgccgcaccaagagctgccgcaccagtaatcggaaaagcctcatcctgaccagcacttcacccacgctaccgagaccccactccccgctgccaggtcacctaggcagcagtcccctggacagcccccgaaacttctcccccaacacccccgcccacttctcgtttgcctcctcccgaagggcggacggacgccggtggtctctggcctcgctcccttcatctggctatggcaccaacacgcccagttccaccgtctcgtcctcctgctcctcccaggagcgccttcaccagctgccctaccagcccacggtggacgagctccacttcctctccaaacacttcgggagcaccgagagcatcacagacgaggatggtggccgtcgctccccagccgtgcggccccgctcacggagcctcagccccgggcgctccccctcctcctacgacaacgagatcgtgatgatgaatcacgtctacaaggagaggttcccgaaggccactgcgcagatggaggagaagctgcgcgactttacccgcgcctacgaacccgacagcgttctgcctctggccgatggcgtgctcagcttcatccaccaccagatcatcgagctggcccgggactgcctgaccaagtcccgtgacggcctcatcaccacggtctacttctatgaattgcaggagaacctggagaagctccttcaagacgcctatgaacgctctgagagcttggaggtggccttcgttactcagctggtgaagaagttgcttattatcatctcacgccctgcgaggctgctggagtgcctggaattcaaccccgaggagttctaccacctgctggaggcggccgaaggacacgccaaggagggccaccttgtgaagacggacatcccccgctacatcatccgccagctgggcctcacccgtgacccctttccagatgtggtgcatctggaggaacaggacagtggtggttccaacacccctgagcaagacgatctctctgagggccgcagcagcaaggccaagaaaccgccgggggagaatgacttcgataccatcaagctcataagcaacggtgcctacggcgctgtctacctggtgcggcaccgcgacacgcggcagcgctttgccatgaaaaagatcaacaagcagaacttgatcctccgcaaccagatccagcaggcctttgtggagcgcgatatcctcaccttcgccgagaacccgtttgtggtcggcatgttctgctcctttgagactcggcgccacctctgcatggtcatggaatatgtggaaggtgtggctgcctgcggggctgcagggaagatggggccgtgctcactggtcagggctgcggggtggcctgcctgagccgcagtctccatattgattagtcggcctggtatgtttatccatctatttatttctccagtcattgatttgtccatccattctacctatatatttattcagtcatctattggtttatttgtttttcatttcattcagcataaaaacattcagtctgacccattatccatccatctatccttctatctactgatgtgctaatccatctgtttttccatccatacatccatgaacctgtttttatttatttatttatttattcatttattcatttatttattttttgagacagagtcttgctctgtcacccaggctgcagtgcagtggtgcaatctcggttcactgcaacctccgactcccaggctcaagcgattcttatgcctcagcctcccgagtagctgggattatgggcctgtgccaccattcatgggtaatttttctatttttagcagagacaggatttcgccatgtttg

SEQ ID NO: 335945 - DNA, 368 bp, Homo sapiens
actagagagaggtactagcgctcagaatggcctggggtgatgccagggtgcagagcactgtaggtggagcgtggcctctttggaggcggggctagacggtgccactgagaatggggcaaggaccttgcctgggagcggagcctaaattaaatacactaatgaggcaggggcgtggcctgacctgaagacttgtaaacccgtcttgaaccaggactgggctcctgtggggatgtgatatgaggaggaaccccgtaccctcagtcacagcccatacccgctccccagcccgctcagacaggtatcaccacgtgaactcctatgacgaggatgacacgacggaggaggagcccgtggaaatccgccagttc

SEQ ID NO: 335946 - DNA, 461 bp, Homo sapiens
attgtctttatccataaaggagattctgaatttttagagttcctgaatattttcccccaagtttctgtcaaattcctgaagtcccttccctatcacactcagtttcctgaagctcttcccctacacctgctcctctgtctggctaacagagttgtcatgtctcagaaactactcaccactcttgtgagactctcttcccaagcatcatccttcctcaggatgaggcctttttctactacccaagagatcaagaccctttttctaacaagacaaggttatatctactccattttcaagagaaataacccctctggttcccatgcaaatcgcttaaattccttcatcaccagaatctctccaacaggcccaactccagcccagctgtgaacactgctgtcatggagacaactccaaaatgaaagaactatgcaattgcctgaaggtgctaatggagagccagt

SEQ ID NO: 335947 - DNA, 158 bp, Homo sapiens
ccagattccagaaaaggtcctgcttcacacccagaaggaaggaatacaagttcagagaggcccacaacaatctagacagataggcctggctggggttccccacttagtctattagcattacagcatacctgtttggtccaatcatatttctacccaac

SEQ ID NO: 335948 - DNA, 670 bp, Homo sapiens
aataagcaacctaaggtactgagggtttaaacgtctttagcaagtttatcaaagtcagtgacctggcagacccaggaattgtaattttgagccatagcccacaccacatattgagaaaactagaagagaatgaacttggccagaggagaatgaaatggcttgatatagatgaagatgcagctgccataagtgatggaaaccacagtaatatgtgaagaacagttgttcatgtattctagaggaaaagaaaggaatatcattatatactgcttatgggattctgtgctgcggagatcattacggaagcaacagtagcaggtggcctggccatacagggattccttactcgcagcagagaatgttgctgccactcaaagtcaccaggggctgaagagctcctgtggagacccacatcatctaacaacacacatactcaaaacagggaaatgtgcattttcgggagaggaagagacaaaccttttgtttagctaactggcatgacagagtgtgacatacatgtgctcctggaagaacggtgttgggtgtctgcactcaaaatcttgagcataggcaactggatgaagggctctgtggcattgattttcattgtgtgtgtgttaatatttacatttataattaaataaataatcgaaattatgctgaactgaaa

SEQ ID NO: 335949 - DNA, 531 bp, Homo sapiens
ctgagatatggggagcgcctctgccccgccgcccatctgggatgcgaggagcgcctctgcccggccgcgaccccgtctgggagttgttcatgtattctagaggaaaagaaaggaatatcattatatactgcttatgggattctgtgctgcggagatcattacggaagcaacagtagcaggtggcctggccatacagggattccttactcgcagcagagaatgttgctgccactcaaagtcaccaggggctgaagagctcctgtggagacccacatcatctaacaacacacatactcaaaacagggaaatgtgcattttcgggagaggaagagacaaaccttttgtttagctaactggcatgacagagtgtgacatacatgtgctcctggaagaacggtgttgggtgtctgcactcaaaatcttgagcataggcaactggatgaagggctctgtggcattgattttcattgtgtgtgtgttaatatttacatttataattaaataaataatcgaaattatgctgaactgaaa

SEQ ID NO: 335950 - DNA, 615 bp, Homo sapiens
aataagcaacctaaggtactgagggtttaaacgtctttagcaagtttatcaaagtcagtgacctggcagacccaggaattgtaattttgagccatagcccacaccacatattgagaaaactagaagagaatgaacttggccagaggagaatgaaatggcttgatatagatgaagatgcagctgccataagtgatggaaaccacagtaatatgtgaagaacggattctgtgctgcggagatcattacggaagcaacagtagcaggtggcctggccatacagggattccttactcgcagcagagaatgttgctgccactcaaagtcaccaggggctgaagagctcctgtggagacccacatcatctaacaacacacatactcaaaacagggaaatgtgcattttcgggagaggaagagacaaaccttttgtttagctaactggcatgacagagtgtgacatacatgtgctcctggaagaacggtgttgggtgtctgcactcaaaatcttgagcataggcaactggatgaagggctctgtggcattgattttcattgtgtgtgtgttaatatttacatttataattaaataaataatcgaaattatgctgaactgaaa

SEQ ID NO: 335951 - DNA, 447 bp, Homo sapiens
aaaaaaaatataaattactaagtccaacaaaaaataaaacaaaacacttgagggattctgtgctgcggagatcattacggaagcaacagtagcaggtggcctggccatacagggattccttactcgcagcagagaatgttgctgccactcaaagtcaccaggggctgaagagctcctgtggagacccacatcatctaacaacacacatactcaaaacagggaaatgtgcattttcgggagaggaagagacaaaccttttgtttagctaactggcatgacagagtgtgacatacatgtgctcctggaagaacggtgttgggtgtctgcactcaaaatcttgagcataggcaactggatgaagggctctgtggcattgattttcattgtgtgtgtgttaatatttacatttataattaaataaataatcgaaattatgctgaactgaaa

SEQ ID NO: 335952 - DNA, 444 bp, Homo sapiens
  misc_feature (52)..(52): n is a, c, g, or t
  misc_feature (62)..(62): n is a, c, g, or t
  misc_feature (64)..(64): n is a, c, g, or t
  misc_feature (66)..(66): n is a, c, g, or t
  misc_feature (72)..(72): n is a, c, g, or t
tatttataatataatataataaaataaagaaacaaaaccctcagggtaacgngctgcgggtncntncggaantacggaagcaacagtagcaggtggcctggccatacagggattccttactcgcagcagagaatgttgctgccactcaaagtcaccaggggctgaagagctcctgtggagacccacatcatctaacaacacacatactcaaaacagggaaatgtgcattttcgggagaggaagagacaaaccttttgtttagctaactggcatgacagagtgtgacatacatgtgctcctggaagaacggtgttgggtgtctgcactcaaaatcttgagcataggcaactggatgaagggctctgtggcattgattttcattgtgtgtgtgttaatatttacatttataattaaataaataatcgaaattatgctgaactgaaa

SEQ ID NO: 335953 - DNA, 455 bp, Homo sapiens
  misc_feature (44)..(44): n is a, c, g, or t
  misc_feature (50)..(50): n is a, c, g, or t
  misc_feature (54)..(54): n is a, c, g, or t
  misc_feature (69)..(69): n is a, c, g, or t
  misc_feature (80)..(80): n is a, c, g, or t
ggccggagggcacgctgggcccgacgcgctgagttttcgccagnaattcngttntatcagcgctgtttnatacatacggnagatacggaagcaacagtagcaggtggcctggccatacagggattccttactcgcagcagagaatgttgctgccactcaaagtcaccaggggctgaagagctcctgtggagacccacatcatctaacaacacacatactcaaaacagggaaatgtgcattttcgggagaggaagagacaaaccttttgtttagctaactggcatgacagagtgtgacatacatgtgctcctggaagaacggtgttgggtgtctgcactcaaaatcttgagcataggcaactggatgaagggctctgtggcattgattttcattgtgtgtgtgttaatatttacatttataattaaataaataatcgaaattatgctgaactgaaa

SEQ ID NO: 335954 - DNA, 439 bp, Homo sapiens
  misc_feature (67)..(67): n is a, c, g, or t
tattttttcagataatgtccattcttataaaaaccaaacaagcccctcgagggtaacgtgctgcggntacggaagcaacagtagcaggtggcctggccatacagggattccttactcgcagcagagaatgttgctgccactcaaagtcaccaggggctgaagagctcctgtggagacccacatcatctaacaacacacatactcaaaacagggaaatgtgcattttcgggagaggaagagacaaaccttttgtttagctaactggcatgacagagtgtgacatacatgtgctcctggaagaacggtgttgggtgtctgcactcaaaatcttgagcataggcaactggatgaagggctctgtggcattgattttcattgtgtgtgtgttaatatttacatttataattaaataaataatcgaaattatgctgaactgaaa

SEQ ID NO: 335955 - DNA, 453 bp, Homo sapiens
  misc_feature (73)..(73): n is a, c, g, or t
gccggcccgctgccagcagtgatatagagtaaaagtagtgacggttataaggtagtaacatgaggagtatctngctgcggctacggaagcaacagtagcaggtggcctggccatacagggattccttactcgcagcagagaatgttgctgccactcaaagtcaccaggggctgaagagctcctgtggagacccacatcatctaacaacacacatactcaaaacagggaaatgtgcattttcgggagaggaagagacaaaccttttgtttagctaactggcatgacagagtgtgacatacatgtgctcctggaagaacggtgttgggtgtctgcactcaaaatcttgagcataggcaactggatgaagggctctgtggcattgattttcattgtgtgtgtgttaatatttacatttataattaaataaataatcgaaattatgctgaactgaaa

SEQ ID NO: 335956 - DNA, 442 bp, Homo sapiens
ccccgctcattttccgtgcccccaccaatatccacaaaccaacaaaacctgggtgatcacgagctgcggatacggaagcaacagtagcaggtggcctggccatacagggattccttactcgcagcagagaatgttgctgccactcaaagtcaccaggggctgaagagctcctgtggagacccacatcatctaacaacacacatactcaaaacagggaaatgtgcattttcgggagaggaagagacaaaccttttgtttagctaactggcatgacagagtgtgacatacatgtgctcctggaagaacggtgttgggtgtctgcactcaaaatcttgagcataggcaactggatgaagggctctgtggcattgattttcattgtgtgtgtgttaatatttacatttataattaaataaataatcgaaattatgctgaactgaaa

SEQ ID NO: 335957 - DNA, 678 bp, Homo sapiens
aataagcaacctaaggtactgagggtttaaacgtctttagcaagtttatcaaagtcagtgacctggcagacccaggaattgtaattttgagccatagcccacaccacatattgagaaaactagaagagaatgaacttggccagaggagaatgaaatggcttgatatagatgaagatgcagctgccataagtgatggaaaccacagtaatatgtgaagaacagttgttcatgtattctagaggaaaagaaaggaatatcattatatactgcttatgggattctgtgctgcggagatcattacggaagcaacagtagcaggtggcctggccatacagggattccttactcgcagcagagaatgttgctgccactcaaagtcaccaggggctgaagagctcctgtggagacccacatcatctaacaacacacatactcaaaacagggaaatgtgcattttcgggagaggaagagacaaaccttttgtttagctaactggcatgacagagtgtgacatacatgtgctcctggaagaacggtgttgggtgtctgcactcaaaatcttgagcataggcaactggatgaagggctctgtggcattgattttcattgtgtgtgtgttaatatttacatttataattcgatggcctcgttggcctcagcggtggagctttgcggcag

SEQ ID NO: 335958 - DNA, 688 bp, Homo sapiens
gattttataaatttcacaaatcaggttaaatttaatgtatttgaaatcagtttcaaaaagcattaagcattgtcatttttcagtgctaaacccaagtacagtacatgtccttttatctggtagcttttatttaagacctgatacagacccataagggcatgagtaatgtactgaataagcacatgaataaattaacttctgagcagaattatagtaataggtgcctattataaggtggtgagtgcagagagagttatggtagttataagctgtctgtgggtgaggctaaacagattaacctgactttcaagttaaggcttcctgagagatgggatttcaggatctggctctaaggaagaaagcttggtgaactggtttggtaaggcatccaagaatagagtgtggcttctgggtgtagtctctaaaggagaacacagtaattggatgagagtgtggaaagggtaaatttgctttaggagtggtagggtcaggtacatggaaacaaaagtggttcattggttttaaagtgaaatgtaaaaaaaaaactgtttccactgaagcaaaaaggataaagatttatgtaaacattctttatttgggtagcagcatcttcccatccccctcagtttgttccccactatttctgtatcacctatacatggtacatacttaataaatatttactcgg

SEQ ID NO: 335959 - DNA, 459 bp, Homo sapiens
ggcgctctgaggatccccccgttccccctaaaaatcttacctatcagtatgtaggaataaataacaacaaaagataggtaagatttcagcaggggagatttatttattacgcagtattaaataatataaatgaaatactgtagattagtagaggttactcatgattaggaagacagaacaagtaagatgtcaatttttctgaactgacatgtagatccagtagaattccagtcaaagcataacttccagtcaaatcttttcatggagtatgataaaatgtatcaaagaataaagggccacgaccatccaaggtactttgaagagtatggttattatttatgttcatatgaagaatttgtttgtgtattagggaaggagaggtttgatttgagtctgcagtaactaaatcaatgtggtgatagcacagggttaaacagattgattaacggaacagattag

SEQ ID NO: 335960 - DNA, 275 bp, Homo sapiens
atggaaaggactgaaatcagaaaaagccttaagttctttctgatcctgtcaggtcccttaactctgagctttggcttcctcgcagggaatcgctgcccctgctcaccatcttgggcttctgggggcaacatgtcagaaccattgcctactgatggccagcactgcccgttcctttctttcctggcatgcccatcccacaagtgagagaacctagacccgggaaacttaagcaactggacagcagagctgggacttgaagtcattcatccagctcc

SEQ ID NO: 335961 - DNA, 139 bp, Homo sapiens
tattgtgtatccttacaagaagaccagagcaactttctgctataagttaggcgtcttctccttctcatgcaaataccttgattcccttctcttcccctctaaccacctatgtatcttcaagttgacttttttttttttt

SEQ ID NO: 335962 - DNA, 455 bp, Homo sapiens
ataagttaataaattgcaatactttaagaaagtatcagtaaacaagttaattctgtgtctagttgggagagattatccaagtccgtgttttctggtctcttcctttcattgcctcttgatagtgcctttacaaaggacagggtgcagttttagaagagtttggtgaacttgaaattaattgttagaatgagatttttaaattttgtgcatacatatcaggttccctattgcgtaatatgtaatcagcttctcaattttttatgtaccctaatatttaatcaggttttacatgtgatgcctctatcagcagtcagtagattagtatatttatgtctgtattcaggaatggtataactgagtgttagtatgagtatatttgtatcatgcctaaatttgatatggtcattctctacaattactttccttccacatttcctttctgttgataaagttgg

SEQ ID NO: 335963 - DNA, 976 bp, Homo sapiens
tgaccatgttggcccagctggtctcgaacttctgacctcaagtgatctgccctcctcggcctccccagactgctgggattacaggcgtgagctaccgtgcctggcctgaaatcatgcattatatactctctctctctctctctctttttttttttttttttttggagacagggtctagctgtgttgttcaggctggagggcagtagcgtgatcacacctcactgcagcctcaactttctagattcaggcaatcctcccacctcagcctcctgagtacctggagctacaggcgtgcgctccaacacctggataatttttgtagagatagggtcttgctgtgctgcccaggctggtctcaaactcatgggctcaagcgattgtcccaccttggtctcccaaagtgctggaattataggtgtgagccaccatgaccaactatatatactcttgtttggtctggctactttcactcagcatattttgagattcatctatgttgttgtctatatcaatagttcattcttttcttttgctaagtagtattccattatgtgggtagtactacagactgcctaatccatttattagttgatggacatttggtggctttgagctcctgaactcatgtagtcctcctacctcagcctcccaagtaggtaggaatatagatgtgtgccactatgtctggctatcacataaatgtctttatatggatgtatattcctttgcttctgggtaaatgcctgcaaatgaaatggctgatcatatcataggttgtatgttttaactttttaagaaactgccaaacttttccaaagtggttatattgttcaacattcctaccagcagtgtatggaagtttcagttcctccatatcctcaccaacacttagtatggttagtctttttaattttagaccttctaataggtgtgtactgattcctcattatggttacaatttgcatttctctaatga

SEQ ID NO: 335964 - DNA, 215 bp, Homo sapiens
accttttatgggaaagtgagaataaattctgatccctattatgcagggaaacagaagagagcattgtttttcatcagggtgaagttggggcaaataggaggggtgaatgatgaggcagacagaaagagacagacactccaaactgcttgacaatgagctcatttttaaatgtatgtaataaagttaccacaataatgttgtagctcagtaatgca

SEQ ID NO: 335965 - DNA, 324 bp, Homo sapiens
ctctaaaatggatgaacaaaatgagtttcttacagacatgttaggaggaataatttccttccagattacaaggtgttctgtaaactctcagaggatggttttccaggtaccatgctgagtagttttagccaaaacctgttctgtgctcgaaggaaaccaccaccaagggctgtcagtcaagctgggtaattgtataaatacagtcaagagttaaggaccacataacagtgccatatatggactccactttctcaaaaccctttaaggggatacagtctcatcctactggaaaatgttaggcaaaggatggaaatagttcgtttc

SEQ ID NO: 335966 - DNA, 243 bp, Homo sapiens
gtgactgtttctgacccactctgtggttctcacttatgagtgtctcatccctcaagccatttcctcccccgtccccacatctgtatctatgccaccaatacctggatgagactaagcggtagaccagacccccagtctgggttcaagcactggtgaggcagatggactcagctggaattattttcactttgcttttttttttttcacttgttttttagagatggagtcttgctctttctccca

SEQ ID NO: 335967 - DNA, 225 bp, Homo sapiens
tagctatttcaaagctctagcttctttttgttgcctgttttttagcattatgctcttttgttttaccttaagactctatattgcatgtcttatttgaaatatctaaagtttaaaatgcagcctcataatgtatctatttgcttaatttaaaacatttaagcaaaagtaataggttctgcttcttagctattgatgggataaagaacacaaggacaggtggggaga

SEQ ID NO: 335968 - DNA, 330 bp, Homo sapiens
tgcgaggtgatctagaggatccctcacgcccatgtcacaaggcaaatgggcagggcaaggtcacaatgccagggcgaaattagaattactgatgaggttcactgtcccgctatgcacagattgtcattgataaacatcttaacaggaaacagggttcaagagcagagaaccagtctgcctacaatttcgccaggctggaatttcccaatcctaacaagcctgggggcgctgctggagaccagggcatatttcatcccctatccacaactgcgtaagacagacactcccagagtggccattttagaggcctccccctgggaatgcattctt

SEQ ID NO: 335969 - DNA, 306 bp, Homo sapiens
ctgtgttggatttctaaacctacagaaatgcaagataacaagttcatgttgttctaagccactaaatttgtgttgatttattacagtagccatagaaaactaatacaagaagcaagaggaaatggagggctcacaaaatgtcgtgtttaatcagcttattccccttcatcatgaatgggtgatgaggcaagagccatcaatcacaaaggacatttccgaacaatccaaacagaagtcctgaaggataggagaacctttgcaaatccctaagactgaacaggcctagtgaatgcaggcagagtgacc

SEQ ID NO: 335970 - DNA, 552 bp, Homo sapiens
atagagtgcatggctaattccacatgttcccaggccttatctagaatctaatgctcccaagtaggtaaactgaacaattttcaaaagcctaagaagcagttgatgaccttaaagcatcgaacaaacctaatatctgacctgcctaatttagactaaatgtcttcatttttcccaataatctttaaaactttttatttcccaaagattactaaagttatgtgaactaaaaggcattagtttttattgttctttcaaaatatttgatttaggtgtttatttatttatttgagattactggctttagggtggagtccttggacaaaaaggaccaggaaagcatgcagtttctagggcccaatataataagtgggcacagcagaaagcaacacaggtctccaaaaattaagggtcccatttttataccagatcctgaatcccaaaaagattgagccctgaacaaagagtccggttactttttaagtatattgtgggccggggagatctgcgcagggggaagtatattacagaagagagtacgctggaatggaattg

SEQ ID NO: 335971 - DNA, 252 bp, Homo sapiens
tgtcaaactctatttccctcatcctaaaattcaactcatcattccatctcccaatattttttttatcctaagacatctgctaaattaagattgtttttcagagtcatcttattcaaatgtttgactcaaacttacccaaaagagatcataagaagctgagtcaagtcacatactgaagttaggattccaaatgtcattccccaaagctatcagtctaataactaacaaagaaagaagtgaagttagttttgc

SEQ ID NO: 335972 - DNA, 356 bp, Homo sapiens
tagaaagttaaagtgtctgtttttcccaattaagtttgtttaaatgatttaaatccttgaactacacactttcctaagctgataggaaggaactagtactgagtacattcgctcactggggcataaatctgagctgctggtgaaggttggaaactctggcatgtgaacctatcagaagccttcgtaaggaaatagccactgatgagttcgttgtgacagagggctgcaaaaccctgagacagcctgagttaggaaagaggcttcacctcccaggagaaagcaaaatgatctcatggaaacccaggacttactgataatcacctgtaaatgaagctctgcctacgcgtcactttgca

SEQ ID NO: 335973 - DNA, 558 bp, Homo sapiens
taaaattataacacctaaatgccagtgaggttgtagtgaaatggatagaagcattcgctagtggtgacattatatacttgatatgaccccttttcagtaatacttctcaggactgggaagattgaatgcctcctttgcctcattcatttcattcctaggaatttctccaaggaaatcactgaacagagacaaaacccagtgtgcatcacgatgttcatctcagcattatttttaatagtgacaatttgatagcaaccaagatgtccagcattagaagaccactttaagtaaattgtggataatcaatttgatgatgcagtcattaaaaattatgttgactatgtagatgtgacaaagttacgacagaaagcaaaatacaaattgtatgtgtactatgattgaaattttgtaaaaataagtatgcatgtttgttcaaaaggatgagatggccaagtgggatggttcatgcctgtaatcccaatacatacggaggccaaggcaggaggatgacttgagaccaagctgggcaacagagtgagatcctgtctctacaaaata

SEQ ID NO: 335974 - DNA, 215 bp, Homo sapiens
cacaatggtagaaacctctcctaaggcaatgcttaacagtttgggcttggtgttgtgtgaagtttctaaaaataaatagtgatgcatgtctcctctctctcattgcctcagatttccatttcctaattgaatgattctctttagagaatcaaaatggtcacgtgcaaagttaaccaaggaagaaggggagaaagcaggctaggtaggccagagga

SEQ ID NO: 335975 - DNA, 109 bp, Homo sapiens
atggtatggaatctttctacttgagtcacaagtaaattcactagaatattgaagataatttatttctgaaatctctagtatggggctctaaacatattttgtggcaaaa

SEQ ID NO: 335976 - DNA, 473 bp, Homo sapiens
tgtaagataataacatgtactgaaacactgaaaacacaaactacttgcagagaaaatcagtttgacttaacgaaaactgaggtacagaatattgaggtgaacagaatagttttatttcagtaattcacattctatgcgtatcatataaattgctatgaatgcaatccaaagaagatatttactatgagagtaataatagtaagaggcaataaggtttggaggatggaaattagaatagggcttgagaaacaagcacaggaataaatactatcaccgaaagaaattcctatctggaaagaaagcaagaggatgtaggctcaagcacagtgacaatagtaagaatatgtatctctggcccaaggaatatcccaattaatgccattgtcaggactatgtgcaaataatgaaagcaaaggcatacacagtataagtaacaacaaaataacaacgaatgggaaataaaaaatacatat

SEQ ID NO: 335977 - DNA, 207 bp, Homo sapiens
cagcatctcaccctttgatagtaatcacatcctcttaagagggctttggaaacaattggccttggctagccaatcccaggttttcgcttccatgagggtctccagcttcacacaatattgtgcccatatctgtagcggccttggtttttaattgcaaacaacagcatccacccacatcagtgttggtaaaaaataaattgctttttt

SEQ ID NO: 335978 - DNA, 220 bp, Homo sapiens
tgctgagattttagggggagtcttacaacctaaatgtgaggctcatatgaccccgggggaagtgcagaaacaccatgggaagccaatacttactgaactctgtgaggacttcccatcctgaggatgaaaggcagggcaggggccctggagctcttttataccctagggaccacccacagatggagaatggattaaagtctggccacacccactctttgcc

SEQ ID NO: 335979 - DNA, 130 bp, Homo sapiens
ccgctaacgatgcagccccatcacattgtttcatctatgtttctcagtctaagtgcaagcttcccaccccagtgcactgtcccaccccatggcccccagaataactgaaatattctgcagaaagatgaaa

SEQ ID NO: 335980 - DNA, 324 bp, Homo sapiens
ccttaaccctagtccattaattctcttttatgcttctcctctatgaataacacaaatattattcacccttgtgtcagaaattccagcatcatccttgactcctctttttatctcagatgatactaagttccatcagctacagccctgcaatctgtcccatcagttcatttccatgcattctacagccactgcctaactcaggcccttgccctcagcaagccactggctttactgaagctttcccctagccagtctgaagctgcccttagaaagcaatttgcacataatctcccttgaactttgatgtatatatagacatgtctt

SEQ ID NO: 335981 - DNA, 385 bp, Homo sapiens
cagaagtaaaaacaaactgattattaggaacattgaccataaatccataaaactactagaggtgtgtattggtttggtattgattgttgtaatggagctttgaatttatgaaccatgaagacatttaaggctgggtgtggtggcttacacctgtaatcccagcactttgagaggccaagatgggagtattacttgaggccaggagttggagaacagcctgggcaacacaatgagagacccccatctctacaaagaaaaaaaaaaattaaccacgcatggtagcgtgtacctgtagtctccgctactcaggaggctgaagtggttcacttgaacccaggagttcgacactgcagtgagccatgattgcaccactgcactgcagcct

SEQ ID NO: 335982 - DNA, 249 bp, Homo sapiens
ctccttgacatcacttctggccactcctcatcttgggccccataatgaggtttataactggatagctaagcacagtatagggggatggtgggagtcgagggtgagtctctcctgtcttcctgcagaaccatctaaaacagcccccaagaaagaaatggttacaagagcctatgaagaaacttaagcccatctctataaaaaataaaacattagccaagcatggtggcacacgcctatcgtcctagctac

SEQ ID NO: 335983 - DNA, 242 bp, Homo sapiens
aataatgttaagaaagtagagaggagctttttataacctatgatggcttttgtaggccatgtgaaagagcgtggactctacctcacatttaagaaggattattaaagacctgtaaggaaaatttgacacatctggatttctgttgatcaagatcactttgacaccctggcagagagaagaactggaggaaggagagaatagaaacagacaagtgttgattgagataggaacttcagggcaac

SEQ ID NO: 335984 - DNA, 382 bp, Homo sapiens
atggggtttcaccatcttggccaggttgatccaccttgaactcttgaccttgtgatccgcccgtctcggcctcccaaagtgctgggattacaggcgtgagccaccctccttggtctactcctgtatctttttaatttactttgatgtttattatatatcaagtcctgttctaactaatttaagttcacaattagtttgcaaaaaattaatcaaatcaatgttttgattcatagtcctggaggctaggcatcctcttggctccttcagagggctgtgagggaaggatctgtccaggcctgcctctccttggctgttgactcttgatccctgtatctcttcccatcatcttccctctgtttgtgtctctgtggccaagttcttt

SEQ ID NO: 335985 - DNA, 305 bp, Homo sapiens
caggcgccactgggggctgcgctcgagagacaggtgtggggaccccgcacaggacctgtcttcgctcagatgaacaaacaggaccaagaatgtgtcctaagtgattcaaaactcacatggatacataagttatcaaacacaagtcactggttaatacactctgccagacagctgaagtgcacatctcccatgggcccactgtagcttcgagaagtcactaaggacacctcctggagctggatcaggagtccagagcaggggtccaaaggaagatccccgggaccagagcagcaaagccccaccac

SEQ ID NO: 335986 - DNA, 392 bp, Homo sapiens
cagtgttttgattatgaaaagagttggaaccaggggacatggaaccaggtggcgaatgtcctaaagccagtggtgacatggtggactggtttcctcctgggatctagttcatgccctgcactttaactgtggtgactggctactatagattcacttttttgctcattaaaatgttaaaaaatcaaactgtacataaaaagatttgtgaaaatataaacttgggaattgatctggagagctggcacacagtcctccccaccccctgccttagcaatgaggtcatttacatttcatcagctgtgcagcatccccaagatccgatttatgtggcagtagttgaagttgcaccgaggctggttgtctaaaagagcttgtgtaggcaagagaaacgg

SEQ ID NO: 335987 - DNA, 217 bp, Homo sapiens
ccatctgaagagaataattccttaacatcagatacccagtcaatgttcaaactgccccaattatcatataagttttttagcaactggtttgttcaaatcaccatctagaattatttcagagggaaataacggtttccttgtctcctgctctgtggtcttttaccccttcaatttcatatacttaccttcttaatttttaagtgtaggcaaaagagca

SEQ ID NO: 335988 - DNA, 485 bp, Homo sapiens
agcagcagctatctcatatttctcgtttccttgttagaaaatgaggaattttccagtaatctcattttccagatataaatagtgtcagttatttatatggtgtcgtctttcgaagcactgtcaaatacattatatccgtaaggcaggaaatgacaggtattgggggaattgtcccatgggtgatgagtggaagagctgggaacagaatccaagtcacttgactcccagtccggtgtttgaaactcatctctcaggtagcagtgtggtgtccacaaaagaacaacagactaggaacctggaggttcttaagccctgaccctaaaattaactagctctatgcccttgaacattaattttacctgggccatagcagataccttacaggagaaaatttaggaattaatctaaattaaggtcagtgagctgctcaaagtcaaatgtttactatagggctagaataagtgttttttttttttttttttttt

SEQ ID NO: 335989 - DNA, 148 bp, Homo sapiens
ggtggtggggtcagggagggcttatagggtatgttaaatcagcagaataattttatttatttatttggagatggagtttcactcttttgcctaagctggagtgaagtagcgtgatcagagatggagtttcactcttttgcctaagctg

SEQ ID NO: 335990 - DNA, 697 bp, Homo sapiens
aagctgcacctgcatttgtgcctaaagagtggggatggggaagctgcacctgcatttgtgccctaagagtggggatggggaagctgcacctgcatttgtgccctaagagtggggatggggaagctacacctgcatttgtgcctaaagagtgggcatggggaagctacacctgcatttgtgccctaagagtggggatggggaaaccgaagttggagagaaaacaaccgcctgtgcccggccttcagaatgagatgtggggtcctgagcgtgacctgtgggtgggtaagtaccacccacacaaggaggatcggaatgagatgcgggtcctgagcgtgacctgtgggtgggtaaatgccacccacacaaggaggagggtcctgagggttcctggccactgaccactggccactgacacccggtgccactgtgatcagtccctgctgtgccataaaccacactcaagcccctgggggccccacagccctcagcattgctcgggtgtggaaatgagggggtcacaagggaacctcctctagaaacaggaacctccaaactgggatggccctggaaacaatgggcatcacctgcatagcctgaggccaccaccagcgcctccctggccttctcttcctacagcaggtccctgcccaacagctgtggctctgacctctcccttccccttctcagtcccatcctg

SEQ ID NO: 335991 - DNA, 232 bp, Homo sapiens
gcctattttttaaagttgtctgaagacttggctcactgtccaatcttgccaagtttctcctattcctaattttatgctgtttatcatctgggaatgcagaaaacaaagtcatagtaacccacatgtgtttccctaacatggacctgaacctaagaatgactgtgccccctactctggaagtatctgtgctaagaggaaggaagacaaatacacagctatttccagcctgctg

SEQ ID NO: 335992 - DNA, 538 bp, Homo sapiens
tgatggatggtaccttcgttattctccatctgtggtgacggcttcgtgatatatccatagtgtcaaagcttctcaaacttcattctctagcatgtgcagtttgctgtatgtcaatcatagctcagtagaactgttaacaaaacaaaaaggctctgccctgggagccttacaatcccacaaggccagaaagaaaccaggtaattacatagacaggaggcagactcacttgctgtagctgaggtgagggtaccttccagaaccacaggaacacaggaaggcagggctcctgagggctgcagaggagaagtcattctctcctcacaggccctttaatgcctcagtttccccaagtgagcagttagaaggaatagggagtctcataccctaagactggtgtggaaagcgtttggagttctagagcttcggggcagctgtgaggaggccttctaggggggatgggtcaggggcatatgtgggacaggcactctgacctcctctgcccacccctgagaaagctgaatgaggcaagagatagcga

SEQ ID NO: 335993 - DNA, 319 bp, Homo sapiens
ttacatcttggcctgctcagaaaaaaggaagtagtttcaatgttagtgcagcaaaaatgcctaaaggtgactgtgctagtctgttctcatgctgctaataaagacatacctaagactgggtaatttataaaggaaagcggtttaattgactcacagttccacatggctagggaggcctcacaatcatggcggaagttgaaggaggagcaaagctactggcagcaggcacgagaatgtgtgcaggggaactgccctttatgaaatcatcagatctcatgagacttattcactatcatgagaattgcatgggaaaaacatg

SEQ ID NO: 335994 - DNA, 190 bp, Homo sapiens
ctgtgtcaccaagtaagatggaatgaatggggcctagactgcggtctcctggccagcctcctgctgtcctccacagtaggctctccatctgtgcagagagcagtgctggctgggcaggcagcaggcacccactggcctggccacttacctgtagggagaagggcccagcctctctggtgcacagcggcca

SEQ ID NO: 335995 - DNA, 247 bp, Homo sapiens
tggggcgatctcactcactgcaacctccacctcccaaggtcaaccgattcccctgcttcagcgtcccaagtagctgggactacaggtgtgcaccaccatgcccagctaattacaaaaatagtttttaagctcatttatttcacatatcatttcacatgactgtaaattttttagatttggtcatttattactacagtgttaggtgctttagtgttaggtagctattgatagcagagatgatgaggaa

SEQ ID NO: 335996 - DNA, 4394 bp, Homo sapiens
cagggcccagaaggcagctgtgcagagtcgagagctggatgctcttttgatacagaaactaatggaactggagaccttctttgccaaggaagaggagcaggaacaatcatcaggctgttgagaagcgattcagtttgagggtctcaattttagggtttttttgttttgttttgtttttgggtttttttttttttttggacctccttggaaaaggttgcctaattttgccctaccgccaaaccactcaaaaatgcacagtccatgaatttttacctatttcaaggtgcaacctttttagaaactggtgaaggagggtcctctacttttactgctgagtatagaacctcaggaatgctccctttctcctggaaatggacctgaacgacatccagccacctcctcagtctctgccatccacaggaggaagcagcagcctatcttcagtaacactaggattccaaggacacacaggatttgcacgtccatatgaaagttccgctttgtttacggtggtgctagaccaagattattagaaacgtggcctagggagggggacctggcgtcctgtcctgtgtggtctcactggctcatttcagtagttgaggaaagatgagctgttgtgttttcttatcttttgtctgcccaggacctattgatgtgagtgtatgtgagagtgtttgtgtgtgtgtggctttttcccatcgttttctcccctctgtgactgggtcactagtgccagaggagcccgtccaggccccattcgaagtaagttgcactttttaatgttgtggtgtggattattttcatttgttttattttcttttttgttgttgtttttgtactattattgctgcatgtgtggagcctttaaatgtgattttaaaacatttttttaaggagaaaaacaatacatgtcttaagaatacatgataggcatttgacccagttgatcgctgcatggaagagacatttttcctattcatgtgtttcaggcaatcccttccccatctccagcttctagtgtaactcattagagggagcactttttttcatctgggttctcattcttgcccaccaaatacatgtatttattttagtgatttaagtaagagcaggtttctctcccgatcattgaaaaactactatggttgggtgtggtcttaatggtttttatctgaaatggtgttaggtaacaaaattgagtacaacggcttgggcagtgatacaggctgacccacagtatttgtggctttccaggcagcccgcttcaagtgtggggagagagtcggggtcatgtttcagacccagagatgtgttcctgcagtgggatctcaaaaatccccagccagccttctttgagggccacctcattgtactctgggctcctacgtcacatctaccggaactgtcaaatgctggagttagccgagtttctgggtttgtgcctgcaggagtctgtgggcagagggatgctgtgggtcagcagcctcgaggtcttgttccttttccactgaagtcctgtgtgtccatatcctgctccccttcccctccttctctaggggtttctctttctctctcaaaacaagagtttagagaattaacattccatggctagtgagtgggatgcaaaagtcatcgtcaggacaccagcatcacctcttcatatcctcctgggagccactggcatggagcagccgccgatgggaaccgtcagagttctagggacatttccaagtcagtctattagagaagagtgagtggcacgtcctggaatgttggccaactctcctaggtttcttttgcttccccatttgctagtggatggggagatgggttgggggtggggggtctctatgtgccttgcttttgcaggttgacagtctatgccacactggagcagaaaaactgacatgagccagagggaaaagtgtgccacggctatgttctaggcccactgcctcagacatagcattgagacgagtgaaatacacacttggtcatccacggaggcttccaaggccatggccaaatacagttagaagagagccaggcttccgtaccagctctgaatgatgctaaccagattctgtcattctacatccactttgcccagactgtatagacacgacctatgtttcacctcaatacctctcccttcctgggacagggttcttagacactaaatgcttctctctgacttttttgcttaagggagtgggatgagtagtacattttgcccttgtccaggcatgtttaaggagctcctactggacaggttgcagactagcagtgagtcaacagagccctgtttgccagctctgttgccagtgtagatgcagtgatgtggcggctatgtttcccagagacaacagtgggcacagctatagtgtcaccaacatggcagagatagtttcaactgtgcctgttacaggtgtggcactcgaaggaccagaagcagcggtttggaacatgggtaactgggagcagaggactggaagaaacagagctgggctccttccctgtcctgacaatgtaggagaggagttgttgtgaggccagccctgcccgtcgttgaaattctggacctaccctctagctaggtcccttcccctgctccaaagttgagaagggggccccactgcaaacttgaaattacttacctgaaggtgatgtatatacctaggctccagctgcgctcagccacacctgtcttaacattcagtttcggcactgagccagctgcagtgttgtcaggggtccccaggcccgtggtccctaaccacgatgggacatggtaatcggctgctggcacaccacctgcccagagctacaggaggtctggttctggggtggagttggtacagtttctgagtatgggaacttccctccccaagtggtgggaagttacagttaactacagcttactcaactatcacttccagaggtttagtgtttttaatatgggaaagaggagaaatctcaggtctaatcagggttctgcccatcagcttttcactgaaactttcaactgtgttttgttttttgtttttttttccatctttcagtttctagctgtgtttgccttctccctccgcgttccctcctctttttttgcttttggtctcctttccagcttcatgtctccatgagttcagctgtacctcatctcctgttaaagcagatcatgtccactttttcttactgaccttactctaagctacagtagctgagggaggtacggtgaagacatgtagcgtttgccttattcggagcctgaggagcccagaaacccatgctgtgaatcccaaaactcagcgctcctcaagagctgtgaaaatcatgatactttgtcacaattttgcctgaaagggtctttggcacgggctccagagccaacctgaggtccattccagatcccactatctgggcgtgagacctcccccgtggctccttccttgcccactgagccaagagcagcagggagcgtacaggacgggagcagcagatccaaggccgcggtgcagccaatgaatgcacggccgtcgctccgtctccaggctggaattccgtctcataatcaatgccatgtacattaagatctgcgaaagaccaacttttaggcagtgatacttttctcccattccctggggtggggggagtatgcagttggtgctttctgtaattcccttgttctgttttgtttctgtaagcttttcccctggtgtcatggaaaggacttcttaaataaccacattgtgggtggctgtatccaaagtttaaataattggccagaagtgcagagtatcctttcctggattcgtgtcagaaaagggctccttgccacaactgaacttactgtataaaaacctggctagggagatttaattttactaaaattacagtttaatgttaccgtctagccacaaatcaagcagcaaaagctattttgatgatgaaagggggtccccgttgagctggccatctagtgcagtgtgctctcagattccatgtttgttgattgtgtgtcttcacaagcccctctctggtgctgaattggatttgaattcttggtgagaggcctcagcatctccttgggctggtctgggccagtaaaaatagctgcctgacatgtttatatattatcatggtcagtagttcaatgaaatttgtacatttttggtaacattggtatacatgatgcccctgcagttccttttctgtttggtagtttgtgactctaagatttccactgttatgtgtgttaatttatgaaaataaatttttttgaaaacctggtttaaacgctttattgtgcccaaaaaaaggcccatggaatgaagggaagagccgcgcagccctgagcccggagcgatggtttgtcgcgcacccaaagg

SEQ ID NO: 335997 - DNA, 2064 bp, Homo sapiens
cagggcccagaaggcagctgtgcagagtcgagagctggatgctcttttgatacagaaactaatggaactggagaccttctttgccaaggaagaggagcaggaacaatcatcaggctgttgagaagcgattcagtttgagggtctcaattttagggtttttttgttttgttttgtttttgggtttttttttttttttggacctccttggaaaaggttgcctaattttgccctaccgccaaaccactcaaaaatgcacagtccatgaatttttacctatttcaaggtgcaacctttttagaaactggtgaaggagggtcctctacttttactgctgagtatagaacctcaggaatgctccctttctcctggaaatggacctgaacgacatccagccacctcctcagtctctgccatccacaggaggaagcagcagcctatcttcagtaacactaggattccaaggacacacaggatttgcacgtccatatgaaagttccgctttgtttacggtggtgctagaccaagattattagaaacgtggcctagggagggggacctggcgtcctgtcctgtgtggtctcactggctcatttcagtagttgaggaaagatgagctgttgtgttttcttatcttttgtctgcccaggacctattgatgtgagtgtatgtgagagtgtttgtgtgtgtgtggctttttcccatcgttttctcccctctgtgactgggtcactagtgccagaggagcccgtccaggccccattcgaagtaagttgcactttttaatgttgtggtgtggattattttcatttgttttattttcttttttgttgttgtttttgtactattattgctgcatgtgtggagcctttaaatgtgattttaaaacatttttttaaggagaaaaacaatacatgtcttaagaatacatgataggcatttgacccagttgatcgctgcatggaagagacatttttcctattcatgtgtttcaggcaatcccttccccatctccagcttctagtgtaactcattagagggagcactttttttcatctgggttctcattcttgcccaccaaatacatgtatttattttagtgatttaagtaagagcaggtttctctcccgatcattgaaaaactactatggttgggtgtggtcttaatggtttttatctgaaatggtgttaggtaacaaaattgagtacaacggcttgggcagtgatacaggctgacccacagtatttgtggctttccaggcagcccgcttcaagtgtggggagagagtcggggtcatgtttcagacccagagatgtgttcctgcagtgggatctcaaaaatccccagccagccttctttgagggccacctcattgtactctgggctcctacgtcacatctaccggaactgtcaaatgctggagttagccgagtttctgggtttgtgcctgcaggagtctgtgggcagagggatgctgtgggtcagcagcctcgaggtcttgttccttttccactgaagtcctgtgtgtccatatcctgctccccttcccctccttctctaggggtttctctttctctctcaaaacaagagtttagagaattaacattccatggctagtgagtgggatgcaaaagtcatcgtcaggacaccagcatcacctcttcatatcctcagattccatgtttgttgattgtgtgtcttcacaagcccctctctggtgctgaattggatttgaattcttggtgagaggcctcagcatctccttgggctggtctgggccagtaaaaatagctgcctgacatgtttatatattatcatggtcagtagttcaatgaaatttgtacatttttggtaacattggtatacatgatgcccctgcagttccttttctgtttggtagtttgtgactctaagatttccactgttatgtgtgttaatttatgaaaataaatttttttgaaaacctggtttaaacgctttattgtgcccaaaaaaaggcccatggaatgaagggaagagccgcgcagccctgagcccggagcgatggtttgtcgcgcacccaaagg

SEQ ID NO: 335998 - DNA, 598 bp, Homo sapiens
ggtaggggaagctttggaaacatccactagtggccttatttatgactcaggacacctgccaggtcactagaacacagctgaggaagctgtcggccagacgtccagaagcatcaacctggtggctgggctgtggggggacctctctggacaggcagacaaggtgtcggaggaaggggctgacactcactcagtgtctgtcatgcactgagggcacaaagggcaggatggagagctggcccacgccacctgtggaatcttccaggtgtgggggcagatggggaagcaagggggcttgaagacacatgcgctcattaaatgtccttaaatcccaagaagaagaacaaggacacatccacaggggcagggctgaaagtctgatgcatggtgttttggggtctgctcctgctgcaacagctacagtggctccctcttacctttctcttccctccattctgttgtgaaaatgttcaaacacatggtcaagttgaaagcattttacagggaacacattcagccatcacctagattctaccactaacaccaagctacacctgctttatcacctcaccgtccatctatccctccttcgcctggccat

SEQ ID NO: 335999 - DNA, 517 bp, Homo sapiens
tacctaactccaagttttatttgcctttttacgatcctggaatctcttataggtttgggtttcatgaaagtccttgggttttagctttcaggaagtagcatgcattgggaaaccttcttaagcacatgctccaggtcccttgaccaggattaactcagtccatgtttggggtctctcagaaaatgctcagagttcctgcgatgggagctttgcagctgctctggttaaggagcttgccagatgtgtggaacagaatcaaaatccccggaatgtcgtccctgttggtgtcatccatcactgtggcacagacggctcctctgagggcctcctccaaaccccagccctgtcggcctgcatttgacacttccaatctggctggcggggcaagcccagcagacactctcgctggcaggcagtaggacagctgatggatgggctcagcctgcattgctgggcagagccaagccagctttgaagaggcatttccacaggcctgctggctgtcgtggcacctgct

SEQ ID NO: 336000 - DNA, 961 bp, Homo sapiens
tggaaacgactccaaaaggaccccctaaaactatacaaatacatggaaattaaataatttgctcttgaatgatgtttgggtcaacaatgaaatcaggatggaaatttaaaaattctttgagttgaacaatgacagtgaaacaacttatcaaaacctctgggatacagcaaaagtggtgctaagaggaaagtttaaagcattaaatgcttacatcaaaaagtctgaaagagcacaagtaggcaatttaacatcatacttcacggaactagagaaacaaaaacaaaccaaatccaaactcagcagaaaaaaagtaaataacaaagatcagagcagaactaaatgaaattaaaattaaaaacacaaaacataaatgaaacaaaaagcagtttctttgaaaagataaaacacaattgatagaccattactgagattaaccaagaagatagaagatccaaataagctcaattagaaatgaaactggagatattacaaccaataccccagaaatacaaaagatcattcaaggctactatgaacacttttatgcacacaaattagaaaatctggaagagatggataaattcctcccatattaaatcacgaaaaaatagaaactctgaacagaccaataattagcaagattgaaacaataataaaaaaaattgccaacaaaaaaatgtccagaaccagatggactgacaggtgaattctattagacattcaaagaagaattgataccaatcttactgaaactattccaaaagatagaaaaagagggactcctccataaatcattctatgaagccagtatcatcctaattccaaaactgggaaaggacataacaataaaagaaaactacagactaagatccctgatgaacacagatgcaaaaatactcaacaaaatactagctgaatccaacagcatatcaaaaaggtaatacaataggatcaagtgggt

SEQ ID NO: 336001 - DNA, 378 bp, Homo sapiens
ggttttatggtagccacttcattatctttcatgatcctgcaggttaactgggctcaactgctcagtcctgctgcacgtgatactgacaggaactgcaaccttcaaggacttggctggctagagtgtctggcaccttggcagggacagctggaaggctgggctctgctgagatggctggacctctttcctctccttatcaactcatggcatttcctccatgtggcttctccacacagtctagacagcagcatagctatacttgatgtatggcagctttcttcccaaaagtgcaaaagcagtttccagacctcaataattggcccagaatcagcatactttctcttctgccacatcctgtttattaaaatgagtcacagg

SEQ ID NO: 336002 - DNA, 118 bp, Homo sapiens
cactcttagctgtttggaaaaaggcatgtgacctaggctcaatcaattagatgctcttgagtagacctttgattcttgagagagagagatgccaagttgctggaagagtcagagatat

SEQ ID NO: 336003 - DNA, 609 bp, Homo sapiens
gaggatgatgtgatcagatttatgattaaaaacaatcactctgactgccaagtgaagatcagactatgagggtgaagaagccaggctggaaacaggacttggtggtcgtgggggaagggtgaagagtagctgggccaggagatgacctgaagtcagatagatgtggcctgcaggtgatgcaggagtccatgatgacgcctaagtttctgaccaagcagctaagtggatggtggagtcatttactgaaacagggaaaagggggaggaagggtgtgggggagaaggccaaggccacattttggacatgtgaagtgtgagatgctcgtgggatatccagcaaaggtgaaaggtaggtggttggacaggagtctggagctcagggagccatcagcatggtgacccatgtggacaagcttaactcggtgatttcactgaaagtcctgggactgggcggcgtgattgcccagggcatgggttctcagtggtatcatactgccccctaggggctaccagaaactgcagtctatttttggtggtcagtaatacggtgctactggcattggaaggaagggatcagggagggactctagatgtcctgcagtctcctacg

SEQ ID NO: 336004 - DNA, 104 bp, Homo sapiens
ccaccggcacttccaggagcttgataactagagaggcattgcaacgcaaagtggggaaactgaggcccagggagagggctgcttgccaaggtcagacagggaag

SEQ ID NO: 336005 - DNA, 508 bp, Homo sapiens
cttcccccttcactcagctctcttctctctcctgctgccctgtgaggtgccttctgccatgattgtttcctgaggcctccccaggttgtggaactgtgagtcctttaaacttcttttctttataaattactcagtctcaggtgtgtcttcatagcagcatgaggacggactaatacagtaaattggtactgcagagaatggggtgctgctataaagatacccaaaaatgtgaaagcaactttggaactgggtaacaggcagaggttggaacagtttggaggactcagaagaagacaggaaaatatgggaaagtatggaacctttctagagacttgttgaatggttttggccaaaaggctgatagtgatatggacaatgaagtccaggctaaggtggtcttagatggagatgaggaacttgttgagaactggagtaaaggtgactcttgctatgatttagcaaagagactggtggcattttgctcctgctctagagatctgtgggactg

SEQ ID NO: 336006 - DNA, 483 bp, Homo sapiens
gcccctgggttgccatgaggatcatgtgaggtgacaggaagaggtttgaggcagcacaaagctctataatcccccttgctcttgttatctgttaaacacactgtttggtgaaatgcacacttaggcaacgaggctcttcggcagagaactgatctctgagtcaggcttcatcaggccctctggttggttcagcaaatggatctaggcactgattccttccacctcctgaacccagacccatctgctcatttgttgataggacacatctacctgagtgtcctcacatacaaggtgcctgaagctgaagctgtcagccatgcacctgcacccaggtggtacacgccctgagctcaccagtctggccagtggcacccatctgcccagtcacccgagccaggaacctggaatcggtcttacccctcccttctcttcacttcccacatccactcaccacggtctgccgctgccagtctcccctctctg

SEQ ID NO: 336007 - DNA, 209 bp, Homo sapiens
taactacattacctttatattaataacagtcagaaaggaaaactatgaacatggccaaacgtatgccctaaactttagaaaagcagatttcaaaaatgtttagggaaaaaaatagatatgctgtatctaaagtaaaagtatgaattccttattcaactctaatctgcttgaaattgtatcaatgactagataaacacaaagcaaagata

SEQ ID NO: 336008 - DNA, 1229 bp, Homo sapiens
atgttccctcagtctaccactgtaaaaacagagtctaatatgggaaaataaatatgaaaatagcatgaaatgctgtttcccagattgcaagataagaccagaacttggtccaagagccagccacccagggagactcctgctttccacagaggagaccaggttcctgtcgtgctggttgttcgtgtcaggcagtcctgcaaactttgagtctgcgcagcgtgccagaatagcttgtgtttcagtcctgtgtcaagaagcaggtgaaaccaaaggttggagaaaagcatcacacgtcgacttacactttctcatttcccacgttccagtctcctgggaagggcactctttcgccacgttttcctgcctcttggcaaatattaactctttgcagatcactaaagcaacagtaaagactttgagaaaatctagacacattattggatcaatgagttatttaacctagtgtctagtgattatctaacctggaaataaattcccaaggaaagtgataataatttcataatcatctgcaatttctggggaacagtggtactgaataataagacatcttttaaaaatatacacaatattaaaaacctgttcttattttactttagatgagggaggaaaatcccccaaatttctaggtactttcatatatatacttgccatgcactaaacactgcattgcttggaaaaatatttcacaccctctttaaaaatgtacaatttaagatggcagttatgcttgtaacagacagcacttcagtaatccaagaagtttcttcatttatacattttatctcaactctttctagcattagtgcacatggtagtttttctaattaaattgtattcaaggtagaaatgatcatgtgagaaagatatatgattgagctactactgtcacctcttacagttactagtgttagctaatagaaactttcatatatacacatagaaaagaattattacattttacattgaaaaatgtaatatatggcccatgtagtgtatagaaaaatctgtagtttattggttcatcaactatgtattgtgcacctacctatgggtgtcaggtacaatgttaggtactgtagaatcaaatgtaaataagagacagtcccagccctcagggagccgagaacctaatagtgaatctgtttgtacagacatcttcatgtttcagaacttttaaaacaaaacaaaataatgtaatctatcatctt

SEQ ID NO: 336009 - DNA, 792 bp, Homo sapiens
tgacacccatcgagacccaagtttcagaatttgctgcagccttgctgccaaatcacagtaaaagctgaaaaggcttttgtggttagttacgtgtgatacaagaaatcgatgtgtctgagagaagtaggatttctctttttgagggggaaaaatacagcaaggggaaatgttttattaacaataaatatgcggcttaccatatctgtagggcacagatttggttagtagtattttgaaggcaggataaaggaagatcctaaaatctctgtgctgtgtagcttccattcgagctgcacatgttaaaaacattctaggatccacacagtttaaacaaggtggctggcttaggaaatgcttctccccattccttggcatccccacaaccctattctcctactttctcttatgtatctggactggcttttaaaagatatttagtgaaatttaattttctagggaaactccactttgtcaaaagtgtagtattcctcaaggatagctttgctggtcggcaaatctcagttgagtgtatttgtggtttaaaaaaaattctttctgaatagaaatacaaagagtgataatgtttaacattttattttttaaaaagctttacgctgtgtaaattgtgggttgacttcatgtttctaaactttgtcttttagaatgactctcttgggtaaattattagcagacactctcgtgttgacatgtccattttcctttccattaagctgtctccattgcagttctgttgatatggctttatatagttttcctgagcttttttttttt

SEQ ID NO: 336010 - DNA, 2099 bp, Homo sapiens
cgacgctccaggccgtcccgcccagcgcagctgcacccaatcacaatgctcagatcgggaggtggagccaatcaggtccaaccaagaggaggggacaccggcactccactagcaggaaaacgggccgagggaccgcaagcagggggtgcctagtcctcgtcccccaaagaccaatcgtaagccagatacaggcgagtgactgtcaagaaggccaattagagcctccgaagggaatctggacctgcctcttctctgagggacggctctacctaccaatagcatgggcgagaaggcggtccctttgctaaggaggaggcgggtgaagagaagctgcccttcttgtggctcggagcttggggttgaagagaagagggggaaaggaaatccgatttccatccagttgttccccccagagctggtggagcatatcatctcattcctcccagtcagagaccttgttgccctcggccagacctgccgctacttccacgaagtgtgcgatggggaaggcgtgtggagacgcatctgtcgcagactcagtccgcgcctccaagatcaggacacgaagggcctgtatttccaggcatttggaggccgccgccgatgtctcagcaagagcgtggcccccttgctagcccacggctaccgccgcttcttgcccaccaaggatcacgtcttcattcttgactacgtggggaccctcttcttcctcaaaaatgccctggtctccaccctcggccagatgcagtggaagcgggcctgtcgctatgttgtgttgtgtcgtggagccaaggattttgcctcggacccaaggtgtgacacagtttaccgtaaatacctctacgtcttggccactcgggagccgcaggaagtggtgggtaccaccagcagccgggcctgtgactgtgttgaggtctatctgcagtctagtgggcagcgggtcttcaagatgacattccaccactcaatgaccttcaagcagatcgtgctggttggtcaggagacccagcgggctctactgctcctcacagaggaaggaaagatctactctttggtagtgaatgagacccagcttgaccagccacgctcctacacggttcagctggccctgaggaaggtgtcccactacctgcctcacctgcgcgtggcctgcatgacttccaaccagagcagcaccctctacgtcacagatcctattctgtgctcttggctacaaccaccttggcctggtggatgaatttggccgaatcttcatgcaaggaaataacagatacgggcagctaggaacaggggacaaaatggaccgaggggaacccacacagggaccctggccgtgtgtccccaggtttgttacctgcagcggcccatcaccctgtggtgcggcctcaaccactccctggtgctgagccagagctcagagttcagcaaggagctgctgggctgcggctgtggggctgggggccgcctcccaggctggcccaaggggagtgcctccttcgtcaagctccaagtcaaggtccctctgtgtgcctgtgccctctgtgccaccagggagtgcctatacatcctgtccagccacgacattgagcagcacgccccctatcgccacctgccagccagcagggtggtggggactcctgagcccagcctgggggccagagcaccccaggaccccggggggatggcccaggcctgcgaggagtacctcagccagatccacagttgccaaacgttgcaggaccgcacggagaagatgaaggagatcgtagggtggatgcccctgatggccgcacagaaggacttcttctgggaggccctggacatgctgcagagggctgaaggaggcgggggtggtgtagggcccccagcccctgagacctaatccccctcatgctagcctagtccctggaggagggagtccggccccaggccagggactaaggagcaatgaccattgtgcacatgcgtgtgggaaggggttgctagggggtggggacggctaaccagggtaagaatgttcagggggctgcccaggaggggcccccaacctgactatcatggacaagagatttgatggatagaataaaaggctgcagcga

SEQ ID NO: 336011 - DNA, 1800 bp, Homo sapiens
cgacgctccaggccgtcccgcccagcgcagctgcacccaatcacaatgctcagatcgggaggtggagccaatcaggtccaaccaagaggaggggacaccggcactccactagcaggaaaacgggccgagggaccgcaagcagggggtgcctagtcctcgtcccccaaagaccaatcgtaagccagatacaggcgagtgactgtcaagaaggccaattagagcctccgaagggaatctggacctgcctcttctctgagggacggctctacctaccaatagcatgggcgagaaggcggtccctttgctaaggaggaggcggacacgaagggcctgtatttccaggcatttggaggccgccgccgatgtctcagcaagagcgtggcccccttgctagcccacggctaccgccgcttcttgcccaccaaggatcacgtcttcattcttgactacgtggggaccctcttcttcctcaaaaatgccctggtctccaccctcggccagatgcagtggaagcgggcctgtcgctatgttgtgttgtgtcgtggagccaaggattttgcctcggacccaaggtgtgacacagtttaccgtaaatacctctacgtcttggccactcgggagccgcaggaagtgaggaaggaaagatctactctttggtagtgaatgagacccagcttgaccagccacgctcctacacggttcagctggccctgaggaaggtgtcccactacctgcctcacctgcgcgtggcctgcatgacttccaaccagagcagcaccctctacgtcacagaccaggggggagtgtattttgaggtgcataccccaggggtgtatcgcgatctctttgggacccttcaagcctttgaccccctggaccagcagatgccgcttgctctctcactgcctgccaagatcctattctgtgctcttggctacaaccaccttggcctggtggatgaatttggccgaatcttcatgcaaggaaataacagatacgggcagctaggaacaggggacaaaatggaccgaggggaacccacacaggtttgttacctgcagcggcccatcaccctgtggtgcggcctcaaccactccctggtgctgagccagagctcagagttcagcaaggagctgctgggctgcggctgtggggctgggggccgcctcccaggctggcccaaggggagtgcctccttcgtcaagctccaagtcaaggtccctctgtgtgcctgtgccctctgtgccaccagggagtgcctatacatcctgtccagccacgacattgagcagcacgccccctatcgccacctgccagccagcagggtggtggggactcctgagcccagcctgggggccagagcaccccaggaccccggggggatggcccaggcctgcgaggagtacctcagccagatccacagttgccaaacgttgcaggaccgcacggagaagatgaaggagatcgtagggtggatgcccctgatggccgcacagaaggacttcttctgggaggccctggacatgctgcagagggctgaaggaggcgggggtggtgtagggcccccagcccctgagacctaatccccctcatgctagcctagtccctggaggagggagtccggccccaggccagggactaaggagcaatgaccattgtgcacatgcgtgtgggaaggggttgctagggggtggggacggctaaccagggtaagaatgttcagggggctgcccaggaggggcccccaacctgactatcatggacaagagatttgatggatagaataaaaggctgcagcga

SEQ ID NO: 336012 - DNA, 260 bp, Homo sapiens
cccaggggtgtatcgcgatctctttgggacccttcaagcctttgaccccctggaccagcagatgccgcttgctctctcactgcctgccaaggtaggctcctggagggacggggcaaaccagaggggtggcgctgtagggattggaaggtctgaagtattataggaatcagattattgatccagaggggcaggggatccccagggagaggtatgccaaaagagatcagctgggggctcggtgcggagggaggctgaggagg

SEQ ID NO: 336013 - DNA, 2240 bp, Homo sapiens
cgacgctccaggccgtcccgcccagcgcagctgcacccaatcacaatgctcagatcgggaggtggagccaatcaggtccaaccaagaggaggggacaccggcactccactagcaggaaaacgggccgagggaccgcaagcagggggtgcctagtcctcgtcccccaaagaccaatcgtaagccagatacaggcgagtgactgtcaagaaggccaattagagcctccgaagggaatctggacctgcctcttctctgagggacggctctacctaccaatagcatgggcgagaaggcggtccctttgctaaggaggaggcgggtgaagagaagctgcccttcttgtggctcggagcttggggttgaagagaagagggggaaaggaaatccgatttccatccagttgttccccccagagctggtggagcatatcatctcattcctcccagtcagagaccttgttgccctcggccagacctgccgctacttccacgaagtgtgcgatggggaaggcgtgtggagacgcatctgtcgcagactcagtccgcgcctccaagatcagggttctggagtccggccctggaagagagctgccattctgaactacacgaagggcctgtatttccaggcatttggaggccgccgccgatgtctcagcaagagcgtggcccccttgctagcccacggctaccgccgcttcttgcccaccaaggatcacgtcttcattcttgactacgtggggaccctcttcttcctcaaaaatgccctggtctccaccctcggccagatgcagtggaagcgggcctgtcgctatgttgtgttgtgtcgtggagccaaggattttgcctcggacccaaggtgtgacacagtttaccgtaaatacctctacgtcttggccactcgggagccgcaggaagtggtgggtaccaccagcagccgggcctgtgactgtgttgaggtctatctgcagtctagtgggcagcgggtcttcaagatgacattccaccactcaatgaccttcaagcagatcgtgctggttggtcaggagacccagcgggctctactgctcctcacagaggaaggaaagatctactctttggtagtgaatgagacccagcttgaccagccacgctcctacacggttcagctggccctgaggaaggtgtcccactacctgcctcacctgcgcgtggcctgcatgacttccaaccagagcagcaccctctacgtcacagaccaggggggagtgtattttgaggtgcataccccaggggtgtatcgcgatctctttgggacccttcaagcctttgaccccctggaccagcagatgccgcttgctctctcactgcctgccaagatcctattctgtgctcttggctacaaccaccttggcctggtggatgaatttggccgaatcttcatgcaaggaaataacagatacgggcagctaggaacaggggacaaaatggaccgaggggaacccacacaggtttgttacctgcagcggcccatcaccctgtggtgcggcctcaaccactccctggtgctgagccagagctcagagttcagcaaggagctgctgggctgcggctgtggggctgggggccgcctcccaggctggcccaaggggagtgcctccttcgtcaagctccaagtcaaggtccctctgtgtgcctgtgccctctgtgccaccagggagtgcctatacatcctgtccagccacgacattgagcagcacgccccctatcgccacctgccagccagcagggtggtggggactcctgagcccagcctgggggccagagcaccccaggaccccggggggatggcccaggcctgcgaggagtacctcagccagatccacagttgccaaacgttgcaggaccgcacggagaagatgaaggagatcgtagggtggatgcccctgatggccgcacagaaggacttcttctgggaggccctggacatgctgcagagggctgaaggaggcgggggtggtgtagggcccccagcccctgagacctaatccccctcatgctagcctagtccctggaggagggagtccggccccaggccagggactaaggagcaatgaccattgtgcacatgcgtgtgggaaggggttgctagggggtggggacggctaaccagggtaagaatgttcagggggctgcccaggaggggcccccaacctgactatcatggacaagagatttgatggatagaataaaaggctgcagcga

SEQ ID NO: 336014 - DNA, 2108 bp, Homo sapiens
ggcctcagaggtcccccaagcctaggctggggacatggtgtgggaaagccagcaggaacgggggggccaagggcctaggagacaggagggcaggagcagggagggggcaatcaggatggtcaggggaagccagagacggaagctgcaaaaattcaccaggctgtgtggacgggaggaggggctccgggtgaagagaagctgcccttcttgtggctcggagcttggggttgaagagaagagggggaaaggaaatccgatttccatccagttgttccccccagagctggtggagcatatcatctcattcctcccagtcagagaccttgttgccctcggccagacctgccgctacttccacgaagtgtgcgatggggaaggcgtgtggagacgcatctgtcgcagactcagtccgcgcctccaagatcagggttctggagtccggccctggaagagagctgccattctgaactacacgaagggcctgtatttccaggcatttggaggccgccgccgatgtctcagcaagagcgtggcccccttgctagcccacggctaccgccgcttcttgcccaccaaggatcacgtcttcattcttgactacgtggggaccctcttcttcctcaaaaatgccctggtctccaccctcggccagatgcagtggaagcgggcctgtcgctatgttgtgttgtgtcgtggagccaaggattttgcctcggacccaaggtgtgacacagtttaccgtaaatacctctacgtcttggccactcgggagccgcaggaagtggtgggtaccaccagcagccgggcctgtgactgtgttgaggtctatctgcagtctagtgggcagcgggtcttcaagatgacattccaccactcaatgaccttcaagcagatcgtgctggttggtcaggagacccagcgggctctactgctcctcacagaggaaggaaagatctactctttggtagtgaatgagacccagcttgaccagccacgctcctacacggttcagctggccctgaggaaggtgtcccactacctgcctcacctgcgcgtggcctgcatgacttccaaccagagcagcaccctctacgtcacagaccaggggggagtgtattttgaggtgcataccccaggggtgtatcgcgatctctttgggacccttcaagcctttgaccccctggaccagcagatgccgcttgctctctcactgcctgccaagatcctattctgtgctcttggctacaaccaccttggcctggtggatgaatttggccgaatcttcatgcaaggaaataacagatacgggcagctaggaacaggggacaaaatggaccgaggggaacccacacaggtttgttacctgcagcggcccatcaccctgtggtgcggcctcaaccactccctggtgctgagccagagctcagagttcagcaaggagctgctgggctgcggctgtggggctgggggccgcctcccaggctggcccaaggggagtgcctccttcgtcaagctccaagtcaaggtccctctgtgtgcctgtgccctctgtgccaccagggagtgcctatacatcctgtccagccacgacattgagcagcacgccccctatcgccacctgccagccagcagggtggtggggactcctgagcccagcctgggggccagagcaccccaggaccccggggggatggcccaggcctgcgaggagtacctcagccagatccacagttgccaaacgttgcaggaccgcacggagaagatgaaggagatcgtagggtggatgcccctgatggccgcacagaaggacttcttctgggaggccctggacatgctgcagagggctgaaggaggcgggggtggtgtagggcccccagcccctgagacctaatccccctcatgctagcctagtccctggaggagggagtccggccccaggccagggactaaggagcaatgaccattgtgcacatgcgtgtgggaaggggttgctagggggtggggacggctaaccagggtaagaatgttcagggggctgcccaggaggggcccccaacctgactatcatggacaagagatttgatggatagaataaaaggctgcagcga

SEQ ID NO: 336015 - DNA, 466 bp, Homo sapiens
gttggaagcagggagcccaacaaaaggttattactgtccaggagagagacaatatgacttgggctatgggaaccgagtgaatgcagtgagaaggagatcagagtcggaaaatgctttggaggatgaacaagtgagatctgctggtgagttagaaatgaagtgcgacagaaagggaggagtcgatgattcatagagcactgactgatctccaatttccaggttacaaagatgtggaatttcacacacaactcaattattatttggagaagaaattaatctttctgtggtaattcagaaggtatataaagaggagttctcctggagttttggagttatcaatcaaacaggggtaattgacaaaatatttaataacctgttaggcacaggcattgaccagtcagaacagaaactagccattatgcaataaaggtgtgcattagctgaagatcagccccgattacaaaca

SEQ ID NO: 336016 - DNA, 268 bp, Homo sapiens
tgagaggagacaatcaaatagggtattcggtgctatgataaaggtgagcacaggttgctgtgacaatagagaacaagggtactcaaattagggtaggctctgttgatggaagtgacacctgagttgagtccctgatatagtttggatatttgtctctgcccaaatctcatgttgaaatgtaatccacaataattggaggtggggcccggtgggaggtatttggatcatggaggcagatccctcatgaatgccttgggccatccacttg

SEQ ID NO: 336017 - DNA, 199 bp, Homo sapiens
ttcacatcacataccagttgaaggcatcacccttctttcttagatgactactgccttctcatatatatgtatttttttttctctttagttccgtgttagtattaatatgtttttctttttctattttttttttagatggagtgtcgctctgtcacccaggttggagtgcagtggcgtgatgttggctcactgcatcctc

SEQ ID NO: 336018 - DNA, 230 bp, Homo sapiens
ccgagattgtaccactgcattccatcctaggtgatagagccagaccttgtctaacaaacaaaatgtggattatggagcgagtataagaaatgtatcatctatttattttccagtgtaaaatcaccttattctacagagaagattccagtatgttgaaccaaagcagagtcagtgatgggtatcaagccctattctattgagagcagagttgagtcaggatggccactggg

SEQ ID NO: 336019 - DNA, 938 bp, Homo sapiens
tcttcattcttatgagctcccagagaatgctttaaagcctattccaaagctgcttctgcttcattctaaccacatacccagcactattttaagcttagggaatttaccaatactgtctagcctctcctaatctacaccgtacactgataagtacaaaacattaggtgaccgtggctgtcctggaaacctgagaagcacattaccccatagcctgatgcctcattcattcagcaggtgtgagtgaggccagttctgttccaagtgttccctggtacactcgcaggggcccaggccacgtgcagaccacagtgagaatgaccccagccagatatttaaaaggaacacaggctactgttagaaggaaagccaatcccaggacagggtcaaagtcctgaaacgttgtatatctgttgacctagaaattattctaagaatttatctaaagaaatgttcatgaaaaaagagcagatttagttacaaggatgttaatagtagctttacttataaaagcaaaatatttgaaacaacccgaatgatgctaaatataccaaggtacagccacatgatgagattcaatgacatcttgaagtgcagtaagggttttgggatggggaaggtttgcttttagaagttatggtaaggaaggccactactttagaaatacaaggggattaaataagcacctttttggtgacaaaaagaaagataccaatccagatatgaagcctctcctcttcaaggcaaagtagctcactgtcctgcctctgtccctttactgtacctcacagaaacgagttataataatgatgatgatggcaatacctgtgccattaccacccagcatttactgagcactgactctgctcctggcaacatttgaagggccttaatcctcagaacaaccccatgaaatagaaagcatcaaccctattttgcag

SEQ ID NO: 336020 - DNA, 158 bp, Homo sapiens
tgaggtgaacgtgattgtgctctgatcattcagaaggcacatgactcttttgtagtgcttcagagccatctttccattatagtactataaaataaatcagactggtttatcttttgagttacttggtgtttgaataacaagattttttttttgaataa

SEQ ID NO: 336021 - DNA, 457 bp, Homo sapiens
ccccactacaaaataaagctaaggagtatctagtgtgtcaaatagagactgtttgatccagtcattaggacttttacagctccttttaaaacaacactgagtcatggtagaaagataacgattcccagtgtctttatgtaagggatatttgaataaaatatgccaatgataactgctattatttaatgataactgtctaaatttgattgtttcaattggaaggttaaatattttctagtgggtattccctgttgcataaaataccacagcaatagcaaatgctcatttgaaatatgcttgttttattagcatgcagttactagttacaaatttttgcttataagaaaagctataaatatacgtgacaataatctgtattttcttagcagatatgtgcaaaagaaatgtaactatgggagagttttgttttcttgcgttttcttgttctgtttttata

SEQ ID NO: 336022 - DNA, 714 bp, Homo sapiens
attttaaatacttctggactcccccgtgaaataagacagcatggggtatgtctcaaaggaagtgatttcctggcggtcatctccaagtccaaagagcagattctgcccaaggaattgacacttcataaagtttactgaaaaatcagcaaatgaaccctgattcctggcaaacctccattaattagcaataagaaatccctctattttccccaccaacagagaggatgagcagtgggattcgtggccagtacttcctgcttctttgctaagatctagatgcactgaggactcaggtccaaagaccttcattccattaggaaaaacagcagctgagttaggcctcccttcccccagcctagggctgtgagtgaacttcccctcctctagctccaccacctgtctctggaccaaatacagatcacagagaggcatttcctgagctctgcaagcttgctgaccccagaggttaatcctacccctctacggccaggccaccagacgagagcctctttcctcccaaccaaaggaaccacagaatcctagaatttcagggcttgaagggacctgagaagcccgcacgttcaaggctctgaaatgtccagggattatcccaaggtcacaaagcagaaatggagaggccaggattcagagctaggtcctctgaccctcaccctaatgctctttactctacccaagacaggacctccttgccat

SEQ ID NO: 336023 - DNA, 189 bp, Homo sapiens
tcaacatcactaatcattatggagatgcaaataaaaatctttatgatgtatcacttcacatctgttggctataataacaaaagataaaaactggttagaatgtaaagaaaagggaatctttgtacatggttagtagttacataaattgatgtagtctcttcagaaaatacaatagtatggagcttcctc

SEQ ID NO: 336024 - DNA, 453 bp, Homo sapiens
tggagtgccactgtggatcatgtcatgccttcatttgcttaattaattaatcaagctaggcaaatatttgtgtgcctattgttagccagggtctgggtgtaaaataatgtccagaacccatctgatctctgatgtcatgaaacatcatttattagagagagataggtaataaacaagtaaacaatgaattaaattgtagttgtaacagggtgatgaaggaaatgtacaaggttatgtggtaaggaaaagcaaaggggtggcgacagaagatgtttctgagtgtgggggttgtgttgtgttgtgagtagagtgagaggtctgggcagaagaaagcactccgggcacatggaccagcatgtgcaaaagccctcaagtgagggcgcagacacctcagggggttctagtaactgtacataggccagcgtgactggaaccagtggggtttggcatttt

SEQ ID NO: 336025 - DNA, 132 bp, Homo sapiens
gaaaaggtacagattttaggggggagaaaacaaagtttcagacatattgagtcaggtactggaaagacatccatgtgttactatgaggagggaactattcctatcctcccctcttacacaccaggaaacctg

SEQ ID NO: 336026 - DNA, 595 bp, Homo sapiens
gactatgcatcttcaagactcagctacacatcatgttgtccaaaaacccttactaatccctgaaagggaatatattataaatctccacttctttaagatcctaggaacaggatgtgtttcctagttcaaaaattttcagattttgaaaaggtaatagcgtgtatttaccaaatactacctagcactatcctaggggtgtctggggcaagatgctataatcaaacacataaacatttctcccacaaaacacaaaaatatgagcacttttaagatgaaattaagactacaaacagttttacagcactgtatgtcagattttgctgccaaatgaattcacattagttcatattttaatgctaaataaactacaaaaaaatcctttgcatatctgaacctgttggatttcagagtggcaattaagagactgtggacttggtcaacttcccttaataaaatgaaatccagaaggtccagggtccatacataaatggagacttccagtgaacaggagcaaccaataacaacctaaacttcctgcactggggtttcattttcctcataggattctcccacttggtaacagacccgaggtggg

SEQ ID NO: 336027 - DNA, 338 bp, Homo sapiens
aatctctggggtttcctgtaatctctgtgacaattgcttctctttagtaagtacaacaaaagctgaacctagaatttcaaggggagagggaaaaatgatttggtttttgaaactgacttggtttttcatttttaaaaaatcaagacactgcaatgccagtttagtttttaattcaaaacttaagagagaaatggtagcactcctcctgtgcatggctgagtcagcacaaactgttgcgcagtatcagacatgtggctccactgcggggaaccccgcatggcctggcatttgctctaagggctgctgggagtcgttgccacagcaaccaatggggtgag

SEQ ID NO: 336028 - DNA, 1123 bp, Homo sapiens
cctgcgggcagctggccgcattctcaggcagacacggagcccccaggggcatctctgttttctctccccaccctgctggctcagcctgagcaggactaggactcacttaaggaatgagggccgcctggcagctccacccggcccagccctgctggagggaatcgtgatgaagaacagggcagctgcactgagggtgatggcgtgctgccctcagaattgcttttctcggctctaattttcctgatgcgagaaaagccagtaaccccggggtacatccaatagtcaggacatggtgctgattggacttgaaaagtccgtccagccagctgtgcttctgattatccctattcttaagtatctgtttgggctggggctgtcactccactgatgcccccccagtttacaaggatggtccttggcctgggtggcagtcagatggtcagatgtgcggctcagctgcaggggccactgaattgtgtcgggtcatggagaggagaggggcacccagcaaaaaccagctgcaggccacggccctccggggcttctcagccctggcagctctgggcacgcttaccactgcatgcgagaccaccttccttggcctggattcctgggggaggtcctcgcacatgaccttgtctggtagctgcagtttgtccctcgttgtgccacactttgcaccaccaccttcaacagctacctattgaggccccatctaggtgctggtgccatcatggttctgtcttgacatctgggacagcaggctttcctggagcctcatgtacctgccttcccacacaagctcagaggagcagtttagcatttctcagtgactcggggtcaccctgggaacagtcatctttgtactttagaaaatggcagctgggcacggtggctcacgcctgtaatcccagcactttgggaggccaaggtaggtggatcacttgaggtcaggagttcgagaccagccaggccaacatggtgaaaccctgtctctactaaaatacaaaaaattagccaggtttggtggtgcacacctgaaatcccagctacttgagaggctgagacaggagaattgctttaacccgggagctggaggttgcagtgagctgagatagtgcca

SEQ ID NO: 336029 - DNA, 190 bp, Homo sapiens
ggatggcatggaaaggaaacagcactaaaaagtattttttatggtatttgaaaaatgcagggagaagactttagagttattttgaaattatgctttggttgttggaaattttttgtaaaccttaatattgctgtaagttggatcacctagattctggctctgatagggttacaaaaatagtgctacaagt

SEQ ID NO: 336030 - DNA, 368 bp, Homo sapiens
acaatctcttccagaatatggaagagggaggcaatacttcccaactcactgtattaccctaacactaaaaccaggccgggtgcagtggctcaccgcctgtaatcccagcattttgggaggccaaggtgggtggatcacttaaggtcaggatgaataaatgcacatgtgagtaaggaatgaagggagcgaaagaactggattagaagctgcttggggcagagatgtgccttacaggcttcatgaagagtgggtgatgaaaaaggtaaatggagcatctaagaggaagctttgatagaagggagaatgcaagagaggttggaaattggaatccattggaattgggagcctggggagatgccaggacaggc

SEQ ID NO: 336031 - DNA, 222 bp, Homo sapiens
ctctaggaactaaccctgtgaatcatagttctgtggatgaaatattttctcgccaactggatttctttgtagacaacacagctaaagtagtgcccatctgctcttaggaaacaattgatccaggctactcaaaaaggactttgcatctctgcatttcagtatttgtggtcaggatttaattaatttggttgatttagaaagcagctctgcactttccttcca

SEQ ID NO: 336032 - DNA, 522 bp, Homo sapiens
ccggcctctgcccctggccatacaccatgtcatagttatcccctccaccacaccagccatgctgagcaactgtgctctatgtgccagtgctcaaggtggttctccagctgctggctcctggtttgcccttttccattgcaattaactaggctctgcccacttctgacttgaaactggccaaaatgcagggaaggaagatacccccaaaacctcagtaaatcttctcaaacatcatcctgttcaacagtcacaaacctggtgtatacatagccaaagtccagtaattctcctaattttgattccatgctggtgttattaaaggccctgaggataaacttactactcaaaagtcaaatccaacagctttgtcatcacaaaaattgaaagaaagaaagccaacaagtatctgtggctctttttttcagggaagtattctgttggcatttaaaaaaatgttcattttgaatggtttcaaatgtcgactcctatctatggctcttttgaaaactacacatggccggg

SEQ ID NO: 336033 - DNA, 434 bp, Homo sapiens
ccggcctctgcccctggccatacaccatgtcatagttatcccctccaccacaccagccatgctgagcaactgtgctctatgtgccagtgctcaaggtggttctccagctgctggctcctggtttgcccttttccattgcaattaactaggctctgcccacttctgacttgaaactggccaaaatgcagggaaggaagatacccccaaaacctcagtaaatcttctcaaacatcatcctgttcaacagtcacaaacctggtgtatacatagccaaagtccagtaattctcctaattttgattccatgctggtgttattaaaggccctgaggataaacttactactcaaaagtcaaatccaacagaatacttccctgaacaaaaagagccacagatacttgttggctttctttctttcaatttttgtgatgacaaa

SEQ ID NO: 336034 - DNA, 197 bp, Homo sapiens
atccaactgggttagtattgaactagcgtttaaaaagggaaaaagaacagtgaattttaaagttggtatgtaacttaaaatgtgaccccaaatcatgatccctgcttgaagaattggtcaaaataaataaaaatggatcacatgctctttaatgtcactgtcttgtctgaaatcaaaccttcaggaatatttatctg

SEQ ID NO: 336035 - DNA, 175 bp, Homo sapiens
gcaggagaatagcttgaacccgggaggcggaggttgcagtgagccgagaccacgaaattccatctcaaaataaataaataaataaatattgaaccattaagcgccttacctagttaaaattaattgcatttaaaaaaagtgtgaaataatgtgtgtttttaaaaaaaaccccatc

SEQ ID NO: 336036 - DNA, 102 bp, Homo sapiens
ggagctccagcggtgaccacatgtataaatgcttggattatatagtgaatcaaggaaggggacaaaaagaaagagtattttaaaaagtattcttaaaactgg

SEQ ID NO: 336037 - DNA, 847 bp, Homo sapiens
cagagtaagaccccatatcaaaaaaaaaaaaaaaatggaaacggcaataagggagccagagtagaagcaagtagactaattaggcagcaacaatcctggcgaaaaatggtggtggctcagaccaaggtggtagcagtagtgatggtaaagagtggtcaaattttaaatattttgaaggtaaagcaagtaagatttcctgacagattgtatgtggagaaagaggactttaggacaatgccaaagcctgagcagctggaagaatgaagttgctttaactgagatggtaggtagaccagctttgggggaaatactaggagtacatttttaatatgttaattggagatgtctgtgatatgtccaggtttgagtagacagttggatacttccctggagatcagggaggaggtttggggaggagagttttcagcatacatctggtatctaaagccaacagacaggatgcgatcaccatagaaagattatagatagagaagctgcccctttgggccctctttaagaagtgaggacccccaactggctgctctgaaaagccatctttgcattgttcctggttcggtgtcctgctcaccacagccacctccgccatgcacttcctctgctgcctcagagtctggcagcttaatcgacatagtccccaaactctcactttcttcttaatcccttgcatcggatcaccgctgtgccccaccatgtcagaggcagttgtggacacaagctccgtgatcaccaccaaggacttcaaggagaagttgtggaggaggcagaaagtggaagagacgcccatgctaacgggaacgctaatgaggaaaatggggagcaggaggct

SEQ ID NO: 336038 - DNA, 252 bp, Homo sapiens
ccctggcaaggggactcacaccctgcaacagcaactctggtccgtgacccccctggagagctatctgtggatcccaagccattcccagaccacatagctggtagctggcacagggggaagcatgccagggtccagtgaccccagacagtcacttaggatgtgatatggtttggctgtgtccccatccaaatctcaacttgaattgtatctcccagaattcccacgtgttgtgggagggacccaggggtgagg

SEQ ID NO: 336039 - DNA, 484 bp, Homo sapiens
cgggggagtgtcgggaccagctaggggagttgtcagaaagttcgtgcgggagtggctgcaggtggcgtcgtgggagtctgtaggagggtgtacgggagttgtgtcgaggggttgctgccacaggtcactgagggtagaactgattgttagtgtgatgacgcctggagttttccctgtcggagagatcgggggtggccgggtcggttggagttcgtgggtgggcgggtacagaagttgggctagttgtgtgggtcacagttgttcgtgctaggcctggggtctgtaagctgtgcgtgtgcgtgctgtatgcgtcggtgaaaaccctagggtttgtaaggcttgagcgatgggtccgggccagttatcctagcgctgttggttaattgcctggcgtgagtgtgtctgggtgcggtgtggggtgcatatgtgggaagcctcccagactacagatggccctgtgtggcggaacaccgaggtggagaag

SEQ ID NO: 336040 - DNA, 202 bp, Homo sapiens
catcctccagacctcagattgatagatcccatggtagcttgcaccatgagcctggaaaagccccagacactcaacaccagcccatggaagccactgcaggagctgtaccctgcatagccacaagggtacagctgtccaaggccttaggagccaactcctgccttcagcgtgccctgagtgtgtgacacaaagtcaaaagaga

SEQ ID NO: 336041 - DNA, 502 bp, Homo sapiens
ctgcagcgggaggccccacttgcttctggaaaccattcaggtacacgggtgtcctcagttgccagcccgatggaccacggaagaacacttcatccctgccactgccgtggtgctgactttttgccatttcttaggaaccttgggatgctgccttcataccatgcctactgggaggaaggcctcgagttctatatcagacccctggggtttagtgcattcttcttgcagaccaggttcagaaggtctcctaatgtcacacactcacaaataacttctcatcaggcgaagtcggcctcatcatgggcagaggggcttgggaggtccaattactgggcaaggagggaaggggattttcaggtattaagaatgcaaagtggccaggcgtggtggctcacaggctaccctcagattcttagagagaagctccccgcccccagacacttggtgggtgatgaactagggtaaccatgccttccattatgggggtccttggaggggccag

SEQ ID NO: 336042 - DNA, 414 bp, Homo sapiens
tgatccccgaggtcaggagatcgagaccatcctgactaacacggtgaagccccgtctctactaaaaatacaaaaaaattagctgggcgtggtggcgggcacctgtagtcccagctactcgggaggctgaggcaggagaatggcgtgaacccgggaggcggagcttgcagggagccgagatcacgccactatactccagcctgggtgacagagcgagactctctcaaaaaaacaaacaaacaaacaaacaaacaaaaacaaacaaaaaacaacaacgtgatccccacccccatttagtgtacattggtttggtagtcttgactgtagggccaaagactgtcctttgaaatgtaggtatgtggggctgggtgcggtggctcatgcctgttatcccagcactttgggaggccgaggc

SEQ ID NO: 336043 - DNA, 433 bp, Homo sapiens
tatttcatttttttactgcaaaaacttagtgaaacttaccaagcttatcccattttgaaataatttttgtaaagtcttttaagtattatcaaattaatatgtaggtattgtaatattatacacagtaatggcctgactctttagtgagggacagacagaattacaggttatgacagcttaaagcaaaccaagcttttcatgttgtgcaggtgacctcttttgctttcatgattgactgaatctactgaagacagaaaccagcttcaattttggtaaccctgtatgtgttactgaactccaaaactcagcttcaccacctgtataataaggctagttattcctacctcattgagttgttgtgattacatgtttaaaacatttggcacaatgcttggtacataataaaaactcaataaattatatgtaaaagtgt

SEQ ID NO: 336044 - DNA, 185 bp, Homo sapiens
tcataatagataaatgtaagtctttttttaagcattcaaacatgtttgaacttaattatattttcttaagcattttgaattatgattgtaagtctaacgtaccattgttaaatatattggattctcttaaatgtttcaaatggcttagtaacagcagaacattataatgattataaaacaacccc

SEQ ID NO: 336045 - DNA, 160 bp, Homo sapiens
cactgattttggccctaagtagggtttttagatattaagaagcatagttttggtgaatggatttaattttctgtcgtttaagttagaaaaacattcgtttgcattaagttaaaaaattttctcttatagtattggatagcaatagcctaaaaatgcatag

SEQ ID NO: 336046 - DNA, 247 bp, Homo sapiens
gtggtggacttttggttgtttccatggagctgctgctgtccagggcatcaccatgattgaagttcttcccgtcttccagtgggctgcagtaggtggcaatctcagcctccagcttgaccttgatgttcagcagggcttcgtactcctgggcctggcgctgtccctctgcccgagtctgtgccagctctgactccaggtgcagcaggatggcattgagctgccccatctgcagggcatagcagacctc

SEQ ID NO: 336047 - DNA, 449 bp, Homo sapiens
aaagtaacagaaggcagtcacacagacactagactaactaaacaagttatgaataaatgagagtcactgaagacctcattaattggatttagctggattttaaggactgaacagaataggaatagtgtgaaaggaaggagaatacaatctaggcaaagagttaataagcaacagccaaagatcagaaataaaccaagtcatgaggggaatttttgtagaaaattcattcttcaatttgtataatgcctaggttttaggaatacaaaaatataaggtaccatagcacgtcttcaacgtgctcacaaagagctggcagcagggactcatgactcccaagactttgaaaggctgaagtgggaggatcgcttgagcctaggaattagaggctacagtgagccatgatcatgccactgtattccagcctgggtgacaaagtgagaccctgtctc

SEQ ID NO: 336048 - DNA, 824 bp, Homo sapiens
agcacgccctctatattctccactgtgcgtcactggtttctaacctcctgacttccctgccagcaaaaagatgaggtgggtgcaaaggaaactggcaacggggattttcctgggggcttcttctaaattactgctgaaaagataggtctggccccaagctacaaccagtggaggctaccatctggacttgatccggagcttaacccactctgtagtccaattctcatcaaaagtctgggctgtagtgaaggtggtctggggagcagcccactgggagccaccagaatctggcagtcactgcaagtccctgagggtcagggaaatctcaggtctagtccctgtatggtcactaactagctatgtgacgtgtgcaagcgataacatcattctgggccccagctgcaccctctgtacaaaggggagaataccccataaggttactatgaggattaaataggaaaatcaaaaaataaaaataaaaaataaaaaaaattaaaaataggaaaatcagtatagtatcaagccctatgtcaagtctgttgagcattgtgtctggcacacagtaagagttacataaatgttagctgcattctcatcaccaccatcacatgtcaggtcctttcatccttgacaagagcaaaacagaaccttaaatttgtgtctcttgcctgtgatcacagagccaaggagtgggtctcaagtcaaggtctcgtggtagctcctaaggaaaggaagcaaatggggtctggtcccttcagtcatatgatttctactctgttggctcacgtaagaatggcaagtcactagttttgaggactgaacct

SEQ ID NO: 336049 - DNA, 413 bp, Homo sapiens
agcacgccctctatattctccactgtgcgtcactggtttctaacctcctgacttccctgccagcaaaaagatgaggtgggtgcaaaggaaactggcaacggggattttcctgggggcttcttctaaattactgctgaaaagataggtctggccccaagctacaaccagtggaggctaccatctggacttgatccggagcttaacccactctgtagtccaattctcatcaaaagtctgggctgtagtgaaggtggtctggggagcagcccactgggagccaccagacaggttcagtcctcaaaactagtgacttgccattcttacgtgagccaacagagtagaatcatatgactgaagggaccagaccccattggcttcctttccttaggagctaccacgagacctgggccgaa

SEQ ID NO: 336050 - DNA, 112 bp, Homo sapiens
ccagttaggaggacatggaatgctttaggcagaggcaccaagggcctcaaatactgcaactgactgctcaggcagctctcagatgacactgggcaatcgagagaaattgacc

SEQ ID NO: 336051 - DNA, 254 bp, Homo sapiens
ctgggaggatacagatgaagaaaagactggaggcactcaacttcaaggaacaaattgcctgagtgtgtctggcccactctaccctcataaggtagtcttcttggctgggcgcggtggctcacgcctgtaatcctagcacttttgaagaccgaggtgggtgggtcacctgaggtcaggagttcaagaccggcctgaccaacatggtgaaaccccatctgtattaaaatataaaaattagctgggcatggtggcag

SEQ ID NO: 336052 - DNA, 638 bp, Homo sapiens
cattttaattgcatctcaattaaacacgataaaaaaatcactcctatttgattttggaaagagagagatagaaactgacagaatgtctgcctaagaatgccttcatgcttctccaatgggagcaactgtacagctatggatttacagaaatatctagtgcctaggtataattgtatcttttcttcccataaaattttaacaatatactcatccagtgcccccttccaattttcagtttccctaattttttttaaaacagcctaacagtccacagtcaaaactgaacctcataaaggcatgtttaagtacatcaaatggtgagacgaaaatataaatttttatataaaccagaatgagtcttaagagggaaattaagatctaactttgctttttctgtcttctgaaaatatacgttgatatcctatagtcctttctaccaaccacatttcccctacctccttcccatagttaattaacacctactaatctctcgtctctcaaattaaattttcttttctcagaaattcttctgagtttctattactccaatccacccccacaactcacacacaattatagtcttgagctgcttaacaacaaggatatggtctgagaaatatgccaataggtgtgttgtt

SEQ ID NO: 336053 - DNA, 431 bp, Homo sapiens
cattttaattgcatctcaattaaacacgataaaaaaatcactcctatttgattttggaaagagagagatagaaactgacagaatgtctgcctaagaatgccttcatgcttctccaatgggagcaactgtacagctatggatttacagaaatatctagtgcctaggtataattgtatcttttcttcccataaaattttaacaatatactcatccagtgcccccttccaattttcagtttccctaattttttttaaaacagcctaacagtccacagtcaaaactgaacctcataaaggcatgtttaagtacatcaaatggtgagacgaaaatataaatttttatataaaccagaatgagtcttaagatattaatatcctatagtcctttctacaattccatatctctcgtctcatcaaataaattttcttttt

SEQ ID NO: 336054 - DNA, 327 bp, Homo sapiens
tggctacagagtccagctcctaagcttcacgtgtgccccatgctcagaaatttacttcttgtatcaagaaggtatagacctccagagcccataggtagccacggctatggactgttggcctctaggttaagaaaccctgaatttgaagcttccagcttcttctactgtctccatcattctgctttgatttcatcacaatctacattaatcacagcaaggatagttctagaaacttcattcaccacatagacctttcctgtctttgctcttagcccatctgtcctagttagttcaggctgctgtaacaaaataacataaactggtggc

SEQ ID NO: 336055 - DNA, 537 bp, Homo sapiens
gggactgcagggagaaagatcttataatgcctgcccagggctttaggctgtgtcagctttctgcatctcttctccagctggagctggcagggtcgaataaatcactgcagagtagttatgagcccagctcaccagggacttctttgaggcacacctgtgacgtcatcctgttatcactgtctgttccacataacctcttttcacctctcccctgagagagggtgatgcccagaactcatgtcagggcaatgagcagaggaaaatgtttcgtaagtattatttttcagatgcctgctagggatacagttgtaggccattgacacattcttcaatattcctcattggaagagaaaacctgtgtttgcaaacatggcctgaataccccttgtggataaaacttctttttaaacttggaaagaaagtcttgaaactcctaagtggtctctttttgtaccccttacctctctcgttccttcccaaacatgcacacacagacacattacatacagagtctgctgtgttcaaaatccttcactg

SEQ ID NO: 336056 - DNA, 2152 bp, Homo sapiens
tccctaaaaacagttgttttttttctgaagtgaaatacaggtggagactaacacatcccctctgcttgtcataagctcattatctggacctcaggtccttttgagagagcccaccaaggccttgggctctgagcccaggtgaccagcagacatctcaggtgtgtcagggcctgagagcactggacatggacatggtggaaggactgtccagccagtgtcctggaaatatttgaacacagtggggagacctagcagggttttcccttgaagtagttgactgaaaatctgcattccttttggacacaggtggaagataatgaagtaaaattgtctgagaaaacccagcaagcagtgaggggggatgagtctttcctgggcacttatctaacaggaggagaaggagcatatctttattccagcaatctacagtcctggcctgaggaagggaatgttcatttcttctctagtggccttctgttttctcactgtcgtcatggaagtatcatcatttccaaggatcacatgaattccatttccttctatgatggggattccaccagtactgttgctgctcttctcatagacttcaaaagctcattgcttcctcacctcccagttcatttccatggatcaagcaattttctgatgattgcccttttccccaaatcgaagatataccaagcattttactcagaggtcttctccctctggaaacagcaggataactcagggatctctttaaaagtgatccaggaagatggattatctgtggaacaaaagagattgtaagtggctgcttcagtatttgtgcttgcttccctaggctttgtgggtgtgctctctctgcaggatgcctcgcattatgtaacacaggggtcttggcttctgaaagggtcaacacagacatttcaatgctgccaacttgcaggtagccggtgcccttgggggaatagaaggcaagagagggccatgtgcagtgcctcacacttgtaatcccaacactttgggaggctgaggcaggaggatgaattgagcacaagaattagagactagcctgcctgggcaacatagtgagaccccgtccctacaaaaaataaaaaattagctgggtatggtggcacatgcctgtagtctcagctagtcaggaggccggggtggaagggttacttgagcccaggaattcaaggttgcagtgagccgtgaccatgccattgcacttcagcctgagtgatgaaacaagaccctttctcaaaaaaaaaaacgaaaaatgtccccactgccaggagccagtgtggctgtgaggggccacgtctcacagccctgacccgggccaagcatggtgttgggcgccgggcccgtctcacctgtcttggggggcgcccagtgtcttactctgtcaccccgggtagagtgcagtggtgcggtcctggctcactgcagccttgacctcctaggctcaggttatcctcccgcttagcaggtgggactacagaggttgcagaacttgaagctaatttaccttgtacatgtaaagtgcattttcctgatccaaacaagcttcactgttctcagctaacagtaactccagatgagggttactaccagggtggaaaatttcagcttgaaaccgaagttcccgatgtgtacaacatggtgcctcccaaagtgaaatgcctgaccaagatctggcaccccaacatcacagagacaggggaaatatgtctgagtttactgagagaacattcaattgacggcactggctgggctcccatgagaacattaaaggatgtcgtttggggattaaactctttgtttactgatttttgaattttgatgatccactgaatattgaagctgcagaacatcatttgcaggacaaggaggacttccagaataaagtggacaactacatcacgcgttatgccagataataaaaggggacggttgcaggcccatggactgtgttacagtttgtctctaatgtgaaacagcaggaggtagccccacctcccatcctcacgctccctctcagtcccctggattgccccagtcctgtgaccatgttgccctgaagaagaccatcttcgtgactgctcattgtagatggggaattcaacataaatacagcaagaaaatgtgtttgggcttcttt

SEQ ID NO: 336057 - DNA, 1476 bp, Homo sapiens
ccatgtatgcacatgagctcgaattcccgggctcgggtgatcctcctgcctcggcctcccaaagtgctggaattaaggtattagccaccacacccagcctcttgtttatttagatctgctattgactctttttttgttcaaatttaacctcggttttttccggatcctttctcatcctgcctttcagggagcccttgcccacttcttgggtctccagtcactcctagccctcatctccttagcatgtaacactttttcccattctcatctgtgtgaccttcgtgcaacactgctgtactgttttttttgtctgttttgttttgtttttgagacagggtcttgctctgttgcccaggctggagtgcagtagtgcaatcctaggtcactgcccaccccagcctcccaagtaactgggactacaggaacacaccatcacacccagctaatttttttgttgtactgttggctgtgccctcctcccttggcctctgaggcctctgctgagagccccccacttctaccaagggggtttctttgcttttcctcaaccacctcttccataacagctattccagcaaccaccagggactatgtggatgtctcacgctcagggtcttagagactttcaaatgccacaagtgcagagtcaaactcttcctcttctcccacctataaaccttttttttctcttgtgtttcccttctgggataatagtgtccacctgatcacccagatcagccaagccagaaacttattttgttcctctctgtctctctctcttactccatcctttcttttcctttttaaaaaacaaaacaaaatgggatctccctctgtcacccaggctggagtacagtggcgcaatctcagctcactgcagccttgaattcctgggctcaagtgctcctcctgcctcagcctcctgagtagctgggaccacaagcatgagccactgtgcccacctactccatcctttctaagctgccaccagtcacatcagttctgtctcttgcattttctcatgaatctatcccaaccatctgcattgtcacagtcttagcatagctgtatcctttcaaggcaggctctcagggactaatgtgtattctccttacagactctgagaggaccatggaggtctgctacaacacactggccaactccttgagcatcatgccagttttggaaggacccacaccaccaccagactccggctgctccctgaaggaagacagcatcaaggactggctgcggcagtcagctaagcagaagcctcagaggaaagccctgaagaccagggggatgctgacgcaacaggagatcaggagcatccacgtgagtgccttgccctggcttctcccctcggtggcccagggctgtcctcggcttgcctagctctgtattttggattctctgagtgaggagctgtttgtaggacatgctggaggtcttgcttctcccaggccacagagggaa

SEQ ID NO: 336058 - DNA, 741 bp, Homo sapiens
tgggattacaggcatgagccactgtgcctagtcagcataaagcaatttgagggaatatacggaaacataaggatactttccttatagcccaagggtgtctctgatcagggagcaatttcagggaagcctgggtgatcctaaagtcacctcccagttcaaagatgtatttaggataactccagttttccctagaaactcttcagtactcttttgccatgttcctttaggcagtatttgtggtctcattcttatggacttctctgaaagttttgggctggtaactgatctaactggtttctcattcaatgcaggcttgtatggccgtctatgacattcctgacttactgggaggcaatggttgtttaggatctgtggttttctctgaatcatttttgacttctcagatcttagttaaagaaaagggtaagtatatgtgatctttagaaagcaaaccttaagcctttttttttttttttggcaaaataaactataaactaaggcaaaaggccaacaataaactggtaaaaatattagaactgatgatcacagcactgcactccagcctcagtgacacagtgagaccccgtctcaaaaaaaaaaaaaaagagaaacattaaagatgaacaaagggtgtataacctaatttatgaagaactcttccaaaattaataagaaaagataagctacccaatagtaaaatgagcaaaaaaaatgaacaggcacttcacagacgtggaaaac

SEQ ID NO: 336059 - DNA, 209 bp, Homo sapiens
gctggtagggaattaactggcatgtgtgtggtgttcctgcagatggcactgttaccacagaaaccagctccgtagtcctgactgctgctgtacccagattctgctcctggctggttagtgtcattcatcaggtggaagtggacctacgtgtggagaaatcagggtgaacacttgaggaagagcctctttgttgggcccctggtgggatg

SEQ ID NO: 336060 - DNA, 5768 bp, Homo sapiens
tgggattacaggcatgagccactgtgcctagtcagcataaagcaatttgagggaatatacggaaacataaggatactttccttatagcccaagggtgtctctgatcagggagcaatttcagggaagcctgggtgatcctaaagtcacctcccagttcaaagatgtatttaggataactccagttttccctagaaactcttcagtactcttttgccatgttcctttaggcagtatttgtggtctcattcttatggacttctctgaaagttttgggctggtaactgatctaactggtttctcattcaatgcaggcttgtatggccgtctatgacattcctgacttactgggaggcaatggttgtttaggatctgtggttttctctgaatcatttttgacttctcagatcttagttaaagaaaaggatggcactgttaccacagaaaccagctccgtagtcctgactgctgctgtacccagattctgctcctggctggtggaagataatgaagtaaaattgtctgagaaaacccagcaagcagtgaggggggatgagtctttcctgggcacttatctaacaggaggagaaggagcatatctttattccagcaatctacagtcctggcctgaggaagggaatgttcatttcttctctagtggccttctgttttctcactgtcgtcatggaagtatcatcatttccaaggatcacatgaattccatttccttctatgatggggattccaccagtactgttgctgctcttctcatagacttcaaaagctcattgcttcctcacctcccagttcatttccatggatcaagcaattttctgatgattgcccttttccccaaatcgaagatataccaagcattttactcagaggtcttctccctctggaaacagcaggataactcagggatctctttaaaagtgatccaggaagatggattatctgtggaacaaaagagattgcactccagtgcacagaagctcttcagtgccctgagccagcctgctggggagaaacggagttccctaaagttactctcagccaaactcccagagctggactggtttctccagcatttcgccatcagcagcattagccaggagcctgtgatgcggacccatcttcctgtgctgctgcagcaagctgaaatcaacactactcacagaatagaaagtgacaaggtaattatcagcattgtaaccggcctcccaggctgtcacgctagcgagctctgtgcttttctggtcactctgcataaggaatgtggcagatggatggtgtatcgccaaatcatggacagctctgaatgttttcatgctgcacacttccagagatacctttccagtgccctagaggcccagcagaaccgctctgcgcgccagtcagcctacatccgcaagaagaccagactgctggtggtgttacaaggctacacagatgttattgatgttgtccaggccctgcagacccacccagactcaaatgtcaaggcctccttcaccattggtgccatcacagcatgtgtggagcccatgagctgctacatggagcacagatttctctttcctaaatgtcttgaccagtgttcacaaggcctggtgagtaacgtggtattcaccagtcacaccacggagcagcggcaccctctccttgttcagctgcagagcctcatcagggctgccaatcctgctgcagccttcattcttgcagaaaatgggattgtcaccaggaatgaagacattgagctgattctctcagaaaacagtttttcaagtcctgagatgctacgatctcgatatttaatgtatcctggctggtatgaaggtaaattgaatgctggatcagtctatcccctaatggttcagatctgcgtatggtttggccgtcccttggagaagactcgctttgtggccaaatgtaaagcaattcagtcctccatcaagccaagtcccttctccggaaacatctaccacatcctgggcaaagtgaagttttcagactctgagaggaccatggaggtctgctacaacacactggccaactccttgagcatcatgccagttttggaaggacccacaccaccaccagactccaaaagcgtatctcaagacagcagcgggcagcaggagtgctaccttgtgttcatcggctgctccctgaaggaagacagcatcaaggactggctgcggcagtcagctaagcagaagcctcagaggaaagccctgaagaccagggggatgctgacgcaacaggagatcaggagcatccacgtaaaacgccacttggaacccctacctgcaggctacttttataatggcacccaatttgttaacttctttggtgacaaaactgattttcacccactcatggaccagttcatgaatgactacgtggaagaagccaaccgggaaattgagaagtataaccaggagctggaacagcaggagtatcatgacctctttgagctgaagccctagaggaaggctgggcccgtacgtcctgcagaatgtccaccttggagatggacgaacgggtgtcttaacctcagctctgctggaggcctctcccttaaggggctgtctttgttctccttggcctgtgtgggctggcttgagtgcatgttgtctttattccctgtatagcgctgaagagcatcacctgcaccattgattttgggggtcgggggaatactcaaggatgagcagatggggcctgcccgtctacgtgtgcaactggcagtccaggagctctgggtttctgataacaggatctcctttgggctcttgaggttggggagaagcattaggattacacagaggagctactgggacttagaaggaaccctggctgcctgaactgtggccgtgtctgggaggcgaggccacgacaggcctcaagcctcagatgctgctccacgagagccatcttccccagtggagtgcctgcctcccctgctaggcccgtttccctgaaggagctggccgtactggccgtgggcccagtcctgggaggagcagcacagccttgcccaggcccagtccacagagccagcagcttgggttgagatgaatgatgtgttcacaaatgaggggatttcccttctggactaaactgaaggagaggcttgttgctttccagaggtgtgtggctcttaagttgacatcagcttttccccttgtgggtggttctttagctctcctgtcacaccattcgggtgtcctaatgtagggacaagagcaagcctgctgctcaggccccctggcgaggcttcacctcactgtggaagggggcgtcctgcagctggttagtcttaggcctggtggctgatcacttgtggggtcagtctccagcacccagcgctcccacaagccttgccaaggaaggcctgcttttcagccacaaacttcaggaaactcatccccccgctccccaaagtgttgttgctggccctgggcttgtgtggctcctgaggattgggaatttcaaataattgcaatacctgagttagaattccttctaatggcatcgttttaagctggaccataaagcagaggggaattacaagtgtgtcccatgcctgaccttcataattggtgtgggggacaggggagtcacagccactgatatttaggtgatgtctcttaggacttcagtgcctcagctgcctgaactgtaaatgttttctgaatttcacatatttttttttgcatgccttaggaagaagcacataggtaaaaccagcagtttccagtaatatagggggtttttgagcaaggcccctggagcagcggagagacaagatggagcacatgtagtctgtgtgcctggtcacacagaggcctgcatgcaagtagcaaagcagctctcaagggcttgtcagtaaaatatattagaaaaaaaaaaaaaacaatttgaagccaaatgaacaaaactccagataccattgataagaaattttggcatcaagaagggcttctgaaaagacccacgtgctccagtcccagctccaaaagccactgatgacaagggccccactgtggaacctaagtctgggagccccctgacttctggctggccagaggctgcggtccgtcaagggcttgcctcgcttcagaatcagtaacatagatcttaagtgcaattgattaataagcagtgagttactgtagcttcctttagctctaccgaactctttttaaaaactcaaacttgagcagccttagaaaaggggttggggggtgggaaccacaggccatttctctaagtgggctgctgtgaagttttaaatgaaagctctagctttaggagcttgagccatttcctgactgcactggcctggcagtctggctgctgcacaagagtttttaaagaggggtcggagcccgcccgtgagagcgggtcttctcaccatgtggggctgtactacgtggtggtcttggtttctcttcacagaaatgctctctcaccaacttgccccactgtcccaactcctctcctcttagagaaaaaactgtgattacctcaacttgaatatgaaactgtgattgaaaaaagtcaaaacgtgaagaagcatcaaagccaaaaaggcaaaactggctgaggcctctgttgatgctcctcagcctactcgggaacgtgaaggggcagctggcgaaagggcattcctggggccacttgctctgccccactgataaggcacacccgcggtgcactgtgagctctttgaggactgaggccaggggatgcctcctggaacctgccaggcctctctgttctgtgaaggtcagtatccacttgattcctccaggcggcgctccaggtgggaggagcagggtcttctgctgtttccaaaggaatggccatgacactgcttttgaccttagaagtggatccagggacccagcaaagagcgggggtgggttcccagggacaggcagtcctcccggggcttacatgctttttgctaactttcctattagcagcttcagtttatatcacccagagtgcgtgggataatgttgaagtcgctgaagttacgggttattttatgtttttacatgggatttttctgtttttgattggaagaaggagacagaaattggaggaaatgggattattatcctagggaagggccgttggcaaggagttgagccggcccctctgagccctgggggctatctgacctgaagcctggacactgggcccttcaggtcgcaagaaaaagttccctcctaaattctattaggattttggagaatttttgcacagtaagaagctctgggttgctccttgggcttctcaaaagggaaaagttcaattcaaagattgtaaactacgaagtattccagccgtgttgctgatctagttggatagttgtacctcaaaaaagtaggtgagaactggcttcctcattgtcccaggatgtcaaatactaatgacataagagctcacttacgtgccaaaattcacttttatactagtttttcagtgctttaatatttgtaacttaaattttaaaactcgtatttacaaacactactgtaacttcagtgaaactgaattgtgcgattgaagctttttgcttatcatagtatttattacactacttaattcagtaaatatataaaagtagccttcaatttatttttatattattttacatgtttttacctgcagttgtgtatgtgaatttaccttggtaatcgagatgtcatgctaaggaccaataaactatcactgaacaaaaaaaaaaacca

SEQ ID NO: 336061 - DNA, 4875 bp, Homo sapiens
ccatgtatgcacatgagctcgaattcccgggctcgggtgatcctcctgcctcggcctcccaaagtgctggaattaaggtattagccaccacacccagcctcttgtttatttagatctgctattgactctttttttgttcaaatttaacctcggttttttccggatcctttctcatcctgcctttcagggagcccttgcccacttcttgggtctccagtcactcctagccctcatctccttagcatgtaacactttttcccattctcatctgtgtgaccttcgtgcaacactgctgtactgttttttttgtctgttttgttttgtttttgagacagggtcttgctctgttgcccaggctggagtgcagtagtgcaatcctaggtcactgcccaccccagcctcccaagtaactgggactacaggaacacaccatcacacccagctaatttttttgttgtactgttggctgtgccctcctcccttggcctctgaggcctctgctgagagccccccacttctaccaagggggtttctttgcttttcctcaaccacctcttccataacagctattccagcaaccaccagggactatgtggatgtctcacgctcagggtcttagagactttcaaatgccacaagtgcagagtcaaactcttcctcttctcccacctataaaccttttttttctcttgtgtttcccttctgggataatagtgtccacctgatcacccagatcagccaagccagaaacttattttgttcctctctgtctctctctcttactccatcctttcttttcctttttaaaaaacaaaacaaaatgggatctccctctgtcacccaggctggagtacagtggcgcaatctcagctcactgcagccttgaattcctgggctcaagtgctcctcctgcctcagcctcctgagtagctgggaccacaagcatgagccactgtgcccacctactccatcctttctaagctgccaccagtcacatcagttctgtctcttgcattttctcatgaatctatcccaaccatctgcattgtcacagtcttagcatagctgtatcctttcaaggcaggctctcagggactaatgtgtattctccttacagactctgagaggaccatggaggtctgctacaacacactggccaactccttgagcatcatgccagttttggaaggacccacaccaccaccagactccaaaagcgtatctcaagacagcagcgggcagcaggagtgctaccttgtgttcatcggctgctccctgaaggaagacagcatcaaggactggctgcggcagtcagctaagcagaagcctcagaggaaagccctgaagaccagggggatgctgacgcaacaggagatcaggagcatccacgtaaaacgccacttggaacccctacctgcaggctacttttataatggcacccaatttgttaacttctttggtgacaaaactgattttcacccactcatggaccagttcatgaatgactacgtggaagaagccaaccgggaaattgagaagtataaccaggagctggaacagcaggagtatcatgacctctttgagctgaagccctagaggaaggctgggcccgtacgtcctgcagaatgtccaccttggagatggacgaacgggtgtcttaacctcagctctgctggaggcctctcccttaaggggctgtctttgttctccttggcctgtgtgggctggcttgagtgcatgttgtctttattccctgtatagcgctgaagagcatcacctgcaccattgattttgggggtcgggggaatactcaaggatgagcagatggggcctgcccgtctacgtgtgcaactggcagtccaggagctctgggtttctgataacaggatctcctttgggctcttgaggttggggagaagcattaggattacacagaggagctactgggacttagaaggaaccctggctgcctgaactgtggccgtgtctgggaggcgaggccacgacaggcctcaagcctcagatgctgctccacgagagccatcttccccagtggagtgcctgcctcccctgctaggcccgtttccctgaaggagctggccgtactggccgtgggcccagtcctgggaggagcagcacagccttgcccaggcccagtccacagagccagcagcttgggttgagatgaatgatgtgttcacaaatgaggggatttcccttctggactaaactgaaggagaggcttgttgctttccagaggtgtgtggctcttaagttgacatcagcttttccccttgtgggtggttctttagctctcctgtcacaccattcgggtgtcctaatgtagggacaagagcaagcctgctgctcaggccccctggcgaggcttcacctcactgtggaagggggcgtcctgcagctggttagtcttaggcctggtggctgatcacttgtggggtcagtctccagcacccagcgctcccacaagccttgccaaggaaggcctgcttttcagccacaaacttcaggaaactcatccccccgctccccaaagtgttgttgctggccctgggcttgtgtggctcctgaggattgggaatttcaaataattgcaatacctgagttagaattccttctaatggcatcgttttaagctggaccataaagcagaggggaattacaagtgtgtcccatgcctgaccttcataattggtgtgggggacaggggagtcacagccactgatatttaggtgatgtctcttaggacttcagtgcctcagctgcctgaactgtaaatgttttctgaatttcacatatttttttttgcatgccttaggaagaagcacataggtaaaaccagcagtttccagtaatatagggggtttttgagcaaggcccctggagcagcggagagacaagatggagcacatgtagtctgtgtgcctggtcacacagaggcctgcatgcaagtagcaaagcagctctcaagggcttgtcagtaaaatatattagaaaaaaaaaaaaaacaatttgaagccaaatgaacaaaactccagataccattgataagaaattttggcatcaagaagggcttctgaaaagacccacgtgctccagtcccagctccaaaagccactgatgacaagggccccactgtggaacctaagtctgggagccccctgacttctggctggccagaggctgcggtccgtcaagggcttgcctcgcttcagaatcagtaacatagatcttaagtgcaattgattaataagcagtgagttactgtagcttcctttagctctaccgaactctttttaaaaactcaaacttgagcagccttagaaaaggggttggggggtgggaaccacaggccatttctctaagtgggctgctgtgaagttttaaatgaaagctctagctttaggagcttgagccatttcctgactgcactggcctggcagtctggctgctgcacaagagtttttaaagaggggtcggagcccgcccgtgagagcgggtcttctcaccatgtggggctgtactacgtggtggtcttggtttctcttcacagaaatgctctctcaccaacttgccccactgtcccaactcctctcctcttagagaaaaaactgtgattacctcaacttgaatatgaaactgtgattgaaaaaagtcaaaacgtgaagaagcatcaaagccaaaaaggcaaaactggctgaggcctctgttgatgctcctcagcctactcgggaacgtgaaggggcagctggcgaaagggcattcctggggccacttgctctgccccactgataaggcacacccgcggtgcactgtgagctctttgaggactgaggccaggggatgcctcctggaacctgccaggcctctctgttctgtgaaggtcagtatccacttgattcctccaggcggcgctccaggtgggaggagcagggtcttctgctgtttccaaaggaatggccatgacactgcttttgaccttagaagtggatccagggacccagcaaagagcgggggtgggttcccagggacaggcagtcctcccggggcttacatgctttttgctaactttcctattagcagcttcagtttatatcacccagagtgcgtgggataatgttgaagtcgctgaagttacgggttattttatgtttttacatgggatttttctgtttttgattggaagaaggagacagaaattggaggaaatgggattattatcctagggaagggccgttggcaaggagttgagccggcccctctgagccctgggggctatctgacctgaagcctggacactgggcccttcaggtcgcaagaaaaagttccctcctaaattctattaggattttggagaatttttgcacagtaagaagctctgggttgctccttgggcttctcaaaagggaaaagttcaattcaaagattgtaaactacgaagtattccagccgtgttgctgatctagttggatagttgtacctcaaaaaagtaggtgagaactggcttcctcattgtcccaggatgtcaaatactaatgacataagagctcacttacgtgccaaaattcacttttatactagtttttcagtgctttaatatttgtaacttaaattttaaaactcgtatttacaaacactactgtaacttcagtgaaactgaattgtgcgattgaagctttttgcttatcatagtatttattacactacttaattcagtaaatatataaaagtagccttcaatttatttttatattattttacatgtttttacctgcagttgtgtatgtgaatttaccttggtaatcgagatgtcatgctaaggaccaataaactatcactgaacaaaaaaaaaaacca

SEQ ID NO: 336062 - DNA, 3133 bp, Homo sapiens
ttcagaggatccccagacgatctttgaggcatcacctgcaccattgattttgggggtcgggggaatactcaaggatgagcagatggggcctgcccgtctacgtgtgcaactggcagtccaggagctctgggtttctgataacaggatctcctttgggctcttgaggttggggagaagcattaggattacacagaggagctactgggacttagaaggaaccctggctgcctgaactgtggccgtgtctgggaggcgaggccacgacaggcctcaagcctcagatgctgctccacgagagccatcttccccagtggagtgcctgcctcccctgctaggcccgtttccctgaaggagctggccgtactggccgtgggcccagtcctgggaggagcagcacagccttgcccaggcccagtccacagagccagcagcttgggttgagatgaatgatgtgttcacaaatgaggggatttcccttctggactaaactgaaggagaggcttgttgctttccagaggtgtgtggctcttaagttgacatcagcttttccccttgtgggtggttctttagctctcctgtcacaccattcgggtgtcctaatgtagggacaagagcaagcctgctgctcaggccccctggcgaggcttcacctcactgtggaagggggcgtcctgcagctggttagtcttaggcctggtggctgatcacttgtggggtcagtctccagcacccagcgctcccacaagccttgccaaggaaggcctgcttttcagccacaaacttcaggaaactcatccccccgctccccaaagtgttgttgctggccctgggcttgtgtggctcctgaggattgggaatttcaaataattgcaatacctgagttagaattccttctaatggcatcgttttaagctggaccataaagcagaggggaattacaagtgtgtcccatgcctgaccttcataattggtgtgggggacaggggagtcacagccactgatatttaggtgatgtctcttaggacttcagtgcctcagctgcctgaactgtaaatgttttctgaatttcacatatttttttttgcatgccttaggaagaagcacataggtaaaaccagcagtttccagtaatatagggggtttttgagcaaggcccctggagcagcggagagacaagatggagcacatgtagtctgtgtgcctggtcacacagaggcctgcatgcaagtagcaaagcagctctcaagggcttgtcagtaaaatatattagaaaaaaaaaaaaaacaatttgaagccaaatgaacaaaactccagataccattgataagaaattttggcatcaagaagggcttctgaaaagacccacgtgctccagtcccagctccaaaagccactgatgacaagggccccactgtggaacctaagtctgggagccccctgacttctggctggccagaggctgcggtccgtcaagggcttgcctcgcttcagaatcagtaacatagatcttaagtgcaattgattaataagcagtgagttactgtagcttcctttagctctaccgaactctttttaaaaactcaaacttgagcagccttagaaaaggggttggggggtgggaaccacaggccatttctctaagtgggctgctgtgaagttttaaatgaaagctctagctttaggagcttgagccatttcctgactgcactggcctggcagtctggctgctgcacaagagtttttaaagaggggtcggagcccgcccgtgagagcgggtcttctcaccatgtggggctgtactacgtggtggtcttggtttctcttcacagaaatgctctctcaccaacttgccccactgtcccaactcctctcctcttagagaaaaaactgtgattacctcaacttgaatatgaaactgtgattgaaaaaagtcaaaacgtgaagaagcatcaaagccaaaaaggcaaaactggctgaggcctctgttgatgctcctcagcctactcgggaacgtgaaggggcagctggcgaaagggcattcctggggccacttgctctgccccactgataaggcacacccgcggtgcactgtgagctctttgaggactgaggccaggggatgcctcctggaacctgccaggcctctctgttctgtgaaggtcagtatccacttgattcctccaggcggcgctccaggtgggaggagcagggtcttctgctgtttccaaaggaatggccatgacactgcttttgaccttagaagtggatccagggacccagcaaagagcgggggtgggttcccagggacaggcagtcctcccggggcttacatgctttttgctaactttcctattagcagcttcagtttatatcacccagagtgcgtgggataatgttgaagtcgctgaagttacgggttattttatgtttttacatgggatttttctgtttttgattggaagaaggagacagaaattggaggaaatgggattattatcctagggaagggccgttggcaaggagttgagccggcccctctgagccctgggggctatctgacctgaagcctggacactgggcccttcaggtcgcaagaaaaagttccctcctaaattctattaggattttggagaatttttgcacagtaagaagctctgggttgctccttgggcttctcaaaagggaaaagttcaattcaaagattgtaaactacgaagtattccagccgtgttgctgatctagttggatagttgtacctcaaaaaagtaggtgagaactggcttcctcattgtcccaggatgtcaaatactaatgacataagagctcacttacgtgccaaaattcacttttatactagtttttcagtgctttaatatttgtaacttaaattttaaaactcgtatttacaaacactactgtaacttcagtgaaactgaattgtgcgattgaagctttttgcttatcatagtatttattacactacttaattcagtaaatatataaaagtagccttcaatttatttttatattattttacatgtttttacctgcagttgtgtatgtgaatttaccttggtaatcgagatgtcatgctaaggaccaataaactatcactgaacaaaaaaaaaaacca

SEQ ID NO: 336063 - DNA, 3298 bp, Homo sapiens
ccagccttcctctagggcttcagctcaaagaggtcatgatactcctgctgttccagcttggagatggacgaacgggtgtcttaacctcagctctgctggaggcctctcccttaaggggctgtctttgttctccttggcctgtgtgggctggcttgagtgcatgttgtctttattccctgtatagcgctgaagagcatcacctgcaccattgattttgggggtcgggggaatactcaaggatgagcagatggggcctgcccgtctacgtgtgcaactggcagtccaggagctctgggtttctgataacaggatctcctttgggctcttgaggttggggagaagcattaggattacacagaggagctactgggacttagaaggaaccctggctgcctgaactgtggccgtgtctgggaggcgaggccacgacaggcctcaagcctcagatgctgctccacgagagccatcttccccagtggagtgcctgcctcccctgctaggcccgtttccctgaaggagctggccgtactggccgtgggcccagtcctgggaggagcagcacagccttgcccaggcccagtccacagagccagcagcttgggttgagatgaatgatgtgttcacaaatgaggggatttcccttctggactaaactgaaggagaggcttgttgctttccagaggtgtgtggctcttaagttgacatcagcttttccccttgtgggtggttctttagctctcctgtcacaccattcgggtgtcctaatgtagggacaagagcaagcctgctgctcaggccccctggcgaggcttcacctcactgtggaagggggcgtcctgcagctggttagtcttaggcctggtggctgatcacttgtggggtcagtctccagcacccagcgctcccacaagccttgccaaggaaggcctgcttttcagccacaaacttcaggaaactcatccccccgctccccaaagtgttgttgctggccctgggcttgtgtggctcctgaggattgggaatttcaaataattgcaatacctgagttagaattccttctaatggcatcgttttaagctggaccataaagcagaggggaattacaagtgtgtcccatgcctgaccttcataattggtgtgggggacaggggagtcacagccactgatatttaggtgatgtctcttaggacttcagtgcctcagctgcctgaactgtaaatgttttctgaatttcacatatttttttttgcatgccttaggaagaagcacataggtaaaaccagcagtttccagtaatatagggggtttttgagcaaggcccctggagcagcggagagacaagatggagcacatgtagtctgtgtgcctggtcacacagaggcctgcatgcaagtagcaaagcagctctcaagggcttgtcagtaaaatatattagaaaaaaaaaaaaaacaatttgaagccaaatgaacaaaactccagataccattgataagaaattttggcatcaagaagggcttctgaaaagacccacgtgctccagtcccagctccaaaagccactgatgacaagggccccactgtggaacctaagtctgggagccccctgacttctggctggccagaggctgcggtccgtcaagggcttgcctcgcttcagaatcagtaacatagatcttaagtgcaattgattaataagcagtgagttactgtagcttcctttagctctaccgaactctttttaaaaactcaaacttgagcagccttagaaaaggggttggggggtgggaaccacaggccatttctctaagtgggctgctgtgaagttttaaatgaaagctctagctttaggagcttgagccatttcctgactgcactggcctggcagtctggctgctgcacaagagtttttaaagaggggtcggagcccgcccgtgagagcgggtcttctcaccatgtggggctgtactacgtggtggtcttggtttctcttcacagaaatgctctctcaccaacttgccccactgtcccaactcctctcctcttagagaaaaaactgtgattacctcaacttgaatatgaaactgtgattgaaaaaagtcaaaacgtgaagaagcatcaaagccaaaaaggcaaaactggctgaggcctctgttgatgctcctcagcctactcgggaacgtgaaggggcagctggcgaaagggcattcctggggccacttgctctgccccactgataaggcacacccgcggtgcactgtgagctctttgaggactgaggccaggggatgcctcctggaacctgccaggcctctctgttctgtgaaggtcagtatccacttgattcctccaggcggcgctccaggtgggaggagcagggtcttctgctgtttccaaaggaatggccatgacactgcttttgaccttagaagtggatccagggacccagcaaagagcgggggtgggttcccagggacaggcagtcctcccggggcttacatgctttttgctaactttcctattagcagcttcagtttatatcacccagagtgcgtgggataatgttgaagtcgctgaagttacgggttattttatgtttttacatgggatttttctgtttttgattggaagaaggagacagaaattggaggaaatgggattattatcctagggaagggccgttggcaaggagttgagccggcccctctgagccctgggggctatctgacctgaagcctggacactgggcccttcaggtcgcaagaaaaagttccctcctaaattctattaggattttggagaatttttgcacagtaagaagctctgggttgctccttgggcttctcaaaagggaaaagttcaattcaaagattgtaaactacgaagtattccagccgtgttgctgatctagttggatagttgtacctcaaaaaagtaggtgagaactggcttcctcattgtcccaggatgtcaaatactaatgacataagagctcacttacgtgccaaaattcacttttatactagtttttcagtgctttaatatttgtaacttaaattttaaaactcgtatttacaaacactactgtaacttcagtgaaactgaattgtgcgattgaagctttttgcttatcatagtatttattacactacttaattcagtaaatatataaaagtagccttcaatttatttttatattattttacatgtttttacctgcagttgtgtatgtgaatttaccttggtaatcgagatgtcatgctaaggaccaataaactatcactgaacaaaaaaaaaaacca

SEQ ID NO: 336064 - DNA, 4436 bp, Homo sapiens
attttataataccggagttttgctctatcactgtatcatggacagcaagcttatggaacttattcctcaaaaagtgggacatgctgaaaatacaaacctagcttgagtttagttatgtccctaaatgttaactgatccctgtgggtcagtagggagacagctggcatccgtttccaaccagccaaggatattcggtcgactgtactgactgaccactttgctcaggccgcaagtgtccctcagaaaagcctgaggacttattaaggtcatggaaggttgccttggccaggaactcttttctaatcacatgtttttgacttccctctctagccctaaccggcagccatttgttctctttggtaatcactccacacgagaaaacctgaatgctggcaactttaacttcccttctgaaggacatctggtacgaagcactggtcccggcgggagctttgccaagcacatggtagcccagtgtgtctcaccaaagggacctcttgcttgttcgagaacatacctttttggagctactcatgttccttacttgggtggtgacagcaagctgcccaagaaaactgaacaaattaggctattgtcccagatatatgctgctgttattgaggctgttttggctggcattgcatgttatgctaaaacttccagtctaacaaaggccaaggaggtagcagagcaaactctgggatctgggttagattcctttgagttgattccgtttaaggcagccctgcgctccaagatgacttttcatatacatgctgtgaataatcagggaagaattgtaccgctggacagtgaagatagcttatcctttgtgaagacggcttgtatggccgtctatgacattcctgacttactgggaggcaatggttgtttaggatctgtggttttctctgaatcatttttgacttctcagatcttagttaaagaaaaggatggcactgttaccacagaaaccagctccgtagtcctgactgctgctgtacccagattctgctcctggctggtggaagataatgaagtaaaattgtctgagaaaacccagcaagcagtgaggggggatgagtctttcctgggcacttatctaacaggaggagaaggagcatatctttattccagcaatctacagtcctggcctgaggaagggaatgttcatttcttctctagtggccttctgttttctcactgtcgtcatggaagtatcatcatttccaaggatcacatgaattccatttccttctatgatggggattccaccagtactgttgctgctcttctcatagacttcaaaagctcattgcttcctcacctcccagttcatttccatggatcaagcaattttctgatgattgcccttttccccaaatcgaagatataccaagcattttactcagaggtcttctccctctggaaacagcaggataactcagggatctctttaaaagtgatccaggaagatggattatctgtggaacaaaagagattgcactccagtgcacagaagctcttcagtgccctgagccagcctgctggggagaaacggagttccctaaagttactctcagccaaactcccagagctggactggtttctccagcatttcgccatcagcagcattagccaggagcctgtgatgcggacccatcttcctgtgctgctgcagcaagctgaaatcaacactactcacagaatagaaagtgacaaggtaattatcagcattgtaaccggcctcccaggctgtcacgctagcgagctctgtgcttttctggtcactctgcataaggaatgtggcagatggatggtgtatcgccaaatcatggacagctctgaatgttttcatgctgcacacttccagagatacctttccagtgccctagaggcccagcagaaccgctctgcgcgccagtcagcctacatccgcaagaagaccagactgctggtggtgttacaaggctacacagatgttattgatgttgtccaggccctgcagacccacccagactcaaatgtcaaggcctccttcaccattggtgccatcacagcatgtgtggagcccatgagctgctacatggagcacagatttctctttcctaaatgtcttgaccagtgttcacaaggcctggtgagtaacgtggtattcaccagtcacaccacggagcagcggcaccctctccttgttcagctgcagagcctcatcagggctgccaatcctgctgcagccttcattcttgcagaaaatgggattgtcaccaggaatgaagacattgagctgattctctcagaaaacagtttttcaagtcctgagatgctacgatctcgatatttaatgtatcctggctggtatgaaggtaaattgaatgctggatcagtctatcccctaatggttcagatctgcgtatggtttggccgtcccttggagaagactcgctttgtggccaaatgtaaagcaattcagtcctccatcaagccaagtcccttctccggaaacatctaccacatcctgggcaaagtgaagttttcagactctgagaggaccatggaggtctgctacaacacactggccaactccttgagcatcatgccagttttggaaggacccacaccaccaccagactccaaaagcgtatctcaagacagcagcgggcagcaggagtgctaccttgtgttcatcggctgctccctgaaggaagacagcatcaaggactggctgcggcagtcagctaagcagaagcctcagaggaaagccctgaagaccagggggatgctgacgcaacaggagatcaggagcatccacgtaaaacgccacttggaacccctacctgcaggctacttttataatggcacccaatttgttaacttctttggtgacaaaactgattttcacccactcatggaccagttcatgaatgactacgtggaagaagccaaccgggaaattgagaagtataaccaggagctggaacagcaggagtatcatgacctctttgagctgaagccctagaggaaggctgggcccgtacgtcctgcagaatgtccaccttggagatggacgaacgggtgtcttaacctcagctctgctggaggcctctcccttaaggggctgtctttgttctccttggcctgtgtgggctggcttgagtgcatgttgtctttattccctgtatagcgctgaagagcatcacctgcaccattgattttgggggtcgggggaatactcaaggatgagcagatggggcctgcccgtctacgtgtgcaactggcagtccaggagctctgggtttctgataacaggatctcctttgggctcttgaggttggggagaagcattaggattacacagaggagctactgggacttagaaggaaccctggctgcctgaactgtggccgtgtctgggaggcgaggccacgacaggcctcaagcctcagatgctgctccacgagagccatcttccccagtggagtgcctgcctcccctgctaggcccgtttccctgaaggagctggccgtactggccgtgggcccagtcctgggaggagcagcacagccttgcccaggcccagtccacagagccagcagcttgggttgagatgaatgatgtgttcacaaatgaggggatttcccttctggactaaactgaaggagaggcttgttgctttccagaggtgtgtggctcttaagttgacatcagcttttccccttgtgggtggttctttagctctcctgtcacaccattcgggtgtcctaatgtagggacaagagcaagcctgctgctcaggccccctggcgaggcttcacctcactgtggaagggggcgtcctgcagctggttagtcttaggcctggtggctgatcacttgtggggtcagtctccagcacccagcgctcccacaagccttgccaaggaaggcctgcttttcagccacaaacttcaggaaactcatccccccgctccccaaagtgttgttgctggccctgggcttgtgtggctcctgaggattgggaatttcaaataattgcaatacctgagttagaattccttctaatggcatcgttttaagctggaccataaagcagaggggaattacaagtgtgtcccatgcctgaccttcataattggtgtgggggacaggggagtcacagccactgatatttaggtgatgtctcttaggacttcagtgcctcagctgcctgaactgtaaatgttttctgaatttcacatatttttttttgcatgccttaggaagaagcacataggtaaaaccagcagtttccagtaatatagggggtttttgagcaaggcccctggagcagcggagagacaagatggagcacatgtagtctgtgtgcctggtcacacagaggcctgcatgcaagtagcaaagcagctctcaagggcttgtcagtaaaatatattaga

SEQ ID NO: 336065 - DNA, 1271 bp, Homo sapiens
attttataataccggagttttgctctatcactgtatcatggacagcaagcttatggaacttattcctcaaaaagtgggacatgctgaaaatacaaacctagcttgagtttagttatgtccctaaatgttaactgatccctgtgggtcagtagggagacagctggcatccgtttccaaccagccaaggatattcggtcgactgtactgactgaccactttgctcaggccgcaagtgtccctcagaaaagcctgaggacttattaaggtcatggaaggttgccttggccaggaactcttttctaatcacatgtttttgacttccctctctagccctaaccggcagccatttgttctctttggtaatcactccacacgagaaaacctgaatgctggcaactttaacttcccttctgaaggacatctggtacgaagcactggtcccggcgggagctttgccaagcacatggtagcccagtgtgtctcaccaaagggacctcttgcttgttcgagaacatacctttttggagctactcatgttccttacttgggtggtgacagcaagctgcccaagaaaactgaacaaattaggctattgtcccagatatatgctgctgttattgaggctgttttggctggcattgcatgttatgctaaaacttccagtctaacaaaggccaaggaggtagcagagcaaactctgggatctgggttagattcctttgagttgattccgtttaaggcagccctgcgctccaagatgacttttcatatacatgctgtgaataatcagggaagaattgtaccgctggacagtgaagatagcttatcctttgtgaagacggcttgtatggccgtctatgacattcctgacttactgggaggcaatggttgtttaggatctgtggttttctctgaatcatttttgacttctcagatcttagttaaagaaaagggtaagtatatgtgatctttagaaagcaaaccttaagcctttttttttttttttggcaaaataaactataaactaaggcaaaaggccaacaataaactggtaaaaatattagaactgatgatcacagcactgcactccagcctcagtgacacagtgagaccccgtctcaaaaaaaaaaaaaaagagaaacattaaagatgaacaaagggtgtataacctaatttatgaagaactcttccaaaattaataagaaaagataagctacccaatagtaaaatgagcaaaaaaaatgaacaggcacttcacagacgtggaaaac

SEQ ID NO: 336066 - DNA, 323 bp, Homo sapiens
ccaccctcagagctccaggatcgcctgcaggcttccttttacctccagagcagggtggttcttccctcactcttgcccagttatgaggactaatggaacttgggaatgtagaaacactgtagcttccaggggctgcatgtcatgaagtggagtgacaccaagggaccagattgcgggctcttccttttggttttctttccatccttgttcaatcagccattcgggattcccctcttcctccactttgcaatgccagtcagtgaactaatcattccttttttaccttccccagctacacagatgttattgatgttgtccaggcc

SEQ ID NO: 336067 - DNA, 646 bp, Homo sapiens
gtcacgctagcgagctctgtgcttttctggtcactctgcataaggaatgtggcaggttagtatggctgatgcctttgctttggggaaagggattctaacttgggcctgcctaggcactggaaaaccttagacatgtactggccttggtgggactggtatcagcatggtagtcagccattcatttaatatgctcttctgagcacttcctgtatggcaggcactgttctgagtatgagagaatacatcgatgaacatacagacacgaaaatctctgcacttatggagcttacattctagtttggtaagacaaacagataaggaaaagtatattaactagtgaaaagttctatggagaaaataaagcagagaaggggccaggtgcagtgtctcacacctgtaatcccagcactttgggaggcaaaagtgggtagatcgcctgagaccaggaatttgagaccagccttgacaacatggcaaaacctacaaaaatacaaaaattagccgaacgtggtggcatgcacctatagtcccagctactcgggaggctgaggtgggaggatcacttgaacctaggagggcgaggctgcggtgagctgagattgcgccactgcatcccagcctgggcaacagagtgagaccctgatta

SEQ ID NO: 336068 - DNA, 6298 bp, Homo sapiens
attttataataccggagttttgctctatcactgtatcatggacagcaagcttatggaacttattcctcaaaaagtgggacatgctgaaaatacaaacctagcttgagtttagttatgtccctaaatgttaactgatccctgtgggtcagtagggagacagctggcatccgtttccaaccagccaaggatattcggtcgactgtactgactgaccactttgctcaggccgcaagtgtccctcagaaaagcctgaggacttattaaggtcatggaaggttgccttggccaggaactcttttctaatcacatgtttttgacttccctctctagccctaaccggcagccatttgttctctttggtaatcactccacacgagaaaacctgaatgctggcaactttaacttcccttctgaaggacatctggtacgaagcactggtcccggcgggagctttgccaagcacatggtagcccagtgtgtctcaccaaagggacctcttgcttgttcgagaacatacctttttggagctactcatgttccttacttgggtggtgacagcaagctgcccaagaaaactgaacaaattaggctattgtcccagatatatgctgctgttattgaggctgttttggctggcattgcatgttatgctaaaacttccagtctaacaaaggccaaggaggtagcagagcaaactctgggatctgggttagattcctttgagttgattccgtttaaggcagccctgcgctccaagatgacttttcatatacatgctgtgaataatcagggaagaattgtaccgctggacagtgaagatagcttatcctttgtgaagacggcttgtatggccgtctatgacattcctgacttactgggaggcaatggttgtttaggatctgtggttttctctgaatcatttttgacttctcagatcttagttaaagaaaaggatggcactgttaccacagaaaccagctccgtagtcctgactgctgctgtacccagattctgctcctggctggtggaagataatgaagtaaaattgtctgagaaaacccagcaagcagtgaggggggatgagtctttcctgggcacttatctaacaggaggagaaggagcatatctttattccagcaatctacagtcctggcctgaggaagggaatgttcatttcttctctagtggccttctgttttctcactgtcgtcatggaagtatcatcatttccaaggatcacatgaattccatttccttctatgatggggattccaccagtactgttgctgctcttctcatagacttcaaaagctcattgcttcctcacctcccagttcatttccatggatcaagcaattttctgatgattgcccttttccccaaatcgaagatataccaagcattttactcagaggtcttctccctctggaaacagcaggataactcagggatctctttaaaagtgatccaggaagatggattatctgtggaacaaaagagattgcactccagtgcacagaagctcttcagtgccctgagccagcctgctggggagaaacggagttccctaaagttactctcagccaaactcccagagctggactggtttctccagcatttcgccatcagcagcattagccaggagcctgtgatgcggacccatcttcctgtgctgctgcagcaagctgaaatcaacactactcacagaatagaaagtgacaaggtaattatcagcattgtaaccggcctcccaggctgtcacgctagcgagctctgtgcttttctggtcactctgcataaggaatgtggcagatggatggtgtatcgccaaatcatggacagctctgaatgttttcatgctgcacacttccagagatacctttccagtgccctagaggcccagcagaaccgctctgcgcgccagtcagcctacatccgcaagaagaccagactgctggtggtgttacaaggctacacagatgttattgatgttgtccaggccctgcagacccacccagactcaaatgtcaaggcctccttcaccattggtgccatcacagcatgtgtggagcccatgagctgctacatggagcacagatttctctttcctaaatgtcttgaccagtgttcacaaggcctggtgagtaacgtggtattcaccagtcacaccacggagcagcggcaccctctccttgttcagctgcagagcctcatcagggctgccaatcctgctgcagccttcattcttgcagaaaatgggattgtcaccaggaatgaagacattgagctgattctctcagaaaacagtttttcaagtcctgagatgctacgatctcgatatttaatgtatcctggctggtatgaaggtaaattgaatgctggatcagtctatcccctaatggttcagatctgcgtatggtttggccgtcccttggagaagactcgctttgtggccaaatgtaaagcaattcagtcctccatcaagccaagtcccttctccggaaacatctaccacatcctgggcaaagtgaagttttcagactctgagaggaccatggaggtctgctacaacacactggccaactccttgagcatcatgccagttttggaaggacccacaccaccaccagactccaaaagcgtatctcaagacagcagcgggcagcaggagtgctaccttgtgttcatcggctgctccctgaaggaagacagcatcaaggactggctgcggcagtcagctaagcagaagcctcagaggaaagccctgaagaccagggggatgctgacgcaacaggagatcaggagcatccacgtaaaacgccacttggaacccctacctgcaggctacttttataatggcacccaatttgttaacttctttggtgacaaaactgattttcacccactcatggaccagttcatgaatgactacgtggaagaagccaaccgggaaattgagaagtataaccaggagctggaacagcaggagtatcatgacctctttgagctgaagccctagaggaaggctgggcccgtacgtcctgcagaatgtccaccttggagatggacgaacgggtgtcttaacctcagctctgctggaggcctctcccttaaggggctgtctttgttctccttggcctgtgtgggctggcttgagtgcatgttgtctttattccctgtatagcgctgaagagcatcacctgcaccattgattttgggggtcgggggaatactcaaggatgagcagatggggcctgcccgtctacgtgtgcaactggcagtccaggagctctgggtttctgataacaggatctcctttgggctcttgaggttggggagaagcattaggattacacagaggagctactgggacttagaaggaaccctggctgcctgaactgtggccgtgtctgggaggcgaggccacgacaggcctcaagcctcagatgctgctccacgagagccatcttccccagtggagtgcctgcctcccctgctaggcccgtttccctgaaggagctggccgtactggccgtgggcccagtcctgggaggagcagcacagccttgcccaggcccagtccacagagccagcagcttgggttgagatgaatgatgtgttcacaaatgaggggatttcccttctggactaaactgaaggagaggcttgttgctttccagaggtgtgtggctcttaagttgacatcagcttttccccttgtgggtggttctttagctctcctgtcacaccattcgggtgtcctaatgtagggacaagagcaagcctgctgctcaggccccctggcgaggcttcacctcactgtggaagggggcgtcctgcagctggttagtcttaggcctggtggctgatcacttgtggggtcagtctccagcacccagcgctcccacaagccttgccaaggaaggcctgcttttcagccacaaacttcaggaaactcatccccccgctccccaaagtgttgttgctggccctgggcttgtgtggctcctgaggattgggaatttcaaataattgcaatacctgagttagaattccttctaatggcatcgttttaagctggaccataaagcagaggggaattacaagtgtgtcccatgcctgaccttcataattggtgtgggggacaggggagtcacagccactgatatttaggtgatgtctcttaggacttcagtgcctcagctgcctgaactgtaaatgttttctgaatttcacatatttttttttgcatgccttaggaagaagcacataggtaaaaccagcagtttccagtaatatagggggtttttgagcaaggcccctggagcagcggagagacaagatggagcacatgtagtctgtgtgcctggtcacacagaggcctgcatgcaagtagcaaagcagctctcaagggcttgtcagtaaaatatattagaaaaaaaaaaaaaacaatttgaagccaaatgaacaaaactccagataccattgataagaaattttggcatcaagaagggcttctgaaaagacccacgtgctccagtcccagctccaaaagccactgatgacaagggccccactgtggaacctaagtctgggagccccctgacttctggctggccagaggctgcggtccgtcaagggcttgcctcgcttcagaatcagtaacatagatcttaagtgcaattgattaataagcagtgagttactgtagcttcctttagctctaccgaactctttttaaaaactcaaacttgagcagccttagaaaaggggttggggggtgggaaccacaggccatttctctaagtgggctgctgtgaagttttaaatgaaagctctagctttaggagcttgagccatttcctgactgcactggcctggcagtctggctgctgcacaagagtttttaaagaggggtcggagcccgcccgtgagagcgggtcttctcaccatgtggggctgtactacgtggtggtcttggtttctcttcacagaaatgctctctcaccaacttgccccactgtcccaactcctctcctcttagagaaaaaactgtgattacctcaacttgaatatgaaactgtgattgaaaaaagtcaaaacgtgaagaagcatcaaagccaaaaaggcaaaactggctgaggcctctgttgatgctcctcagcctactcgggaacgtgaaggggcagctggcgaaagggcattcctggggccacttgctctgccccactgataaggcacacccgcggtgcactgtgagctctttgaggactgaggccaggggatgcctcctggaacctgccaggcctctctgttctgtgaaggtcagtatccacttgattcctccaggcggcgctccaggtgggaggagcagggtcttctgctgtttccaaaggaatggccatgacactgcttttgaccttagaagtggatccagggacccagcaaagagcgggggtgggttcccagggacaggcagtcctcccggggcttacatgctttttgctaactttcctattagcagcttcagtttatatcacccagagtgcgtgggataatgttgaagtcgctgaagttacgggttattttatgtttttacatgggatttttctgtttttgattggaagaaggagacagaaattggaggaaatgggattattatcctagggaagggccgttggcaaggagttgagccggcccctctgagccctgggggctatctgacctgaagcctggacactgggcccttcaggtcgcaagaaaaagttccctcctaaattctattaggattttggagaatttttgcacagtaagaagctctgggttgctccttgggcttctcaaaagggaaaagttcaattcaaagattgtaaactacgaagtattccagccgtgttgctgatctagttggatagttgtacctcaaaaaagtaggtgagaactggcttcctcattgtcccaggatgtcaaatactaatgacataagagctcacttacgtgccaaaattcacttttatactagtttttcagtgctttaatatttgtaacttaaattttaaaactcgtatttacaaacactactgtaacttcagtgaaactgaattgtgcgattgaagctttttgcttatcatagtatttattacactacttaattcagtaaatatataaaagtagccttcaatttatttttatattattttacatgtttttacctgcagttgtgtatgtgaatttaccttggtaatcgagatgtcatgctaaggaccaataaactatcactgaacaaaaaaaaaaacca

SEQ ID NO: 336069 - DNA, 2970 bp, Homo sapiens
acttccggtcccgccgccgggagccggtgcggctgtgaggggccgcgtctcgcagcagccgcccggaccgggcatggtgttgggcgccgggcccgcctcgcctgtctcggggagcccagggtaaaggcagcagtaatgctaacgctagcaagtaaactgaagcgtgacgatggtctcaaagggtcccggacggcagccacagcgtccgactcgactcggagggtttctgtgagagacaaattgcttgttaaagaggttgcagaacttgaagctaatttaccttgtacatgtaaagtgcattttcctgatccaaacaagcttcactgttctcagctaacagtaactccagtttactgagagaacattcaattgacggcactggctgggctcccatgagaacattaaaggatgtcgtttggggattaaactctttgtttactgatttttgaattttgatgatccactgaatattgaagctgcagaacatcatttgcaggacaaggtgagaattctatttggtgcacgtgctattgtgtccggaattggtgggttcttggtctcactgacttcaagaatgaagccgcggaccctcgcggaaagtttatatggactataatgcaacgactcccctggagccagaagttatccaggccatgaccaaggccatgtgggaagcctggggaaatcccagcagcccgtattcagcaggaagaaaggccaaggatattataaatgcagctcgggaaagcctcgcgaagatgataggggggaaacctcaagatataatcttcacttccgggggcactgagtcaaataatttagtaatccattctgtggtgaaacatttccacgcaaaccggacctcaaagggacacacaggtgggcaccacagcccagtgaagggggccaagccccatttcattacttcctcggtggaacacgactccatccggctgcccctggagcacctggtggaagaacaagtggcagcggtcaccttgtcccggtgtccaaggtgagcgggcaggcagaggtggacgacatcctcgcggcagtccgcccgaccacacgcctcgtgaccatcatgctggccaacaatgagactggcattgtcatgcctgtccctgaaatcagtcagcgcattaaagccctgaaccaggaacgggtggcagctgggctacctcccatcctcgtgcacacggatgctgcacaggccttggggaagcagcgcgtggatgtggaggacctgggcgtggacttccttacaatcgtggggcacaagttttatggtcccaggattggcgcactttatatacgaggacttggtgaatttacccctctctaccctatgctatttggaggtggacaagaacggaatttcaggccagggacagagaacaccccaatgattgctggccttgggaaggccgcggagctggtgacccagaactgcgaggcttatgaggcccacatgagggacgtccgcgactacctggaagagaggctggaagctgaattcggtcagaagagaatccatctgaatagccagtttccaggcacccagcggcttcccaatacctgtaacttttccatccggggaccccggcttcaaggccacgtggtgcttgcgcagtgccgagtgctgatggccagtgtgggggccgcgtgccactcggaccacggggaccagccgtccccagtgctgctgagctacggtgtccccttcgacgtggccaggaacgcgctccggctcagcgtgggccgcagcaccaccagggccgaggtggacctcgtcgtgcaggacctgaagcaggccgtggcgcagctggaggaccaggcctagcactggggccgccttccccaccccgcttctgggaagcccgtggcagggcacagggttgtccctccagttccctcctgagggctgtgccaggatgactgtctcatgccccctctgcattttgtcctggagtgccagcgagtgtgcacccccagtttccttccctggacccctgcagagctcacagggcccaggacaccaacgccgcataggactgcccacatgggaccgcccacataggaccgcccacataggaccgcccacatgggaccgcccacatgggaccgcccacatgggaccgcccacatgggaccgcccacatgggagcgcccacatgggaccgcccacatgggaccgcccacatgggaccgcccacatagaaccgtcctccagtggtgaagcggaaacacttagctttatccaccctccccactgggaactgggcacgcctgttgtgagtgccctttcctggaaggtgtttttatctggaagatagaatccaagtatttataactcattgtcagccaaatgctatcatgaacgtaggaaacttgatttttttgttttgatcatggcctctacatgcacctttccagagtggtctcttctcaggccctttttagtccctttccaaagctgcccccaccaccctgctcctctggcctcagtgcacagtggcccccagcctcggccaggcctgctctgctcagcgcccaccgcccaccacccctcctgcttccccgagcctgaccctgttccgcccactggcaatcagggctgcgcacttccctgtccacggtccccaggccttcctgtcttgtcccttttgatcattattaactcagggtttcagctccaacctcgctgagttggtgcagctccaggtcattcctggggtgggaatcggatcatccctgactcagcttttaccttaattttatttgcagaggattcttttctcaaaatgctctggcatttggacacacatcacatgtcgatatttgcataggagtcattttcagtggaataacatttttaatgtgtggttttacggttcaaggaactacttgatgattttgaggaaacacttgccagaaactaaattaacgaataaaagatttcagtgcccg

SEQ ID NO: 336070 - DNA, 5984 bp, Homo sapiens
attttataataccggagttttgctctatcactgtatcatggacagcaagcttatggaacttattcctcaaaaagtgggacatgctgaaaatacaaacctagcttgagtttagttatgtccctaaatgttaactgatccctgtgggtcagtagggagacagctggcatccgtttccaaccagccaaggatattcggtcgactgtactgactgaccactttgctcaggccgcaagtgtccctcagaaaagcctgaggacttattaaggtcatggaaggttgccttggccaggaactcttttctaatcacatgtttttgacttccctctctagccctaaccggcagccatttgttctctttggtaatcactccacacgagaaaacctgaatgctggcaactttaacttcccttctgaaggacatctggtacgaagcactggtcccggcgggagctttgccaagcacatggtagcccagtgtgtctcaccaaagggacctcttgcttgttcgagaacatacctttttggagctactcatgttccttacttgggtggtgacagcaagctgcccaagaaaactgaacaaattaggctattgtcccagatatatgctgctgttattgaggctgttttggctggcattgcatgttatgctaaaacttccagtctaacaaaggccaaggaggtagcagagcaaactctgggatctgggttagattcctttgagttgattccgtttaaggcagccctgcgctccaagatgacttttcatatacatgctgtgaataatcagggaagaattgtaccgctggacagtgaagatagcttatcctttgtgaagacggcttgtatggccgtctatgacattcctgacttactgggaggcaatggttgtttaggatctgtggttttctctgaatcatttttgacttctcagatcttagttaaagaaaaggatggcactgttaccacagaaaccagctccgtagtcctgactgctgctgtacccagattctgctcctggctggtggaagataatgaagtaaaattgtctgagaaaacccagcaagcagtgaggggggatgagtctttcctgggcacttatctaacaggaggagaaggagcatatctttattccagcaatctacagtcctggcctgaggaagggaatgttcatttcttctctagtggccttctgttttctcactgtcgtcatggaagtatcatcatttccaaggatcacatgaattccatttccttctatgatggggattccaccagtactgttgctgctcttctcatagacttcaaaagctcattgcttcctcacctcccagttcatttccatggatcaagcaattttctgatgattgcccttttccccaaatcgaagatataccaagcattttactcagaggtcttctccctctggaaacagcaggataactcagggatctctttaaaagtgatccaggaagatggattatctgtggaacaaaagagattgcactccagtgcacagaagctcttcagtgccctgagccagcctgctggggagaaacggagttccctaaagttactctcagccaaactcccagagctggactggtttctccagcatttcgccatcagcagcattagccaggagcctgtgatgcggacccatcttcctgtgctgctgcagcaagctgaaatcaacactactcacagaatagaaagtgacaaggtaattatcagcattgtaaccggcctcccaggctgtcacgctagcgagctctgtgcttttctggtcactctgcataaggaatgtggcagatggatggtgtatcgccaaatcatggacagctctgaatgttttcatgctgcacacttccagagatacctttccagtgccctagaggcccagcagaaccgctctgcgcgccagtcagcctacatccgcaagaagaccagactgctggtggtgttacaaggctacacagatgttattgatgttgtccaggccctgcagacccacccagactcaaatgtcaaggcctccttcaccattggtgccatcacagcatgtgtggagcccatgagctgctacatggagcacagatttctctttcctaaatgtcttgaccagtgttcacaaggcctggtgagtaacgtggtattcaccagtcacaccacggagcagcggcaccctctccttgttcagctgcagagcctcatcagggctgccaatcctgctgcagccttcattcttgcagaaaatgggattgtcaccaggaatgaagacattgagctgattctctcagaaaacagtttttcaagtcctgagatgctacgatctcgatatttaatgtatcctggctggtatgaaggtaaattgaatgctggatcagtctatcccctaatggttcagatctgcgtatggtttggccgtcccttggagaagactcgctttgtggccaaatgtaaagcaattcagtcctccatcaagccaagtcccttctccggaaacatctaccacatcctgggcaaagtgaagttttcagactctgagaggaccatggaggtctgctacaacacactggccaactccttgagcatcatgccagttttggaaggacccacaccaccaccagactccaaaagcgtatctcaagacagcagcgggcagcaggagtgctaccttgtgttcatcggctgctccctgaaggaagacagcatcaaggactggctgcggcagtcagctaagcagaagcctcagaggaaagccctgaagaccagggggatgctgacgcaacaggagatcaggagcatccacgtaaaacgccacttggaacccctacctgcaggctacttttataatggcacccaatttgttaacttctttggtgacaaaactgattttcacccactcatggaccagttcatgaatgactacgtggaagaagccaaccgggaaattgagaagtataaccaggagctggaacagcaggagtatcatgacctctttgagctgaagccctagaggaaggctgggcccgtacgtcctgcagaatgtccaccttggagatggacgaacgggtgtcttaacctcagctctgctggaggcctctcccttaaggggctgtctttgttctccttggcctgtgtgggctggcttgagtgcatgttgtctttattccctgtatagcgctgaagagcatcacctgcaccattgattttgggggtcgggggaatactcaaggatgagcagatggggcctgcccgtctacgtgtgcaactggcagtccaggagctctgggtttctgataacaggatctcctttgggctcttgaggttggggagaagcattaggattacacagaggagctactgggacttagaaggaaccctggctgcctgaactgtggccgtgtctgggaggcgaggccacgacaggcctcaagcctcagatgctgctccacgagagccatcttccccagtggagtgcctgcctcccctgctaggcccgtttccctgaaggagctggccgtactggccgtgggcccagtcctgggaggagcagcacagccttgcccaggcccagtccacagagccagcagcttgggttgagatgaatgatgtgttcacaaatgaggggatttcccttctggactaaactgaaggagaggcttgttgctttccagaggtgtgtggcttcctgaggattgggaatttcaaataattgcaatacctgagttagaattccttctaatggcatcgttttaagctggaccataaagcagaggggaattacaagtgtgtcccatgcctgaccttcataattggtgtgggggacaggggagtcacagccactgatatttaggtgatgtctcttaggacttcagtgcctcagctgcctgaactgtaaatgttttctgaatttcacatatttttttttgcatgccttaggaagaagcacataggtaaaaccagcagtttccagtaatatagggggtttttgagcaaggcccctggagcagcggagagacaagatggagcacatgtagtctgtgtgcctggtcacacagaggcctgcatgcaagtagcaaagcagctctcaagggcttgtcagtaaaatatattagaaaaaaaaaaaaaacaatttgaagccaaatgaacaaaactccagataccattgataagaaattttggcatcaagaagggcttctgaaaagacccacgtgctccagtcccagctccaaaagccactgatgacaagggccccactgtggaacctaagtctgggagccccctgacttctggctggccagaggctgcggtccgtcaagggcttgcctcgcttcagaatcagtaacatagatcttaagtgcaattgattaataagcagtgagttactgtagcttcctttagctctaccgaactctttttaaaaactcaaacttgagcagccttagaaaaggggttggggggtgggaaccacaggccatttctctaagtgggctgctgtgaagttttaaatgaaagctctagctttaggagcttgagccatttcctgactgcactggcctggcagtctggctgctgcacaagagtttttaaagaggggtcggagcccgcccgtgagagcgggtcttctcaccatgtggggctgtactacgtggtggtcttggtttctcttcacagaaatgctctctcaccaacttgccccactgtcccaactcctctcctcttagagaaaaaactgtgattacctcaacttgaatatgaaactgtgattgaaaaaagtcaaaacgtgaagaagcatcaaagccaaaaaggcaaaactggctgaggcctctgttgatgctcctcagcctactcgggaacgtgaaggggcagctggcgaaagggcattcctggggccacttgctctgccccactgataaggcacacccgcggtgcactgtgagctctttgaggactgaggccaggggatgcctcctggaacctgccaggcctctctgttctgtgaaggtcagtatccacttgattcctccaggcggcgctccaggtgggaggagcagggtcttctgctgtttccaaaggaatggccatgacactgcttttgaccttagaagtggatccagggacccagcaaagagcgggggtgggttcccagggacaggcagtcctcccggggcttacatgctttttgctaactttcctattagcagcttcagtttatatcacccagagtgcgtgggataatgttgaagtcgctgaagttacgggttattttatgtttttacatgggatttttctgtttttgattggaagaaggagacagaaattggaggaaatgggattattatcctagggaagggccgttggcaaggagttgagccggcccctctgagccctgggggctatctgacctgaagcctggacactgggcccttcaggtcgcaagaaaaagttccctcctaaattctattaggattttggagaatttttgcacagtaagaagctctgggttgctccttgggcttctcaaaagggaaaagttcaattcaaagattgtaaactacgaagtattccagccgtgttgctgatctagttggatagttgtacctcaaaaaagtaggtgagaactggcttcctcattgtcccaggatgtcaaatactaatgacataagagctcacttacgtgccaaaattcacttttatactagtttttcagtgctttaatatttgtaacttaaattttaaaactcgtatttacaaacactactgtaacttcagtgaaactgaattgtgcgattgaagctttttgcttatcatagtatttattacactacttaattcagtaaatatataaaagtagccttcaatttatttttatattattttacatgtttttacctgcagttgtgtatgtgaatttaccttggtaatcgagatgtcatgctaaggaccaataaactatcactgaacaaaaaaaaaaacca

SEQ ID NO: 336071 - DNA, 1809 bp, Homo sapiens
attttataataccggagttttgctctatcactgtatcatggacagcaagcttatggaacttattcctcaaaaagtgggacatgctgaaaatacaaacctagcttgagtttagttatgtccctaaatgttaactgatccctgtgggtcagtagggagacagctggcatccgtttccaaccagccaaggatattcggtcgactgtactgactgaccactttgctcaggccgcaagtgtccctcagaaaagcctgaggacttattaaggtcatggaaggttgccttggccaggaactcttttctaatcacatgtttttgacttccctctctagccctaaccggcagccatttgttctctttggtaatcactccacacgagaaaacctgaatgctggcaactttaacttcccttctgaaggacatctggtacgaagcactggtcccggcgggagctttgccaagcacatggtagcccagtgtgtctcaccaaagggacctcttgcttgttcgagaacatacctttttggagctactcatgttccttacttgggtggtgacagcaagctgcccaagaaaactgaacaaattaggctattgtcccagatatatgctgctgttattgaggctgttttggctggcattgcatgttatgctaaaacttccagtctaacaaaggccaaggaggtagcagagcaaactctgggatctgggttagattcctttgagttgattccgtttaaggcagccctgcgctccaagatgacttttcatatacatgctgtgaataatcagggaagaattgtaccgctggacagtgaagatagcttatcctttgtgaagacggcttgtatggccgtctatgacattcctgacttactgggaggcaatggttgtttaggatctgtggttttctctgaatcatttttgacttctcagatcttagttaaagaaaaggatggcactgttaccacagaaaccagctccgtagtcctgactgctgctgtacccagattctgctcctggctggtggaagataatgaagtaaaattgtctgagaaaacccagcaagcagtgaggggggatgagtctttcctgggcacttatctaacaggaggagaaggagcatatctttattccagcaatctacagtcctggcctgaggaagggaatgttcatttcttctctagtggccttctgttttctcactgtcgtcatggaagtatcatcatttccaaggatcacatgaattccatttccttctatgatggggattccaccagtactgttgctgctcttctcatagacttcaaaagctcattgcttcctcacctcccagttcatttccatggatcaagcaattttctgatgattgcccttttccccaaatcgaagatataccaagcattttactcagaggtcttctccctctggaaacagcaggataactcagggatctctttaaaagtgatccaggaagatggattatctgtggaacaaaagagattgcactccagtgcacagaagctcttcagtgccctgagccagcctgctggggagaaacggagttccctaaagttactctcagccaaactcccagagctggactggtttctccagcatttcgccatcagcagcattagccaggagcctgtgatgcggacccatcttcctgtgctgctgcagcaagctgaaatcaacactactcacagaatagaaagtgacaaggtagaggagctcaccagatatgctgggaattcacaggaagatgatcttgagagcctgcccctgaatcttttgtgtcagttaacaaa

SEQ ID NO: 336072 - DNA, 214 bp, Homo sapiens
gggaagagagctgagggtctatgagaggtagtgattataatgatcgactggaatttcagctgagttaggaggacatctgaggttgaggatcagcagatgggcattcccaggggattgttggagtcagaataccacatggtatgagttggaaagataggatgtggtggtctgagaatggaggagttgccattattagtaagcttaaggtaggaag

SEQ ID NO: 336073 - DNA, 388 bp, Homo sapiens
atgtgtgtgttgggagagagggagagggcagccctccacctcaggctggggcaggctggagtgaaggtccaagcgctggacccgagcagcagcctcagccccaatctaaaagctcagcccgttttcccatgcatacaatgggcataactgtcccaagaatgaggcttgctggagttactggcaagctgcgcgctgtccgcctaattcacctaattcagggcaagaaccgctctctggcccctgcacctgggagaggtggggtgctggaccgagggcgaagtaacagcgtcctgagggcccatccccaaatcgccttccttagggaagccggaacaaacgatgcagcggggcggccctggatctgttccttcctaagagctggagcagg

SEQ ID NO: 336074 - DNA, 738 bp, Homo sapiens
gtggtgcctggtccttcctatcttttaattggaaaagatcactatgatatattaagtgaaaaaagacaaagtacaagttatatatatggtatatgccaccttttgaataaggaaaaaaagagcataaaggaagaaagacaagaacacgggatataaacaatggcaaagtcaaaacacaagagaggcaaagggatctcccaggagcatggttaggaggaattccagagtgacacctatacatcagatatgagaggtaaagaacccagattggagcaatgagacttatgaatcagaaatattgtcaacaccaacatccccttctgccattataacatgcttttaatctaagaacacaatattatatggagaaggaggtgatcacattcttattctcgctccatgccctgctgcctggataagcagaagacactcatgacccccagaattgttctgctgtgtatgatttatgtttcttctgtgtatgatatatgttttttaacacatcctcctccaacaattgtgaaaccgagtttcacttattactaactggcctgtgattaacacattatatttcctataactgttcactgtcctcaagcatattttgaaaattaatacaagattcaaaacacttaaatattttacaaagtaggggataaaagcaaacataaagcaattcataccgtgtgacacaagtcctgaaatacacttatatactataaagaaatcaaacaataa

SEQ ID NO: 336075 - DNA, 494 bp, Homo sapiens
gtatttattctcctcttgtgtgccagttccatagaggatgtatagatgtgaaaatgtgtggaggatatagattgatcagtaaggagagaattctttcaatttatacgtttccatgtaatttgatttcttttttccaactaacatctatttaagattgaaaagggaatgtggagaaataagttgtattaagatagtagaaataggctgggcgcggtggctcacgcctgtaatcccagcactttgggaggccgaggcgggcggatcacgaggtcaggagatcgagaccatcctggctaacatggtgaaaccccgtctctactaaaaatacaaaaattagctggacatgatggcgggcacctgtagtcccagctactaaggaggctgaggcaggagaatggtgtgaacctgggaggcggagctttcagtgagccaagatggcgccactatactccagcctgggcgacagagcgagactccatttcaaaaaaaaaaag

SEQ ID NO: 336076 - DNA, 341 bp, Homo sapiens
cgtgtcatgcatgtcgaactcctgagctcaggcagtctgcccgcctcggtgtcccaaagtgctaggattataggcgtgagccactgctcccggcctagaaatgtattctcactgtattgctcaggctggtctcaaactcctggcctcaagcagtcctttcactttagcctcccaaagtggtaggattacaggtgtaagccaccacacctgaccaataaggaatctttttaaaaggggctaggaataacccataatactgtctttcttaatacatgtggcagttgggttaaatcttttaatagttcccatagtatgtctcctgcgtgctcattgttttgaag

SEQ ID NO: 336077 - DNA, 201 bp, Homo sapiens
tgagcctctggtttactgtttgatagaaatgaaaatatgtgtataaattaccattaatttcaggacacagtatgccaccctacaattaacttaaaattttgggccaggtacagtagctcacgcctgcaatcccagcactttgggaggccaaggcagggggatcgcttgagcccaggagtcccagaccatcctggctaatat

SEQ ID NO: 336078 - DNA, 303 bp, Homo sapiens
gtgatctagaggatcccgcgaaatcctcctcctcctgaattccttcctcctcttcctccttggaaagcaggtaggggactgcaaacacatactgcaaatagaagacttgatcatctgttctgagcttacagtgaagttgtgaactgactctgctacttttcagagatagtctaagtcaatacttaagaatttgggggccgagagtagtggctcacgcctgtaattcaacacttctggaagctgaggtgggagaattgcttgagactgggagtttgagactagcttgagcaacaaggcaatacc

SEQ ID NO: 336079 - DNA, 1851 bp, Homo sapiens
ggccgttactttactattccgtggtcctcccttggggccctccccgtgtgtgatgtgctccccggtgttgtgctctcctgtatgtccacatttgggctttttgtcgcacgtgcgcgtgcgggtgtcgcccgccggggccggtctcttactatttgtgtgtgggatcgctccctctcgccgctttcgttgcttgtcccccgggggttctcctttggtactaccgcctttgcccctcgttctcgttatgccgcgatctggggccccggtggccccatcgtctggtgttgtcagcagcgtctttttcgcgaggttcgcgttgggggcccaagagtgttgtttggttggggttggtttgtttgtgtttgttttgtagtttcattacctacatactatgagtagtaattattgtttatttcaaaaaattgcattctttatgttttatatatcaacagtctttacacataatgaatgcatgtatatttttctttgattttttttcccagtagccagagtctgtagccttaataaaattatccaaaaataagtattgaaattcctataaataaggttttttttaaatatttattttttgtgacagagtctcgctcttttactggagtacagtgacatgatcttggctccctgcaacctccatctcctgggttctagcgattctcatgcctcagcctcccaagtagctgggattacaggcgtgcgccaccatgcccggttgatttttctatttttagtagagatggggttttgccatattgtccaggctggtcttgaactcatggcctcaagtgatctgcccaccttggcctcccaaagtgctgggattacagatatgagccactatgcccagcctattttatgttgtaaattgagtgatttaaggggatgtatgatgtaatataaagtgaataggtacattttgctttaattttttaaaaattatattactgtattttaataagtatatttttaaattaaagacagagtctcactatgttgtccaggctggtcttgaacctctgacctcaagtgattctcttgccttggcctgtcaaagtgctgggattataggcatgagccaccatgccccgctaaatttagctttatttgttatattttatgacaagtttgtaaccataaagaacacaaaaatttttttcttaagttttcaattaagttacttgtaaaaaggctgaaaacacatactaatcttcctatgtctattaattaatgaattaatttattaaatattctttctgaaaacatttcttagtccttgctttaaagaaccacaactgtgattctcacaggcatgtttataaactttactaattgcatgactagcttatttcacaggtgagaatgatcagtatacatgaataataattttttttagagaaattttaattgtattactattacataaccaagtaattttggagtttagatttaacattttggggaaaaaaacacttgacatataaatttatagattctgatacattttaacaaaaaatttaagttgtttttgccattcttaagaagctcccccttttcctttttcacgtactacaccaagtgaccatgcctccttggaaagcaggtaggggactgcaaacacatactgcaaatagaagacttgatcatctgttctgagcttacagtgaagttgtgaactgactctgctacttttcagagatagtctaagtcaatacttaagaatttgggggccgagagtagtggctcacgcctgtaattcaacacttctggaagctgaggtgggagaattgcttgagactgggagtttgagactagcttgagcaacaaggcaatacc

SEQ ID NO: 336080 - DNA, 193 bp, Homo sapiens
agattataatagctaacctcaatggggactgctggttctccagattttacccaagatatggaccctggagcacaggaaggtgcagtgagctgggtgtgttgctctgttgcagagctggggggtccccaggctgcttccctctcggggcagtgcgtgtttgtaggcatggttttttttccagtgagtttttttc

SEQ ID NO: 336081 - DNA, 497 bp, Homo sapiens
aatagtaactttgaaactgttgaatcaagtataagattgctgtttattatctggatacaaactccttacatgagggaagaaatgtttgttgttcttgttgtttttagtttttgctgaatttaaaccataggcaaatggacaaataccacttgcctaatgagtggaggactgaaaatgtgaattccactccaacatcccaccaggaactcttaaaataaaagacaaaccagaaaaccccctcgcctaagaatatgtctcatgtatcagccaaactctgaacctttttgaagaagagatacgtttccacagttatgctcagggatggtgcctttaattgatgtgaaacctgatctaacttaaaagaactgatctacttcaaaggaaaagctagtcctctctgattctgccacttccattaatgagaaataaataataattgttttgccgcaaaagaccttccccatattgtgaaacaacctttacctacaaggagaaga

SEQ ID NO: 336082 - DNA, 349 bp, Homo sapiens
acaaaataattatcctagagcaaggttttatgtaattaagtaatgtaattttatgtaattaagtaatgttatcctagaatagagatagttgtgtcaataaaaagcacgtaaatttgataatggatttgctttgtgcaaaactgaataggtaggaattccttttctagaaaaaataagatgaagaatcatgtaacacattttctatactgtgcaactagtaaaatgtaaaaataatatttataatagaaattagcttgctctatctaacaagaattcctttgcctggaaaaaaaaagtgttttcataatatgttactaaattgttaaaactcaggttacaaagtaggata

SEQ ID NO: 336083 - DNA, 467 bp, Homo sapiens
agggttgtgatcactcaaatcttgaccaaagtcagatatagggccaaatattttagaacaagatagggccccgctttggtaactgaaaaaaaacgaaactcagcttcttgaagctttgactgatttgcccttctggctacactgcctttgacacctgagcctacttataaccaattcctatagcaaccactgtgggagcctaggacaatggaggaccatcctggtttcaccagatcactactaggggaaccagggggccttccttcccacactcaagactgcctggacatgaacatatcctctgcctgacttccaaagcccgccacaaactacacctgactctctaaccacctctctccaagatcaccttttgctgcacttggtagttctatccacagctccctgcacacactgggcttgttatcattcctggacccacctcacgctgtttcctccctgtccccatc

SEQ ID NO: 336084 - DNA, 201 bp, Homo sapiens
tcgtgaataggacttgtgctttcataaaaagagatattaaagagctcgttgcctgttcctgtttccaccatgtcaggacacggcaggaagatggctgggctaaaccatgaagaatgctctcaccaggaaccaatttggctggcaccttgctcttggatttcccactttccaaattcatgagaaataaatttctgtgtctga

SEQ ID NO: 336085 - DNA, 229 bp, Homo sapiens
ggccccaggcccctgtgactcagcccagagacctggcgcaacccgggcttgggaatcccgttaacccacttcccgaaagctgtgaatcagataaggaaactgaggcagcttagggcggttaagtgacttgcccgagattgctgggtgagtggtggagccggacctgcaccccaacactgggggtggctgctgggactgccctcatggaggcttcgggagcctggaggag

SEQ ID NO: 336086 - DNA, 293 bp, Homo sapiens
catggcgggaggtggtggcgaggggacaagtagtgagatgagcaaataaaagctatttctgtgcattgtggtcactgtggccataggaggggtcccaaagccagatgaaggacccaaagccaggccacagagtacatctgtcctgtgcatgcactgcaaaaagacacctagcaaagggagctaggaagctgaaaggcagtctgtgacctccttcatggtttcctgtatctgccaaaagtgggtacctttttctgatttgcacaaaggctagtggtggccctgtaggtatggcc

SEQ ID NO: 336087 - DNA, 549 bp, Homo sapiens
tggggagcttgaggcttacagatagcagttattcctttggtgcttattttgcagggcactattataggaagcaagcaccttcttaacacaggtatagggaactaatttttggttacatagctgggggtgattcctgttatcagaaaaaattccaaaatgcatacatgagtaggcacttcaaaacactcagaaagtaggccagatcacagttatgttaaaaattagcatgtagacacttaaaggatttagttttttttacattgaaactaacatcatgaaaaacttgtgtttgcggtagttctgttacactgacaaggtcatatgtgatatgatttcagattagtatttttctacaaatgaataggtttctggttttaatgactgtgccagagaactttatgtggatattttcatttaatctttaccataccctgagggcagatcatgtcattaacagattaggacactagggcttcaaaatagttggtaagctgtccagttagcaaagcaggtactccacatctgctggggtccaggagcagctcagat

SEQ ID NO: 336088 - DNA, 618 bp, Homo sapiens
actgggaagctcctagtcaaattctgatgatcatttttatcacttaactttattcttctgactttttgcaacacttttcgggggtcagatataatctttgaaatattccttccatcccacatctaaattaacccacgtttagtagcattcaatgaggattactcctcaaccccattcttttctggctctggggtgacacttctgtgttctctaagtcattcagtccaccttttgtttgtcctctcttatttaaccttggtcttgccttcataacatcctggtattcatctcctccattcccactatctatccgtctttgcacatgtcattatagtgacctcctaacttatttcccttttcatcgtcctattgtttgcccaagcctgcttaattttgttgaatattcattaaatacaaggcttccctgctccctaaatttgtttgtcctctcttatttaaccttggtcttgccttcataacatcctggtattcatctcctccattcccactatctatccgtctttgcacatgtcattatagtgacctcctaacttatttaaccttggtcttgccttcatcacatcctgctattcatctcgtccatcccactcgctctgc

SEQ ID NO: 336089 - DNA, 1388 bp, Homo sapiens
actgggaagctcctagtcaaattctgatgatcatttttatcacttaactttattcttctgactttttgcaacacttttcgggggtcagatataatctttgaaatattccttccatcccacatctaaattaacccacgtttagtagcattcaatgaggattactcctcaaccccattcttttctggctctggggtgacacttctgtgttctctaagtcattcagtccaccttttgtttgtcctctcttatttaaccttggtcttgccttcataacatcctggtattcatctcctccattcccactatctatccgtctttgcacatgtcattatagtgacctcctaacttatttcccttttcatcgtcctattgtttgcccaagcctgcttaattttgttgaatattcattaaatacaaggcttccctgctccctaaatttgtttttcgttgcctactgagaattttccagactcacatcatgcctaagaaaggaagctgaataccttgttgtttcatcccatttctcttggtggttcccgtaaataccttattttttcccaaattaaatataaactttgtgtctccggaataccatagatatcatatcttgggaggatggataacttaatacaactgttaaaattctgctgcacataatgtgcgttttgcatttatatcagttgggcactatattctaatgacattttcaaatactgtgaacttaaagagttgaaaacagtcacatatgtcttcatggattctcaaacagtatttggatgttgtacgtcctaaataagatttttttgcctgctatctaacacctgagtaatatatgttctgtccaactgcataagtcatctctctagtcctagaatagccacacactttaaggaagattattcttattcaggcttatctgatatttggtagacttatgtacttttaaaatctaattttgacatctccatgtgcagactaacaaccttgtctttttaaaaatggtttcctggttggtcacggtggctcacacctgtaatcccagcactttgggaggcctaacatgggaggatagcttgagctccaggagttggaggctgtagtaagctatgattgcaccactgccctccagtctgttgctacagagcaagacctcaactcttgaaaaagtaataaaataagaggtttcccagtgaagatggtctcttattttaccatgttgtcttaaggtgcagttttaatggcgatatatagcttgttttatttagcatttctgattctacttactgtattaggaaattatatcctgaactgccaaagtattttaaacagtgggggaagcatgggagaaaataggttcccttccttcaactgccaaaaagtaaaatcaa

SEQ ID NO: 336090 - DNA, 655 bp, Homo sapiens
gctggtctggaactcttgagctcaagcagtcctcctgcttcagcttctgagcagttggggctacaggtacatgacactgtgtacagctttactaagctgatcatcattccagggataaattaggttgtaagtcagggttgcctgtggtactatatttgaagattatgcacttaaaaagaaagaggcatatgctttagattcatttccttgtcgctattggccttatgcttatatcacttatggaagatggatagggaaatcttgaatcgtggacaaattgtgggaaagtttccaaatcaagaaatataggctggttgcggtggctgatgcctgtaatctcagcattttgggaggctgaggtaggtggtttgtttgagcccaggagttccagaccagcctgggcaacatagcaaaaccctgtctctgctaaaaatacaaaaaaattggccaggcatggtggtgcatgcctgtagtccagctactcaggaggctgaggtgggaggattgcttcagcctgggaggtggattctgcagtgagctgtgatcacgccactgcactccagcctgggccacagagtaagaccctgtctcaaaaaaataattaattttttaaaaaagaaatataaattctcttttagtaagcttaaggctatga

SEQ ID NO: 336091 - DNA, 416 bp, Homo sapiens
tgagcccagatttcaccacagcactccagcctaggtgacagagtgagactacatttcaataaaacaaaaggaaaagaaccacgtatctagaaggcttccaccaggatgccacggcctttgggtgggtggaatcatgggtgttctttaggagctactttttgcttggctgtatttcttttttttccttcctattctgagcattggttacttttgaataagagacaggagctggacttactctaaactctactttaaatctctagttcattttagccagctttctctaattggcagtgtttttgaggaaacttcagattgaaaaagggtgaatgcttccaataaccagttaatgaggaagctgaggcccaagaggtccagtgatttatctgcccaggatgggcagcagggcaggctga

SEQ ID NO: 336092 - DNA, 557 bp, Homo sapiens
cattttctgcttaaactccttagagcggcttctgttgtctgcaactaacaacattaatcaaaacaacttcttaccttataccttaggttttttaatccttaatgtagtatctcctcctcattgttacagaacgtgcttgagatacatgcctcaaatttcacttgagaaaaggcaagtctcagttactttgaatatgtattatatcagctttatagactagcattagcactagtctcctccattaattcacttaacaaagatctattacaggggtactgtgtaccaggtgctgagatgaccatggtacacatataagacacagttcctgccttcatagagcttatcatctagtagaaaaagaatagcggctgggtgtggtggttcacgcctgtaatcccagcactttgggaggccaaggcagatggatcacgaggtcaggagttcgaaaccagcctgaccaacaaggtgaaaacccgtctctactaaaaatacaaaaatcagctgggcgcagtggcgcaggcctgtaatctcaactactcaggaggctgaggcaggag

SEQ ID NO: 336093 - DNA, 203 bp, Homo sapiens
aacttggggccacagatctctcagagatctgtccagtggtgagttgactggggcccagacaagcagcttgtccatcatctcagagtctctcgaaggccaggcctagaactcatctggctgccttactacctggtgtctggaatgggccccctaggcacacagatgtaccatttattcatccagtccatcacccaacacacatt

SEQ ID NO: 336094 - DNA, 260 bp, Homo sapiens
gtgtgtgtgtgtgtgtgtgtgtgtgtgtgtgtgctgctataacagaataccacagactaggaaatgttaaagaacagaaacttatttctcatagttctggacactgggaagtccaagattaaggtgccagcatatttagtctctggttccaagatggtgcatcattgctgcattctccagcaagggggaacactgtgtcctcacatggcagaagagtagaagagagagcgagagagagaaagcccacttccacaagccct

SEQ ID NO: 336095 - DNA, 338 bp, Homo sapiens
aatgaaaactaagtgtgtaattctaaataaatgttgactatataaaacaatagtgtcttcttggattgaatgtataattgataagatatatgcaaatagcaataaagaggctggagataaaggtaacaggaataaatttagtcaaactgtgttttgggcttttctatgtctgtgagaagaatttgaacatcataatcaaggaccctgtaattctacacccagatatatatacacagaggaattgtagcaaatgatatgtgaaagaatgttcattgtagcattattcataaaagctcaaaaaataagctgtccaaatatatatcaaataaggatggata

SEQ ID NO: 336096 - DNA, 515 bp, Homo sapiens
tgaagtgtcccatgtcttgcatctatttcattggcaagaaggattatctaaatgacattgaagacggggtgtcagtatttagatgatgaaggtttccatgagttcttgttttggggaacagaatgaatccatacatgagttcctgttttggggaacagaatgaatccatacagttacagagatatagagtgcctagagacagtagcccaattttttggttgcaggtttcctatgctatttacatgtttcagaaaacctagtgaatgtttagatgctatgcatgttgtccagcagctgtactcaggaaaagcaagagcaacatttgtgagtttcattacatcttattttattatttccataaaattgtgttttattatgcaatcacaaggacttctaagccaccaagagactgacaaggatttcgctttgcagaacaacccctaaaacagaacaaattcaattatccagaggcctattttgtaggagaggtaatctttgctttagaatttttaaaa

SEQ ID NO: 336097 - DNA, 397 bp, Homo sapiens
tgatttctcaggatgctcatttcctttcacaagtagtcccaggtagtatgtcatgtccagagcagtcctggtactctcctagaacaccacagctcaacatcctttcggttcactgtccagaggcctagcatgctcatttcctctctaaaccccttgactctcagaaatgtccctaacacatttacagtttacaaagtattttcacatgtcatttaattcttgcaagtactctgtgagatgacagagactcaatcattcatttattcagcaagcactaatcaagggctaggtaccatgccagaccctggggagacagaacaagctaagatgtgctgcccacacttgaggagctcacagaacaccaagggaaacaggcaatgccccggcctagctgcca

SEQ ID NO: 336098 - DNA, 140 bp, Homo sapiens
gaatatcatcattctcatctgactgaacgaagtcacagagaataacttgcccaaaattacataattagtaagtagcaaggagaggatctgaacccaggcagtctgattgccaagtccatgggcttagatactttgctata

SEQ ID NO: 336099 - DNA, 962 bp, Homo sapiens
cttctcagttgagagaatttgtgcctttgaactccatggcatattcatcctctaacagcgacatagaggacgacagctccaaatccaattccaacctgagcctctctgtgggctatttcccctgtgaggacaccccctgtgaggacacaacctcctgggaagatgcaccttccaagggtccttccatccactttctgcctcccgtccaaggggcatgggggactgaaaggatagggagacgcatgaagagacaagaccaaattcaggatgaaccagagcagttttgcaaactaagcatcttcctggcctgggacgtggacattggctccgataacacagactcaagagctaataggcttctaaatggagacaacctgtggatagacaagttaccaaaagagagaacaaaactgtctgttggcaaactgaataatcttgtgcaagagtttcagatatttctagaaaatctgaaagatgatgacgctgtatttcctgaaactgctcagcaagatttccagctatccagcggctcccctccggaaatggttcagatgataagccaggcaaccgccagccaaaggacaagcgctccagagatctcctcaatcctgtcagagcagccagagaaggatgacactccttcacacacacaggcccagtgctgcctgaactttgggtgggccttcagctggctgaggcagcgtatcctcccctctctgctgaggagggatcaccctgtgaatgccaccaaaagtccccatcggtcagcaccaacgaaaagactctttcacaagacaagagaattcaacatccagaagaccatgaattaggacaacacatataagacagatttttaaactttttggaaagtttaaaataatccataataaggattccattaataatccccatcagtttgttttttcctcaataaacaaaataaatgctcttgttaccccaca

SEQ ID NO: 336100 - DNA, 223 bp, Homo sapiens
aatgtgctttctcatttgtgggtggctcaactttttgataaagtgagatagaagtctctttgttgggagaagttgaagcaactgctgctgctatctaaaatacaaatagtggctcagaaccttccttcttcttcgccttccattggctgcagtggccccagcaccaccatggctggcctccagtcctaattcactgagatgtccagaaagaataatggtagag

SEQ ID NO: 336101 - DNA, 705 bp, Homo sapiens
gcatggtgtctctatttgctgttgaacagctgatataaaaggaattgaagcaggccatgtatggtggctcacgcctgtaatcccaacactttgggaggccaaggcgggaggatcacttgaggccagaagcttgagaccagcctgggcaaatagtgagaccccatctctacagaaaattttaaaattttttgttgtggtggcacaggcctgtggtgttaactgtttaaaaggttgagggtggaggattgcctgggccaaggacttccaggttgtgatgacctatgatcgcaccactgcactccgccctgggcaacagagtaagaccctgtctcgaaaaaaaaaaacaaaaaaacccaactcctaagattacaaaaagcagtaaatatctattacagaacagaagaaaataaaaatcacctttaatccagcacccaccaataagctctgggatcactggggggttatttccagcccttccccttcttttctttaagtttttgaaaattctaaaatattctaaagtagaacagaaaagcatagaaaataatattgcagacacccacctctcaggttgaacaaaccttaacattgccatacctgcctctcttctcttttctttctatctttcttagaaatagaaatgattcaggtccagaaggagtcaggacagtgtggtctactggccaaacccagcccctcatctgt

SEQ ID NO: 336102 - DNA, 1080 bp, Homo sapiens
gaataggacaggattggagaagtttggtgaaaatgggggtgcaagagaagcttggatttcccattaactgtcaatacagtcatggttccacctggtatctagaaacctgttcacaattgtaggtttagcagcacacagggtggggtaagtgtctctccccatcaggagcagcctctgaactctcctgggaccctgagcttcagggaacccaggctgtggcccccctcccccactttggcaatgctgtctgcagagggaagggccggttttactagcacagggagtgctccggctcctgtgtgtcggggaaattctggaagaggctctcttccagaagttatggaaggtccccgggagacagaccaccagtttgggccaaacccctccatctacatgaaacaacaacaacaacaataataatgtttacggccaggcaccatggtttatgcctgtaatcccaacactttgggaggccaaggcgggaggatcacttgaggccagaagcttgagaccagcctgggcaaatagtgagaccccatctctacagaaaattttaaaattttttgttgtggtggcacaggcctgtggtgttaactgtttaaaaggttgagggtggaggattgcctgggccaaggacttccaggttgtgatgacctatgatcgcaccactgcactccgccctgggcaacagagtaagaccctgtctcgaaaaaaaaaaacaaaaaaacccaactcctaagattacaaaaagcagtaaatatctattacagaacagaagaaaataaaaatcacctttaatccagcacccaccaataagctctgggatcactggggggttatttccagcccttccccttcttttctttaagtttttgaaaattctaaaatattctaaagtagaacagaaaagcatagaaaataatattgcagacacccacctctcaggttgaacaaaccttaacattgccatacctgcctctcttctcttttctttctatctttcttagaaatagaaatgattcaggtccagaaggagtcaggacagtgtggtctactggccaaacccagcccctcatctgt

SEQ ID NO: 336103 - DNA, 241 bp, Homo sapiens
gtttattgcaagtcgactgacaaggagacagaaggaaacgctcaaatctgtcttcccaagctgactggatcctgccatggagtcatgccaggacttgatctgattggatcctgaatcctgccatgcagtatccacctcttaattcagtccttactccttagtccaagcacttaggttctgcccatttggttcatcttcatgttcaggttatgtgaccttcaaactgggggtccaacagcaa

SEQ ID NO: 336104 - DNA, 322 bp, Homo sapiens
atggtgcccagccacattgacgctgggtctgcctcttccagtccgctgactcaaatgttaaccttctttggcaacaccctcacaaacacacccaggaacaatactttgcattcttcaatcaagttgacactccataataaccacatacatgggggtatttaccaggtgtcttgttttggggtccccaggcgccgagtgtgcttgggtgagagtggaactctccctcgttacgcgcagcagctctggcggccacatggctgatgagtgcccacctggctttgaaggctgtccttgggcactgtgggcacagactcggagacgg

SEQ ID NO: 336105 - DNA, 555 bp, Homo sapiens
tcttaatgtccattcttggtagcctgtggaccccagagaaaggcaaatgtctaagtccatatccatcttcttgggacattccgttctctgacgcctgtctgagggactatctgtacccccaataaacttgcaaaaaccgaggcccagagaggtgaagccaccatctctaggtcacacagccagtaaatgcagagccaggtccaagcccagctgtgtgtgactccaatgccatgcctttaaccacctgacattactactctattattgctcagtccaggtggagacaacaggcattcaccaagcacttgctgtgtgtcaagggggcagtgggactggaggtgagggtggctgaggtactgatcctggaccacaggtgctgtcctgggaaggcagaccctcatactgctaagcatatgtcaggtaatgcatcatatatccacagtcattcattcattcagtctctgctcttgcctgtccctgggctctgggtggtgggtcagatatggtccttcccctgagagctcctgacccagcaggggaacagatagttaaata

SEQ ID NO: 336106 - DNA, 268 bp, Homo sapiens
ggaggaaagaaagagaaaactccaaaaacaaaaaaagaaaaaccaggcaattagaagaagcacaattggtcacagccgtaggaaaaacatcccatgtcagtagtcagtgaagaaaaagcaacagaaaccacagggcggcagcatgtctctcttttcagagctgcccgagttacaaaccaggtcctggagctggtgatgcggaggtgagtagacagagagctggggcaaaccgagaactccacctcccctcggcctcaagcacctcggg

SEQ ID NO: 336107 - DNA, 246 bp, Homo sapiens
tcagaggcagctccatggatccccactgttcacctgtgtatggaaactcaggttttctggtcacacttagataataaaaagtggaagaggcctttctatcaccaaacgctctaaatcagatcctggaaatgccagcttcattcagccgtgagcagtgctgctgaccgtggagctgtttcccccaccagactcagtgtgggtgtctgagtgtgtggtgtgagtgtgtgtaatgtgagcctgtggtgt

SEQ ID NO: 336108 - DNA, 166 bp, Homo sapiens
tctctaccaagcagccatcctggtgagaagggtgaggacggggctccccagggtccagggtccccgtggtgtccgtccacatgtgcgattttaaaggaaaatgggggaagctgatgctgtttacacctggagatgctcacgagcaagtagtgtcacagcagaacct

SEQ ID NO: 336109 - DNA, 336 bp, Homo sapiens
accctacagtaaaggtgatattcagggggtatggtgggaacagagaggaaggaatgcacccttggcttggagaatgggccccgtgagccttctcagcaggaatgtggaagacagtttgcatactgccgagggcacgctggtcaaagacacagtatgtgctaaaactcagagaagggaaagacagggtttgtctcatacgatcggagaatatggggaaatagccagagatgctttcattccacacatatctatggagtgtcaactaatgccaggtactggcaacagaaatagaagacacattcctcccttcaaggagtttagagactggtagggaga

SEQ ID NO: 336110 - DNA, 340 bp, Homo sapiens
ttgtacatcgaaacttaacatgagaggattgtgattagttagtggaaatcctattccttagtcaagcaaattttctcccaagccattttcctctatttattcacattattggcaaagctcactgtcatcataactctgaatctaatttctgctagtgagattaacaatgaccaagtaagtatactgttaagtgtgtttggatttatagcccatcccttgatttttcattaaggccactatcctgaattttgtcagtaaaaatattatgtcctcactgaatctctccctcacctaattctgtatttgtttataccactgcttatacgccattattgcattt

SEQ ID NO: 336111 - DNA, 399 bp, Homo sapiens
ccatggttcttggcagaggagggttgggggtgactgaggagagccaggcctaggcaatacaagcttctctgagcttcttagaatgcagacatttaaacagaaaacacagagccttcctggagagccttcctgaagaatcactgtgtcaagacctgaccatgggcaaacccaggaaagtttgcagccagatccccattcctgttacccaacgggaggggcaagactcctaggactggctagaaaattgctttgttgagtgtttgctgtggttgttcctaaacctgtctgtccagaagctggacatgcagtaggcccctgcgagtagaaactttccttgtgtggaagttttcgctggcaaaccagtctggcggcagcaggggggtgggtggggttctctgt

SEQ ID NO: 336112 - DNA, 196 bp, Homo sapiens
tgccaatccagtgcttgttacatgattatctgacaccaaggctctgtaacaaacatcctcaaaaagagaggcagtctctgcactgcctttcattcaccaaaacaaagatggagccctctacctagctgaactaaggttttggagtcagagtaaaattcaaaagaaaaagtcacagaataatgaaagggtgattata

SEQ ID NO: 336113 - DNA, 427 bp, Homo sapiens
catggtccaaacatccagctctctgatggtctgggtttactgagatgtaaaacttttggcaaaactgatatttttaagccattctttgtaaatattatttctgctaactgggtttttgatagactctgggaaataagcaattaaaggttgttttggggttctcttgtaagagacccaaaggaggcattctgagtaagtgatcttggggagactcacatacttaaaaatcaatggagtgtggggaaaggtggcaggactggtgatattttgcaaacattgagggtccctatactgagtgctttttggatttgcttttctaattcaaccagtcagccatagaaaattctcaattgcactcccaattatattatgatttagaataattagctccttttgaataccctagaatgaattctttaattgcaaa

SEQ ID NO: 336114 - DNA, 298 bp, Homo sapiens
cctccagctaagacacaatgcgacactgaaaaatcactggcaaagttcacagttgaactctgaaagtgatacttgtttttaatttttttgatccggccttgtgatatgattcctgttgtcaggttagaatcaattgtggtctctagtagcaaacacacctgtgacattctgttaaacaatcagctattctttctacttaaattttaacataagtgacattaagaaactgttttctttttttaactttcataatgcttccctaacttgtgtgccctactcttccgtaaattctctccac

SEQ ID NO: 336115 - DNA, 421 bp, Homo sapiens
ccagcagtaggagggagagactcactaaggacaaaaccccatgaaatgaccaagatgtacatggtttctttagaggagtatgggcaaaaaagaatgagaaataaaggctaaagatttatgaaaagaatctggacagaattacatctggggcatcaagagaagagaggattttcaagaaagctgccctggtaaagagggacacagtcttctgctgagatacatgggatggtcacaggattgacatcagggaatctctaattaagaagctgtagggtaggcttccttctccagcgctgtttttgtagagtaaaacagctgaaagtgataatttgaagagtgaactggaggtgaggaagtagagaaaagaggtataaactacccttgtaagaaatgaggtgctaatacattgaaaaggtacagc

SEQ ID NO: 336116 - DNA, 1385 bp, Homo sapiens
taactaatattagcaacaataatgactaatggcctgaagactgaagacatgaggaaatgttagaaataattgaaaacaacttgaagaaggaggataaagtgaaggtcctttgctgccagcatgatgtcgtatttataatatgtggaggagagagagctcaccatgctcagtttgagaagttgcagtatatctgtacacacaccctctattctacattgaggctcacaagtatttccctccggagtgtagctcctgtgaaatgctccaagatgatctcggatgcaaattcagccatgcaagagtgatgaaatgcttgcattatttccaaagatgaattaagacaatgaggcagctcttcatttgtcaagatccagcacaaaggtgctcaagaaatgttgatatgaaaaaaaatcaaaccaacctggctaagggttctctacactggaaattacctgtggataagttatgctgtagccagggtgctggtaccatccaaacagataattcagaggagacaggggacaccaaaataataagaaggacttgcaatcaaaacctgaagaggttttctctgacattgacttcagcagttcttcaccctaggaggtctacagaggggcttcaggaaaccagaaaccacatgcacaaagaagtatttttctgagaattgagcttatcagtttctgggttgttgttttttttccagattttcaaaggattctgtgaggcccccaaaacttgagaacctcttggattcatctctccactctggtttctacccccagaatctatcaagtggcctcactcctggattacctccagcacaagagaaagtgcatattctgtctgctctactgggccaggggagtagggaaagaacaggagacagtaaggataaaatgaaagcaacataaatgggcagcataaaatagaaaaagcagctattgcatctccctcatttcagattatttgtcagatatgcccttccccacacatgtgtgtatgcatgttccattacatcacagttctgtccatctgcccgtcccactagaccatgaatccttggcaatcaagaccataactctcatagtacccaacacaataactgccctgtaatacattcccaataagtatttgctgaatttaattgaagcaaattaatagaagacgacatattgtgcatagttcctataattatatacaaactgaggcccagaactgaaccattagccatggtattggtatcactgtcaactcagactcccaggcaacagtgcaaatggaattggaacacagggaccctctcctcacctccgcccctttgtttctcaaatgtacaaattctaaataaaatagaacaaaataaattttgtttggctttagag

SEQ ID NO: 336117 - DNA, 1157 bp, Homo sapiens
taactaatattagcaacaataatgactaatggcctgaagactgaagacatgaggaaatgttagaaataattgaaaacaacttgaagaaggaggataaagtgaaggtcctttgctgccagcatgatgtcgtatttataatatgtggaggagagagagctcaccatgctcagtatttccctccggagtgtagctcctgtgaaatgctccaagatgatctcggatgcaaattcagccatgcaagagtgatgaaatgcttgcattatttccaaagatgaattaagacaatgaggcagctcttcatttgtcaagatccagcacaaaggtgctcaagaaatgttgatatgaaaaaaaatcaaaccaacctggctaagggttctctacactggaaattacctgtggataagttatgctgtagccagggtgctggtaccatccaaacagataattcagaggagacaggggacaccaaaataataagattttcaaaggattctgtgaggcccccaaaacttgagaacctcttggattcatctctccactctggtttctacccccagaatctatcaagtggcctcactcctggattacctccagcacaagagaaagtgcatattctgtctgctctactgggccaggggagtagggaaagaacaggagacagtaaggataaaatgaaagcaacataaatgggcagcataaaatagaaaaagcagctattgcatctccctcatttcagattatttgtcagatatgcccttccccacacatgtgtgtatgcatgttccattacatcacagttctgtccatctgcccgtcccactagaccatgaatccttggcaatcaagaccataactctcatagtacccaacacaataactgccctgtaatacattcccaataagtatttgctgaatttaattgaagcaaattaatagaagacgacatattgtgcatagttcctataattatatacaaactgaggcccagaactgaaccattagccatggtattggtatcactgtcaactcagactcccaggcaacagtgcaaatggaattggaacacagggaccctctcctcacctccgcccctttgtttctcaaatgtacaaattctaaataaaatagaacaaaataaattttgtttggctttagag

SEQ ID NO: 336118 - DNA, 987 bp, Homo sapiens
taactaatattagcaacaataatgactaatggcctgaagactgaagacatgaggaaatgttagaaataattgaaaacaacttgaagaaggaggataaagtgaaggtcctttgctgccagcatgatgtcgtatttataatatgtggaggagagagagctcaccatgctcagtatttccctccggagtgtagctcctgtgaaatgctccaagatgatctcggatgcaaattcagccatgcaagagtgatgaaatgcttgcattatttccaaagatgaattaagacaatgaggcagctcttcatttgtcaaattttcaaaggattctgtgaggcccccaaaacttgagaacctcttggattcatctctccactctggtttctacccccagaatctatcaagtggcctcactcctggattacctccagcacaagagaaagtgcatattctgtctgctctactgggccaggggagtagggaaagaacaggagacagtaaggataaaatgaaagcaacataaatgggcagcataaaatagaaaaagcagctattgcatctccctcatttcagattatttgtcagatatgcccttccccacacatgtgtgtatgcatgttccattacatcacagttctgtccatctgcccgtcccactagaccatgaatccttggcaatcaagaccataactctcatagtacccaacacaataactgccctgtaatacattcccaataagtatttgctgaatttaattgaagcaaattaatagaagacgacatattgtgcatagttcctataattatatacaaactgaggcccagaactgaaccattagccatggtattggtatcactgtcaactcagactcccaggcaacagtgcaaatggaattggaacacagggaccctctcctcacctccgcccctttgtttctcaaatgtacaaattctaaataaaatagaacaaaataaattttgtttggctttagag

SEQ ID NO: 336119 - DNA, 98 bp, Homo sapiens
catcacgacattatactttttaatagcaaaagactgaaaacaacacaaacatccatgaaaaggggacatattaagtaaactatggtacatacatatta

SEQ ID NO: 336120 - DNA, 1063 bp, Homo sapiens
aatcccaggtagatgttgtcagataaacttgaggtaaggccaagaagacagacattttatgcttcatactttctgtaattatcttttgtagcttgattacatagagtaccctctcttccttaagttgtagttgctatttatcattgtagacaaattctgttgcctttcagcaacgtatgctgaactagtatcataagatggtgcatcagttcataagctagtgcataagttttgtgtcaaaacttttaaatcctgaagttctgcagttatcatcttagttattttctatctaattagcttataattgcaaacactagtcagcttgtgatctctgtgtttcaagttcttttcttcacgaggttcagtacctgctatgttgatctttggcagtgccagaggcttaaattttgacctgctcaattaaaaataaacactggcgtttataatgaaaaggtttttttgtcgggggggggggggtcaagagaatttattttgtgatagtaataattttcaagaccttcagtcattcctatgtctatgttgctatctttattttaaaacttagaaccctgatctaactcccttctcaagtgaagatactgtgtagattcaagaattataatgtagagtaataggcctttaagtttttttttaatctgttagaaataaagagcatgatttaattattgttgaattaacaattaaaatgaatccctttggagggatggcattgaataacttataatttcagtgaatcatttacgttttcattggaagacagtatctgatttcaactggtgcgttacgaagtagagccattcccacaaagtaaatgtgcagtgcccatgtttcttgtgtttaaatattttttattttcactacatatatattattttctcatgtttatttactaatgtaattttcacttaaaattagatgtttattttcaaattttaaaagctagtgctcttaaaagagctaaattatatttctggaagcaggagtttagtataaatgtaataaaattttaaaataaaattgacttccctacttaaaattgggt

SEQ ID NO: 336121 - DNA, 3045 bp, Homo sapiens
acgtcaggcgtcctctctcgcggtatcatccggttgctgaggccctgtaataaaggtctcgcgaaatttgttctagaggtccaagtttgcttcttagcttactccaccccacccccaacctgtccctccttttctttccaagtcacaaaattctcccctcccctaccccggagtttacggccctcctcctgtttccgatttcagcccggaaccggaagtgtagtgggcggggcccgtcggcggaaaacgcagcggagccagagccggacacggctgtggccgctgcctctacccccgccacggatcgccgggtagtaggactgcgcggctccaggctgagggtcggtccggaggcgggtgggcgcgggtctcacccggattgtccgggtggcaccgttcccggccccaccgggcgccgcgagggatcatgtctacagcctctgccgcctcctcctcctcctcgtcttcggccggtgagatgatcgaagccccttcccaggtcctcaactttgaagagatcgactacaaggagatcgaggtggaagaggttgttggaagaggagcctttggagttgtttgcaaagctaagtggagagcaaaagatgttgctattaaacaaatagaaagtgaatctgagaggaaagcgtttattgtagagcttcggcagttatcccgtgtgaaccatcctaatattgtaaagctttatggagcctgcttgaatccagtgtgtcttgtgatggaatatgctgaagggggctctttatataatgtgctgcatggtgctgaaccattgccatattatactgctgcccacgcaatgagttggtgtttacagtgttcccaaggagtggcttatcttcacagcatgcaacccaaagcgctaattcacagggacctgaaaccaccaaacttactgctggttgcaggggggacagttctaaaaatttgtgattttggtacagcctgtgacattcagacacacatgaccaataacaaggggagtgctgcttggatggcacctgaagtttttgaaggtagtaattacagtgaaaaatgtgacgtcttcagctggggtattattctttgggaagtgataacgcgtcggaaaccctttgatgagattggtggcccagctttccgaatcatgtgggctgttcataatggtactcgaccaccactgataaaaaatttacctaagcccattgagagcctgatgactcgttgttggtctaaagatccttcccagcgcccttcaatggaggaaattgtgaaaataatgactcacttgatgcggtactttccaggagcagatgagccattacagtatccttgtcagtattcagatgaaggacagagcaactctgccaccagtacaggctcattcatggacattgcttctacaaatacgagtaacaaaagtgacactaatatggagcaagttcctgccacaaatgatactattaagcgcttagaatcaaaattgttgaaaaatcaggcaaagcaacagagtgaatctggacgtttaagcttgggagcctcccgtgggagcagtgtggagagcttgcccccaacctctgagggcaagaggatgagtgctgacatgtctgaaatagaagctaggatcgccgcaaccacaggcaacggacagccaagacgtagatccatccaagacttgactgtaactggaacagaacctggtcaggtgagcagtaggtcatccagtcccagtgtcagaatgattactacctcaggaccaacctcagaaaagccaactcgaagtcatccatggacccctgatgattccacagataccaatggatcagataactccatcccaatggcttatcttacactggatcaccaactacagcctctagcaccgtgcccaaactccaaagaatctatggcagtgtttgaacagcattgtaaaatggcacaagaatatatgaaagttcaaacagaaattgcattgttattacagagaaagcaagaactagttgcagaactggaccaggatgaaaaggaccagcaaaatacatctcgcctggtacaggaacataaaaagcttttagatgaaaacaaaagcctttctacttactaccagcaatgcaaaaaacaactagaggtcatcagaagtcagcagcagaaacgacaaggcacttcatgattctctgggaccgttacattttgaaatatgcaaagaaagactttttttttaaggaaaggaaaaccttataatgacgattcatgagtgttagctttttggcgtgttctgaatgccaactgcctatatttgctgcatttttttcattgtttattttccttttctcatggtggacatacaattttactgtttcattgcataacatggtagcatctgtgacttgaatgagcagcactttgcaacttcaaaacagatgcagtgaactgtggctgtatatgcatgctcattgtgtgaaggctagcctaacagaacaggaggtatcaaactagctgctatgtgcaaacagcgtccattttttcatattagaggtggaacctcaagaatgactttattcttgtatctcatctcaaaatattaataatttttttcccaaaagatggtatataccaagttaaagacagggtattataaatttagagtgattggtggtatattacggaaatacggaacctttagggatagttccgtgtaagggctttgatgccagcatccttggatcagtactgaactcagttccatccgtaaaatatgtaaaggtaagtggcagctgctctatttaatgaaagcagttttaccggattttgttagactaaaatttgattgtgatacattgaacaaaatggaactcatttttttttaaggagtaaagatttttaattctgtgattgtgtgtatgtgtgttgaaactgtaaagcttttatgactctaatattaatctcttaaatgaaattaaaaggcaaaagaacatgattgagcttaaatgatcatttcttcctgcagtgattcttggattgttttctcatgtatttgaaaaaaaaaaa

SEQ ID NO: 336122 - DNA, 3126 bp, Homo sapiens
acgtcaggcgtcctctctcgcggtatcatccggttgctgaggccctgtaataaaggtctcgcgaaatttgttctagaggtccaagtttgcttcttagcttactccaccccacccccaacctgtccctccttttctttccaagtcacaaaattctcccctcccctaccccggagtttacggccctcctcctgtttccgatttcagcccggaaccggaagtgtagtgggcggggcccgtcggcggaaaacgcagcggagccagagccggacacggctgtggccgctgcctctacccccgccacggatcgccgggtagtaggactgcgcggctccaggctgagggtcggtccggaggcgggtgggcgcgggtctcacccggattgtccgggtggcaccgttcccggccccaccgggcgccgcgagggatcatgtctacagcctctgccgcctcctcctcctcctcgtcttcggccggtgagatgatcgaagccccttcccaggtcctcaactttgaagagatcgactacaaggagatcgaggtggaagaggttgttggaagaggagcctttggagttgtttgcaaagctaagtggagagcaaaagatgttgctattaaacaaatagaaagtgaatctgagaggaaagcgtttattgtagagcttcggcagttatcccgtgtgaaccatcctaatattgtaaagctttatggagcctgcttgaatccagtgtgtcttgtgatggaatatgctgaagggggctctttatataatgtgctgcatggtgctgaaccattgccatattatactgctgcccacgcaatgagttggtgtttacagtgttcccaaggagtggcttatcttcacagcatgcaacccaaagcgctaattcacagggacctgaaaccaccaaacttactgctggttgcaggggggacagttctaaaaatttgtgattttggtacagcctgtgacattcagacacacatgaccaataacaaggggagtgctgcttggatggcacctgaagtttttgaaggtagtaattacagtgaaaaatgtgacgtcttcagctggggtattattctttgggaagtgataacgcgtcggaaaccctttgatgagattggtggcccagctttccgaatcatgtgggctgttcataatggtactcgaccaccactgataaaaaatttacctaagcccattgagagcctgatgactcgttgttggtctaaagatccttcccagcgcccttcaatggaggaaattgtgaaaataatgactcacttgatgcggtactttccaggagcagatgagccattacagtatccttgtcagtattcagatgaaggacagagcaactctgccaccagtacaggctcattcatggacattgcttctacaaatacgagtaacaaaagtgacactaatatggagcaagttcctgccacaaatgatactattaagcgcttagaatcaaaattgttgaaaaatcaggcaaagcaacagagtgaatctggacgtttaagcttgggagcctcccgtgggagcagtgtggagagcttgcccccaacctctgagggcaagaggatgagtgctgacatgtctgaaatagaagctaggatcgccgcaaccacagcctattccaagcctaaacggggccaccgtaaaactgcttcatttggcaacattctggatgtccctgagatcgtcatatcaggcaacggacagccaagacgtagatccatccaagacttgactgtaactggaacagaacctggtcaggtgagcagtaggtcatccagtcccagtgtcagaatgattactacctcaggaccaacctcagaaaagccaactcgaagtcatccatggacccctgatgattccacagataccaatggatcagataactccatcccaatggcttatcttacactggatcaccaactacagcctctagcaccgtgcccaaactccaaagaatctatggcagtgtttgaacagcattgtaaaatggcacaagaatatatgaaagttcaaacagaaattgcattgttattacagagaaagcaagaactagttgcagaactggaccaggatgaaaaggaccagcaaaatacatctcgcctggtacaggaacataaaaagcttttagatgaaaacaaaagcctttctacttactaccagcaatgcaaaaaacaactagaggtcatcagaagtcagcagcagaaacgacaaggcacttcatgattctctgggaccgttacattttgaaatatgcaaagaaagactttttttttaaggaaaggaaaaccttataatgacgattcatgagtgttagctttttggcgtgttctgaatgccaactgcctatatttgctgcatttttttcattgtttattttccttttctcatggtggacatacaattttactgtttcattgcataacatggtagcatctgtgacttgaatgagcagcactttgcaacttcaaaacagatgcagtgaactgtggctgtatatgcatgctcattgtgtgaaggctagcctaacagaacaggaggtatcaaactagctgctatgtgcaaacagcgtccattttttcatattagaggtggaacctcaagaatgactttattcttgtatctcatctcaaaatattaataatttttttcccaaaagatggtatataccaagttaaagacagggtattataaatttagagtgattggtggtatattacggaaatacggaacctttagggatagttccgtgtaagggctttgatgccagcatccttggatcagtactgaactcagttccatccgtaaaatatgtaaaggtaagtggcagctgctctatttaatgaaagcagttttaccggattttgttagactaaaatttgattgtgatacattgaacaaaatggaactcatttttttttaaggagtaaagatttttaattctgtgattgtgtgtatgtgtgttgaaactgtaaagcttttatgactctaatattaatctcttaaatgaaattaaaaggcaaaagaacatgattgagcttaaatgatcatttcttcctgcagtgattcttggattgttttctcatgtatttgaaaaaaaaaaa

SEQ ID NO: 336123 - DNA, 817 bp, Homo sapiens
gaaaaataatggaaaatggaagtaattactccagctaaaaaaagcttggacttagatttctttttatgataccaaatgagaaataaaccaggcaaatcagaaggaagttaaagaagcaaatataaattcaacaagtgtcctaattatcctggatattggaatatttgattttccttacaatcccgttctagaatgcctgccgcctttcaacactttcaagagaatttcaacacttacagagtatttatattgttaacagtaattttgctaccaaaaccttcagaataactttaataataaaatgacactgaaataatagactatacaaactctatattttttcagttggtgttaaaataagtcacattttgataccagtacaagatgtcttttaaataaggatgtcatcagtctgatttttatagcattaatgttttatgaagaaaaagttcaaaatgaaagcattaattgctgtgattattagaattctatcatgactgtattgtagtttttgctctatttcagataagcaagatctaagaagttatcaaaactattctttaaaatgctaaagcagctcctgtagccagagatcacaggtcttccctgtgaaactttggtttctttctataaatgtgtgtggttttcagcgctcaactcctgtcttcaaatggtagtaagttctacttctacttctgtcattcagaacattttatgtcaaatgatgtaatgcagaaattcttgtgcatatttgtaactgaaggaagctttttagatttatttttgtttttaataaaattcagattcctattctaaa

SEQ ID NO: 336124 - DNA, 4347 bp, Homo sapiens
acgtcaggcgtcctctctcgcggtatcatccggttgctgaggccctgtaataaaggtctcgcgaaatttgttctagaggtccaagtttgcttcttagcttactccaccccacccccaacctgtccctccttttctttccaagtcacaaaattctcccctcccctaccccggagtttacggccctcctcctgtttccgatttcagcccggaaccggaagtgtagtgggcggggcccgtcggcggaaaacgcagcggagccagagccggacacggctgtggccgctgcctctacccccgccacggatcgccgggtagtaggactgcgcggctccaggctgagggtcggtccggaggcgggtgggcgcgggtctcacccggattgtccgggtggcaccgttcccggccccaccgggcgccgcgagggatcatgtctacagcctctgccgcctcctcctcctcctcgtcttcggccggtgagatgatcgaagccccttcccaggtcctcaactttgaagagatcgactacaaggagatcgaggtggaagaggttgttggaagaggagcctttggagttgtttgcaaagctaagtggagagcaaaagatgttgctattaaacaaatagaaagtgaatctgagaggaaagcgtttattgtagagcttcggcagttatcccgtgtgaaccatcctaatattgtaaagctttatggagcctgcttgaatccagtgtgtcttgtgatggaatatgctgaagggggctctttatataatgtgctgcatggtgctgaaccattgccatattatactgctgcccacgcaatgagttggtgtttacagtgttcccaaggagtggcttatcttcacagcatgcaacccaaagcgctaattcacagggacctgaaaccaccaaacttactgctggttgcaggggggacagttctaaaaatttgtgattttggtacagcctgtgacattcagacacacatgaccaataacaaggggagtgctgcttggatggcacctgaagtttttgaaggtagtaattacagtgaaaaatgtgacgtcttcagctggggtattattctttgggaagtgataacgcgtcggaaaccctttgatgagattggtggcccagctttccgaatcatgtgggctgttcataatggtactcgaccaccactgataaaaaatttacctaagcccattgagagcctgatgactcgttgttggtctaaagatccttcccagcgcccttcaatggaggaaattgtgaaaataatgactcacttgatgcggtactttccaggagcagatgagccattacagtatccttgtcagtattcagatgaaggacagagcaactctgccaccagtacaggctcattcatggacattgcttctacaaatacgagtaacaaaagtgacactaatatggagcaagttcctgccacaaatgatactattaagcgcttagaatcaaaattgttgaaaaatcaggcaaagcaacagagtgaatctggacgtttaagcttgggagcctcccgtgggagcagtgtggagagcttgcccccaacctctgagggcaagaggatgagtgctgacatgtctgaaatagaagctaggatcgccgcaaccacagcctattccaagcctaaacggggccaccgtaaaactgcttcatttggcaacattctggatgtccctgagatcgtcatatcaggcaacggacagccaagacgtagatccatccaagacttgactgtaactggaacagaacctggtcaggtgagcagtaggtcatccagtcccagtgtcagaatgattactacctcaggaccaacctcagaaaagccaactcgaagtcatccatggacccctgatgattccacagataccaatggatcagataactccatcccaatggcttatcttacactggatcaccaactacagcctctagcaccgtgcccaaactccaaagaatctatggcagtgtttgaacagcattgtaaaatggcacaagaatatatgaaagttcaaacagaaattgcattgttattacagagaaagcaagaactagttgcagaactggaccaggatgaaaaggaccagcaaaatacatctcgcctggtacaggaacataaaaagcttttagatgaaaacaaaagcctttctacttactaccagcaatgcaaaaaacaactagaggtcatcagaagtcagcagcagaaacgacaaggcacttcatgattctctgggaccgttacattttgaaatatgcaaagaaagactttttttttaaggaaaggaaaaccttataatgacgattcatgagtgttagctttttggcgtgttctgaatgccaactgcctatatttgctgcatttttttcattgtttattttccttttctcatggtggacatacaattttactgtttcattgcataacatggtagcatctgtgacttgaatgagcagcactttgcaacttcaaaacagatgcagtgaactgtggctgtatatgcatgctcattgtgtgaaggctagcctaacagaacaggaggtatcaaactagctgctatgtgcaaacagcgtccattttttcatattagaggtggaacctcaagaatgactttattcttgtatctcatctcaaaatattaataatttttttcccaaaagatggtatataccaagttaaagacagggtattataaatttagagtgattggtggtatattacggaaatacggaacctttagggatagttccgtgtaagggctttgatgccagcatccttggatcagtactgaactcagttccatccgtaaaatatgtaaagataagcaagatctaagaagttatcaaaactattctttaaaatgctaaagcaggtaactttttcttccattattttttcctcctaccactgagttttgtaatgaattccttgtgtatacaagcaatacaggtgaatactaaactgttatttttagcttcttcaaaagctattttagaaagcttcctggaaataaatgtcttctgtcatttaatttaaataaaaggagtgttaattgttcccaaatttgattacctagctgaaacagatattggattcagcatagtaatagtaaaataaaattggcagagaaaataactgtagactaggataaagcatgactcctccatagcattgttgcttgtatgtacatctgtcactccactgaaagggacctagtcactttaaagaggccttttatctcagcacgagatatccaagcgtgaatgctaaggcttgatgtttccattaggatttagcattcgagatttcagattttatttatagtcattgatgtgttttgctgtattataacacatttaaagggaaattttattatggtttttacatgtagtcatttcataaaaatatccagataggtaaatggaagaaaatagtagattttagtcatggtaccaaatgcaagaggctgttgaacagttgcttgtttgtttacagtaagttccttgagattttcagtactgtagttgccctggacattgagtacagttcagccttactctgtttttaagtagttgtgttgtcaatttcatgcttttaagtcctgatgatccttggagatgggagaaaaagataccagggataattaaaatccacagccagtttcatcagtttcctcatccatcctgcaaataaaaatgttaacaaggagccaaacttattcgttctggttttacaatttattttgaccgttttttgggtgaaaattgcaaacagccaagcaagtggctggaatgccccagtctaagaaattcaaaaacaatcactgagtaagccctaattacattttactcttgactccaggaaaagaaagcaagcttttatctaatctagagggaagtattcgtgagcaataaaaatcacttttttgagttgaataataatcagttaagaatatttaccgcatagcaacacaacatataaagatttgttacaagttgtttacagatgtttgactatttttgctgaagtattttagagtattgaatgtcttctctcttcaagtttctttcatgttcctaatttcagctcctgtagccagagatcacaggtcttccctgtgaaactttggtttctttctataaatgtgtgtggttttcagcgctcaactcctgtcttcaaatggtagtaagttctacttctacttctgtcattcagaacattttatgtcaaatgatgtaatgcagaaattcttgtgcatatttgtaactgaaggaagctttttagatttatttttgtttttaataaaattcagattcctattctaaa

SEQ ID NO: 336125 - DNA, 4478 bp, Homo sapiens
acgtcaggcgtcctctctcgcggtatcatccggttgctgaggccctgtaataaaggtctcgcgaaatttgttctagaggtccaagtttgcttcttagcttactccaccccacccccaacctgtccctccttttctttccaagtcacaaaattctcccctcccctaccccggagtttacggccctcctcctgtttccgatttcagcccggaaccggaagtgtagtgggcggggcccgtcggcggaaaacgcagcggagccagagccggacacggctgtggccgctgcctctacccccgccacggatcgccgggtagtaggactgcgcggctccaggctgagggtcggtccggaggcgggtgggcgcgggtctcacccggattgtccgggtggcaccgttcccggccccaccgggcgccgcgagggatcatgtctacagcctctgccgcctcctcctcctcctcgtcttcggccggtgagatgatcgaagccccttcccaggtcctcaactttgaagagatcgactacaaggagatcgaggtggaagaggttgttggaagaggagcctttggagttgtttgcaaagctaagtggagagcaaaagatgttgctattaaacaaatagaaagtgaatctgagaggaaagcgtttattgtagagcttcggcagttatcccgtgtgaaccatcctaatattgtaaagctttatggagcctgcttgaatccagtgtgtcttgtgatggaatatgctgaagggggctctttatataatgtgctgcatggtgctgaaccattgccatattatactgctgcccacgcaatgagttggtgtttacagtgttcccaaggagtggcttatcttcacagcatgcaacccaaagcgctaattcacagggacctgaaaccaccaaacttactgctggttgcaggggggacagttctaaaaatttgtgattttggtacagcctgtgacattcagacacacatgaccaataacaaggggagtgctgcttggatggcacctgaagtttttgaaggtagtaattacagtgaaaaatgtgacgtcttcagctggggtattattctttgggaagtgataacgcgtcggaaaccctttgatgagattggtggcccagctttccgaatcatgtgggctgttcataatggtactcgaccaccactgataaaaaatttacctaagcccattgagagcctgatgactcgttgttggtctaaagatccttcccagcgcccttcaatggaggaaattgtgaaaataatgactcacttgatgcgggtataatccttcttttgaggggctttggatttaggggaatttaatatgtgctgagttttaatggaattttaaaagggatgttattactatattctgctttatatattgctatgttttctaagtgagaatgggcatttattactcatagtcagaagaggaaacatttcgagagggaaaatctagttctttatcactggaaagatggctagactaggtttctagacttgcttttttctttttgcttacattagtggacaagtatgtttgtctctgggcctgttgcctcatttgtaatgtgggagaaactgaaatagatagtctctaaagccatcacaggacttggatatattaatattatgacttcaatacatgataaactaaattttacatttttctgataccaattttcatcaagcatttagtcatttatgcaaggcaataggttgcattctcagacacatttatttgagtgacttttactatttggcctattttcaggtttttatatcccagtaaaaagttaaactttcttctatttagaagaacccttttaaatgattatcaaattttcctagtctgtgaatcaagcgcctttagaattatttggaatattttacgcctctggtttttggtacattaacaaaaactgtgaagtggtatcttggctttaaaaagttcaaatatctatgaaagtgcctgaattttgaaacagtttgttcagtagaagaatcttacaatctccttaaatatagactaagtaatttcctaaatggtaaaacgttgtttattcaatctattgaaaatttcttacgcaaagcagcttgaactaatctactaaaagtttaccatcgtatttggataccagtcatatatagaagcctaggccttaaaggtgtgtgcataagaaaacaacttagtctctgtagtcagattacttaaaactttaggatatataagttattgcagttgtaattttgcttctctgttccttgtctaatttgaggagaatacgtttcctttttttctctaaattctaacatttttgtccagcagatactttgagtattatgcctccagtttgtagaaagacattcataatctatcctcttaatatttaaaatgttctaacaattattctatggtatactagtctcagtcttcagactaacagtcactggaagtttacatcactactgtaagaacatgagtatgttttacataattatgagaaatgatactattttatttcatatgtttctctagagaaatatttgctgttttcttcaagactatctagactccaatgtaagctagattcttaggtaggtgcatggcattgatcaaagttgaaatccaagagtacattattgtaatctttgtaaaataaaaaacttaggcacctacaaatttagtatataacttagggaaaataaaacattaatcaggatttaatttgtattaaggaaattttaagctgtggtttacttttttatatatagtactttccaggagcagatgagccattacagtatccttgtcagtattcagatgaaggacagagcaactctgccaccagtacaggctcattcatggacattgcttctacaaatacgagtaacaaaagtgacactaatatggagcaagttcctgccacaaatgatactattaagcgcttagaatcaaaattgttgaaaaatcaggcaaagcaacagagtgaatctggacgtttaagcttgggagcctcccgtgggagcagtgtggagagcttgcccccaacctctgagggcaagaggatgagtgctgacatgtctgaaatagaagctaggatcgccgcaaccacaggcaacggacagccaagacgtagatccatccaagacttgactgtaactggaacagaacctggtcaggtgagcagtaggtcatccagtcccagtgtcagaatgattactacctcaggaccaacctcagaaaagccaactcgaagtcatccatggacccctgatgattccacagataccaatggatcagataactccatcccaatggcttatcttacactggatcaccaactacagcctctagcaccgtgcccaaactccaaagaatctatggcagtgtttgaacagcattgtaaaatggcacaagaatatatgaaagttcaaacagaaattgcattgttattacagagaaagcaagaactagttgcagaactggaccaggatgaaaaggaccagcaaaatacatctcgcctggtacaggaacataaaaagcttttagatgaaaacaaaagcctttctacttactaccagcaatgcaaaaaacaactagaggtcatcagaagtcagcagcagaaacgacaaggcacttcatgattctctgggaccgttacattttgaaatatgcaaagaaagactttttttttaaggaaaggaaaaccttataatgacgattcatgagtgttagctttttggcgtgttctgaatgccaactgcctatatttgctgcatttttttcattgtttattttccttttctcatggtggacatacaattttactgtttcattgcataacatggtagcatctgtgacttgaatgagcagcactttgcaacttcaaaacagatgcagtgaactgtggctgtatatgcatgctcattgtgtgaaggctagcctaacagaacaggaggtatcaaactagctgctatgtgcaaacagcgtccattttttcatattagaggtggaacctcaagaatgactttattcttgtatctcatctcaaaatattaataatttttttcccaaaagatggtatataccaagttaaagacagggtattataaatttagagtgattggtggtatattacggaaatacggaacctttagggatagttccgtgtaagggctttgatgccagcatccttggatcagtactgaactcagttccatccgtaaaatatgtaaaggtaagtggcagctgctctatttaatgaaagcagttttaccggattttgttagactaaaatttgattgtgatacattgaacaaaatggaactcatttttttttaaggagtaaagatttttaattctgtgattgtgtgtatgtgtgttgaaactgtaaagcttttatgactctaatattaatctcttaaatgaaattaaaaggcaaaagaacatgattgag

SEQ ID NO: 336126 - DNA, 4092 bp, Homo sapiens
acgtcaggcgtcctctctcgcggtatcatccggttgctgaggccctgtaataaaggtctcgcgaaatttgttctagaggtccaagtttgcttcttagcttactccaccccacccccaacctgtccctccttttctttccaagtcacaaaattctcccctcccctaccccggagtttacggccctcctcctgtttccgatttcagcccggaaccggaagtgtagtgggcggggcccgtcggcggaaaacgcagcggagccagagccggacacggctgtggccgctgcctctacccccgccacggatcgccgggtagtaggactgcgcggctccaggctgagggtcggtccggaggcgggtgggcgcgggtctcacccggattgtccgggtggcaccgttcccggccccaccgggcgccgcgagggatcatgtctacagcctctgccgcctcctcctcctcctcgtcttcggccggtgagatgatcgaagccccttcccaggtcctcaactttgaagagatcgactacaaggagatcgaggtggaagaggttgttggaagaggagcctttggagttgtttgcaaagctaagtggagagcaaaagatgttgctattaaacaaatagaaagtgaatctgagaggaaagcgtttattgtagagcttcggcagttatcccgtgtgaaccatcctaatattgtaaagctttatggagcctgcttgaatccagtgtgtcttgtgatggaatatgctgaagggggctctttatataatgtgctgcatggtgctgaaccattgccatattatactgctgcccacgcaatgagttggtgtttacagtgttcccaaggagtggcttatcttcacagcatgcaacccaaagcgctaattcacagggacctgaaaccaccaaacttactgctggttgcaggggggacagttctaaaaatttgtgattttggtacagcctgtgacattcagacacacatgaccaataacaaggggagtgctgcttggatggcacctgaagtttttgaaggtagtaattacagtgaaaaatgtgacgtcttcagctggggtattattctttgggaagtgataacgcgtcggaaaccctttgatgagattggtggcccagctttccgaatcatgtgggctgttcataatggtactcgaccaccactgataaaaaatttacctaagcccattgagagcctgatgactcgttgttggtctaaagatccttcccagcgcccttcaatggaggaaattgtgaaaataatgactcacttgatgcggtactttccaggagcagatgagccattacagtatccttgtcagtattcagatgaaggacagagcaactctgccaccagtacaggctcattcatggacattgcttctacaaatacgagtaacaaaagtgacactaatatggagcaagttcctgccacaaatgatactattaagcgcttagaatcaaaattgttgaaaaatcaggcaaagcaacagagtgaatctggacgtttaagcttgggagcctcccgtgggagcagtgtggagagcttgcccccaacctctgagggcaagaggatgagtgctgacatgtctgaaatagaagctaggatcgccgcaaccacaggcaacggacagccaagacgtagatccatccaagacttgactgtaactggaacagaacctggtcaggtgagcagtaggtcatccagtcccagtgtcagaatgattactacctcaggaccaacctcagaaaagccaactcgaagtcatccatggacccctgatgattccacagataccaatggatcagataactccatcccaatggcttatcttacactggatcaccaactacaggcaagaactagttgcagaactggaccaggatgaaaaggaccagcaaaatacatctcgcctggtacaggaacataaaaagcttttagatgaaaacaaaagcctttctacttactaccagcaatgcaaaaaacaactagaggtcatcagaagtcagcagcagaaacgacaaggcacttcatgattctctgggaccgttacattttgaaatatgcaaagaaagactttttttttaaggaaaggaaaaccttataatgacgattcatgagtgttagctttttggcgtgttctgaatgccaactgcctatatttgctgcatttttttcattgtttattttccttttctcatggtggacatacaattttactgtttcattgcataacatggtagcatctgtgacttgaatgagcagcactttgcaacttcaaaacagatgcagtgaactgtggctgtatatgcatgctcattgtgtgaaggctagcctaacagaacaggaggtatcaaactagctgctatgtgcaaacagcgtccattttttcatattagaggtggaacctcaagaatgactttattcttgtatctcatctcaaaatattaataatttttttccgtatattacggaaatacggaacctttagggatagttccgtgtaagggctttgatgccagcatccttggatcagtactgaactcagttccatccgtaaaatatgtaaagataagcaagatctaagaagttatcaaaactattctttaaaatgctaaagcaggtaactttttcttccattattttttcctcctaccactgagttttgtaatgaattccttgtgtatacaagcaatacaggtgaatactaaactgttatttttagcttcttcaaaagctattttagaaagcttcctggaaataaatgtcttctgtcatttaatttaaataaaaggagtgttaattgttcccaaatttgattacctagctgaaacagatattggattcagcatagtaatagtaaaataaaattggcagagaaaataactgtagactaggataaagcatgactcctccatagcattgttgcttgtatgtacatctgtcactccactgaaagggacctagtcactttaaagaggccttttatctcagcacgagatatccaagcgtgaatgctaaggcttgatgtttccattaggatttagcattcgagatttcagattttatttatagtcattgatgtgttttgctgtattataacacatttaaagggaaattttattatggtttttacatgtagtcatttcataaaaatatccagataggtaaatggaagaaaatagtagattttagtcatggtaccaaatgcaagaggctgttgaacagttgcttgtttgtttacagtaagttccttgagattttcagtactgtagttgccctggacattgagtacagttcagccttactctgtttttaagtagttgtgttgtcaatttcatgcttttaagtcctgatgatccttggagatgggagaaaaagataccagggataattaaaatccacagccagtttcatcagtttcctcatccatcctgcaaataaaaatgttaacaaggagccaaacttattcgttctggttttacaatttattttgaccgttttttgggtgaaaattgcaaacagccaagcaagtggctggaatgccccagtctaagaaattcaaaaacaatcactgagtaagccctaattacattttactcttgactccaggaaaagaaagcaagcttttatctaatctagagggaagtattcgtgagcaataaaaatcacttttttgagttgaataataatcagttaagaatatttaccgcatagcaacacaacatataaagatttgttacaagttgtttacagatgtttgactatttttgctgaagtattttagagtattgaatgtcttctctcttcaagtttctttcatgttcctaatttcagctcctgtagccagagatcacaggtcttccctgtgaaactttggtttctttctataaatgtgtgtggttttcagcgctcaactcctgtcttcaaatggtagtaagttctacttctacttctgtcattcagaacattttatgtcaaatgatgtaatgcagaaattcttgtgcatatttgtaactgaaggaagctttttagatttatttttgtttttaataaaattcagattcctattctaaa

SEQ ID NO: 336127 - DNA, 4367 bp, Homo sapiens
acgtcaggcgtcctctctcgcggtatcatccggttgctgaggccctgtaataaaggtctcgcgaaatttgttctagaggtccaagtttgcttcttagcttactccaccccacccccaacctgtccctccttttctttccaagtcacaaaattctcccctcccctaccccggagtttacggccctcctcctgtttccgatttcagcccggaaccggaagtgtagtgggcggggcccgtcggcggaaaacgcagcggagccagagccggacacggctgtggccgctgcctctacccccgccacggatcgccgggtagtaggactgcgcggctccaggctgagggtcggtccggaggcgggtgggcgcgggtctcacccggattgtccgggtggcaccgttcccggccccaccgggcgccgcgagggatcatgtctacagcctctgccgcctcctcctcctcctcgtcttcggccggtgagatgatcgaagccccttcccaggtcctcaactttgaagagatcgactacaaggagatcgaggtggaagaggttgttggaagaggagcctttggagttgtttgcaaagctaagtggagagcaaaagatgttgctattaaacaaatagaaagtgaatctgagaggaaagcgtttattgtagagcttcggcagttatcccgtgtgaaccatcctaatattgtaaagctttatggagcctgcttgaatccagtgtgtcttgtgatggaatatgctgaagggggctctttatataatgtttgtgcctttctttcgcagtgctgcatggtgctgaaccattgccatattatactgctgcccacgcaatgagttggtgtttacagtgttcccaaggagtggcttatcttcacagcatgcaacccaaagcgctaattcacagggacctgaaaccaccaaacttactgctggttgcaggggggacagttctaaaaatttgtgattttggtacagcctgtgacattcagacacacatgaccaataacaaggggagtgctgcttggatggcacctgaagtttttgaaggtagtaattacagtgaaaaatgtgacgtcttcagctggggtattattctttgggaagtgataacgcgtcggaaaccctttgatgagattggtggcccagctttccgaatcatgtgggctgttcataatggtactcgaccaccactgataaaaaatttacctaagcccattgagagcctgatgactcgttgttggtctaaagatccttcccagcgcccttcaatggaggaaattgtgaaaataatgactcacttgatgcggtactttccaggagcagatgagccattacagtatccttgtcagtattcagatgaaggacagagcaactctgccaccagtacaggctcattcatggacattgcttctacaaatacgagtaacaaaagtgacactaatatggagcaagttcctgccacaaatgatactattaagcgcttagaatcaaaattgttgaaaaatcaggcaaagcaacagagtgaatctggacgtttaagcttgggagcctcccgtgggagcagtgtggagagcttgcccccaacctctgagggcaagaggatgagtgctgacatgtctgaaatagaagctaggatcgccgcaaccacagcctattccaagcctaaacggggccaccgtaaaactgcttcatttggcaacattctggatgtccctgagatcgtcatatcaggcaacggacagccaagacgtagatccatccaagacttgactgtaactggaacagaacctggtcaggtgagcagtaggtcatccagtcccagtgtcagaatgattactacctcaggaccaacctcagaaaagccaactcgaagtcatccatggacccctgatgattccacagataccaatggatcagataactccatcccaatggcttatcttacactggatcaccaactacagcctctagcaccgtgcccaaactccaaagaatctatggcagtgtttgaacagcattgtaaaatggcacaagaatatatgaaagttcaaacagaaattgcattgttattacagagaaagcaagaactagttgcagaactggaccaggatgaaaaggaccagcaaaatacatctcgcctggtacaggaacataaaaagcttttagatgaaaacaaaagcctttctacttactaccagcaatgcaaaaaacaactagaggtcatcagaagtcagcagcagaaacgacaaggcacttcatgattctctgggaccgttacattttgaaatatgcaaagaaagactttttttttaaggaaaggaaaaccttataatgacgattcatgagtgttagctttttggcgtgttctgaatgccaactgcctatatttgctgcatttttttcattgtttattttccttttctcatggtggacatacaattttactgtttcattgcataacatggtagcatctgtgacttgaatgagcagcactttgcaacttcaaaacagatgcagtgaactgtggctgtatatgcatgctcattgtgtgaaggctagcctaacagaacaggaggtatcaaactagctgctatgtgcaaacagcgtccattttttcatattagaggtggaacctcaagaatgactttattcttgtatctcatctcaaaatattaataatttttttcccaaaagatggtatataccaagttaaagacagggtattataaatttagagtgattggtggtatattacggaaatacggaacctttagggatagttccgtgtaagggctttgatgccagcatccttggatcagtactgaactcagttccatccgtaaaatatgtaaagataagcaagatctaagaagttatcaaaactattctttaaaatgctaaagcaggtaactttttcttccattattttttcctcctaccactgagttttgtaatgaattccttgtgtatacaagcaatacaggtgaatactaaactgttatttttagcttcttcaaaagctattttagaaagcttcctggaaataaatgtcttctgtcatttaatttaaataaaaggagtgttaattgttcccaaatttgattacctagctgaaacagatattggattcagcatagtaatagtaaaataaaattggcagagaaaataactgtagactaggataaagcatgactcctccatagcattgttgcttgtatgtacatctgtcactccactgaaagggacctagtcactttaaagaggccttttatctcagcacgagatatccaagcgtgaatgctaaggcttgatgtttccattaggatttagcattcgagatttcagattttatttatagtcattgatgtgttttgctgtattataacacatttaaagggaaattttattatggtttttacatgtagtcatttcataaaaatatccagataggtaaatggaagaaaatagtagattttagtcatggtaccaaatgcaagaggctgttgaacagttgcttgtttgtttacagtaagttccttgagattttcagtactgtagttgccctggacattgagtacagttcagccttactctgtttttaagtagttgtgttgtcaatttcatgcttttaagtcctgatgatccttggagatgggagaaaaagataccagggataattaaaatccacagccagtttcatcagtttcctcatccatcctgcaaataaaaatgttaacaaggagccaaacttattcgttctggttttacaatttattttgaccgttttttgggtgaaaattgcaaacagccaagcaagtggctggaatgccccagtctaagaaattcaaaaacaatcactgagtaagccctaattacattttactcttgactccaggaaaagaaagcaagcttttatctaatctagagggaagtattcgtgagcaataaaaatcacttttttgagttgaataataatcagttaagaatatttaccgcatagcaacacaacatataaagatttgttacaagttgtttacagatgtttgactatttttgctgaagtattttagagtattgaatgtcttctctcttcaagtttctttcatgttcctaatttcagctcctgtagccagagatcacaggtcttccctgtgaaactttggtttctttctataaatgtgtgtggttttcagcgctcaactcctgtcttcaaatggtagtaagttctacttctacttctgtcattcagaacattttatgtcaaatgatgtaatgcagaaattcttgtgcatatttgtaactgaaggaagctttttagatttatttttgtttttaataaaattcagattcctattctaaa

SEQ ID NO: 336128 - DNA, 3077 bp, Homo sapiens
gttaacgaataattggggcttttagctcccagttctagtgactgccttttcataaagacagtatctgcagcttgctttcccttacccctgtagctccctctcgtacaaacttccctctcctttcagagcagaacaggatctatcagaatcccatttgccatcttcctccttttaggttgcctaagattgctaaattaaagaacttcagtaattcagattgacctgtaattttaacagagtgaatctggacgtttaagcttgggagcctcccgtgggagcagtgtggagagcttgcccccaacctctgagggcaagaggatgagtgctgacatgtctgaaatagaagctaggatcgccgcaaccacagcctattccaagcctaaacggggccaccgtaaaactgcttcatttggcaacattctggatgtccctgagatcgtcatatcaggcaacggacagccaagacgtagatccatccaagacttgactgtaactggaacagaacctggtcaggtgagcagtaggtcatccagtcccagtgtcagaatgattactacctcaggaccaacctcagaaaagccaactcgaagtcatccatggacccctgatgattccacagataccaatggatcagataactccatcccaatggcttatcttacactggatcaccaactacagcctctagcaccgtgcccaaactccaaagaatctatggcagtgtttgaacagcattgtaaaatggcacaagaatatatgaaagttcaaacagaaattgcattgttattacagagaaagcaagaactagttgcagaactggaccaggatgaaaaggaccagcaaaatacatctcgcctggtacaggaacataaaaagcttttagatgaaaacaaaagcctttctacttactaccagcaatgcaaaaaacaactagaggtcatcagaagtcagcagcagaaacgacaaggcacttcatgattctctgggaccgttacattttgaaatatgcaaagaaagactttttttttaaggaaaggaaaaccttataatgacgattcatgagtgttagctttttggcgtgttctgaatgccaactgcctatatttgctgcatttttttcattgtttattttccttttctcatggtggacatacaattttactgtttcattgcataacatggtagcatctgtgacttgaatgagcagcactttgcaacttcaaaacagatgcagtgaactgtggctgtatatgcatgctcattgtgtgaaggctagcctaacagaacaggaggtatcaaactagctgctatgtgcaaacagcgtccattttttcatattagaggtggaacctcaagaatgactttattcttgtatctcatctcaaaatattaataatttttttcccaaaagatggtatataccaagttaaagacagggtattataaatttagagtgattggtggtatattacggaaatacggaacctttagggatagttccgtgtaagggctttgatgccagcatccttggatcagtactgaactcagttccatccgtaaaatatgtaaagataagcaagatctaagaagttatcaaaactattctttaaaatgctaaagcaggtaactttttcttccattattttttcctcctaccactgagttttgtaatgaattccttgtgtatacaagcaatacaggtgaatactaaactgttatttttagcttcttcaaaagctattttagaaagcttcctggaaataaatgtcttctgtcatttaatttaaataaaaggagtgttaattgttcccaaatttgattacctagctgaaacagatattggattcagcatagtaatagtaaaataaaattggcagagaaaataactgtagactaggataaagcatgactcctccatagcattgttgcttgtatgtacatctgtcactccactgaaagggacctagtcactttaaagaggccttttatctcagcacgagatatccaagcgtgaatgctaaggcttgatgtttccattaggatttagcattcgagatttcagattttatttatagtcattgatgtgttttgctgtattataacacatttaaagggaaattttattatggtttttacatgtagtcatttcataaaaatatccagataggtaaatggaagaaaatagtagattttagtcatggtaccaaatgcaagaggctgttgaacagttgcttgtttgtttacagtaagttccttgagattttcagtactgtagttgccctggacattgagtacagttcagccttactctgtttttaagtagttgtgttgtcaatttcatgcttttaagtcctgatgatccttggagatgggagaaaaagataccagggataattaaaatccacagccagtttcatcagtttcctcatccatcctgcaaataaaaatgttaacaaggagccaaacttattcgttctggttttacaatttattttgaccgttttttgggtgaaaattgcaaacagccaagcaagtggctggaatgccccagtctaagaaattcaaaaacaatcactgagtaagccctaattacattttactcttgactccaggaaaagaaagcaagcttttatctaatctagagggaagtattcgtgagcaataaaaatcacttttttgagttgaataataatcagttaagaatatttaccgcatagcaacacaacatataaagatttgttacaagttgtttacagatgtttgactatttttgctgaagtattttagagtattgaatgtcttctctcttcaagtttctttcatgttcctaatttcagctcctgtagccagagatcacaggtcttccctgtgaaactttggtttctttctataaatgtgtgtggttttcagcgctcaactcctgtcttcaaatggtagtaagttctacttctacttctgtcattcagaacattttatgtcaaatgatgtaatgcagaaattcttgtgcatatttgtaactgaaggaagctttttagatttatttttgtttttaataaaattcagattcctattctaaa

SEQ ID NO: 336129 - DNA, 3271 bp, Homo sapiens
agcagaattaacacaatagcccatttcaacaagctgtatatttgagaacagagtgacagttattaacatccagtaggaaattaagagttgttgttcacaaataataaattactagattctgacaaagactaatggggattaagtaagcgtgactcaatataacaaatttaagcctaagcatcttctaggccctgaaatgaacaaggtattgctgccagttaaagtcagttgtgtcttacaacctgctagctgtcttgctgtaaaaactgtaacgtaaggcccttgaaatagatgccgtcatcagccccagcccccaagcattcatctatttaaacacatgacagaagatggtggaagagagttcagcagctattcatgtggtagaagtggttattgtattaggacatactctgttgtaggccagcaacttttgagttaaaacaccgcagctgtttctcttcctttctttacatctttctcttcttttttttttttcttagcaataaactcacttttttttccccacaaacattttgtgtagatccaaggagcaacaaattccaactttctgctgtagcaattacacgctttttgtctgtttgactagattttagtattttactttttttcttctttttaaaggcaacggacagccaagacgtagatccatccaagacttgactgtaactggaacagaacctggtcaggtgagcagtaggtcatccagtcccagtgtcagaatgattactacctcaggaccaacctcagaaaagccaactcgaagtcatccatggacccctgatgattccacagataccaatggatcagataactccatcccaatggcttatcttacactggatcaccaactacagcctctagcaccgtgcccaaactccaaagaatctatggcagtgtttgaacagcattgtaaaatggcacaagaatatatgaaagttcaaacagaaattgcattgttattacagagaaagcaagaactagttgcagaactggaccaggatgaaaaggaccagcaaaatacatctcgcctggtacaggaacataaaaagcttttagatgaaaacaaaagcctttctacttactaccagcaatgcaaaaaacaactagaggtcatcagaagtcagcagcagaaacgacaaggcacttcatgattctctgggaccgttacattttgaaatatgcaaagaaagactttttttttaaggaaaggaaaaccttataatgacgattcatgagtgttagctttttggcgtgttctgaatgccaactgcctatatttgctgcatttttttcattgtttattttccttttctcatggtggacatacaattttactgtttcattgcataacatggtagcatctgtgacttgaatgagcagcactttgcaacttcaaaacagatgcagtgaactgtggctgtatatgcatgctcattgtgtgaaggctagcctaacagaacaggaggtatcaaactagctgctatgtgcaaacagcgtccattttttcatattagaggtggaacctcaagaatgactttattcttgtatctcatctcaaaatattaataatttttttcccaaaagatggtatataccaagttaaagacagggtattataaatttagagtgattggtggtatattacggaaatacggaacctttagggatagttccgtgtaagggctttgatgccagcatccttggatcagtactgaactcagttccatccgtaaaatatgtaaagataagcaagatctaagaagttatcaaaactattctttaaaatgctaaagcaggtaactttttcttccattattttttcctcctaccactgagttttgtaatgaattccttgtgtatacaagcaatacaggtgaatactaaactgttatttttagcttcttcaaaagctattttagaaagcttcctggaaataaatgtcttctgtcatttaatttaaataaaaggagtgttaattgttcccaaatttgattacctagctgaaacagatattggattcagcatagtaatagtaaaataaaattggcagagaaaataactgtagactaggataaagcatgactcctccatagcattgttgcttgtatgtacatctgtcactccactgaaagggacctagtcactttaaagaggccttttatctcagcacgagatatccaagcgtgaatgctaaggcttgatgtttccattaggatttagcattcgagatttcagattttatttatagtcattgatgtgttttgctgtattataacacatttaaagggaaattttattatggtttttacatgtagtcatttcataaaaatatccagataggtaaatggaagaaaatagtagattttagtcatggtaccaaatgcaagaggctgttgaacagttgcttgtttgtttacagtaagttccttgagattttcagtactgtagttgccctggacattgagtacagttcagccttactctgtttttaagtagttgtgttgtcaatttcatgcttttaagtcctgatgatccttggagatgggagaaaaagataccagggataattaaaatccacagccagtttcatcagtttcctcatccatcctgcaaataaaaatgttaacaaggagccaaacttattcgttctggttttacaatttattttgaccgttttttgggtgaaaattgcaaacagccaagcaagtggctggaatgccccagtctaagaaattcaaaaacaatcactgagtaagccctaattacattttactcttgactccaggaaaagaaagcaagcttttatctaatctagagggaagtattcgtgagcaataaaaatcacttttttgagttgaataataatcagttaagaatatttaccgcatagcaacacaacatataaagatttgttacaagttgtttacagatgtttgactatttttgctgaagtattttagagtattgaatgtcttctctcttcaagtttctttcatgttcctaatttcagctcctgtagccagagatcacaggtcttccctgtgaaactttggtttctttctataaatgtgtgtggttttcagcgctcaactcctgtcttcaaatggtagtaagttctacttctacttctgtcattcagaacattttatgtcaaatgatgtaatgcagaaattcttgtgcatatttgtaactgaaggaagctttttagatttatttttgtttttaataaaattcagattcctattctaaa

SEQ ID NO: 336130 - DNA, 4382 bp, Homo sapiens
acgtcaggcgtcctctctcgcggtatcatccggttgctgaggccctgtaataaaggtctcgcgaaatttgttctagaggtccaagtttgcttcttagcttactccaccccacccccaacctgtccctccttttctttccaagtcacaaaattctcccctcccctaccccggagtttacggccctcctcctgtttccgatttcagcccggaaccggaagtgtagtgggcggggcccgtcggcggaaaacgcagcggagccagagccggacacggctgtggccgctgcctctacccccgccacggatcgccgggtagtaggactgcgcggctccaggctgagggtcggtccggaggcgggtgggcgcgggtctcacccggattgtccgggtggcaccgttcccggccccaccgggcgccgcgagggatcatgtctacagcctctgccgcctcctcctcctcctcgtcttcggccggtgagatgatcgaagccccttcccaggtcctcaactttgaagagatcgactacaaggagatcgaggtggaagaggttgttggaagaggagcctttggagttgtttgcaaagctaagtggagagcaaaagatgttgctattaaacaaatagaaagtgaatctgagaggaaagcgtttattgtagagcttcggcagttatcccgtgtgaaccatcctaatattgtaaagctttatggagcctgcttgaatccagtgtgtcttgtgatggaatatgctgaagggggctctttatataatgtgctgcatggtgctgaaccattgccatattatactgctgcccacgcaatgagttggtgtttacagtgttcccaaggagtggcttatcttcacagcatgcaacccaaagcgctaattcacagggacctgaaaccaccaaacttactgctggttgcaggggggacagttctaaaaatttgtgattttggtacagcctgtgacattcagacacacatgaccaataacaaggggagtgctgcttggatggcacctgaagtttttgaaggtagtaattacagtgaaaaatgtgacgtcttcagctggggtattattctttgggaagtgataacgcgtcggaaaccctttgatgagattggtggcccagctttccgaatcatgtgggctgttcataatggtactcgaccaccactgataaaaaatttacctaagcccattgagagcctgatgactcgttgttggtctaaagatccttcccagcgcccttcaatggaggaaattgtgaaaataatgactcacttgatgcggtactttccaggagcagatgagccattacagtatccttgtcagtattcagatgaaggacagagcaactctgccaccagtacaggctcattcatggacattgcttctacaaatacgagtaacaaaagtgacactaatatggagcaagttcctgccacaaatgatactattaagcgcttagaatcaaaattgttgaaaaatcaggcaaagcaacagagtgaatctggacgtttaagcttgggagcctcccgtgggagcagtgtggagagcttgcccccaacctctgagggcaagaggatgagtgctgacatgtctgaaatagaagctaggatcgccgcaaccacagcctattccaagcctaaacggggccaccgtaaaactgcttcatttggcaacattctggatgtccctgagatcgtcatatcaggcaacggacagccaagacgtagatccatccaagacttgactgtaactggaacagaacctggtcaggtgagcagtaggtcatccagtcccagtgtcagaatgattactacctcaggaccaacctcagaaaagccaactcgaagtcatccatggacccctgatgattccacagataccaatggatcagataactccatcccaatggcttatcttacactggatcaccaactacagcctctagcaccgtgcccaaactccaaagaatctatggcagtgtttgaacagcattgtaaaatggcacaagaatatatgaaagttcaaacagaaattgcattgttattacagagaaagcaagaactagttgcagaactggaccaggatgaaaaggaccagcaaaatacatctcgcctggtacaggaacataaaaagcttttagatgaaaacaaaagcctttctacttactaccagcaatgcaaaaaacaactagaggtcatcagaagtcagcagcagaaacgacaaggcacttcatgattctctgggaccgttacattttgaaatatgcaaagaaagactttttttttaaggaaaggaaaaccttataatgacgattcatgagtgttagctttttggcgtgttctgaatgccaactgcctatatttgctgcatttttttcattgtttattttccttttctcatggtggacatacaattttactgtttcattgcataacatggtagcatctgtgacttgaatgagcagcactttgcaacttcaaaacagatgcagtgaactgtggctgtatatgcatgctcattgtgtgaaggctagcctaacagaacaggaggtatcaaactagctgctatgtgcaaacagcgtccattttttcatattagaggtggaacctcaagaatgactttattcttgtatctcatctcaaaatattaataatttttttcccaaaagatggtatataccaagttaaagacagggtattataaatttagagtgattggtggtatattacggaaatacggaacctttagggatagttccgtgtaagggctttgatgccagcatccttggatcagtactgaactcagttccatccgtaaaatatgtaaagataagcaagatctaagaagttatcaaaactattctttaaaatgctaaagcaggtaactttttcttccattattttttcctcctaccactgagttttgtaatgaattccttgtgtatacaagcaatacaggtgaatactaaactgttatttttagcttcttcaaaagctattttagaaagcttcctggaaataaatgtcttctgtcatttaatttaaataaaaggagtgttaattgttcccaaatttgattacctagctgaaacagatattggattcagcatagtaatagtaaaataaaattggcagagaaaataactgtagactaggataaagcatgactcctccatagcattgttgcttgtatgtacatctgtcactccactgaaagggacctagtcactttaaagaggccttttatctcagcacgagatatccaagcgtgaatgctaaggcttgatgtttccattaggatttagcattcgagatttcagattttatttatagtcattgatgtgttttgctgtattataacacatttaaagggaaattttattatggtttttacatgtagtcatttcataaaaatatccagataggtaaatggaagaaaatagtagattttagtcatggtaccaaatgcaagaggctgttgaacagttgcttgtttgtttacagtaagttccttgagattttcagtactgtagttgccctggacattgagtacagttcagccttactctgtttttaagtagttgtgttgtcaatttcatgcttttaagtcctgatgatccttggagatgggagaaaaagataccagggataattaaaatccacagccagtttcatcagtttcctcatccatcctgcaaataaaaatgttaacaaggagccaaacttattcgttctggttttacaatttattttgaccgttttttgggtgaaaattgcaaacagccaagcaagtggctggaatgccccagtctaagaaattcaaaaacaatcactgagtaagccctaattacattttactcttgactccaggaaaagaaagcaagcttttatctaatctagagggaagtattcgtgagcaataaaaatcacttttttgagttgaataataatcagttaagaatatttaccgcatagcaacacaacatataaagatttgttacaagttgtttacagatgtttgactatttttgctgaagtattttagagtattgaatgtcttctctcttcaagtttctttcatgttcctaatttcagctcctgtagccagagatcacaggtcttccctgtgaaactttggtttctttctataaatgtgtgtggttttcagcgctcaactcctgtcttcaaatggtagtaagttctacttctacttctgtcattcagaacattttatgtcaaatgatgtaatgcagaaattcttgtgcatatttgtaactgaaggaagctttttagatttatttttgtttttaataaaattcagattcctattctaaactggtacataaaagtggtgaatgacttgtatcagc

SEQ ID NO: 336131 - DNA, 4382 bp, Homo sapiens
  misc_feature (3800)..(3800): n is a, c, g, or t
  misc_feature (3807)..(3807): n is a, c, g, or t
  misc_feature (3827)..(3829): n is a, c, g, or t
  misc_feature (3835)..(3835): n is a, c, g, or t
  misc_feature (3840)..(3840): n is a, c, g, or t
  misc_feature (3849)..(3849): n is a, c, g, or t
  misc_feature (3852)..(3853): n is a, c, g, or t
  misc_feature (3858)..(3858): n is a, c, g, or t
  misc_feature (3876)..(3876): n is a, c, g, or t
  misc_feature (3882)..(3883): n is a, c, g, or t
  misc_feature (3888)..(3889): n is a, c, g, or t
  misc_feature (3894)..(3894): n is a, c, g, or t
  misc_feature (3896)..(3896): n is a, c, g, or t
  misc_feature (3911)..(3911): n is a, c, g, or t
  misc_feature (3915)..(3916): n is a, c, g, or t
  misc_feature (3918)..(3919): n is a, c, g, or t
  misc_feature (3925)..(3925): n is a, c, g, or t
  misc_feature (3928)..(3929): n is a, c, g, or t
  misc_feature (3931)..(3932): n is a, c, g, or t
  misc_feature (3935)..(3936): n is a, c, g, or t
  misc_feature (3941)..(3941): n is a, c, g, or t
  misc_feature (3949)..(3949): n is a, c, g, or t
  misc_feature (3951)..(3951): n is a, c, g, or t
  misc_feature (3954)..(3954): n is a, c, g, or t
  misc_feature (3956)..(3956): n is a, c, g, or t
  misc_feature (3958)..(3959): n is a, c, g, or t
  misc_feature (3966)..(3966): n is a, c, g, or t
  misc_feature (3969)..(3969): n is a, c, g, or t
  misc_feature (3971)..(3971): n is a, c, g, or t
  misc_feature (3986)..(3987): n is a, c, g, or t
  misc_feature (3994)..(3994): n is a, c, g, or t
  misc_feature (3997)..(3997): n is a, c, g, or t
  misc_feature (4004)..(4004): n is a, c, g, or t
  misc_feature (4009)..(4009): n is a, c, g, or t
  misc_feature (4012)..(4012): n is a, c, g, or t
  misc_feature (4016)..(4016): n is a, c, g, or t
  misc_feature (4019)..(4019): n is a, c, g, or t
  misc_feature (4023)..(4023): n is a, c, g, or t
  misc_feature (4026)..(4026): n is a, c, g, or t
  misc_feature (4029)..(4029): n is a, c, g, or t
  misc_feature (4033)..(4033): n is a, c, g, or t
  misc_feature (4043)..(4043): n is a, c, g, or t
  misc_feature (4046)..(4046): n is a, c, g, or t
  misc_feature (4049)..(4049): n is a, c, g, or t
  misc_feature (4059)..(4059): n is a, c, g, or t
  misc_feature (4064)..(4064): n is a, c, g, or t
  misc_feature (4068)..(4068): n is a, c, g, or t
  misc_feature (4088)..(4088): n is a, c, g, or t
  misc_feature (4116)..(4116): n is a, c, g, or t
  misc_feature (4139)..(4139): n is a, c, g, or t
  misc_feature (4143)..(4143): n is a, c, g, or t
acgtcaggcgtcctctctcgcggtatcatccggttgctgaggccctgtaataaaggtctcgcgaaatttgttctagaggtccaagtttgcttcttagcttactccaccccacccccaacctgtccctccttttctttccaagtcacaaaattctcccctcccctaccccggagtttacggccctcctcctgtttccgatttcagcccggaaccggaagtgtagtgggcggggcccgtcggcggaaaacgcagcggagccagagccggacacggctgtggccgctgcctctacccccgccacggatcgccgggtagtaggactgcgcggctccaggctgagggtcggtccggaggcgggtgggcgcgggtctcacccggattgtccgggtggcaccgttcccggccccaccgggcgccgcgagggatcatgtctacagcctctgccgcctcctcctcctcctcgtcttcggccggtgagatgatcgaagccccttcccaggtcctcaactttgaagagatcgactacaaggagatcgaggtggaagaggttgttggaagaggagcctttggagttgtttgcaaagctaagtggagagcaaaagatgttgctattaaacaaatagaaagtgaatctgagaggaaagcgtttattgtagagcttcggcagttatcccgtgtgaaccatcctaatattgtaaagctttatggagcctgcttgaatccagtgtgtcttgtgatggaatatgctgaagggggctctttatataatgtgctgcatggtgctgaaccattgccatattatactgctgcccacgcaatgagttggtgtttacagtgttcccaaggagtggcttatcttcacagcatgcaacccaaagcgctaattcacagggacctgaaaccaccaaacttactgctggttgcaggggggacagttctaaaaatttgtgattttggtacagcctgtgacattcagacacacatgaccaataacaaggggagtgctgcttggatggcacctgaagtttttgaaggtagtaattacagtgaaaaatgtgacgtcttcagctggggtattattctttgggaagtgataacgcgtcggaaaccctttgatgagattggtggcccagctttccgaatcatgtgggctgttcataatggtactcgaccaccactgataaaaaatttacctaagcccattgagagcctgatgactcgttgttggtctaaagatccttcccagcgcccttcaatggaggaaattgtgaaaataatgactcacttgatgcggtactttccaggagcagatgagccattacagtatccttgtcagtattcagatgaaggacagagcaactctgccaccagtacaggctcattcatggacattgcttctacaaatacgagtaacaaaagtgacactaatatggagcaagttcctgccacaaatgatactattaagcgcttagaatcaaaattgttgaaaaatcaggcaaagcaacagagtgaatctggacgtttaagcttgggagcctcccgtgggagcagtgtggagagcttgcccccaacctctgagggcaagaggatgagtgctgacatgtctgaaatagaagctaggatcgccgcaaccacagcctattccaagcctaaacggggccaccgtaaaactgcttcatttggcaacattctggatgtccctgagatcgtcatatcaggcaacggacagccaagacgtagatccatccaagacttgactgtaactggaacagaacctggtcaggtgagcagtaggtcatccagtcccagtgtcagaatgattactacctcaggaccaacctcagaaaagccaactcgaagtcatccatggacccctgatgattccacagataccaatggatcagataactccatcccaatggcttatcttacactggatcaccaactacagcctctagcaccgtgcccaaactccaaagaatctatggcagtgtttgaacagcattgtaaaatggcacaagaatatatgaaagttcaaacagaaattgcattgttattacagagaaagcaagaactagttgcagaactggaccaggatgaaaaggaccagcaaaatacatctcgcctggtacaggaacataaaaagcttttagatgaaaacaaaagcctttctacttactaccagcaatgcaaaaaacaactagaggtcatcagaagtcagcagcagaaacgacaaggcacttcatgattctctgggaccgttacattttgaaatatgcaaagaaagactttttttttaaggaaaggaaaaccttataatgacgattcatgagtgttagctttttggcgtgttctgaatgccaactgcctatatttgctgcatttttttcattgtttattttccttttctcatggtggacatacaattttactgtttcattgcataacatggtagcatctgtgacttgaatgagcagcactttgcaacttcaaaacagatgcagtgaactgtggctgtatatgcatgctcattgtgtgaaggctagcctaacagaacaggaggtatcaaactagctgctatgtgcaaacagcgtccattttttcatattagaggtggaacctcaagaatgactttattcttgtatctcatctcaaaatattaataatttttttcccaaaagatggtatataccaagttaaagacagggtattataaatttagagtgattggtggtatattacggaaatacggaacctttagggatagttccgtgtaagggctttgatgccagcatccttggatcagtactgaactcagttccatccgtaaaatatgtaaagataagcaagatctaagaagttatcaaaactattctttaaaatgctaaagcaggtaactttttcttccattattttttcctcctaccactgagttttgtaatgaattccttgtgtatacaagcaatacaggtgaatactaaactgttatttttagcttcttcaaaagctattttagaaagcttcctggaaataaatgtcttctgtcatttaatttaaataaaaggagtgttaattgttcccaaatttgattacctagctgaaacagatattggattcagcatagtaatagtaaaataaaattggcagagaaaataactgtagactaggataaagcatgactcctccatagcattgttgcttgtatgtacatctgtcactccactgaaagggacctagtcactttaaagaggccttttatctcagcacgagatatccaagcgtgaatgctaaggcttgatgtttccattaggatttagcattcgagatttcagattttatttatagtcattgatgtgttttgctgtattataacacatttaaagggaaattttattatggtttttacatgtagtcatttcataaaaatatccagataggtaaatggaagaaaatagtagattttagtcatggtaccaaatgcaagaggctgttgaacagttgcttgtttgtttacagtaagttccttgagattttcagtactgtagttgccctggacattgagtacagttcagccttactctgtttttaagtagttgtgttgtcaatttcatgcttttaagtcctgatgatccttggagatgggagaaaaagataccagggataattaaaatccacagccagtttcatcagtttcctcatccatcctgcaaataaaaatgttaacaaggagccaaacttattcgttctggttttacaatttattttgaccgttttttgggtgaaaattgcaaacagccacncccgtcncccccccgcccccgcccaannnaccccnacccnacccccgcncannccccnaccccccccccccccccncccccnnccccnnacccncncccccacccaacccngagnnanncacccncgnncnnccnnaaccncccccccnanccnancnncaaccanccnanaacacccaccccacnncaacacnacncacaaanacccnccncaanccncccncanacncccnaccacccccnccnaancaccccagancaccnaacnccccccccccccaagccccntccatgcccccaatcccagcccccgcanccagagaccacaggccccccccncganaccctggcccccccccataaatgtgtgtggttttcagcgctcaactcctgtcttcaaatggtagtaagttctacttctacttctgtcattcagaacattttatgtcaaatgatgtaatgcagaaattcttgtgcatatttgtaactgaaggaagctttttagatttatttttgtttttaataaaattcagattcctattctaaactggtacataaaagtggtgaatgacttgtatcagc

SEQ ID NO: 336132 - DNA, 3133 bp, Homo sapiens
acgtcaggcgtcctctctcgcggtatcatccggttgctgaggccctgtaataaaggtctcgcgaaatttgttctagaggtccaagtttgcttcttagcttactccaccccacccccaacctgtccctccttttctttccaagtcacaaaattctcccctcccctaccccggagtttacggccctcctcctgtttccgatttcagcccggaaccggaagtgtagtgggcggggcccgtcggcggaaaacgcagcggagccagagccggacacggctgtggccgctgcctctacccccgccacggatcgccgggtagtaggactgcgcggctccaggctgagggtcggtccggaggcgggtgggcgcgggtctcacccggattgtccgggtggcaccgttcccggccccaccgggcgccgcgagggatcatgtctacagcctctgccgcctcctcctcctcctcgtcttcggccggtgagatgatcgaagccccttcccaggtcctcaactttgaagagatcgactacaaggagatcgaggtggaagaggttgttggaagaggagcctttggagttgtttgcaaagctaagtggagagcaaaagatgttgctattaaacaaatagaaagtgaatctgagaggaaagcgtttattgtagagcttcggcagttatcccgtgtgaaccatcctaatattgtaaagctttatggagcctgcttgaatccagtgtgtcttgtgatggaatatgctgaagggggctctttatataatgtgctgcatggtgctgaaccattgccatattatactgctgcccacgcaatgagttggtgtttacagtgttcccaaggagtggcttatcttcacagcatgcaacccaaagcgctaattcacagggacctgaaaccaccaaacttactgctggttgcaggggggacagttctaaaaatttgtgattttggtacagcctgtgacattcagacacacatgaccaataacaaggggagtgctgcttggatggcacctgaagtttttgaaggtagtaattacagtgaaaaatgtgacgtcttcagctggggtattattctttgggaagtgataacgcgtcggaaaccctttgatgagattggtggcccagctttccgaatcatgtgggctgttcataatggtactcgaccaccactgataaaaaatttacctaagcccattgagagcctgatgactcgttgttggtctaaagatccttcccagcgcccttcaatggaggaaattgtgaaaataatgactcacttgatgcggtactttccaggagcagatgagccattacagtatccttgtcagtattcagatgaaggacagagcaactctgccaccagtacaggctcattcatggacattgcttctacaaatacgagtaacaaaagtgacactaatatggagcaagttcctgccacaaatgatactattaagcgcttagaatcaaaattgttgaaaaatcaggcaaagcaacagagtgaatctggacgtttaagcttgggagcctcccgtgggagcagtgtggagagcttgcccccaacctctgagggcaagaggatgagtgctgacatgtctgaaatagaagctaggatcgccgcaaccacagcctattccaagcctaaacggggccaccgtaaaactgcttcatttggcaacattctggatgtccctgagatcgtcatatcaggcaacggacagccaagacgtagatccatccaagacttgactgtaactggaacagaacctggtcaggtgagcagtaggtcatccagtcccagtgtcagaatgattactacctcaggaccaacctcagaaaagccaactcgaagtcatccatggacccctgatgattccacagataccaatggatcagataactccatcccaatggcttatcttacactggatcaccaactacagcctctagcaccgtgcccaaactccaaagaatctatggcagtgtttgaacagcattgtaaaatggcacaagaatatatgaaagttcaaacagaaattgcattgttattacagagaaagcaagaactagttgcagaactggaccaggatgaaaaggaccagcaaaatacatctcgcctggtacaggaacataaaaagcttttagatgaaaacaaaagcctttctacttactaccagcaatgcaaaaaacaactagaggtcatcagaagtcagcagcagaaacgacaaggcacttcatgattctctgggaccgttacattttgaaatatgcaaagaaagactttttttttaaggaaaggaaaaccttataatgacgattcatgagtgttagctttttggcgtgttctgaatgccaactgcctatatttgctgcatttttttcattgtttattttccttttctcatggtggacatacaattttactgtttcattgcataacatggtagcatctgtgacttgaatgagcagcactttgcaacttcaaaacagatgcagtgaactgtggctgtatatgcatgctcattgtgtgaaggctagcctaacagaacaggaggtatcaaactagctgctatgtgcaaacagcgtccattttttcatattagaggtggaacctcaagaatgactttattcttgtatctcatctcaaaatattaataatttttttcccaaaagatggtatataccaagttaaagacagggtattataaatttagagtgattggtggtatattacggaaatacggaacctttagggatagttccgtgtaagggctttgatgccagcatccttggatcagtactgaactcagttccatccgtaaaatatgtaaagataagcaagatctaagaagttatcaaaactattctttaaaatgctaaagcagctcctgtagccagagatcacaggtcttccctgtgaaactttggtttctttctataaatgtgtgtggttttcagcgctcaactcctgtcttcaaatggtagtaagttctacttctacttctgtcattcagaacattttatgtcaaatgatgtaatgcagaaattcttgtgcatatttgtaactgaaggaagctttttagatttatttttgtttttaataaaattcagattcctattctaaa

SEQ ID NO: 336133 - DNA, 2031 bp, Homo sapiens
gaaaaataatggaaaatggaagtaattactccagctaaaaaaagcttggacttagatttctttttatgataccaaatgagaaataaaccaggcaaatcagaaggaagttaaagaagcaaatataaattcaacaagtgtcctaattatcctggatattggaatatttgattttccttacaatcccgttctagaatgcctgccgcctttcaacactttcaagagaatttcaacacttacagagtatttatattgttaacagtaattttgctaccaaaaccttcagaataactttaataataaaatgacactgaaataatagactatacaaactctatattttttcagttggtgttaaaataagtcacattttgataccagtacaagatgtcttttaaataaggatgtcatcagtctgatttttatagcattaatgttttatgaagaaaaagttcaaaatgaaagcattaattgctgtgattattagaattctatcatgactgtattgtagtttttgctctatttcagataagcaagatctaagaagttatcaaaactattctttaaaatgctaaagcaggtaactttttcttccattattttttcctcctaccactgagttttgtaatgaattccttgtgtatacaagcaatacaggtgaatactaaactgttatttttagcttcttcaaaagctattttagaaagcttcctggaaataaatgtcttctgtcatttaatttaaataaaaggagtgttaattgttcccaaatttgattacctagctgaaacagatattggattcagcatagtaatagtaaaataaaattggcagagaaaataactgtagactaggataaagcatgactcctccatagcattgttgcttgtatgtacatctgtcactccactgaaagggacctagtcactttaaagaggccttttatctcagcacgagatatccaagcgtgaatgctaaggcttgatgtttccattaggatttagcattcgagatttcagattttatttatagtcattgatgtgttttgctgtattataacacatttaaagggaaattttattatggtttttacatgtagtcatttcataaaaatatccagataggtaaatggaagaaaatagtagattttagtcatggtaccaaatgcaagaggctgttgaacagttgcttgtttgtttacagtaagttccttgagattttcagtactgtagttgccctggacattgagtacagttcagccttactctgtttttaagtagttgtgttgtcaatttcatgcttttaagtcctgatgatccttggagatgggagaaaaagataccagggataattaaaatccacagccagtttcatcagtttcctcatccatcctgcaaataaaaatgttaacaaggagccaaacttattcgttctggttttacaatttattttgaccgttttttgggtgaaaattgcaaacagccaagcaagtggctggaatgccccagtctaagaaattcaaaaacaatcactgagtaagccctaattacattttactcttgactccaggaaaagaaagcaagcttttatctaatctagagggaagtattcgtgagcaataaaaatcacttttttgagttgaataataatcagttaagaatatttaccgcatagcaacacaacatataaagatttgttacaagttgtttacagatgtttgactatttttgctgaagtattttagagtattgaatgtcttctctcttcaagtttctttcatgttcctaatttcagctcctgtagccagagatcacaggtcttccctgtgaaactttggtttctttctataaatgtgtgtggttttcagcgctcaactcctgtcttcaaatggtagtaagttctacttctacttctgtcattcagaacattttatgtcaaatgatgtaatgcagaaattcttgtgcatatttgtaactgaaggaagctttttagatttatttttgtttttaataaaattcagattcctattctaaa

SEQ ID NO: 336134 - DNA, 1977 bp, Homo sapiens
gaaaaataatggaaaatggaagtaattactccagctaaaaaaagcttggacttagatttctttttatgataccaaatgagaaataaaccaggcaaatcagaaggaagttaaagaagcaaatataaattcaacaagtgtcctaattatcctggatattggaatatttgattttccttacaatcccgttctagaatgcctgccgcctttcaacactttcaagagaatttcaacacttacagagtatttatattgttaacagtaattttgctaccaaaaccttcagaataactttaataataaaatgacactgaaataatagactatacaaactctatattttttcagttggtgttaaaataagtcacattttgataccagtacaagatgtcttttaaataaggatgtcatcagtctgatttttatagcattaatgttttatgaagaaaaagttcaaaatgaaagcattaattgctgtgattattagaattctatcatgactgtattgtagtttttgctctatttcagataagcaagatctaagaagttatcaaaactattctttaaaatgctaaagcaggtaactttttcttccattattttttcctcctaccactgagttttgtaatgaattccttgtgtatacaagcaatacaggtgaatactaaactgttatttttagcttcttcaaaagctattttagaaagcttcctggaaataaatgtcttctgtcatttaatttaaataaaaggagtgttaattgttcccaaatttgattacctagctgaaacagatattggattcagcatagtaatagtaaaataaaattggcagagaaaataactgtagactaggataaagcatgactcctccatagcattgttgcttgtatgtacatctgtcactccactgaaagggacctagtcactttaaagaggccttttatctcagcacgagatatccaagcgtgaatgctaaggcttgatgtttccattaggatttagcattcgagatttcagattttatttatagtcattgatgtgttttgctgtattataacacatttaaagggaaattttattatggtttttacatgtagtcatttcataaaaatatccagataggtaaatggaagttgtttgtttacagtaagttccttgagattttcagtactgtagttgccctggacattgagtacagttcagccttactctgtttttaagtagttgtgttgtcaatttcatgcttttaagtcctgatgatccttggagatgggagaaaaagataccagggataattaaaatccacagccagtttcatcagtttcctcatccatcctgcaaataaaaatgttaacaaggagccaaacttattcgttctggttttacaatttattttgaccgttttttgggtgaaaattgcaaacagccaagcaagtggctggaatgccccagtctaagaaattcaaaaacaatcactgagtaagccctaattacattttactcttgactccaggaaaagaaagcaagcttttatctaatctagagggaagtattcgtgagcaataaaaatcacttttttgagttgaataataatcagttaagaatatttaccgcatagcaacacaacatataaagatttgttacaagttgtttacagatgtttgactatttttgctgaagtattttagagtattgaatgtcttctctcttcaagtttctttcatgttcctaatttcagctcctgtagccagagatcacaggtcttccctgtgaaactttggtttctttctataaatgtgtgtggttttcagcgctcaactcctgtcttcaaatggtagtaagttctacttctacttctgtcattcagaacattttatgtcaaatgatgtaatgcagaaattcttgtgcatatttgtaactgaaggaagctttttagatttatttttgtttttaataaaattcagattcctattctaaa

SEQ ID NO: 336135 - DNA, 1749 bp, Homo sapiens
acgtcaggcgtcctctctcgcggtatcatccggttgctgaggccctgtaataaaggtctcgcgaaatttgttctagaggtccaagtttgcttcttagcttactccaccccacccccaacctgtccctccttttctttccaagtcacaaaattctcccctcccctaccccggagtttacggccctcctcctgtttccgatttcagcccggaaccggaagtgtagtgggcggggcccgtcggcggaaaacgcagcggagccagagccggacacggctgtggccgctgcctctacccccgccacggatcgccgggtagtaggactgcgcggctccaggctgagggtcggtccggaggcgggtgggcgcgggtctcacccggattgtccgggtggcaccgttcccggccccaccgggcgccgcgagggatcatgtctacagcctctgccgcctcctcctcctcctcgtcttcggccggtgagatgatcgaagccccttcccaggtcctcaactttgaagagatcgactacaaggagatcgaggtggaagaggttgttggaagaggagcctttggagttgtttgcaaagctaagtggagagcaaaagatgttgctattaaacaaatagaaagtgaatctgagaggaaagcgtttattgtagagcttcggcagttatcccgtgtgaaccatcctaatattgtaaagctttatggagcctgcttgaatccagtgtgtcttgtgatggaatatgctgaagggggctctttatataatgtgctgcatggtgctgaaccattgccatattatactgctgcccacgcaatgagttggtgtttacagtgttcccaaggagtggcttatcttcacagcatgcaacccaaagcgctaattcacagggacctgaaaccaccaaacttactgctggttgcaggggggacagttctaaaaatttgtgattttggtacagcctgtgacattcagacacacatgaccaataacaaggggagtgctgcttggatggcacctgaagtttttgaaggtagtaattacagtgaaaaatgtgacgtcttcagctggggtattattctttgggaagtgataacgcgtcggaaaccctttgatgagattggtggcccagctttccgaatcatgtgggctgttcataatggtactcgaccaccactgataaaaaatttacctaagcccattgagagcctgatgactcgttgttggtctaaagatccttcccagcgcccttcaatggaggaaattgtgaaaataatgactcacttgatgcggtactttccaggagcagatgagccattacagtatccttgtcagtattcagatgaaggacagagcaactctgccaccagtacaggctcattcatggacattgcttctacaaatacgagtaacaaaagtgacactaatatggagcaagttcctgccacaaatgatactattaagcgcttagaatcaaaattgttgagtgggagcagtgtggagagcttgcccccaacctctgagggcaagaggatgagtgctgacatgtctgaaatagaagctaggatcgccgcaaccacagcctattccaagcctaaacggggccaccgtaaaactgcttcatttggcaacattctggatgtccctgagatcgtcatatcaggcaacggacagccaagacgtagatccatccaagacttgactgtaactggaacagaacctggtcaggtaagacaacattcaaattt

SEQ ID NO: 336136 - DNA, 1226 bp, Homo sapiens
tagaatcgagcgtcggcctgacagtaaaatgaacacattgccatattatactgctgcccacgcaatgagttggtgtttacagtgttcccaaggagtggcttatcttcacagcatgcaacccaaagcgctaattcacagggacctgaaaccaccaaagtaagttataataatgtgacacccctcagcctcttcctccttctctctcactctcaccaccccgaacccactctctaattcaagctactcgggaggctgagccaggagaatcgcttgaacccaggaggtggagtttacagtgagccaagatcgcaccactgcactccagcctggcgacaaagtgagagtccgtctcaaaaaacaaaaagaaaaaagaaagtaaaaaattaaaagcaggactgatggagcatatgtatatgtagaaaaatacccagtcatgtgttctgatagtgcttgcattcacattgtgtcttttgttatatgcaataaagttctttttagtttgtgcctttctttcgcagtgctgcatggtgctgaaccattgccatattatactgctgcccacgcaatgagttggtgtttacagtgttcccaaggagtggcttatcttcacagcatgcaacccaaagcgctaattcacagggacctgaaaccaccaaacttactgctggttgcaggggggacagttctaaaaatttgtgattttggtacagcctgtgacattcagacacacatgaccaataacaaggggagtgctgcttggatggcacctgaagtttttgaaggtagtaattacagtgaaaaatgtgacgtcttcagctggggtattattctttgggaagtgataacgcgtcggaaaccctttgatgagattggtggcccagctttccgaatcatgtgggctgttcataatggttcgtaaaaagaaatttttcttaaaagtactttttgtgttttctacttggaagactactcctgtccccttccctaaagaatatcatttatctctaacattaaaatgtacaattctttgttaagagactgctttgctattatcagactctgccctgtccctgccccagagtccagcagagcaggattgagagtagtcctggtctacacatgcggctgaggatgttcactggctccgctgattagggaaaggccatcagtacgcaacctagacagttggctctctcttagggagaagcatcaggctggatcatgga

SEQ ID NO: 336137 - DNA, 4095 bp, Homo sapiens
tagaatcgagcgtcggcctgacagtaaaatgaacacattgccatattatactgctgcccacgcaatgagttggtgtttacagtgttcccaaggagtggcttatcttcacagcatgcaacccaaagcgctaattcacagggacctgaaaccaccaaagtaagttataataatgtgacacccctcagcctcttcctccttctctctcactctcaccaccccgaacccactctctaattcaagctactcgggaggctgagccaggagaatcgcttgaacccaggaggtggagtttacagtgagccaagatcgcaccactgcactccagcctggcgacaaagtgagagtccgtctcaaaaaacaaaaagaaaaaagaaagtaaaaaattaaaagcaggactgatggagcatatgtatatgtagaaaaatacccagtcatgtgttctgatagtgcttgcattcacattgtgtcttttgttatatgcaataaagttctttttagtttgtgcctttctttcgcagtgctgcatggtgctgaaccattgccatattatactgctgcccacgcaatgagttggtgtttacagtgttcccaaggagtggcttatcttcacagcatgcaacccaaagcgctaattcacagggacctgaaaccaccaaacttactgctggttgcaggggggacagttctaaaaatttgtgattttggtacagcctgtgacattcagacacacatgaccaataacaaggggagtgctgcttggatggcacctgaagtttttgaaggtagtaattacagtgaaaaatgtgacgtcttcagctggggtattattctttgggaagtgataacgcgtcggaaaccctttgatgagattggtggcccagctttccgaatcatgtgggctgttcataatggtactcgaccaccactgataaaaaatttacctaagcccattgagagcctgatgactcgttgttggtctaaagatccttcccagcgcccttcaatggaggaaattgtgaaaataatgactcacttgatgcggtactttccaggagcagatgagccattacagtatccttgtcagtattcagatgaaggacagagcaactctgccaccagtacaggctcattcatggacattgcttctacaaatacgagtaacaaaagtgacactaatatggagcaagttcctgccacaaatgatactattaagcgcttagaatcaaaattgttgaaaaatcaggcaaagcaacagagtgaatctggacgtttaagcttgggagcctcccgtgggagcagtgtggagagcttgcccccaacctctgagggcaagaggatgagtgctgacatgtctgaaatagaagctaggatcgccgcaaccacagcctattccaagcctaaacggggccaccgtaaaactgcttcatttggcaacattctggatgtccctgagatcgtcatatcaggcaacggacagccaagacgtagatccatccaagacttgactgtaactggaacagaacctggtcaggtgagcagtaggtcatccagtcccagtgtcagaatgattactacctcaggaccaacctcagaaaagccaactcgaagtcatccatggacccctgatgattccacagataccaatggatcagataactccatcccaatggcttatcttacactggatcaccaactacagcctctagcaccgtgcccaaactccaaagaatctatggcagtgtttgaacagcattgtaaaatggcacaagaatatatgaaagttcaaacagaaattgcattgttattacagagaaagcaagaactagttgcagaactggaccaggatgaaaaggaccagcaaaatacatctcgcctggtacaggaacataaaaagcttttagatgaaaacaaaagcctttctacttactaccagcaatgcaaaaaacaactagaggtcatcagaagtcagcagcagaaacgacaaggcacttcatgattctctgggaccgttacattttgaaatatgcaaagaaagactttttttttaaggaaaggaaaaccttataatgacgattcatgagtgttagctttttggcgtgttctgaatgccaactgcctatatttgctgcatttttttcattgtttattttccttttctcatggtggacatacaattttactgtttcattgcataacatggtagcatctgtgacttgaatgagcagcactttgcaacttcaaaacagatgcagtgaactgtggctgtatatgcatgctcattgtgtgaaggctagcctaacagaacaggaggtatcaaactagctgctatgtgcaaacagcgtccattttttcatattagaggtggaacctcaagaatgactttattcttgtatctcatctcaaaatattaataatttttttcccaaaagatggtatataccaagttaaagacagggtattataaatttagagtgattggtggtatattacggaaatacggaacctttagggatagttccgtgtaagggctttgatgccagcatccttggatcagtactgaactcagttccatccgtaaaatatgtaaagataagcaagatctaagaagttatcaaaactattctttaaaatgctaaagcaggtaactttttcttccattattttttcctcctaccactgagttttgtaatgaattccttgtgtatacaagcaatacaggtgaatactaaactgttatttttagcttcttcaaaagctattttagaaagcttcctggaaataaatgtcttctgtcatttaatttaaataaaaggagtgttaattgttcccaaatttgattacctagctgaaacagatattggattcagcatagtaatagtaaaataaaattggcagagaaaataactgtagactaggataaagcatgactcctccatagcattgttgcttgtatgtacatctgtcactccactgaaagggacctagtcactttaaagaggccttttatctcagcacgagatatccaagcgtgaatgctaaggcttgatgtttccattaggatttagcattcgagatttcagattttatttatagtcattgatgtgttttgctgtattataacacatttaaagggaaattttattatggtttttacatgtagtcatttcataaaaatatccagataggtaaatggaagaaaatagtagattttagtcatggtaccaaatgcaagaggctgttgaacagttgcttgtttgtttacagtaagttccttgagattttcagtactgtagttgccctggacattgagtacagttcagccttactctgtttttaagtagttgtgttgtcaatttcatgcttttaagtcctgatgatccttggagatgggagaaaaagataccagggataattaaaatccacagccagtttcatcagtttcctcatccatcctgcaaataaaaatgttaacaaggagccaaacttattcgttctggttttacaatttattttgaccgttttttgggtgaaaattgcaaacagccaagcaagtggctggaatgccccagtctaagaaattcaaaaacaatcactgagtaagccctaattacattttactcttgactccaggaaaagaaagcaagcttttatctaatctagagggaagtattcgtgagcaataaaaatcacttttttgagttgaataataatcagttaagaatatttaccgcatagcaacacaacatataaagatttgttacaagttgtttacagatgtttgactatttttgctgaagtattttagagtattgaatgtcttctctcttcaagtttctttcatgttcctaatttcagctcctgtagccagagatcacaggtcttccctgtgaaactttggtttctttctataaatgtgtgtggttttcagcgctcaactcctgtcttcaaatggtagtaagttctacttctacttctgtcattcagaacattttatgtcaaatgatgtaatgcagaaattcttgtgcatatttgtaactgaaggaagctttttagatttatttttgtttttaataaaattcagattcctattctaaa

SEQ ID NO: 336138 - DNA, 4150 bp, Homo sapiens
acgtcaggcgtcctctctcgcggtatcatccggttgctgaggccctgtaataaaggtctcgcgaaatttgttctagaggtccaagtttgcttcttagcttactccaccccacccccaacctgtccctccttttctttccaagtcacaaaattctcccctcccctaccccggagtttacggccctcctcctgtttccgatttcagcccggaaccggaagtgtagtgggcggggcccgtcggcggaaaacgcagcggagccagagccggacacggctgtggccgctgcctctacccccgccacggatcgccgggtagtaggactgcgcggctccaggctgagggtcggtccggaggcgggtgggcgcgggtctcacccggattgtccgggtggcaccgttcccggccccaccgggcgccgcgagggatcatgtctacagcctctgccgcctcctcctcctcctcgtcttcggccggtgagatgatcgaagccccttcccaggtcctcaactttgaagagatcgactacaaggagatcgaggtggaagaggttgttggaagaggagcctttggagttgtttgcaaagctaagtggagagcaaaagatgttgctattaaacaaatagaaagtgaatctgagaggaaagcgtttattgtagagcttcggcagttatcccgtgtgaaccatcctaatattgtaaagctttatggagcctgcttgaatccagtgtgtcttgtgatggaatatgctgaagggggctctttatataatgtgctgcatggtgctgaaccattgccatattatactgctgcccacgcaatgagttggtgtttacagtgttcccaaggagtggcttatcttcacagcatgcaacccaaagcgctaattcacagggacctgaaaccaccaaacttactgctggttgcaggggggacagttctaaaaatttgtgattttggtacagcctgtgacattcagacacacatgaccaataacaaggggagtgctgcttggatggcacctgaagtttttgaaggtagtaattacagtgaaaaatgtgacgtcttcagctggggtattattctttgggaagtgataacgcgtcggaaaccctttgatgagattggtggcccagctttccgaatcatgtgggctgttcataatggtactcgaccaccactgataaaaaatttacctaagcccattgagagcctgatgactcgttgttggtctaaagatccttcccagcgcccttcaatggaggaaattgtgaaaataatgactcacttgatgcggtactttccaggagcagatgagccattacagtatccttgtcagtattcagatgaaggacagagcaactctgccaccagtacaggctcattcatggacattgcttctacaaatacgagtaacaaaagtgacactaatatggagcaagttcctgccacaaatgatactattaagcgcttagaatcaaaattgttgaaaaatcaggcaaagcaacagagtgaatctggacgtttaagcttgggagcctcccgtgggagcagtgtggagagcttgcccccaacctctgagggcaagaggatgagtgctgacatgtctgaaatagaagctaggatcgccgcaaccacaggcaacggacagccaagacgtagatccatccaagacttgactgtaactggaacagaacctggtcaggtgagcagtaggtcatccagtcccagtgtcagaatgattactacctcaggaccaacctcagaaaagccaactcgaagtcatccatggacccctgatgattccacagataccaatggatcagataactccatcccaatggcttatcttacactggatcaccaactacaggcaagaactagttgcagaactggaccaggatgaaaaggaccagcaaaatacatctcgcctggtacaggaacataaaaagcttttagatgaaaacaaaagcctttctacttactaccagcaatgcaaaaaacaactagaggtcatcagaagtcagcagcagaaacgacaaggcacttcatgattctctgggaccgttacattttgaaatatgcaaagaaagactttttttttaaggaaaggaaaaccttataatgacgattcatgagtgttagctttttggcgtgttctgaatgccaactgcctatatttgctgcatttttttcattgtttattttccttttctcatggtggacatacaattttactgtttcattgcataacatggtagcatctgtgacttgaatgagcagcactttgcaacttcaaaacagatgcagtgaactgtggctgtatatgcatgctcattgtgtgaaggctagcctaacagaacaggaggtatcaaactagctgctatgtgcaaacagcgtccattttttcatattagaggtggaacctcaagaatgactttattcttgtatctcatctcaaaatattaataatttttttcccaaaagatggtatataccaagttaaagacagggtattataaatttagagtgattggtggtatattacggaaatacggaacctttagggatagttccgtgtaagggctttgatgccagcatccttggatcagtactgaactcagttccatccgtaaaatatgtaaagataagcaagatctaagaagttatcaaaactattctttaaaatgctaaagcaggtaactttttcttccattattttttcctcctaccactgagttttgtaatgaattccttgtgtatacaagcaatacaggtgaatactaaactgttatttttagcttcttcaaaagctattttagaaagcttcctggaaataaatgtcttctgtcatttaatttaaataaaaggagtgttaattgttcccaaatttgattacctagctgaaacagatattggattcagcatagtaatagtaaaataaaattggcagagaaaataactgtagactaggataaagcatgactcctccatagcattgttgcttgtatgtacatctgtcactccactgaaagggacctagtcactttaaagaggccttttatctcagcacgagatatccaagcgtgaatgctaaggcttgatgtttccattaggatttagcattcgagatttcagattttatttatagtcattgatgtgttttgctgtattataacacatttaaagggaaattttattatggtttttacatgtagtcatttcataaaaatatccagataggtaaatggaagaaaatagtagattttagtcatggtaccaaatgcaagaggctgttgaacagttgcttgtttgtttacagtaagttccttgagattttcagtactgtagttgccctggacattgagtacagttcagccttactctgtttttaagtagttgtgttgtcaatttcatgcttttaagtcctgatgatccttggagatgggagaaaaagataccagggataattaaaatccacagccagtttcatcagtttcctcatccatcctgcaaataaaaatgttaacaaggagccaaacttattcgttctggttttacaatttattttgaccgttttttgggtgaaaattgcaaacagccaagcaagtggctggaatgccccagtctaagaaattcaaaaacaatcactgagtaagccctaattacattttactcttgactccaggaaaagaaagcaagcttttatctaatctagagggaagtattcgtgagcaataaaaatcacttttttgagttgaataataatcagttaagaatatttaccgcatagcaacacaacatataaagatttgttacaagttgtttacagatgtttgactatttttgctgaagtattttagagtattgaatgtcttctctcttcaagtttctttcatgttcctaatttcagctcctgtagccagagatcacaggtcttccctgtgaaactttggtttctttctataaatgtgtgtggttttcagcgctcaactcctgtcttcaaatggtagtaagttctacttctacttctgtcattcagaacattttatgtcaaatgatgtaatgcagaaattcttgtgcatatttgtaactgaaggaagctttttagatttatttttgtttttaataaaattcagattcctattctaaa

SEQ ID NO: 336139 - DNA, 4231 bp, Homo sapiens
acgtcaggcgtcctctctcgcggtatcatccggttgctgaggccctgtaataaaggtctcgcgaaatttgttctagaggtccaagtttgcttcttagcttactccaccccacccccaacctgtccctccttttctttccaagtcacaaaattctcccctcccctaccccggagtttacggccctcctcctgtttccgatttcagcccggaaccggaagtgtagtgggcggggcccgtcggcggaaaacgcagcggagccagagccggacacggctgtggccgctgcctctacccccgccacggatcgccgggtagtaggactgcgcggctccaggctgagggtcggtccggaggcgggtgggcgcgggtctcacccggattgtccgggtggcaccgttcccggccccaccgggcgccgcgagggatcatgtctacagcctctgccgcctcctcctcctcctcgtcttcggccggtgagatgatcgaagccccttcccaggtcctcaactttgaagagatcgactacaaggagatcgaggtggaagaggttgttggaagaggagcctttggagttgtttgcaaagctaagtggagagcaaaagatgttgctattaaacaaatagaaagtgaatctgagaggaaagcgtttattgtagagcttcggcagttatcccgtgtgaaccatcctaatattgtaaagctttatggagcctgcttgaatccagtgtgtcttgtgatggaatatgctgaagggggctctttatataatgtgctgcatggtgctgaaccattgccatattatactgctgcccacgcaatgagttggtgtttacagtgttcccaaggagtggcttatcttcacagcatgcaacccaaagcgctaattcacagggacctgaaaccaccaaacttactgctggttgcaggggggacagttctaaaaatttgtgattttggtacagcctgtgacattcagacacacatgaccaataacaaggggagtgctgcttggatggcacctgaagtttttgaaggtagtaattacagtgaaaaatgtgacgtcttcagctggggtattattctttgggaagtgataacgcgtcggaaaccctttgatgagattggtggcccagctttccgaatcatgtgggctgttcataatggtactcgaccaccactgataaaaaatttacctaagcccattgagagcctgatgactcgttgttggtctaaagatccttcccagcgcccttcaatggaggaaattgtgaaaataatgactcacttgatgcggtactttccaggagcagatgagccattacagtatccttgtcagtattcagatgaaggacagagcaactctgccaccagtacaggctcattcatggacattgcttctacaaatacgagtaacaaaagtgacactaatatggagcaagttcctgccacaaatgatactattaagcgcttagaatcaaaattgttgaaaaatcaggcaaagcaacagagtgaatctggacgtttaagcttgggagcctcccgtgggagcagtgtggagagcttgcccccaacctctgagggcaagaggatgagtgctgacatgtctgaaatagaagctaggatcgccgcaaccacagcctattccaagcctaaacggggccaccgtaaaactgcttcatttggcaacattctggatgtccctgagatcgtcatatcaggcaacggacagccaagacgtagatccatccaagacttgactgtaactggaacagaacctggtcaggtgagcagtaggtcatccagtcccagtgtcagaatgattactacctcaggaccaacctcagaaaagccaactcgaagtcatccatggacccctgatgattccacagataccaatggatcagataactccatcccaatggcttatcttacactggatcaccaactacaggcaagaactagttgcagaactggaccaggatgaaaaggaccagcaaaatacatctcgcctggtacaggaacataaaaagcttttagatgaaaacaaaagcctttctacttactaccagcaatgcaaaaaacaactagaggtcatcagaagtcagcagcagaaacgacaaggcacttcatgattctctgggaccgttacattttgaaatatgcaaagaaagactttttttttaaggaaaggaaaaccttataatgacgattcatgagtgttagctttttggcgtgttctgaatgccaactgcctatatttgctgcatttttttcattgtttattttccttttctcatggtggacatacaattttactgtttcattgcataacatggtagcatctgtgacttgaatgagcagcactttgcaacttcaaaacagatgcagtgaactgtggctgtatatgcatgctcattgtgtgaaggctagcctaacagaacaggaggtatcaaactagctgctatgtgcaaacagcgtccattttttcatattagaggtggaacctcaagaatgactttattcttgtatctcatctcaaaatattaataatttttttcccaaaagatggtatataccaagttaaagacagggtattataaatttagagtgattggtggtatattacggaaatacggaacctttagggatagttccgtgtaagggctttgatgccagcatccttggatcagtactgaactcagttccatccgtaaaatatgtaaagataagcaagatctaagaagttatcaaaactattctttaaaatgctaaagcaggtaactttttcttccattattttttcctcctaccactgagttttgtaatgaattccttgtgtatacaagcaatacaggtgaatactaaactgttatttttagcttcttcaaaagctattttagaaagcttcctggaaataaatgtcttctgtcatttaatttaaataaaaggagtgttaattgttcccaaatttgattacctagctgaaacagatattggattcagcatagtaatagtaaaataaaattggcagagaaaataactgtagactaggataaagcatgactcctccatagcattgttgcttgtatgtacatctgtcactccactgaaagggacctagtcactttaaagaggccttttatctcagcacgagatatccaagcgtgaatgctaaggcttgatgtttccattaggatttagcattcgagatttcagattttatttatagtcattgatgtgttttgctgtattataacacatttaaagggaaattttattatggtttttacatgtagtcatttcataaaaatatccagataggtaaatggaagaaaatagtagattttagtcatggtaccaaatgcaagaggctgttgaacagttgcttgtttgtttacagtaagttccttgagattttcagtactgtagttgccctggacattgagtacagttcagccttactctgtttttaagtagttgtgttgtcaatttcatgcttttaagtcctgatgatccttggagatgggagaaaaagataccagggataattaaaatccacagccagtttcatcagtttcctcatccatcctgcaaataaaaatgttaacaaggagccaaacttattcgttctggttttacaatttattttgaccgttttttgggtgaaaattgcaaacagccaagcaagtggctggaatgccccagtctaagaaattcaaaaacaatcactgagtaagccctaattacattttactcttgactccaggaaaagaaagcaagcttttatctaatctagagggaagtattcgtgagcaataaaaatcacttttttgagttgaataataatcagttaagaatatttaccgcatagcaacacaacatataaagatttgttacaagttgtttacagatgtttgactatttttgctgaagtattttagagtattgaatgtcttctctcttcaagtttctttcatgttcctaatttcagctcctgtagccagagatcacaggtcttccctgtgaaactttggtttctttctataaatgtgtgtggttttcagcgctcaactcctgtcttcaaatggtagtaagttctacttctacttctgtcattcagaacattttatgtcaaatgatgtaatgcagaaattcttgtgcatatttgtaactgaaggaagctttttagatttatttttgtttttaataaaattcagattcctattctaaa

SEQ ID NO: 336140 - DNA, 3637 bp, Homo sapiens
tggttaattaatttttgcttattatttctctgaactattaggcttttatagtgaccaagtaaattagtcatttcacagaagttgaatgataacattcattttgcttaaccttttccatttccacaaatgtctcttcttttattgtagaataaaatgttggccttgtaacttttgatgttttttgtttttttttaaacagcttactgctggttgcaggggggacagttctaaaaatttgtgattttggtacagcctgtgacattcagacacacatgaccaataacaaggggagtgctgcttggatggcacctgaagtttttgaaggtagtaattacagtgaaaaatgtgacgtcttcagctggggtattattctttgggaagtgataacgcgtcggaaaccctttgatgagattggtggcccagctttccgaatcatgtgggctgttcataatggtactcgaccaccactgataaaaaatttacctaagcccattgagagcctgatgactcgttgttggtctaaagatccttcccagcgcccttcaatggaggaaattgtgaaaataatgactcacttgatgcggtactttccaggagcagatgagccattacagtatccttgtcagtattcagatgaaggacagagcaactctgccaccagtacaggctcattcatggacattgcttctacaaatacgagtaacaaaagtgacactaatatggagcaagttcctgccacaaatgatactattaagcgcttagaatcaaaattgttgaaaaatcaggcaaagcaacagagtgaatctggacgtttaagcttgggagcctcccgtgggagcagtgtggagagcttgcccccaacctctgagggcaagaggatgagtgctgacatgtctgaaatagaagctaggatcgccgcaaccacagcctattccaagcctaaacggggccaccgtaaaactgcttcatttggcaacattctggatgtccctgagatcgtcatatcaggcaacggacagccaagacgtagatccatccaagacttgactgtaactggaacagaacctggtcaggtgagcagtaggtcatccagtcccagtgtcagaatgattactacctcaggaccaacctcagaaaagccaactcgaagtcatccatggacccctgatgattccacagataccaatggatcagataactccatcccaatggcttatcttacactggatcaccaactacagcctctagcaccgtgcccaaactccaaagaatctatggcagtgtttgaacagcattgtaaaatggcacaagaatatatgaaagttcaaacagaaattgcattgttattacagagaaagcaagaactagttgcagaactggaccaggatgaaaaggaccagcaaaatacatctcgcctggtacaggaacataaaaagcttttagatgaaaacaaaagcctttctacttactaccagcaatgcaaaaaacaactagaggtcatcagaagtcagcagcagaaacgacaaggcacttcatgattctctgggaccgttacattttgaaatatgcaaagaaagactttttttttaaggaaaggaaaaccttataatgacgattcatgagtgttagctttttggcgtgttctgaatgccaactgcctatatttgctgcatttttttcattgtttattttccttttctcatggtggacatacaattttactgtttcattgcataacatggtagcatctgtgacttgaatgagcagcactttgcaacttcaaaacagatgcagtgaactgtggctgtatatgcatgctcattgtgtgaaggctagcctaacagaacaggaggtatcaaactagctgctatgtgcaaacagcgtccattttttcatattagaggtggaacctcaagaatgactttattcttgtatctcatctcaaaatattaataatttttttcccaaaagatggtatataccaagttaaagacagggtattataaatttagagtgattggtggtatattacggaaatacggaacctttagggatagttccgtgtaagggctttgatgccagcatccttggatcagtactgaactcagttccatccgtaaaatatgtaaagataagcaagatctaagaagttatcaaaactattctttaaaatgctaaagcaggtaactttttcttccattattttttcctcctaccactgagttttgtaatgaattccttgtgtatacaagcaatacaggtgaatactaaactgttatttttagcttcttcaaaagctattttagaaagcttcctggaaataaatgtcttctgtcatttaatttaaataaaaggagtgttaattgttcccaaatttgattacctagctgaaacagatattggattcagcatagtaatagtaaaataaaattggcagagaaaataactgtagactaggataaagcatgactcctccatagcattgttgcttgtatgtacatctgtcactccactgaaagggacctagtcactttaaagaggccttttatctcagcacgagatatccaagcgtgaatgctaaggcttgatgtttccattaggatttagcattcgagatttcagattttatttatagtcattgatgtgttttgctgtattataacacatttaaagggaaattttattatggtttttacatgtagtcatttcataaaaatatccagataggtaaatggaagaaaatagtagattttagtcatggtaccaaatgcaagaggctgttgaacagttgcttgtttgtttacagtaagttccttgagattttcagtactgtagttgccctggacattgagtacagttcagccttactctgtttttaagtagttgtgttgtcaatttcatgcttttaagtcctgatgatccttggagatgggagaaaaagataccagggataattaaaatccacagccagtttcatcagtttcctcatccatcctgcaaataaaaatgttaacaaggagccaaacttattcgttctggttttacaatttattttgaccgttttttgggtgaaaattgcaaacagccaagcaagtggctggaatgccccagtctaagaaattcaaaaacaatcactgagtaagccctaattacattttactcttgactccaggaaaagaaagcaagcttttatctaatctagagggaagtattcgtgagcaataaaaatcacttttttgagttgaataataatcagttaagaatatttaccgcatagcaacacaacatataaagatttgttacaagttgtttacagatgtttgactatttttgctgaagtattttagagtattgaatgtcttctctcttcaagtttctttcatgttcctaatttcagctcctgtagccagagatcacaggtcttccctgtgaaactttggtttctttctataaatgtgtgtggttttcagcgctcaactcctgtcttcaaatggtagtaagttctacttctacttctgtcattcagaacattttatgtcaaatgatgtaatgcagaaattcttgtgcatatttgtaactgaaggaagctttttagatttatttttgtttttaataaaattcagattcctattctaaa

SEQ ID NO: 336141 - DNA, 4583 bp, Homo sapiens
acgtcaggcgtcctctctcgcggtatcatccggttgctgaggccctgtaataaaggtctcgcgaaatttgttctagaggtccaagtttgcttcttagcttactccaccccacccccaacctgtccctccttttctttccaagtcacaaaattctcccctcccctaccccggagtttacggccctcctcctgtttccgatttcagcccggaaccggaagtgtagtgggcggggcccgtcggcggaaaacgcagcggagccagagccggacacggctgtggccgctgcctctacccccgccacggatcgccgggtagtaggactgcgcggctccaggctgagggtcggtccggaggcgggtgggcgcgggtctcacccggattgtccgggtggcaccgttcccggccccaccgggcgccgcgagggatcatgtctacagcctctgccgcctcctcctcctcctcgtcttcggccggtgagatgatcgaagccccttcccaggtcctcaactttgaagagatcgactacaaggagatcgaggtggaagaggttgttggaagaggagcctttggagttgtttgcaaagctaagtggagagcaaaagatgttgctattaaacaaatagaaagtgaatctgagaggaaagcgtttattgtagagcttcggcagttatcccgtgtgaaccatcctaatattgtaaagctttatggagcctgcttgaatccagtgtgtcttgtgatggaatatgctgaagggggctctttatataatgtgctgcatggtgctgaaccattgccatattatactgctgcccacgcaatgagttggtgtttacagtgttcccaaggagtggcttatcttcacagcatgcaacccaaagcgctaattcacagggacctgaaaccaccaaacttactgctggttgcaggggggacagttctaaaaatttgtgattttggtacagcctgtgacattcagacacacatgaccaataacaaggggagtgctgcttggatggcacctgaagtttttgaaggtagtaattacagtgaaaaatgtgacgtcttcagctggggtattattctttgggaagtgataacgcgtcggaaaccctttgatgagattggtggcccagctttccgaatcatgtgggctgttcataatggtactcgaccaccactgataaaaaatttacctaagcccattgagagcctgatgactcgttgttggtctaaagatccttcccagcgcccttcaatggaggaaattgtgaaaataatgactcacttgatgcggtactttccaggagcagatgagccattacagtatccttgtcagtattcagatgaaggacagagcaactctgccaccagtacaggctcattcatggacattgcttctacaaatacgagtaacaaaagtgacactaatatggagcaagttcctgccacaaatgatactattaagcgcttagaatcaaaattgttgaaaaatcaggcaaagcaacagagtgaatctggacgtttaagcttgggagcctcccgtgggagcagtgtggagagcttgcccccaacctctgagggcaagaggatgagtgctgacatgtctgaaatagaagctaggatcgccgcaaccacagcctattccaagcctaaacggggccaccgtaaaactgcttcatttggcaacattctggatgtccctgagatcgtcatatcaggcaacggacagccaagacgtagatccatccaagacttgactgtaactggaacagaacctggtcaggtgagcagtaggtcatccagtcccagtgtcagaatgattactacctcaggaccaacctcagaaaagccaactcgaagtcatccatggacccctgatgattccacagataccaatggatcagataactccatcccaatggcttatcttacactggatcaccaactacagcctctagcaccgtgcccaaactccaaagaatctatggcagtgtttgaacagcattgtaaaatggcacaagaatatatgaaagttcaaacagaaattgcattgttattacagagaaagcaagaactagttgcagaactggaccaggatgaaaaggaccagcaaaatacatctcgcctggtacaggaacataaaaagcttttagatgaaaacaaaagcctttctacttactaccagcaatgcaaaaaacaactagaggtcatcagaagtcagcagcagaaacgacaaggcacttcatgattctctgggaccgttacattttgaaatatgcaaagaaagactttttttttaaggaaaggaaaaccttataatgacgattcatgagtgttagctttttggcgtgttctgaatgccaactgcctatatttgctgcatttttttcattgtttattttccttttctcatggtggacatacaattttactgtttcattgcataacatggtagcatctgtgacttgaatgagcagcactttgcaacttcaaaacagatgcagtgaactgtggctgtatatgcatgctcattgtgtgaaggctagcctaacagaacaggaggtatcaaactagctgctatgtgcaaacagcgtccattttttcatattagaggtggaacctcaagaatgactttattcttgtatctcatctcaaaatattaataatttttttcccaaaagatggtatataccaagttaaagacagggtattataaatttagagtgattggtggtatattacggaaatacggaacctttagggatagttccgtgtaagggctttgatgccagcatccttggatcagtactgaactcagttccatccgtaaaatatgtaaagataagcaagatctaagaagttatcaaaactattctttaaaatgctaaagcaggtaactttttcttccattattttttcctcctaccactgagttttgtaatgaattccttgtgtatacaagcaatacaggtgaatactaaactgttatttttagcttcttcaaaagctattttagaaagcttcctggaaataaatgtcttctgtcatttaatttaaataaaaggagtgttaattgttcccaaatttgattacctagctgaaacagatattggattcagcatagtaatagtaaaataaaattggcagagaaaataactgtagactaggataaagcatgactcctccatagcattgttgcttgtatgtacatctgtcactccactgaaagggacctagtcactttaaagaggccttttatctcagcacgagatatccaagcgtgaatgctaaggcttgatgtttccattaggatttagcattcgagatttcagattttatttatagtcattgatgtgttttgctgtattataacacatttaaagggaaattttattatggtttttacatgtagtcatttcataaaaatatccagataggtaaatggaagaaaatagtagattttagtcatggtaccaaatgcaagaggctgttgaacagttgcttgtttgtttacagtaagttccttgagattttcagtactgtagttgccctggacattgagtacagttcagccttactctgtttttaagtagttgtgttgtcaatttcatgcttttaagtcctgatgatccttggagatgggagaaaaagataccagggataattaaaatccacagccagtttcatcagtttcctcatccatcctgcaaataaaaatgttaacaaggagccaaacttattcgttctggttttacaatttattttgaccgttttttgggtgaaaattgcaaacagccaagcaagtggctggaatgccccagtctaagaaattcaaaaacaatcactgagtaagccctaattacattttactcttgactccaggaaaagaaagcaagcttttatctaatctagagggaagtattcgtgagcaataaaaatcacttttttgagttgaataataatcagttaagaatatttaccgcatagcaacacaacatataaagatttgttacaagttgtttacagatgtttgactatttttgctgaagtattttagagtattgaatgtcttctctcttcaagtttctttcatgttcctaatttcagctcctgtagccagagatcacaggtcttccctgtgaaactttggtttctttctataaatgtgtgtggttttcagcgctcaactcctgtcttcaaatggtagtaagttctacttctacttctgtcattcagaacattttatgtcaaatgatgtaatgcagaaattcttgtgcatatttgtaactgaaggaagctttttagatttatttttgtttttaataaaattcagattcctattctaaaaaaaaaaaaaaaaaaaaaaaaaaggggggggcggctaaaaaataacctagagggcaagtttaagcgtaccaggtttttggtcaaaagggccctaaggggggaataaaaggagggaggggcgtacaacgtcggtgggaaacggcgttgggctttggaagagcttcttttggtggcgtttggaatctaagaattagctaggaataatacgttatggtacacgttctgggaatgcgtaa

SEQ ID NO: 336142 - DNA, 2970 bp, Homo sapiens
acgtcaggcgtcctctctcgcggtatcatccggttgctgaggccctgtaataaaggtctcgcgaaatttgttctagaggtccaagtttgcttcttagcttactccaccccacccccaacctgtccctccttttctttccaagtcacaaaattctcccctcccctaccccggagtttacggccctcctcctgtttccgatttcagcccggaaccggaagtgtagtgggcggggcccgtcggcggaaaacgcagcggagccagagccggacacggctgtggccgctgcctctacccccgccacggatcgccgggtagtaggactgcgcggctccaggctgagggtcggtccggaggcgggtgggcgcgggtctcacccggattgtccgggtggcaccgttcccggccccaccgggcgccgcgagggatcatgtctacagcctctgccgcctcctcctcctcctcgtcttcggccggtgagatgatcgaagccccttcccaggtcctcaactttgaagagatcgactacaaggagatcgaggtggaagaggttgttggaagaggagcctttggagttgtttgcaaagctaagtggagagcaaaagatgttgctattaaacaaatagaaagtgaatctgagaggaaagcgtttattgtagagcttcggcagttatcccgtgtgaaccatcctaatattgtaaagctttatggagcctgcttgaatccagtgtgtcttgtgatggaatatgctgaagggggctctttatataatgtgctgcatggtgctgaaccattgccatattatactgctgcccacgcaatgagttggtgtttacagtgttcccaaggagtggcttatcttcacagcatgcaacccaaagcgctaattcacagggacctgaaaccaccaaacttactgctggttgcaggggggacagttctaaaaatttgtgattttggtacagcctgtgacattcagacacacatgaccaataacaaggggagtgctgcttggatggcacctgaagtttttgaaggtagtaattacagtgaaaaatgtgacgtcttcagctggggtattattctttgggaagtgataacgcgtcggaaaccctttgatgagattggtggcccagctttccgaatcatgtgggctgttcataatggtactcgaccaccactgataaaaaatttacctaagcccattgagagcctgatgactcgttgttggtctaaagatccttcccagcgcccttcaatggaggaaattgtgaaaataatgactcacttgatgcggtactttccaggagcagatgagccattacagtatccttgtcagtattcagatgaaggacagagcaactctgccaccagtacaggctcattcatggacattgcttctacaaatacgagtaacaaaagtgacactaatatggagcaagttcctgccacaaatgatactattaagcgcttagaatcaaaattgttgaaaaatcaggcaaagcaacagagtgaatctggacgtttaagcttgggagcctcccgtgggagcagtgtggagagcttgcccccaacctctgagggcaagaggatgagtgctgacatgtctgaaatagaagctaggatcgccgcaaccacagcctattccaagcctaaacggggccaccgtaaaactgcttcatttggcaacattctggatgtccctgagatcgtcatatcaggcaacggacagccaagacgtagatccatccaagacttgactgtaactggaacagaacctggtcaggtgagcagtaggtcatccagtcccagtgtcagaatgattactacctcaggaccaacctcagaaaagccaactcgaagtcatccatggacccctgatgattccacagataccaatggatcagataactccatcccaatggcttatcttacactggatcaccaactacagcctctagcaccgtgcccaaactccaaagaatctatggcagtgtttgaacagcattgtaaaatggcacaagaatatatgaaagttcaaacagaaattgcattgttattacagagaaagcaagaactagttgcagaactggaccaggatgaaaaggaccagcaaaatacatctcgcctggtacaggaacataaaaagcttttagatgaaaacaaaagcctttctacttactaccagcaatgcaaaaaacaactagaggtcatcagaagtcagcagcagaaacgacaaggcacttcatgattctctgggaccgttacattttgaaatatgcaaagaaagactttttttttaaggaaaggaaaaccttataatgacgattcatgagtgttagctttttggcgtgttctgaatgccaactgcctatatttgctgcatttttttcattgtttattttccttttctcatggtggacatacaattttactgtttcattgcataacatggtagcatctgtgacttgaatgagcagcactttgcaacttcaaaacagatgcagtgaactgtggctgtatatgcatgctcattgtgtgaaggctagcctaacagaacaggaggtatcaaactagctgctatgtgcaaacagcgtccattttttcatattagaggtggaacctcaagaatgactttattcttgtatctcatctcaaaatattaataatttttttcccaaaagatggtatataccaagttaaagacagggtattataaatttagagtgattggtggtatattacggaaatacggaacctttagggatagttccgtgtaagggctttgatgccagcatccttggatcagtactgaactcagttccatccgtaaaatatgtaaaggtaagtggcagctgctctatttaatgaaagcagttttaccggattttgttagactaaaatttgattgtgatacattgaacaaaatggaactcatttttttttaaggagtaaagatttttaattctgtga

SEQ ID NO: 336143 - DNA, 2230 bp, Homo sapiens
acgtcaggcgtcctctctcgcggtatcatccggttgctgaggccctgtaataaaggtctcgcgaaatttgttctagaggtccaagtttgcttcttagcttactccaccccacccccaacctgtccctccttttctttccaagtcacaaaattctcccctcccctaccccggagtttacggccctcctcctgtttccgatttcagcccggaaccggaagtgtagtgggcggggcccgtcggcggaaaacgcagcggagccagagccggacacggctgtggccgctgcctctacccccgccacggatcgccgggtagtaggactgcgcggctccaggctgagggtcggtccggaggcgggtgggcgcgggtctcacccggattgtccgggtggcaccgttcccggccccaccgggcgccgcgagggatcatgtctacagcctctgccgcctcctcctcctcctcgtcttcggccggtgagatgatcgaagccccttcccaggtcctcaactttgaagagatcgactacaaggagatcgaggtggaagaggttgttggaagaggagcctttggagttgtttgcaaagctaagtggagagcaaaagatgttgctattaaacaaatagaaagtgaatctgagaggaaagcgtttattgtagagcttcggcagttatcccgtgtgaaccatcctaatattgtaaagctttatggagcctgcttgaatccagtgtgtcttgtgatggaatatgctgaagggggctctttatataatgtgctgcatggtgctgaaccattgccatattatactgctgcccacgcaatgagttggtgtttacagtgttcccaaggagtggcttatcttcacagcatgcaacccaaagcgctaattcacagggacctgaaaccaccaaacttactgctggttgcaggggggacagttctaaaaatttgtgattttggtacagcctgtgacattcagacacacatgaccaataacaaggggagtgctgcttggatggcacctgaagtttttgaaggtagtaattacagtgaaaaatgtgacgtcttcagctggggtattattctttgggaagtgataacgcgtcggaaaccctttgatgagattggtggcccagctttccgaatcatgtgggctgttcataatggtactcgaccaccactgataaaaaatttacctaagcccattgagagcctgatgactcgttgttggtctaaagatccttcccagcgcccttcaatggaggaaattgtgaaaataatgactcacttgatgcggtactttccaggagcagatgagccattacagtatccttgtcagtattcagatgaaggacagagcaactctgccaccagtacaggctcattcatggacattgcttctacaaatacgagtaacaaaagtgacactaatatggagcaagttcctgccacaaatgatactattaagcgcttagaatcaaaattgttgaaaaatcaggcaaagcaacagagtgaatctggacgtttaagcttgggagcctcccgtgggagcagtgtggagagcttgcccccaacctctgagggcaagaggatgagtgctgacatgtctgaaatagaagctaggatcgccgcaaccacagcctattccaagcctaaacggggccaccgtaaaactgcttcatttggcaacattctggatgtccctgagatcgtcatatcaggtatcatagaccacctgagttggtctaatagctgtggaaccggaataatgatccctggtacttgtaaaatgcttcttgctccaatttttacaagacatgaaaatggataccttgcatgcagtaattagggagacagattgaaaaactacatttattctgaagcagtcttgaaaagatacctctgatctacaataagtgaggataaaatagaagagaaagtaaacctttttggagaagggagaacaccaacccagaattctaccaacttcctctctacttttaagtgagcacatgagctaaacccagaccttttttgcacccaacagaaagaggaaacaactaattaaaatttgttattttccttggctcctttccttcctcagttactgctttttgggtcccctctagactttctgtcctaacctctttctgttggtagcaagtgaatgtgaagttgagagaagagagttgctaaatagcattttgccttaacctggaaaacaaaaagtaaa

SEQ ID NO: 336144 - DNA, 526 bp, Homo sapiens
aaaaacatcaagaaaaacaagcctgtgaaacacgatggaagaagaaatacaaaatctgaatagacctgtaagtaaagtgattgaattaatacatttaaaactttacacaaagaaaagcctttacttgtgaatctatcaaacatttaaagaatcaatactattcctgaaaaaatagaagatgagggaaaacattccaacttattttatgaggtcaaatatcaccctaatagcaaaagcagaaaaaagtcagtgtaaaaaggaaaactgcagaatgacatctgttataaatcttaggacaaaaatcgttaacaaaatgctagcaaactaaatccaacaacatgtaagaaggattacacaccatgtccaagtgtgacttacaaataaaaatcaattaatataccatattaatagcataaaagacaaaaactataaaagaattagctgaaaagatgtagaaaaagcattcaggaaaatgcaccactttcatgataaaatcactcaataaactatgaaaagatgaagtatg

SEQ ID NO: 336145 - DNA, 490 bp, Homo sapiens
tacaactggagacttgcagggaaaaaaaaagttttcaacagactaggccccaaacatgaaggataaaagtaaatgtgaaaaaggaattcaattttcaaatatatgcataagtatatgagaatacttcaaggataaataaaataaaacaaattatctttaatgactattacccagggataatttttaagacttttggaacaactacatccccggattttatggaaatatcagctctcaataaataagttttcttaatgcctatctgcttagacaacctgcacaatctttgcttgctctaatgaagagcaggtataactgagatggcttgcctttaccctgtggttatcaagttcttataccagaggtatcaaagtgacatcctgcaaattctaacaagcccccaaacagttgttccacacatcattttaaaaatcagaaaaataacataaagttttagatttctaatctttcttaaaaaataggaagatcg

SEQ ID NO: 336146 - DNA, 572 bp, Homo sapiens
gacacttaaggttggtcttgttgaatctagaatttagtccttggaattcacagtccagcaactcaaatcctaaaaggtcatccaaggataatcaggaaattgggaactcatcctggtaacatcctgctagtcaacctctgtggagcctgacttggaaggcagggtgctgacatggtttcagaacatggagattcacttggtccatatccaatgctagggcacggacggcctccatatgtcaggttaacagacaacatttagacctcaatattatttggtaagtaaataactagaacacaggaagtttaagtttgtttgcaggattttttttttcttttttgagacctgcaggtctcactctgtcacacaggctggagtgcagttgcgtgaccaccactcaccacagcctcaacctcccaggctcaggtgatcctcccacctcagccttcctagtaactgggactacaggcaagtgtcacaacacgcggctaatttttgtattttttgtagaaacaggtttggccacattgcccaggctggtctcaaactcctggcctcaagcaattgcccac

SEQ ID NO: 336147 - DNA, 294 bp, Homo sapiens
ctgtggttggggaccagaaagactagagtgctggtagatggaggaatactggaggtaggcagaaggtctagactgggaggggtctggggatcacctgctggcctccttatcacggccttcttctccaggtggccatcaaagtgattccccggaatcgtgtgctgggctggtcccccttggtgagtaccttcggagcccttcctaacctacctactccatcactgatgtattcacctccttgcttttccaggggatgtatgactccctgggccctgtaacagtgagaatactgcc

SEQ ID NO: 336148 - DNA, 1594 bp, Homo sapiens
ctgaaaagtaacaggatccccttaccagagaaagaatactcaggatggtaacaggatcccctcaccagaataggagcccaggatctctttgactatatcacagagaagggcccactgggtgaaggcccaagccgctgcttctttggccaagtagtggcagccatccagcactgccattcccgtggagttgtccatcgtgacatcaaggatgagaacatcctgatagacctacgccgtggctgtgccaaactcattgattttggttctggtgccctgcttcatgatgaaccctacactgactttgatgggacaagggtgtacagccccccagagtggatctctcgacaccagtaccatgcactcccggccactgtctggtcactgggcatcctcctctatgacatggtgtgtggggacattccctttgagagggaccaggagattctggaagctgagctccacttcccagcccatgtctccccagactgctgtgccctaatccgccggtgcctggcccccaaaccttcttcccgaccctcactggaagagatcctgctggacccctggatgcaaacaccagccgaggatgtacccctcaacccctccaaaggaggccctgcccctttggcctggtccttgctaccctaagcctggcctggcctggcctggcccccaatggtcagaagagccatcccatggccatgtcacagggatagatggacatttgttgacttggttttacaggtcattaccagtcattaaagtccagtattactaaggtaagggattgaggatcaggggttagaagacataaaccaagtctgcccagttcccttcccaatcctacaaaggagccttcctcccagaacctgtggtccctgattctggagggggaacttcttgcttctcattttgctaaggaagtttattttggtgaagttgttcccattctgagccccgggactcttattctgatgatgtgtcaccccacattggcacctcctactaccaccacacaaacttagttcatatgctcttacttgggcaagggtgctttccttccaataccccagtagcttttattttagtaaagggaccctttcccctagcctagggtcccatattgggtcaagctgcttacctgcctcagcccaggattctttattctgggggaggtaatgccctgttgttaccccaaggcttctttttttttttttttttttttgggtgaggggaccctactctgttatcccaagtgctcttattctggtgagaagaaccttacttccataatttgggaaggaatggaagatggacaccaccggacaccaccagacactaggatgggatggatggttttttgggggatgggctaggggaaataaggcttgctgtttgttctcctggggcgctccctccaacttttgcagattcttgcaacctcctcctgagccgggattgtccaattactaaaatgtaaataatcacgtattgtggggaggggagttccaagtgtgccctcctctcttctcctgcctggattatttaaaaagccatgtgtggaaacccactatttaataaaagtaatagaatc

SEQ ID NO: 336149 - DNA, 589 bp, Homo sapiens
tagcattggggctggcgcgcgcggcgaatctcaacgctgcgccgtctgcgggcgcttccgggccaccagtttctctgctttccaccctggcgccccccagccctggctccccagctgcgctgccccgggcgtccacgccctgcgggcttagcgggttcagtgggctcaatctgcgcagcgccacctccatgttgaccaagcctctacaggggcctcccgcgccccccgggacccccacgccgccgccaggaggcaaggatcgggaagcgttcgaggccgagtatcgactcggccccctcctgggtaaggggggctttggcaccgtcttcgcaggacaccgcctcacagatcgactccaggtatccgtcatgagggtcttgggagggtcaggtgcgtgtggcgggggcgggggtcctggccctggaatgctggttgaccgaggagtgagcctgcagagtgtgtagaggaccaggtgtgtgtgtgtgtgtgtccgtgtccgtgtccgaggagtgagcctgcagtgtgtgtagagggccaggtgtgtgtgcgtgcgcgtgtgtgtgtcggtctaggaggttatgggcggggg

SEQ ID NO: 336150 - DNA, 416 bp, Homo sapiens
gactatatcacagagaagggcccactgggtgaaggcccaagccgctgcttctttggccaagtagtggcagccatccagcactgccattcccgtggagttgtccatcgtgacatcaaggatgagaacatcctgatagacctacgccgtggctgtgccaaactcattgattttggttctggtgccctgcttcatgatgaaccctacactgactttgatggtaaggcttctctaaatctccctggagggattgtttttacttgatggccttgtgacctttggcctccagtggtggggtgtcctgtaatccttgacccatactgcattatataagatgatcgattgctaatactggggattctcagccttgccctctgataaagtccatcttttaatggtgtgctaaccttattctgggc

SEQ ID NO: 336151 - DNA, 741 bp, Homo sapiens
ctgagcctcccaagtagctgggactacaggtgcatgccaccaagcctggctaatttttgtgtttgtgccattttgcccaggctgatcttgaactcttgggctcaagcaatccacccacatcagcctcccaaagtgctgggattgcagggatgagccactgtgcctggccgaacttctttcgtttattcaaatgtttattgatctacgacatgcgagatttgtgcaggctctttgctggtttcaccctctcaatcgctgtgtgagtttgtgtctttagggaaagtgaggcccaggaagggaagtgagttgcttagcgacacactgtcaggaaaaggggccctgagttgagcttaggtaaaaagcctcagagctgttgccctgacatctgtcttttttctctccctgcttcccaccccacctgtgcccccagtcagactcagtcacatgcccactcgaagtcgcactgctatggaaagtgggtgcaggtggtgggcaccctggcgtgatccgcctgcttgactggtttgagacacaggagggcttcatgctggtcctcgagcggcctttgcccgcccaggatctctttgactatatcacagagaagggcccactgggtgaaggcccaagccgctgcttctttggccaagtagtggcagccatccagcactgccattcccgtggagttgtccatcgtgacatcaaggatgagaacatcctgatagacctacgccgtggctgtgc

SEQ ID NO: 336152 - DNA, 2070 bp, Homo sapiens
tagcattggggctggcgcgcgcggcgaatctcaacgctgcgccgtctgcgggcgcttccgggccaccagtttctctgctttccaccctggcgccccccagccctggctccccagctgcgctgccccgggcgtccacgccctgcgggcttagcgggttcagtgggctcaatctgcgcagcgccacctccatgttgaccaagcctctacaggggcctcccgcgccccccgggacccccacgccgccgccaggaggcaaggatcgggaagcgttcgaggccgagtatcgactcggccccctcctgggtaaggggggctttggcaccgtcttcgcaggacaccgcctcacagatcgactccaggtggccatcaaagtgattccccggaatcgtgtgctgggctggtcccccttgtcagactcagtcacatgcccactcgaagtcgcactgctatggaaagtgggtgcaggtggtgggcaccctggcgtgatccgcctgcttgactggtttgagacacaggagggcttcatgctggtcctcgagcggcctttgcccgcccaggatctctttgactatatcacagagaagggcccactgggtgaaggcccaagccgctgcttctttggccaagtagtggcagccatccagcactgccattcccgtggagttgtccatcgtgacatcaaggatgagaacatcctgatagacctacgccgtggctgtgccaaactcattgattttggttctggtgccctgcttcatgatgaaccctacactgactttgatgggacaagggtgtacagccccccagagtggatctctcgacaccagtaccatgcactcccggccactgtctggtcactgggcatcctcctctatgacatggtgtgtggggacattccctttgagagggaccaggagattctggaagctgagctccacttcccagcccatgtctccccagactgctgtgccctaatccgccggtgcctggcccccaaaccttcttcccgaccctcactggaagagatcctgctggacccctggatgcaaacaccagccgaggatgtacccctcaacccctccaaaggaggccctgcccctttggcctggtccttgctaccctaagcctggcctggcctggcctggcccccaatggtcagaagagccatcccatggccatgtcacagggatagatggacatttgttgacttggttttacaggtcattaccagtcattaaagtccagtattactaaggtaagggattgaggatcaggggttagaagacataaaccaagtctgcccagttcccttcccaatcctacaaaggagccttcctcccagaacctgtggtccctgattctggagggggaacttcttgcttctcattttgctaaggaagtttattttggtgaagttgttcccattctgagccccgggactcttattctgatgatgtgtcaccccacattggcacctcctactaccaccacacaaacttagttcatatgctcttacttgggcaagggtgctttccttccaataccccagtagcttttattttagtaaagggaccctttcccctagcctagggtcccatattgggtcaagctgcttacctgcctcagcccaggattctttattctgggggaggtaatgccctgttgttaccccaaggcttctttttttttttttttttttttgggtgaggggaccctactctgttatcccaagtgctcttattctggtgagaagaaccttacttccataatttgggaaggaatggaagatggacaccaccggacaccaccagacactaggatgggatggatggttttttgggggatgggctaggggaaataaggcttgctgtttgttctcctggggcgctccctccaacttttgcagattcttgcaacctcctcctgagccgggattgtccaattactaaaatgtaaataatcacgtattgtggggaggggagttccaagtgtgccctcctctcttctcctgcctggattatttaaaaagccatgtgtggaaacccactatttaataaaagtaatagaatc

SEQ ID NO: 336153 - DNA, 2015 bp, Homo sapiens
tagcattggggctggcgcgcgcggcgaatctcaacgctgcgccgtctgcgggcgcttccgggccaccagtttctctgctttccaccctggcgccccccagccctggctccccagctgcgctgccccgggcgtccacgccctgcgggcttagcgggttcagtgggctcaatctgcgcagcgccacctccatgttgaccaagcctctacaggggcctcccgcgccccccgggacccccacgccgccgccaggaggcaaggatcgggaagcgttcgaggccgagtatcgactcggccccctcctgggtaaggggggctttggcaccgtcttcgcaggacaccgcctcacagatcgactccaggtggccatcaaagtgattccccggaatcgtgtgctgggctggtcccccttgtcagactcagtcacatgcccactcgaagtcgcactgctatggaaagtgggtgcaggtggtgggcaccctggcgtgatccgcctgcttgactggtttgagacacaggagggcttcatgctggtcctcgagcggcctttgcccgcccaggatctctttgactatatcacagagaagggcccactgggtgaaggcccaagccgctgcttctttggccaagtagtggcagccatccagcactgccattcccgtggagttgtccatcgtgacatcaaggatgagaacatcctgatagacctacgccgtggctgtgccaaactcattgattttggttctggtgccctgcttcatgatgaaccctacactgactttgatgggacaagggtgtacagccccccagagtggatctctcgacaccagtaccatgcactcccggccactgtctggtcactgggcatcctcctctatgacatggtgtgtggggacattccctttgagagggaccaggagattctggaagctgagctccacttcccagcccatgtctccccagactgctgtgccctaatccgccggtgcctggcccccaaaccttcttcccgaccctcactggaagagatcctgctggacccctggatgcaaacaccagccgaggatgtacccctcaacccctccaaaggaggccctgcccctttggcctggtccttgctaccctaagcctggcctggcctggcctggcccccaatggtcagaagaaggtcattaccagtcattaaagtccagtattactaaggtaagggattgaggatcaggggttagaagacataaaccaagtctgcccagttcccttcccaatcctacaaaggagccttcctcccagaacctgtggtccctgattctggagggggaacttcttgcttctcattttgctaaggaagtttattttggtgaagttgttcccattctgagccccgggactcttattctgatgatgtgtcaccccacattggcacctcctactaccaccacacaaacttagttcatatgctcttacttgggcaagggtgctttccttccaataccccagtagcttttattttagtaaagggaccctttcccctagcctagggtcccatattgggtcaagctgcttacctgcctcagcccaggattctttattctgggggaggtaatgccctgttgttaccccaaggcttctttttttttttttttttttttgggtgaggggaccctactctgttatcccaagtgctcttattctggtgagaagaaccttacttccataatttgggaaggaatggaagatggacaccaccggacaccaccagacactaggatgggatggatggttttttgggggatgggctaggggaaataaggcttgctgtttgttctcctggggcgctccctccaacttttgcagattcttgcaacctcctcctgagccgggattgtccaattactaaaatgtaaataatcacgtattgtggggaggggagttccaagtgtgccctcctctcttctcctgcctggattatttaaaaagccatgtgtggaaacccactatttaataaaagtaatagaatc

SEQ ID NO: 336154 - DNA, 542 bp, Homo sapiens
aatcttccctctctgcttcttggcctacagactgctgtgccctaatccgccggtgcctggcccccaaaccttcttcccgaccctcactggaagagatcctgctggacccctggatgcaaacaccagccgaggatgtacccctcaacccctccaaaggaggccctgcccctttggcctggtccttgctaccctaagcctggcctggcctggcctggcccccaatggtcagaagagccatcccatggccatgtcacagggatagatggacatttgttgacttggttttacaggtcattaccagtcattaaagtccagtattactaaggtaagggattgaggatcaggggttagaagacataaaccaagtctgcccagttcccttcccaatcctacaaaggagccttcctcccagaacctgtggtccctgattctggagggggaacttcttgcttctcattttgctaaggaagtttattttggtgaagttgttcccattctgagccccgggactcttattctgatgatgtgtcaccccacattgg

SEQ ID NO: 336155 - DNA, 581 bp, Homo sapiens
cgcgcggcgaatctcaacgctgcgccgtctgcgggcgcttccgggccaccagtttctctgctttccaccctggcgccccccagccctggctccccagctgcgctgccccgggcgtccacgccctgcgggcttagcgggttcagtgggctcaatctgcgcagcgccacctccatgttgaccaagcctctacaggggcctcccgcgccccccgggacccccacgccgccgccaggtgagtacatcctcccctactgcaaccagacggggtgggctggaatgatgggttgcagcgcggggggagggagtcgtggctgggctcagcacgccgccaccctgacttcctcgcctccgcctgcgtaggaggcaaggatcgggaagcgttcgaggccgagtatcgactcggccccctcctgggtaaggggggctttggcaccgtcttcgcaggacaccgcctcacagatcgactccaggtatccgtcatgagggtcttgggagggtcaggtgcgtgtggcgggggcgggggtcctggccctggaatgctggttgaccgaggagtgagcctgcagagtgtgtagaggacc

SEQ ID NO: 336156 - DNA, 131 bp, Homo sapiens
atgggggtccccaggcagtgggcaatgtgataatttacactagttccagtttagaggtttagagcagtggttgataacctgtatttcttgaattccttgttggagaaacagttgtttgaaagagattccat

SEQ ID NO: 336157 - DNA, 250 bp, Homo sapiens
gcgtggtggctcacgcctataatcccagcactttgggaggccgaggtgggcagatcactattgggggaaccggcccccaatatttcaatgtaggttcttttctattttccctaagtgttggctggtctgagaaataaagggaaagagtacaaaagagagaaattttaaagctgggtgtccgggggagacatcacatgttggcaggttctgtgatgccccctgagccgtaaaaccagcaagtttttattag

SEQ ID NO: 336158 - DNA, 347 bp, Homo sapiens
tctgtatgtgggggcaacagagcagtgagtgtgtgcttgtgggggtcccccatggcttctgttagggtgcatggcctataagagttccccagagtcccctctaggtcgccagccctttgcagtgggtggggtccagaagggacctcgagattggccttcgcttccccatgggatggatgggcttcagggagatttgtcctgtgaaactccaggtcccagaggcccctgagggagttcaggctacctgggatgtgagctcaggcgagttttcctcccgaggcccctgcgcctgctgcctcacggtacctgcctccccttcccaaggcctccagtccctactgggctct

SEQ ID NO: 336159 - DNA, 436 bp, Homo sapiens
cagagagagccatgcctgcctgtagcaggtgatgaataaattatgacggtcgtgatttgttaggcaaggctgctcttccgacccctgtctcagagcatgctgggaaaaggtgctgctaagatttgcaagaggataaacaacagcccagatttggagcacatcaagaacaaggaattgatgctagagcagggctggctggaaggggcggcagcatttgacctccttcctggaggtctcactcctgagttccttaggcgccaagagggctctggtctgccccttttcactcgtacctcacgcttctcagctgcctgctgaggaaggaatgattttccacccacccccatctttttctcaaggccagggtccacctggaaaaattctgagacctgaggagttggggcagctgtccttttagccacccacctctaaacag

SEQ ID NO: 336160 - DNA, 203 bp, Homo sapiens
ccagatgcacattcttatttaaagttcacaacatccctatgagtgagggatcactattcccattatacaaacatataaattaaggtttggagggctatattacttgccctgaagtagtgctgaccagtgacagagccagaatttgaactcaggcctgcctgactccagagtcttggtaataactatgttgtataccaattgac

SEQ ID NO: 336161 - DNA, 172 bp, Homo sapiens
atataaataacttataagatggaactcactgactttaaaactgcttttcccatagctgacttttcttacttaacagtgatagaccttattctctgacttcctgattctaactaacaccctccaccccctcttcaagtgtagatctggttttgtatttaaggtcaatgatgag

SEQ ID NO: 336162 - DNA, 143 bp, Homo sapiens
tgtcagaaggaagaacaagctcattttgaaaagtacacagacgttggaaactgtgagtattacccaaaaaaaagcttgaaaggctcccatccccatcgggtgaccagcagaacttgccactgcaagagcctcgttctcattaa

SEQ ID NO: 336163 - DNA, 472 bp, Homo sapiens
agttttcacatcaagaccatctgaaaagtaggtttcaggtaacaatccatgtctccaaaaacaaatgtggacaatttttatccatgttcctaagggagaaagtggaaagcttttggaagtcaaaattcataaatgagttccatttatcactctaagatgtgggcaaaaataaacagtgcttctgcacacccccacagagggaacaggctacgctgagcttccacttaactagggtgattcacaaaatcagagcagggcttccaaccagtcagacggcggctctgagcccagcacaaccacctccgtgcctcagggacagagaactggatgtgggcattgccagcccacccttggcacccctgggctcacgccaatgcatcacttcacaatactgggaaggactgtgggacaaagatgatcctatctacccagataaggtaggagtcaaatgacccctgcgggtgacctgagc

SEQ ID NO: 336164 - DNA, 110 bp, Homo sapiens
actgtaacccaaacatattatagagaaaaacctttttgcaaaactctaagaactcagtttaagcctcaccacctccaaatgaatacatagttcaccttggacaacacagg

SEQ ID NO: 336165 - DNA, 262 bp, Homo sapiens
gcctgggggtgtttgggaacttcctccttccgaagaagtttcagggagggataaagacaaaccctgggctccttgaggggcccttactaatttgagaggactctatcgggaaggagagtgacaatggcctccttgaggactgaggcccctgaataaatgaggcccagatacagtccatgggggatgagaccttcaagggtcacattttggttgggacagaggaaaagtgcagctctgcagccgcagaggaaaacccggcagt

SEQ ID NO: 336166 - DNA, 439 bp, Homo sapiens
gtcccatccacggagctttgtccacaggcatctgggccacctctctcattagagaacggggccagtcctgctgtcctggctgacttcggctccattaatccacccctttgccttccattctccttgcaggctgcctgtgctgaaggcctcttgcactcctgtgctatcccaacttgcagtaattgcttggggttgtaaatccagcaagtagaggaggctttctgtagcaggtcctaggtcggttgcctgaggacagcactgctctccccagcccctagcactgagaggccctgtgggaagtccacgcctgccatggtggttgtcctgccaacagcatctcccttcagggttcatcttattttcttctgatgaacaagcaaaggcaaccagactctccgtaggtgtaagttggcacgcacatttggcagggagggtggat

SEQ ID NO: 336167 - DNA, 423 bp, Homo sapiens
ggaatgactaaatcacaaaacagtcaccgaattgcaactgtgataatgccaagggggaggagggactgtgtaggccgatgctgaaggctgggtgaaggttttccaggggcaagtcccatcagtcacagtgcccgtttagggtttgcaccttgctcttttgacgacgctgctcggctctcagggctgcgaggctggcttcttcccaaacttcattccactccaggtttctgcactgggccctgagagccacatctggccatcactacagatgcacttttgcagtgcctctgcattttgaggtgaaagacagtctttaaacttcagggtgaacttctcactcggagtttggtgtattgttgccatttcttttgtgttgatttgcacgtagctcttttgtacacaggcacgagggtaagcattcct

SEQ ID NO: 336168 - DNA, 282 bp, Homo sapiens
gatctgggcaggattggggaagggctattaaaaagcaagagctttggggtcaggcagacatggactcatatgcaatttttgctgtttatcagtcctgggaccttttgcaaatcatttaactgttctgagcctctgctaatggggttgttggttgtatgaattaaatatagaaacatggaatatacttagtgctgtgcctcatatttaggaagcatgtatctaatgagctgcaatagatgctcattatcatcacggtgggtttcggggtcagcgattcagttt

SEQ ID NO: 336169 - DNA, 299 bp, Homo sapiens
tccagcctgggtgacagagcaagactctgtctcaaaaataaaaataaaataaaatatacctactaagcatctacccgtgccaagcactattctaggcacaggatatagtgaaaaatgagatagacaaactgagaaaaaagaaataggatcattcattcttcactccccaatattatagaactagttcaggcctattaatgaaataactgagggctacgaaaatgtagcgtgcatagactaacgcaggcacgtgacgagcatttactgaaacacacactttggcgttccaccaccaggct

SEQ ID NO: 336170 - DNA, 757 bp, Homo sapiens
atcccatttttgctttatatttttctatcttctatacttctccaatacttgtcttagcttgtttttcattttctatctgaaactcttgacaatattttcattttctatcttgtttctatcttccaattttcttctaagtttgtacattttgcccttagctttttgtttcctagcttgtcttttttcttctgcttcctacttttcaggtttaaatttatcttttttcttctaaaagtatgtttttatcttctaatttccctatcttctctattcttttcttcgccttcccgtacttctgtcttccagttttccacttcaaacttctatcttctccaaattgtttcatcctaccaccaaacaccgcaatctgattcaaactaatgagggagggaggtaaaggtgaaataagattagtcatatgttgttaattgttatggtcatatgttggcaattgttaaagtgggcaacataaggatttatgatacgtttttctctctagtatatggtttgatattttccataataaaaagctaaaaagaaaagtgtccaagtttgtaacaaatgtgaaaaagatctccagtaaaagtggctaacataaaattttacatgatacttgaaggattaagttttactgacctagagcagggttggcgaactatttaggccaagtataggcagcaagctagactaataaagaagaaaagagagaagatccaaataaacacaattagaaatgacaggccaggtgcggtgtttg

SEQ ID NO: 336171 - DNA, 815 bp, Homo sapiens
atcccatttttgctttatatttttctatcttctatacttctccaatacttgtcttagcttgtttttcattttctatctgaaactcttgacaatattttcattttctatcttgtttctatcttccaattttcttctaagtttgtacattttgcccttagctttttgtttcctagcttgtcttttttcttctgcttcctacttttcaggtttaaatttatcttttttcttctaaaagtatgtttttatcttctaatttccctatcttctctattcttttcttcgccttcccgtacttctgtcttccagttttccacttcaaacttctatcttctccaaattgtttcatcctaccaccaaacaccgcaatctgattcaaactaatgagggagggaggtaaaggtgaaataagattagtcatatgttgttaattgttatggtcatatgttggcaattgttaaagtgggcaacataaggatttatgatacgtttttctctctagtatatggtttgatattttccataataaaaagctaaaaagaaaagtgtccaagtttgtaacaaatgtgaaaaagatctccagtaaaagtggctaacataaaattttacatgatacttgaaggattaagttttactgacctagagcagggttggcgaactatttaggccaagtataggcagcaagctaaataatttctacttttagtcattgttaaaaagaaaagaaaaaagaatatgcaacagaggacctacatagcccacgtgcctaaatatttactatctggcccttctgccaacccctgatgtagagaatcagg

SEQ ID NO: 336172 - DNA, 335 bp, Homo sapiens
cagtcactgcctctttcacactcaaaacattccagaagaatgtgccaaggccctgtgcacttccatgtaaggcagtgtttacaggcaccggcacctcctgatgtgtgagccagacacaggagcagcagagcttcagccgcctcctcagggtcgagggaagtcccattccagctcaggtttcctgtgagcccctagtgcgggtagtgtgtatgtgtgtgtgtgtatatatgtgtgtatgcgtgtgtgtgtttaagctcaacttcaaaatatccccttgatcagtagtgaccagacctccattgacagcacatctgctgtctacctgacaccagcag

SEQ ID NO: 336173 - DNA, 466 bp, Homo sapiens
ccagaatgaagcagccacttaaaaagtgacgattaagtgaaaaatccctatggttgtgtgctttcaaactcaaccaggtctttattggtttgatttgttgctggttagatcctgaccctggggaccatttcagacactcctcaccctgccacagcataaagcccaggctttgtctctctcatcctcagcagatgatctcaatgtctacttttttaacaaagtataattgctatttcatttttttccagaggatagttttccatccttaagattgaaaacaccttatacgggctttcgcggaggtcatggaacagcaccattaggtctaaatcagggaggggtattggatccttctgggcttcatgagaatgactcctgactacttttccatgaatggcacaactcatatcacaatgcagtttctcatacagctgggaagcacaggtgttaaagacactcacttcag

SEQ ID NO: 336174 - DNA, 230 bp, Homo sapiens
ctcacttacatagtgaagaatagatcagaaaggaagcttacagtaatgaaggttacagatgacagaggtctacattaggacaacaggagtaaataaaaaaaatgagatgcatttaagttgtttactgggtatatcttacaggactagtgactcaatgtggacagccagaaagggagaaagtcagtcaaggagtcaagtgatttctggcttacaaccaagttgagactggg

SEQ ID NO: 336175 - DNA, 288 bp, Homo sapiens
gggtacttctcagaaagggaaaatggatacccaatggcccaaacccaaaatagccccagttcccctaactttgactacagggcagtccagtttgggtgccgcttccgttgcactcacatgtcctacatatctgttgactactcacaagtgcaaatgcttattctcaactcaacattaacattttttctggcaacccaggttcactggttctcttccacagagcggccctgagcagctgagcctgcaagccacgcaagcatctgtttcttcttttgccaagtacaggag

SEQ ID NO: 336176 - DNA, 92 bp, Homo sapiens
agcaggctcacaagattgcattctttgaacagtaggctctagatgtctcagtagataacctcaaagagcatggcgccagggagtgattgccc

SEQ ID NO: 336177 - DNA, 359 bp, Homo sapiens
atgtgtatatgggtgtgtatttgtgtgcgtgtgtgtctgcatgtgtattttgtgtgtatgtttgaatgggtgtgtatttgtgtgtgtgtgtgtctgtgtggtcctcagaaccccccacatttcctggcagtggacagcacgaacgctccttgacccccacgggcaggggaagcctgctgagcctcttttctctccgaggcatccgacttctgccaacggtgagttagaaggaaggggcctcagccaacagcaaaagctacagaaggattttccgcgcctgacctggactgtggtgcgcacacagccctctttgtcttctctttctctggcccctcacacaggtgctgtttgtagaggac

SEQ ID NO: 336178 - DNA, 719 bp, Homo sapiens
gagtcaaacagatctgactactacatctgtgctaggtactttcagtggttgaatcttaatgattctgactctgtttgctcacatgtaaaatgtggatgatcatagaacctttatcacagatttgtgaagactgcattgcacactccatgaaaagttatccttagcacagcatcaggcacagggaagctcaacgccttgaaggtgctgtttttatttctaggtccctaagatcttcctcgtcctccttatggctcccccctttattctccatatttgttccttccttgaaagtcaagggtgcaggaagaagatgatatcctggaggccaagcccacacaattaggacatgtggtggacattcacctgttcttagatccactgctgctcttcctctgcttgtctatcacaaggggctgacacctgcacactaattctgtcttgagggagactgtgtaggggaacatggccatttgagttcattaggaaagggttttgaggtcaggacatgggtatctggtgtacatgggagtttggtggcctctattgtaggaggctttggaaatgtgtattgttgggaggtcctgagggaggaagtttgggatgaacatggagattctaggctgtggaggaagatgtaacatggctattggaggattctgggaccttaccttggtaccttggtaccttggtaatgaggacatcttcagctttatttttat

SEQ ID NO: 336179 - DNA, 691 bp, Homo sapiens
gttaagttgctggttcatatcacaagaatatctgaatggaaatggggtacctgagcagctggactcatcaagctggaaatccatgcagtcggcaaaaccatcacagcgctggtgggctgggatacagctgttggaggaggcacacaccagagctccattagaacagcttttgttggctgcaaaaaaaaaagaataatgatcagggatgccagcatgatttttttttgtcccaatgaattctcacaacaaaataacataaaacagtttattatattactcttgattttttctagtctgatattttagaacacagttctttttgaagaatatttcaaatggattaacttaaaaatgtctgaaagaaaaaccacatttgcctgaaaaatcacttcgcagatgtgcattcttagggactgaattgtgtcctcacctcaacattcatatcttgaaaccctaacccgcaacaggactgtatttacagataggagctttaagaaggtaacaaaggttataagaagagagagacatcagggatgcaatgacatacaggaaaggctacgtgaagacacagcaagaaggcagccatctgtaagccaaggagagaggccttaggagacaccaaacctgcctacacgttgatcttggacttttagcctccagaagtgggagaaaataaattcctgttgtttta

SEQ ID NO: 336180 - DNA, 848 bp, Homo sapiens
  misc_feature (848)..(848): n is a, c, g, or t
gttaagttgctggttcatatcacaagaatatctgaatggaaatggggtacctgagcagctggactcatcaagctggaaatccatgcagtcggcaaaaccatcacagcgctggtgggctgggatacagctgttggaggaggcacacaccagagctccattagaacagcttttgttggctgcaaaaaaaaaagaataatgatcagggatgccagcatgatttttttttgtcccaatgaattctcacaacaaaataacataaaacagtttattatattactcttgattttttctagtctgatattttagaacacagttctttttgaagaatatttcaaatggattaacttaaaaatgtctgaaagaaaaaccacatttgcctgaaaaatcacttcgcagatgtgcattcttagggactgaattgtgtcctcacctcaacattcatatcttgaaaccctaacccgcaacaggactgtatttacagataggagctttaagaaggtaacaaaggttataagaagagagagacatcagggatgcaatgacatacaggaaaggctacgtgaagacacagcaagaaggcagccatctgtaagccaaggagagaggccttaggagacaccaaacctgcctacacgttgatcttggacttttagcctccagaagtgggagaaaataaattcctgttgttttaagcaacaaccatggattaaaaataacaaattaaatggccctgttgggctcaggcgggggagccttgcgcgcatctcctttgaggagggtaaccatagatccccgctactaactgcgtacgatcaggcgcccgaatggcagaaacgccaccccccccn

SEQ ID NO: 336181 - DNA, 803 bp, Homo sapiens
  misc_feature (701)..(701): n is a, c, g, or t
  misc_feature (705)..(705): n is a, c, g, or t
  misc_feature (709)..(709): n is a, c, g, or t
  misc_feature (713)..(714): n is a, c, g, or t
  misc_feature (726)..(726): n is a, c, g, or t
  misc_feature (730)..(730): n is a, c, g, or t
  misc_feature (734)..(734): n is a, c, g, or t
  misc_feature (736)..(736): n is a, c, g, or t
  misc_feature (738)..(738): n is a, c, g, or t
  misc_feature (752)..(754): n is a, c, g, or t
  misc_feature (764)..(764): n is a, c, g, or t
  misc_feature (769)..(769): n is a, c, g, or t
  misc_feature (772)..(772): n is a, c, g, or t
gttaagttgctggttcatatcacaagaatatctgaatggaaatggggtacctgagcagctggactcatcaagctggaaatccatgcagtcggcaaaaccatcacagcgctggtgggctgggatacagctgttggaggaggcacacaccagagctccattagaacagcttttgttggctgcaaaaaaaaaagaataatgatcagggatgccagcatgatttttttttgtcccaatgaattctcacaacaaaataacataaaacagtttattatattactcttgattttttctagtctgatattttagaacacagttctttttgaagaatatttcaaatggattaacttaaaaatgtctgaaagaaaaaccacatttgcctgaaaaatcacttcgcagatgtgcattcttagggactgaattgtgtcctcacctcaacattcatatcttgaaaccctaacccgcaacaggactgtatttacagataggagctttaagaaggtaacaaaggttataagaagagagagacatcagggatgcaatgacatacaggaaaggctacgtgaagacacagcaagaaggcagccatctgtaagccaaggagagaggccttaggagacaccaaacctgcctacacgttgatcttggacttttagcctccagaagtgggagaaaataaattcctgttgttttaaaaaaaaaanaaantggnctcnntgccccaacggnggancttngngncgttccctttaggnnnggttaattangaccnccnctacttgattcctaccctcgaagtcacgggg

SEQ ID NO: 336182 - DNA, 604 bp, Homo sapiens
gttaagttgctggttcatatcacaagaatatctgaatggaaatggggtacctgagcagctggactcatcaagctggaaatccatgcagtcggcaaaaccatcacagcgctgctgttggaggaggcacacaccagagctccattagaacagcttttgttggctgcaaaaaaaaaagaataatgatcagggatgctgtcccaatgaattctcacaacaaaataacataaaacagtttattatattactcttgattttttctagtctgatattttagaacacatttcaaatggattaacttaaaaatgtctgaaagaaaaaccacatttgcctgaaaaatcacttcgcagatgtgcattcttagggactgaattcatatcttgaaaccctaacccgcaacaggactgtatttacagataggagctttaagaaggtaacaaaggttataagaagagagagacatcagaaaggctacgtgaagacacagcaagaaggcagccatctgtaagccaaggagagaggccttaggagacaccaaacctgcctacacgttgatcttggacttttagcctccagaagtgggagaaaataaattcctgttgtttta

SEQ ID NO: 336183 - DNA, 221 bp, Homo sapiens
caggctcattcggctccaggttgttgccaaattgctggcccatcctcatcttagagatgtcttttctcctaacccttttcttctgtccattccaggcatccctctacccgcctgcctctacccactaggaaagacttaaaattccttttactttattatgtagaaggatttaactctcaatcctcatctcaggccagactccaggccacctttattgacac

SEQ ID NO: 336184 - DNA, 758 bp, Homo sapiens
gggcagtacggatgtgcgagccaggaagaggaggacgtgaagatgtggggtccccgcttagcaggcagtaacagaggaggaaaagctacaatactgcctggtatatatacttgacaacacagcatctgagcctctggtgaccctggggaagacctgatggagctccctgtcaggaccaaatcctggagggaggggagggagctgactgagctcccactatgcgtcacgctcccactcaagcctcgccagcccccattaaggccttataggccccccttgcagatgacaaaagtgacaggcctgaggatcccaacagggcatctcagaacatgctagaggacgaagcagaaaacggcagagcttcggacacagcaggactcgagccgggccaggccctgacagctgtgtgcactgggccgtgttactcagcagagcctcagctcccactcccacatatgagctggtagtgggtttttttcaccagaaccggtaaaactgttctcagtttcgggaggtgtaagtaagtggttgcctcttagactcagatgcagttctggactctggctagagttctgaatttgggaccagggtctctagttcccacgctgacatctctccctagcctggaattgtctcttctgactgtggcctctcaaggacaccagtgaagaggaaggggagctgtagcctggctgttctaaaacctacccacgtcccttgggctgctcctatttagattgaactgctgtgctgcagcc

SEQ ID NO: 336185 - DNA, 403 bp, Homo sapiens
agaggggaaagacacgtgctcaaacaccaataacaattttaccagcccactcctgaagaagtcacagaaagcgcgatcatgcaaagagccaggagccagcagccagcagccaaaacccaagaagtccagactcaggtgggaggccctcagagagtacagttccgtaacagagactgaggcctggagaaagaagtccatgccaccagagtcaggactatagctcagggctcctgaatcatggcagatgtctgatagatcatttctggccctaacattctagaagttggatgtgagcagaccaggactagtgatcattgggaaggcaaagtaaaaactctaagtgagccatcaaaaaatctagggaccacaccagggccagctgctcaggaaacatttttgtctg

SEQ ID NO: 336186 - DNA, 304 bp, Homo sapiens
atcctctggaattgggactatatcttatgattatttgggaccagagttcctgacgtagctgaatgtacttcacctttgaaattaggtattgcaataaaggttggctaaagactgagaggggttccccagtcatgcttattacaggttcacaatgcccaacaacctaactcgtggttgaattactgaaggtcatgagatgttgggcaagattttgttttttaagtcgttaactcagtgttcattggttcagaattccaattgtgtctagatattggagatttaaaagaaaagccatttgctaaac

SEQ ID NO: 336187 - DNA, 437 bp, Homo sapiens
ggcacatttactgtcatattggaacggagagttgatgtcatattacaagctgagtaaacctagcagctccttctctgatatggttaatcaaaaaggaatcaagcccccaactgcagggcttctgaattaatgatgaattgaaggagaaaagaagcaacagcaacagcatatttgtaaagccaaggcttcaaagtaactcaggacagctcatttagataagtcatgaacctaaatggctaaattaaagcaagactgtgattaccaacacagctgggattaggcaagctgtggcacaagaattaagccacatgaaggggaagagccacaggtcagaaggtccccagaaaatgtctaacaagagaagcaagttaaccggaaatcagccatgtgccttaaccagaagtcagctgtgacttttaggcctcttctggaagtgg

SEQ ID NO: 336188 - DNA, 1851 bp, Homo sapiens
gattgtgggaaggcagctgaactcggcgcctggaaagatggaggcagcggagacagaggcggaagctgcagccctagaggtcctggctgaggtggcaggcatcttggaacctgtaggcctgcaggaggaggcagaactgccagccaagatcctggttgagtttgtggtggactctcagaagaaagacaagctgctctgcagccagcttcaggtagcggatttcctgcagaacatcctggctcaggaggacactgctaagggtctcgaccccttggcttctgaagacacgagccgacagaaggcaattgcagctaaggaacaatggaaagagctgaaggccacctacagggagcacgtagaggccatcaaaattggcctcaccaaggccctgactcagatggaggaagcccagaggaaacggacacaactccgggaagcctttgagcagctccaggccaagaaacaaatggccatggagaaacgcagagcagtccagaaccagtggcagctacaacaggagaagcatctgcagcatctggcggaggtttctgcagaggtgagggagcgtaagacagggactcagcaggagcttgacggggtgtttcagaaacttggaaacctgaagcagcaggcagaacaggagcgggacaagctgcagaggtatcagaccttcctccagcttctgtataccctgcagggtaagctgttgttccctgaggctgaggctgaggcagagaatcttccagatgataaaccccagcagccgactcgaccccaggagcagagtacaggagacaccatggggagagaccctggtgtgtccttcaaggctgttggtctacaacctgctggagatgtaaatttgccatgacttcctggaggacagcagcatggagaaagatcctagaaaaggtcagacccaactcaggccttggtgtccctggactgcaagtgtggaaggagggaaagcctggtttacctctctctgcatctgagctctgctacccatggagcagatggatggtgggaacaggaaagagcttatgttacacctcattcccatgcttagcccacccagagctaacccctgtcttcttccccaggcctctgacttccctcacctcccaaccatcattacaggaaagactgtgaactcctgagttcagcttgatttctgactacatcccagcaagctctggcatctgtggattaaaatccctggatctctctcagttgtgtatttgttcatcttcatatgctggcaggaacaactattaatacagatactcagaagccaataacatgacaggagctgggactggtttgaacacagggtgtgcagatggggagggggtactggccttgggcctcctatgatgcagacatggtgaatttaattcaaggaggaggagaatgttttaggcaggtggttatatgtgggaagataattttattcatggatccaaatgtttgttgagtcctttctttgtgctaaggttcttgcggtgaaccagaattataacagtgagctcatctgactgttttaggatgtacagcctagtgttaacattcttggtatctttttgtgccttatctaaaacatttctcgatcactggtttcagatgttcatttattatattcttttcaaagattcagagattggcttttgtcatccactattgtatgttttgtttcattgacctctagtgataccttgatctttcccactttctgttttcggattggagaagatgtaccttttttgtcaactcttacttttatcagatgatcaactcacgtatttggatctttatttgttttctcaaataaatatttaaggttatacattt

SEQ ID NO: 336189 - DNA, 1037 bp, Homo sapiens
gattgtgggaaggcagctgaactcggcgcctggaaagatggaggcagcggagacagaggcggaagctgcagccctagaggtcctggctgaggtggcaggcatcttggaacctgtaggcctgcaggaggaggcagaactgccagccaagatcctggttgagtttgtggtggactctcagaagaaagacaagctgctctgcagccagcttcaggtagcggatttcctgcagaacatcctggctcaggaggacactgctaagggtctcgaccccttggcttctgaagacacgagccgacagaaggcaattgcagctaaggaacaatggaaagagctgaaggccacctacagggagcacgtagaggccatcaaaattggcctcaccaaggccctgactcagatggaggaagcccagaggaaacggacacaactccgggaagcctttgagcagctccaggccaagaaacaaatggccatggagaaacgcagagcagtccagaaccagtggcagctacaacaggagaagcatctgcagcatctggcggaggtttctgcagaggtgagggagcgtaagacagggactcagcaggagcttgacggggtgtttcagaaacttggaaacctgaagcagcaggcagaacaggagcgggacaagctgcagaggtatcagaccttcctccagcttctgtataccctgcagggtaagctgttgttccctgaggctgaggctgaggcagagaatcttccagatgataaaccccagcagccgactcgaccccaggagcagagtacaggagacaccatggggagagaccctggtgtgtccttcaaggctgttggtctacaacctgctggagatgtaaatttgccatgacttcctggaggacagcagcatggagaaagatcctagaaaaggcctctgacttccctcacctcccaaccatcattacaggaaagactgtgaactcctgagttcagcttgatttctgactacatcccagcaagctctggcatctgtggattaaaatccctggatctct

SEQ ID NO: 336190 - DNA, 236 bp, Homo sapiens
accctggtgtgtccttcaagataacaaggcctgttggcttctgcctgccgccgatgtagattatgtatcttttcctgaggaccaggagcatggaaaaagttcctaggaaaggcctctgacttccctcacctcccaaccatcattacaggaaagactgtgaactcctgagttcagcttgatttctgactacatcccagcaagctctggcatctgtggattaaaatccctggatctct

SEQ ID NO: 336191 - DNA, 2081 bp, Homo sapiens
gattgtgggaaggcagctgaactcggcgcctggaaagatggaggcagcggagacagaggcggaagctgcagccctagaggtcctggctgaggtggcaggcatcttggaacctgtaggcctgcaggaggaggcagaactgccagccaagatcctggttgagtttgtggtggactctcagaagaaagacaagctgctctgcagccagcttcaggtagcggatttcctgcagaacatcctggctcaggaggacactgctaagggtctcgaccccttggcttctgaagacacgagccgacagaaggcaattgcagctaaggaacaatggaaagagctgaaggccacctacagggagcacgtagaggccatcaaaattggcctcaccaaggccctgactcagatggaggaagcccagaggaaacggacacaactccgggaagcctttgagcagctccaggccaagaaacaaatggccatggagaaacgcagagcagtccagaaccagtggcagctacaacaggagaagcatctgcagcatctggcggaggtttctgcagaggtgagggagcgtaagacagggactcagcaggagcttgacggggtgtttcagaaacttggaaacctgaagcagcaggcagaacaggagcgggacaagctgcagaggtatcagaccttcctccagcttctgtataccctgcagggtaagctgttgttccctgaggctgaggctgaggcagagaatcttccagatgataaaccccagcagccgactcgaccccaggagcagagtacaggagacaccatggggagagaccctggtgtgtccttcaaggctgttggtctacaacctgctggagatgtaaatttgccatgacttcctggaggacagcagcatggagaaagatcctagaaaaggcctctgacttccctcacctcccaaccatcattacaggaaagactgtgaactcctgagttcagcttgatttctgactacatcccagcaagctctggcatctgtggattaaaatccctggatctctctcagttgtgtatttgttcatcttcatatgctggcaggaacaactattaatacagatactcagaagccaataacatgacaggagctgggactggtttgaacacagggtgtgcagatggggagggggtactggccttgggcctcctatgatgcagacatggtgaatttaattcaaggaggaggagaatgttttaggcaggtggttatatgtgggaagataattttattcatggatccaaatgtttgttgagtcctttctttgtgctaaggttcttgcggtgaaccagaattataacagtgagctcatctgactgttttaggatgtacagcctagtgttaacattcttggtatctttttgtgccttatctaaaacatttctcgatcactggtttcagatgttcatttattatattcttttcaaagattcagagattggcttttgtcatccactattgtatgttttgtttcattgacctctagtgataccttgatctttcccactttctgttttcggattggagaagatgtaccttttttgtcaactcttacttttatcagatgatcaactcacgtatttggatctttatttgttttctcaaataaatatttaaggttatacatttaaaaaaaaaaacaaaacaaaaacaaaacaaacaaacacaaaaaaaaaaaaaaaaaaaaaataaaccaaacaacaaaaccaaaaaaaaaaacaaaaaataaaaaaaaaaaaaacagagagcggaaagagagaagaaaaatagacaaacaagaaagaaaaaaccaaaaagatggaggggagcgcgtagaccatacgacaggggaggaggagaagaaagagagaaccgaaagtaaaatgagaaagaggagacaagtaataaacagaacacaacataacaatggggcggcagcgaaaaaacgaagcacgcggatagagaaagtgaagttacgaggtcaatgaacaaaccatatatagggggacatacaaaggacgaacacaacaatgagagagccgaaagtagaaaagcgggaggttgacaactc

SEQ ID NO: 336192 - DNA, 2294 bp, Homo sapiens
gattgtgggaaggcagctgaactcggcgcctggaaagatggaggcagcggagacagaggcggaagctgcagccctagaggtcctggctgaggtggcaggcatcttggaacctgtaggcctgcaggaggaggcagaactgccagccaagatcctggttgagtttgtggtggactctcagaagaaagacaagctgctctgcagccagcttcaggtagcggatttcctgcagaacatcctggctcaggaggacactgctaagggtctcgaccccttggcttctgaagacacgagccgacagaaggcaattgcagctaaggaacaatggaaagagctgaaggccacctacagggagcacgtagaggccatcaaaattggcctcaccaaggccctgactcagatggaggaagcccagaggaaacggacacaactccgggaagcctttgagcagctccaggccaagaaacaaatggccatggagaaacgcagagcagtccagaaccagtggcagctacaacaggagaagcatctgcagcatctggcggaggtttctgcagaggtgagggagcgtaagacagggactcagcaggagcttgacggggtgtttcagaaacttggaaacctgaagcagcaggcagaacaggagcgggacaagctgcagaggtatcagaccttcctccagcttctgtataccctgcagggtaagctgttgttccctgaggctgaggctgaggcagagaatcttccagatgataaaccccagcagccgactcgaccccaggagcagagtacaggagacaccatggggagagaccctggtgtgtccttcaaggctgttggtctacaacctgctggagatgtaaatttgccatgacttcctggaggacagcagcatggagaaagatcctagaaaaggcctctgacttccctcacctcccaaccatcattacaggaaagactgtgaactcctgagttcagcttgatttctgactacatcccagcaagctctggcatctgtggattaaaatccctggatctctctcagttgtgtatttgttcatcttcatatgctggcaggaacaactattaatacagatactcagaagccaataacatgacaggagctgggactggtttgaacacagggtgtgcagatggggagggggtactggccttgggcctcctatgatgcagacatggtgaatttaattcaaggaggaggagaatgttttaggcaggtggttatatgtgggaagataattttattcatggatccaaatgtttgttgagtcctttctttgtgctaaggttcttgcggtgaaccagaattataacagtgagctcatctgactgttttaggatgtacagcctagtgttaacattcttggtatctttttgtgccttatctaattcagagattggcttttgtcatccactattgtatgttttgtttcattgacctctagtgataccttgatctttcccactttctgttttcggattggagaagatgtaccttttttgtcaactcttacttttatcagatgatcaactcacgtatttggatctttatttgttttctcaaataaatatttaaggttatacatttcttctgacttcctttattttcacaatcattcaattcatagcatttcctatattctgttataattatttcattgattcataaatttctttgaaaaataatttggtcttctattgattgtgagaagataatctaagtttaatttggtcagagaatatcatctgtttaataaactttgaaatttggtgagtgaattatcttttttactgataaagagtgatgtcatcttttttaatgtttcacataggtttggaaagaatgcattttagattgtgtgtagtattttctattagattatgtttgcaatttttgtttcaatttatatcttatatacttaattttttgttgtctgtcacctgagaggtgtgttcaaatctccaactatgatagtggatttgtgcatttgtctttatagttccattttcttacatactttgcagttactttattaaggtatatgtaaatttacatttatatttttcttctgaactgaactctttgtgtggtagcctgcttcatctataggctaatgtgtttaaccttgaaaactactagttttaatattaatataactgtcaattcttttggttaccctttgcttgacatcctttctcttgaatttccattcttttttagtttcaacctttctttatatttaccacttgtatacagcatttaaagggttatttat

SEQ ID NO: 336193 - DNA, 1327 bp, Homo sapiens
gattgtgggaaggcagctgaactcggcgcctggaaagatggaggcagcggagacagaggcggaagctgcagccctagaggtcctggctgaggtggcaggcatcttggaacctgtaggcctgcaggaggaggcagaactgccagccaagatcctggttgagtttgtggtggactctcagaagaaagacaagctgctctgcagccagcttcaggtagcggatttcctgcagaacatcctggctcaggaggacactgctaagggtctcgaccccttggcttctgaagacacgagccgacagaaggcaattgcagctaaggaacaatggaaagagctgaaggccacctacagggagcacgtagaggccatcaaaattggcctcaccaaggccctgactcagatggaggaagcccagaggaaacggacacaactccgggaagcctttgagcagctccaggccaagaaacaaatggccatggagaaacgcagagcagtccagaaccagtggcagctacaacaggagaagcatctgcagcatctggcggaggtttctgcagaggtgagggagcgtaagacagggactcagcaggagcttgacggggtgtttcagaaacttggaaacctgaagcagcaggcagaacaggagcgggacaagctgcagaggtatcagaccttcctccagcttctgtataccctgcagggtaagctgttgttccctgaggctgaggctgaggcagagaatcttccagatgataaaccccagcagccgactcgaccccaggagcagagtacaggagacaccatggggagagaccctggtgtgtccttcaaggctgttggtctacaacctgctggagatgtaaatttgccatgacttcctggaggacagcagcatggagaaagatcctagaaaaggcctctgacttccctcacctcccaaccatcattacaggaaagactgtgaactcctgagttcagcttgatttctgactacatcccagcaagctctggcatctgtggattaaaatccctggatctctctcagttgtgtatttgttcatcttcatatgctggcaggaacaactattaatacagatactcagaagccaataacatgacaggagctgggactggtttgaacacagggtgtgcagatggggaggcaatcctctcccaaccccaccattcatccttacactttcccaatctcccttttcccatctctccctactccaccacccctcctcctcactctaacccccatctctccccacccttcctcccctccccttccttacctcatcctctctctctctccaccatcactctc

SEQ ID NO: 336194 - DNA, 1649 bp, Homo sapiens
gattgtgggaaggcagctgaactcggcgcctggaaagatggaggcagcggagacagaggcggaagctgcagccctagaggtcctggctgaggtggcaggcatcttggaacctgtaggcctgcaggaggaggcagaactgccagccaagatcctggttgagtttgtggtggtatgtacaagatgagagcgagcctttcagaagccagggtctggtcctggctcctcttactgagatacagggcagcattggcagagagcagacttaaggaaacctgtaaggaggacagaaggcaattgcagctaaggaacaatggaaagagctgaaggccacctacagggagcacgtagaggccatcaaaattggcctcaccaaggccctgactcagatggaggaagcccagaggaaacggacacaactccgggaagcctttgagcagctccaggccaagaaacaaatggccatggagaaacgcagagcagtccagaaccagtggcagctacaacaggagaagcatctgcagcatctggcggaggtttctgcagaggtgagggagcgtaagacagggactcagcaggagcttgacggggtgtttcagaaacttggaaacctgaagcagcaggcagaacaggagcgggacaagctgcagaggtatcagaccttcctccagcttctgtataccctgcagggtaagctgttgttccctgaggctgaggctgaggcagagaatcttccagatgataaaccccagcagccgactcgaccccaggagcagagtacaggagacaccatggggagagaccctggtgtgtccttcaaggctgttggtctacaacctgctggagatgtaaatttgccatgacttcctggaggacagcagcatggagaaagatcctagaaaaggcctctgacttccctcacctcccaaccatcattacaggaaagactgtgaactcctgagttcagcttgatttctgactacatcccagcaagctctggcatctgtggattaaaatccctggatctctctcagttgtgtatttgttcatcttcatatgctggcaggaacaactattaatacagatactcagaagccaataacatgacaggagctgggactggtttgaacacagggtgtgcagatggggagggggtactggccttgggcctcctatgatgcagacatggtgaatttaattcaaggaggaggagaatgttttaggcaggtggttatatgtgggaagataattttattcatggatccaaatgtttgttgagtcctttctttgtgctaaggttcttgcggtgaaccagaattataacagtgagctcatctgactgttttaggatgtacagcctagtgttaacattcttggtatctttttgtgccttatctaaaacatttctcgatcactggtttcagatgttcatttattatattcttttcaaagattcagagattggcttttgtcatccactattgtatgttttgtttcattgacctctagtgataccttgatctttcccactttctgttttcggattggagaagatgtaccttttttgtcaactcttacttttatcagatgatcaactcacgtatttggatctttatttgttttctcaaataaatatttaaggttatacattt

SEQ ID NO: 336195 - DNA, 1519 bp, Homo sapiens
gattgtgggaaggcagctgaactcggcgcctggaaagatggaggcagcggagacagaggcggaagctgcagccctagaggtcctggctgaggtggcaggcatcttggaacctgtaggcctgcaggaggaggcagaactgccagccaagatcctggttgagtttgtggtggactctcagaagaaagacaagctgctctgcagccagcttcaggtagcggatttcctgcagaacatcctggctcaggaggacactgctaagggtctcgaccccttggcttctgaagacacgagccgacagaaggcaattgcagctaaggaacaatggaaagagctgaaggccacctacagggagcacgtagaggccatcaaaattggcctcaccaaggccctgactcagatggaggaagcccagaggaaacggacacaactccgggaagcctttgagcagctccaggccaagaaacaaatggccatggagaaacgcagagcagtccagaaccagtggcagctacaacaggagaagcatctgcagcatctggcggaggtttctgcagagggtaagctgttgttccctgaggctgaggctgaggcagagaatcttccagatgataaaccccagcagccgactcgaccccaggagcagagtacaggagacaccatggggagagaccctggtgtgtccttcaaggctgttggtctacaacctgctggagatgtaaatttgccatgacttcctggaggacagcagcatggagaaagatcctagaaaaggcctctgacttccctcacctcccaaccatcattacaggaaagactgtgaactcctgagttcagcttgatttctgactacatcccagcaagctctggcatctgtggattaaaatccctggatctctctcagttgtgtatttgttcatcttcatatgctggcaggaacaactattaatacagatactcagaagccaataacatgacaggagctgggactggtttgaacacagggtgtgcagatggggagggggtactggccttgggcctcctatgatgcagacatggtgaatttaattcaaggaggaggagaatgttttaggcaggtggttatatgtgggaagataattttattcatggatccaaatgtttgttgagtcctttctttgtgctaaggttcttgcggtgaaccagaattataacagtgagctcatctgactgttttaggatgtacagcctagtgttaacattcttggtatctttttgtgccttatctaaaacatttctcgatcactggtttcagatgttcatttattatattcttttcaaagattcagagattggcttttgtcatccactattgtatgttttgtttcattgacctctagtgataccttgatctttcccactttctgttttcggattggagaagatgtaccttttttgtcaactcttacttttatcagatgatcaactcacgtatttggatctttatttgttttctcaaataaatatttaaggttatacattt

SEQ ID NO: 336196 - DNA, 1710 bp, Homo sapiens
gattgtgggaaggcagctgaactcggcgcctggaaagatggaggcagcggagacagaggcggaagctgcagccctagaggtcctggctgaggtggcaggcatcttggaacctgtaggcctgcaggaggaggcagaactgccagccaagatcctggttgagtttgtggtggactctcagaagaaagacaagctgctctgcagccagcttcaggtagcggatttcctgcagaacatcctggctcaggaggacactgctaagggtctcgaccccttggcttctgaagacacgagccgacagaaggcaattgcagctaaggaacaatggaaagagctgaaggccacctacagggagcacgtagaggccatcaaaattggcctcaccaaggccctgactcagatggaggaagcccagaggaaacggacacaactccgggaagcctttgagcagctccaggccaagaaacaaatggccatggagaaacgcagagcagtccagaaccagtggcagctacaacaggagaagcatctgcagcatctggcggaggtttctgcagagggtaagctgttgttccctgaggctgaggctgaggcagagaatcttccagatgataaaccccagcagccgactcgaccccaggagcagagtacaggagacaccatggggagagaccctggtgtgtccttcaaggctgttggtctacaacctgctggagatgtaaatttgccatgacttcctggaggacagcagcatggagaaagatcctagaaaaggtcagacccaactcaggccttggtgtccctggactgcaagtgtggaaggagggaaagcctggtttacctctctctgcatctgagctctgctacccatggagcagatggatggtgggaacaggaaagagcttatgttacacctcattcccatgcttagcccacccagagctaacccctgtcttcttccccaggcctctgacttccctcacctcccaaccatcattacaggaaagactgtgaactcctgagttcagcttgatttctgactacatcccagcaagctctggcatctgtggattaaaatccctggatctctctcagttgtgtatttgttcatcttcatatgctggcaggaacaactattaatacagatactcagaagccaataacatgacaggagctgggactggtttgaacacagggtgtgcagatggggagggggtactggccttgggcctcctatgatgcagacatggtgaatttaattcaaggaggaggagaatgttttaggcaggtggttatatgtgggaagataattttattcatggatccaaatgtttgttgagtcctttctttgtgctaaggttcttgcggtgaaccagaattataacagtgagctcatctgactgttttaggatgtacagcctagtgttaacattcttggtatctttttgtgccttatctaaaacatttctcgatcactggtttcagatgttcatttattatattcttttcaaagattcagagattggcttttgtcatccactattgtatgttttgtttcattgacctctagtgataccttgatctttcccactttctgttttcggattggagaagatgtaccttttttgtcaactcttacttttatcagatgatcaactcacgtatttggatctttatttgttttctcaaataaatatttaaggttatacattt

SEQ ID NO: 336197 - DNA, 1670 bp, Homo sapiens
gattgtgggaaggcagctgaactcggcgcctggaaagatggaggcagcggagacagaggcggaagctgcagccctagaggtcctggctgaggtggcaggcatcttggaacctgtaggcctgcaggaggaggcagaactgccagccaagatcctggttgagtttgtggtggtatgtacaagatgagagcgagcctttcagaagccagggtctggtcctggctcctcttactgagatacagggcagcattggcagagagcagacttaaggaaacctgtaaggaggtaaggatgttccctgtctctgccctccctctgagcaggactctcagaagaaagacaagctgctctgcagccagcttcaggtagcggatttcctgcagaacatcctggctcaggaggacactgctaagggtctcgaccccttggcttctgaagacacgagccgacagaaggcaattgcagctaaggaacaatggaaagagctgaaggccacctacagggagcacgtagaggccatcaaaattggcctcaccaaggccctgactcagatggaggaagcccagaggaaacggacacaactccgggaagcctttgagcagctccaggccaagaaacaaatggccatggagaaacgcagagcagtccagaaccagtggcagctacaacaggagaagcatctgcagcatctggcggaggtttctgcagagggtaagctgttgttccctgaggctgaggctgaggcagagaatcttccagatgataaaccccagcagccgactcgaccccaggagcagagtacaggagacaccatggggagagaccctggtgtgtccttcaaggctgttggtctacaacctgctggagatgtaaatttgccatgacttcctggaggacagcagcatggagaaagatcctagaaaaggcctctgacttccctcacctcccaaccatcattacaggaaagactgtgaactcctgagttcagcttgatttctgactacatcccagcaagctctggcatctgtggattaaaatccctggatctctctcagttgtgtatttgttcatcttcatatgctggcaggaacaactattaatacagatactcagaagccaataacatgacaggagctgggactggtttgaacacagggtgtgcagatggggagggggtactggccttgggcctcctatgatgcagacatggtgaatttaattcaaggaggaggagaatgttttaggcaggtggttatatgtgggaagataattttattcatggatccaaatgtttgttgagtcctttctttgtgctaaggttcttgcggtgaaccagaattataacagtgagctcatctgactgttttaggatgtacagcctagtgttaacattcttggtatctttttgtgccttatctaaaacatttctcgatcactggtttcagatgttcatttattatattcttttcaaagattcagagattggcttttgtcatccactattgtatgttttgtttcattgacctctagtgataccttgatctttcccactttctgttttcggattggagaagatgtaccttttttgtcaactcttacttttatcagatgatcaactcacgtatttggatctttatttgttttctcaaataaatatttaaggttatacattt

SEQ ID NO: 336198 - DNA, 1660 bp, Homo sapiens
gattgtgggaaggcagctgaactcggcgcctggaaagatggaggcagcggagacagaggcggaagctgcagccctagaggtcctggctgaggtggcaggcatcttggaacctgtaggcctgcaggaggaggcagaactgccagccaagatcctggttgagtttgtggtggactctcagaagaaagacaagctgctctgcagccagcttcaggtagcggatttcctgcagaacatcctggctcaggaggacactgctaagggtctcgaccccttggcttctgaagacacgagccgacagaaggcaattgcagctaaggaacaatggaaagagctgaaggccacctacagggagcacgtagaggccatcaaaattggcctcaccaaggccctgactcagatggaggaagcccagaggaaacggacacaactccgggaagcctttgagcagctccaggccaagaaacaaatggccatggagaaacgcagagcagtccagaaccagtggcagctacaacaggagaagcatctgcagcatctggcggaggtttctgcagaggtgagggagcgtaagacagggactcagcaggagcttgacggggtgtttcagaaacttggaaacctgaagcagcaggcagaacaggagcgggacaagctgcagaggtatcagaccttcctccagcttctgtataccctgcagggtaagctgttgttccctgaggctgaggctgaggcagagaatcttccagatgataaaccccagcagccgactcgaccccaggagcagagtacaggagacaccatggggagagaccctggtgtgtccttcaaggctgttggtctacaacctgctggagatgtaaatttgccatgacttcctggaggacagcagcatggagaaagatcctagaaaaggcctctgacttccctcacctcccaaccatcattacaggaaagactgtgaactcctgagttcagcttgatttctgactacatcccagcaagctctggcatctgtggattaaaatccctggatctctctcagttgtgtatttgttcatcttcatatgctggcaggaacaactattaatacagatactcagaagccaataacatgacaggagctgggactggtttgaacacagggtgtgcagatggggagggggtactggccttgggcctcctatgatgcagacatggtgaatttaattcaaggaggaggagaatgttttaggcaggtggttatatgtgggaagataattttattcatggatccaaatgtttgttgagtcctttctttgtgctaaggttcttgcggtgaaccagaattataacagtgagctcatctgactgttttaggatgtacagcctagtgttaacattcttggtatctttttgtgccttatctaaaacatttctcgatcactggtttcagatgttcatttattatattcttttcaaagattcagagattggcttttgtcatccactattgtatgttttgtttcattgacctctagtgataccttgatctttcccactttctgttttcggattggagaagatgtaccttttttgtcaactcttacttttatcagatgatcaactcacgtatttggatctttatttgttttctcaaataaatatttaaggttatacattt

SEQ ID NO: 336199 - DNA, 2348 bp, Homo sapiens
gattgtgggaaggcagctgaactcggcgcctggaaagatggaggcagcggagacagaggcggaagctgcagccctagaggtcctggctgaggtggcaggcatcttggaacctgtaggcctgcaggaggaggcagaactgccagccaagatcctggttgagtttgtggtggactctcagaagaaagacaagctgctctgcagccagcttcaggtagcggatttcctgcagaacatcctggctcaggaggacactgctaagggtctcgaccccttggcttctgaagacacgagccgacagaaggcaattgcagctaaggaacaatggaaagagctgaaggccacctacagggagcacgtagaggccatcaaaattggcctcaccaaggccctgactcagatggaggaagcccagaggaaacggacacaactccgggaagcctttgagcagctccaggccaagaaacaaatggccatggagaaacgcagagcagtccagaaccagtggcagctacaacaggagaagcatctgcagcatctggcggaggtttctgcagaggtgagggagcgtaagacagggactcagcaggagcttgacggggtgtttcagaaacttggaaacctgaagcagcaggcagaacaggagcgggacaagctgcagaggtatcagaccttcctccagcttctgtataccctgcagggtaagctgttgttccctgaggctgaggctgaggcagagaatcttccagatgataaaccccagcagccgactcgaccccaggagcagagtacaggagacaccatggggagagaccctggtgtgtccttcaaggctgttggtctacaacctgctggagatgtaaatttgccatgacttcctggaggacagcagcatggagaaagatcctagaaaaggcctctgacttccctcacctcccaaccatcattacaggaaagactgtgaactcctgagttcagcttgatttctgactacatcccagcaagctctggcatctgtggattaaaatccctggatctctctcagttgtgtatttgttcatcttcatatgctggcaggaacaactattaatacagatactcagaagccaataacatgacaggagctgggactggtttgaacacagggtgtgcagatggggagggggtactggccttgggcctcctatgatgcagacatggtgaatttaattcaaggaggaggagaatgttttaggcaggtggttatatgtgggaagataattttattcatggatccaaatgtttgttgagtcctttctttgtgctaaggttcttgcggtgaaccagaattataacagtgagctcatctgactgttttaggatgtacagcctagtgttaacattcttggtatctttttgtgccttatctaaaacatttctcgatcactggtttcagatgttcatttattatattcttttcaaagattcagagattggcttttgtcatccactattgtatgttttgtttcattgacctctagtgataccttgatctttcccactttctgttttcggattggagaagatgtaccttttttgtcaactcttacttttatcagatgatcaactcacgtatttggatctttatttgttttctcaaataaatatttaaggttatacatttcttctgacttcctttattttcacaatcattcaattcatagcatttcctatattctgttataattatttcattgattcataaatttctttgaaaaataatttggtcttctattgattgtgagaagataatctaagtttaatttggtcagagaatatcatctgtttaataaactttgaaatttggtgagtgaattatcttttttactgataaagagtgatgtcatcttttttaatgtttcacataggtttggaaagaatgcattttagattgtgtgtagtattttctattagattatgtttgcaatttttgtttcaatttatatcttatatacttaattttttgttgtctgtcacctgagaggtgtgttcaaatctccaactatgatagtggatttgtgcatttgtctttatagttccattttcttacatactttgcagttactttattaaggtatatgtaaatttacatttatatttttcttctgaactgaactctttgtgtggtagcctgcttcatctataggctaatgtgtttaaccttgaaaactactagttttaatattaatataactgtcaattcttttggttaccctttgcttgacatcctttctcttgaatttccattcttttttagtttcaacctttctttatatttaccacttgtatacagcatttaaagggttatttat

SEQ ID NO: 336200 - DNA, 1975 bp, Homo sapiens
gattgtgggaaggcagctgaactcggcgcctggaaagatggaggcagcggagacagaggcggaagctgcagccctagaggtcctggctgaggtggcaggcatcttggaacctgtaggcctgcaggaggaggcagaactgccagccaagatcctggttgagtttgtggtggtatgtacaagatgagagcgagcctttcagaagccagggtctggtcctggctcctcttactgagatacagggcagcattggcagagagcagacttaaggaaacctgtaaggaggtaaggatgttccctgtctctgccctccctctgagcaggactctcagaagaaagacaagctgctctgcagccagcttcaggtagcggatttcctgcagaacatcctggctcaggaggacactgctaagggtctcgaccccttggcttctgaagacacgagccgtgagtaggcaggggattgtagtagcagctgacctgagtggggaaggaaggaggatttcagttaggtctcccatttggctgatgggaaggaggcccagtgttgcagggaggcaggctagcaggccaccctcactcatgtactcattcctggtggctcatctcaggacagaaggcaattgcagctaaggaacaatggaaagagctgaaggccacctacagggagcacgtagaggccatcaaaattggcctcaccaaggccctgactcagatggaggaagcccagaggaaacggacacaactccgggaagcctttgagcagctccaggccaagaaacaaatggccatggagaaacgcagagcagtccagaaccagtggcagctacaacaggagaagcatctgcagcatctggcggaggtttctgcagaggtgagggagcgtaagacagggactcagcaggagcttgacggggtgtttcagaaacttggaaacctgaagcagcaggcagaacaggagcgggacaagctgcagaggtatcagaccttcctccagcttctgtataccctgcagggtaagctgttgttccctgaggctgaggctgaggcagagaatcttccagatgataaaccccagcagccgactcgaccccaggagcagagtacaggagacaccatggggagagaccctggtgtgtccttcaaggctgttggtctacaacctgctggagatgtaaatttgccatgacttcctggaggacagcagcatggagaaagatcctagaaaaggcctctgacttccctcacctcccaaccatcattacaggaaagactgtgaactcctgagttcagcttgatttctgactacatcccagcaagctctggcatctgtggattaaaatccctggatctctctcagttgtgtatttgttcatcttcatatgctggcaggaacaactattaatacagatactcagaagccaataacatgacaggagctgggactggtttgaacacagggtgtgcagatggggagggggtactggccttgggcctcctatgatgcagacatggtgaatttaattcaaggaggaggagaatgttttaggcaggtggttatatgtgggaagataattttattcatggatccaaatgtttgttgagtcctttctttgtgctaaggttcttgcggtgaaccagaattataacagtgagctcatctgactgttttaggatgtacagcctagtgttaacattcttggtatctttttgtgccttatctaaaacatttctcgatcactggtttcagatgttcatttattatattcttttcaaagattcagagattggcttttgtcatccactattgtatgttttgtttcattgacctctagtgataccttgatctttcccactttctgttttcggattggagaagatgtaccttttttgtcaactcttacttttatcagatgatcaactcacgtatttggatctttatttgttttctcaaataaatatttaaggttatacattt

SEQ ID NO: 336201 - DNA, 1435 bp, Homo sapiens
taataccggtccctcacaagacctggcagaagcaggaagccagaagcaggagcagaagcaggaagcaggacagaaggcaattgcagctaaggaacaatggaaagagctgaaggccacctacagggagcacgtagaggccatcaaaattggcctcaccaaggccctgactcagatggaggaagcccagaggaaacggacacaactccgggaagcctttgagcagctccaggccaagaaacaaatggccatggagaaacgcagagcagtccagaaccagtggcagctacaacaggagaagcatctgcagcatctggcggaggtttctgcagaggtgagggagcgtaagacagggactcagcaggagcttgacggggtgtttcagaaacttggaaacctgaagcagcaggcagaacaggagcgggacaagctgcagaggtatcagaccttcctccagcttctgtataccctgcagggtaagctgttgttccctgaggctgaggctgaggcagagaatcttccagatgataaaccccagcagccgactcgaccccaggagcagagtacaggagacaccatggggagagaccctggtgtgtccttcaaggctgttggtctacaacctgctggagatgtaaatttgccatgacttcctggaggacagcagcatggagaaagatcctagaaaaggcctctgacttccctcacctcccaaccatcattacaggaaagactgtgaactcctgagttcagcttgatttctgactacatcccagcaagctctggcatctgtggattaaaatccctggatctctctcagttgtgtatttgttcatcttcatatgctggcaggaacaactattaatacagatactcagaagccaataacatgacaggagctgggactggtttgaacacagggtgtgcagatggggagggggtactggccttgggcctcctatgatgcagacatggtgaatttaattcaaggaggaggagaatgttttaggcaggtggttatatgtgggaagataattttattcatggatccaaatgtttgttgagtcctttctttgtgctaaggttcttgcggtgaaccagaattataacagtgagctcatctgactgttttaggatgtacagcctagtgttaacattcttggtatctttttgtgccttatctaaaacatttctcgatcactggtttcagatgttcatttattatattcttttcaaagattcagagattggcttttgtcatccactattgtatgttttgtttcattgacctctagtgataccttgatctttcccactttctgttttcggattggagaagatgtaccttttttgtcaactcttacttttatcagatgatcaactcacgtatttggatctttatttgttttctcaaataaatatttaaggttatacattt

SEQ ID NO: 336202 - DNA, 1623 bp, Homo sapiens
gattgtgggaaggcagctgaactcggcgcctggaaagatggaggcagcggagacagaggcggaagctgcagccctagaggtcctggctgaggtggcaggcatcttggaacctgtaggcctgcaggaggaggcagaactgccagccaagatcctggttgagtttgtggtggactctcagaagaaagacaagctgctctgcagccagcttcaggtagcggatttcctgcagaacatcctggctcaggaggacactgctaagggtctcgaccccttggcttctgaagacacgagccgacagaaggcaattgcagctaaggaacaatggaaagagctgaaggccacctacagggagcacgtagaggccatcaaaattggcctcaccaaggccctgactcagatggaggaagcccagaggaaacggacacaactccgggaagcctttgagcagctccaggccaagaaacaaatggccatggagaaacgcagagcagtccagaaccagtggcagctacaacaggagaagcatctgcagcatctggcggaggtttctgcagaggtgagggagcgtaagacagggactcagcaggagcttgacggggtgtttcagaaacttggaaacctgaagcagcaggcagaacaggagcgggacaagctgcagagggtaagctgttgttccctgaggctgaggctgaggcagagaatcttccagatgataaaccccagcagccgactcgaccccaggagcagagtacaggagacaccatggggagagaccctggtgtgtccttcaaggctgttggtctacaacctgctggagatgtaaatttgccatgacttcctggaggacagcagcatggagaaagatcctagaaaaggcctctgacttccctcacctcccaaccatcattacaggaaagactgtgaactcctgagttcagcttgatttctgactacatcccagcaagctctggcatctgtggattaaaatccctggatctctctcagttgtgtatttgttcatcttcatatgctggcaggaacaactattaatacagatactcagaagccaataacatgacaggagctgggactggtttgaacacagggtgtgcagatggggagggggtactggccttgggcctcctatgatgcagacatggtgaatttaattcaaggaggaggagaatgttttaggcaggtggttatatgtgggaagataattttattcatggatccaaatgtttgttgagtcctttctttgtgctaaggttcttgcggtgaaccagaattataacagtgagctcatctgactgttttaggatgtacagcctagtgttaacattcttggtatctttttgtgccttatctaaaacatttctcgatcactggtttcagatgttcatttattatattcttttcaaagattcagagattggcttttgtcatccactattgtatgttttgtttcattgacctctagtgataccttgatctttcccactttctgttttcggattggagaagatgtaccttttttgtcaactcttacttttatcagatgatcaactcacgtatttggatctttatttgttttctcaaataaatatttaaggttatacattt

SEQ ID NO: 336203 - DNA, 1412 bp, Homo sapiens
gattgtgggaaggcagctgaactcggcgcctggaaagatggaggcagcggagacagaggcggaagctgcagccctagaggtcctggctgaggtggcaggcatcttggaacctgtaggcctgcaggaggaggcagaactgccagccaagatcctggttgagtttgtggtggactctcagaagaaagacaagctgctctgcagccagcttcaggtagcggatttcctgcagaacatcctggctcaggaggacactgctaagggtctcgaccccttggcttctgaagacacgagccgacagaaggcaattgcagctaaggaacaatggaaagagctgaaggccacctacagggagcacgtagaggccatcaaaattggcctcaccaaggccctgactcagatggaggaagcccagaggaaacggacacaactccgggaagcctttgagcagctccaggccaagaaacaaatggccatggagaaacgcagagcagtccagaaccagtggcagctacaacaggagaagcatctgcagcatctggcggaggtttctgcagaggtgagggagcgtaagacagggactcagcaggagcttgacggggtgtttcagaaacttggaaacctgaagcttagcccacccagagctaacccctgtcttcttccccaggcctctgacttccctcacctcccaaccatcattacaggaaagactgtgaactcctgagttcagcttgatttctgactacatcccagcaagctctggcatctgtggattaaaatccctggatctctctcagttgtgtatttgttcatcttcatatgctggcaggaacaactattaatacagatactcagaagccaataacatgacaggagctgggactggtttgaacacagggtgtgcagatggggagggggtactggccttgggcctcctatgatgcagacatggtgaatttaattcaaggaggaggagaatgttttaggcaggtggttatatgtgggaagataattttattcatggatccaaatgtttgttgagtcctttctttgtgctaaggttcttgcggtgaaccagaattataacagtgagctcatctgactgttttaggatgtacagcctagtgttaacattcttggtatctttttgtgccttatctaaaacatttctcgatcactggtttcagatgttcatttattatattcttttcaaagattcagagattggcttttgtcatccactattgtatgttttgtttcattgacctctagtgataccttgatctttcccactttctgttttcggattggagaagatgtaccttttttgtcaactcttacttttatcagatgatcaactcacgtatttggatctttatttgttttctcaaataaatatttaaggttatacattt

SEQ ID NO: 336204 - DNA, 324 bp, Homo sapiens
ctgggattgcaggtgtgcaccaccacgtcaggctaatttttgtatttttagtagagatggcatttcaccatgttggccaggctggtctcaaactcctgacctcaggagatccacctgccttggccttccaaagtgctgggattacaggcatgaaccactgcgcctggccccggatggtttctattacatgtcatatttccatctgaaaagccctcaagctggaaccagctgaccctcttcagacctggccctatgtctaggagctgagggataatttattacaatctgtcgctcctcagcccaggacactcattagaatcacaa

SEQ ID NO: 336205 - DNA, 699 bp, Homo sapiens
aggctctgtaaaataccaagtactagatatgtatgggtaactattttgattctcacaatcatcctgaggaagcagtgtagacaggtgatataaattgatcaatatcacacccaatatgtggcagactccagattcaaactgaagtctctctctgatgctaatgcttattccctctccatataccacaccaactcctgaacttctgtaccagcttggacgttatggaaaatgggagctttaaatgttcttgaaggccaggcacggtggctcacgcctataatcccagcactttgggaggccgaggcgggtggatcacaaggtcaggagttcgagaccatcctgggcaagatggtgaaatcccgtctctactaaaaatacaaaaaaattatccgggcgtggtggtgggtgcctgtaatcccagctacacaggaggctgaggcagagaattgcttgaacctgggaggcaaaggttgcagtgacctgagattgtgccactgcactccagcctgggcgacagagcgagactccatctcaaataaataaataaataaattaaattaaataaatgttcttgaacatggggaaacatattttcattgcagtttatttatccaactgagtatttattcacttatttatttgctttctctagtggcagtgtaggggacaacttaaatggaggggagatcagaggcaaaa

SEQ ID NO: 336206 - DNA, 195 bp, Homo sapiens
ccctcccctattctgagtggttggtgggctgtccgtcagtcttactgtcttataacctgagcttggtcatccctattgcaacagtgattgctgttactcatgcagagccagtcagaatcctttttttgaaatttatggttgaatgctaggacaaagatactaccttttctctgaaattgttaatctgggaaggtg

SEQ ID NO: 336207 - DNA, 216 bp, Homo sapiens
agacataaataaagcaagatcccaaatattcccacacacagctcctaaaataaatgggagaaacacagttgtgtataagaaagtaccacacagctacaacaaaggagcccatgggagagaagaagagatcatgacccaaaaagctaacagagacctggccatacccatcctatcctggccagagcagcattcttgtcccaggtagtttctgtgagg

SEQ ID NO: 336208 - DNA, 575 bp, Homo sapiens
gaggggcctagagcagctctttccctcgcagccctcaaaaggagtgatccctgccaacaccttgatctcagacttctagcgtcccagcccgtgagaaaatgaatttctggaggtgaagcttcccaggctgtagtactttattatggcaggcctagaaaacgaattcattcacagacccccagttaagaagaagcaggaggaggaggcaaaaaacaaattactcttttaagtgaattcatctcatgttaaaatataaaatatgtgagaatgtgtgcatttcattagatatggggagcttaattgaatcatcttttaaaagaaataatcggaatttagttctataataagagtaaaatcaagaaagcaggaaaagtctgaatttatattgatgtagtacccttgaagtagtatcatagaccggaaacagcagcttcattaaggccaaagtgtgtttgttaattagctgtggtcctctccagtgagccgaccaatagatgccatcaatgatgagagagcatggacttattgacgaaaagatgaagtcagttgggcattagacacacatgtttcctccg

SEQ ID NO: 336209 - DNA, 171 bp, Homo sapiens
gttgagttacttattttgtgtgaactacatatttgtccataggatataaatatcaggctagagcttttaacagccgagagaattttttcaattcccttcacatttggatagtacttaattaggaaaataataataatcttccatagcagaatcataagatagtaaaacccc

SEQ ID NO: 336210 - DNA, 138 bp, Homo sapiens
ccagggaggtcaatgactggtcaaggctctgacacctgaggcagaaccacatgggaggtaggcattccgcccccagcctagggccctccacatcccacgccgcttccttcagtgcagggtgatgctgccactgaccag

SEQ ID NO: 336211 - DNA, 219 bp, Homo sapiens
tcagaaatgtatcaaggtgtggaggacaaagctggacaggaagaagcaggaagacaagttatgaggctattgaggtagtctgtgcaagatatactaaggacctgatatgaggaagtgacagtgggctaggaaagggaataaatacttgaaagatatttctgaggtataatttttaaaattttaacaaattggttgtaaatagggaaatggtggaataag

SEQ ID NO: 336212 - DNA, 447 bp, Homo sapiens
cttctcttatctgactaaaagcagcaacttctgggaaacgaggctgccataaagtccctctccagggcagttttaagatcatgaagaagctggaaagacccaccatacctgcataaacaagtactaccacaaacgtatttcctatttattctcctaaaaaaacttgtctttcctaaagaaacctatttgttcttctcatagaagcctttctcccagcttcctttttcctactaaattagaaagccttggctgggtgcagtggctcacacctgtaatcccagcactttgggaagctgaggtgggcagatcacctgaggtcgggagttcaagaccggcctgaccaacatggagaaaccccatctctactaaaaatacaaaattagccaggcgtggtggcacatgcctgtaatcccagctacttgggaggctgaggcaggagaatcgctt

SEQ ID NO: 336213 - DNA, 610 bp, Homo sapiens
atacagacccaaaactaaattgttttactaatttcaaatttcatgccttgtttaatttgcaaactgaagtcagtccagtaagttatagataccactgaattgatatgtgttgtgatattcatgtatttattcatattacctatttatttgttcaacagatgtctgctgagcaactatattgaagaaggatgtctgccagaccttagtaacaatgtcattgcaaaacaagataaagatgaaaagaattggtataataaccaagaaagggcagtgatgattatcattctaactaaagacaaaccacacatattgaatttctgaccgctatagaaagaagagtattgaacattgagattagttcaatacacaaacaccccacatttgcagatggatatgcaatagagaacaaagcacattgcactgatgtctggaaagttttgcacacctagtgattcatttacagaccatgctggacaggagcatctccatacagaggtgacttcaggtgttcagtgcatggtttatggtcctcaaaaaaaattgcatggtgagaggacagagattcaggacatgggatttccagactcacttatctttagctctatgagtt

SEQ ID NO: 336214 - DNA, 553 bp, Homo sapiens
ctactcaggaagctgaggcaggagaattgcttggaggcagaggttgcagtgagccgagatcacgccattgcaatccagcctgggcaacaagagcgacactctgtctcaaaaaacaaacaaacaaaaaaaacggggctaataacattcacaggttgttgtgcaaaccaaagatcaagaacgtgaacgtgctgtttcaggggaaaaagctgacttgctccaagtgttcgctcgggtaactggaaggtatgacctctgtcacaggatgcggagctgggctactgctgccagcagaagagaaagtcactatccagcagaaggtcaagagggctctcccaccacagtctcttcaatacagaccaaaatacttgacctgctgagctcagcctccttggttttgcctggaggagcaaacagtgacctaccaattagccaagagcttctgtaaagtggggcaaaggaaaggaaaaagaacaaaaaacaggtgacatgtgtgtttgtgggctggaagaaacgaagcagaaccctcagcttcttgccacacatccaggcctct

SEQ ID NO: 336215 - DNA, 365 bp, Homo sapiens
gaggcagctctcctggaggcagctagcgtgaggctggggagcgcagagctgcgtgtcatgccctgcgctgcccagactagtgaacaatacagtcaggatggctaaaggtgaccccaagaaaccaaatggcaagatgtctgcctatgccttctttgtgcagacgtgcagagaagaacgtaagaagaaataccaagaggtccctgtcaattttgcagaattttccaagaagtgctccaggaggtggaagacaatgtccaggaaagaaaagtctaaatttgataaactggcaaaggtggataaagtacgctatgatcgggaaatgaaggattatggaccagctaaaggaggcaagaagaagaaggatt

SEQ ID NO: 336216 - DNA, 540 bp, Homo sapiens
atttgtgatggcagctctatacccacaaacatgcgcgtgtgcaccaaaagaatgggaataaattgcacaaatccagtgaaaatcccaaaggtgatttttttaaatcaatgtattcatgaaagaagatagagaaaaccaagcttttaaaaaatgaggaatgaaatagggatatgttacttggcatcatgggggtgtagtaacagaaccgtgatgagacggtttcgtcattggcgcacagagtgtgcttgcatttaaagtaattttacctttgaagactgcacctggaatcctttgtaaattttccacaatgagtatactttttgttgttgttgttgttttgagacagagtctcactctgtcgccctggctggagtgcagtggtgtgatctctgctcactgcagcctccgcttcccgggttcaagcgattctccggcctcagcctcccacatagctgggattacaggcgcacgccaccatgcccgactaatttttgtatttttagtagagacagggtttcaccatgttggccaggctgctct

SEQ ID NO: 336217 - DNA, 306 bp, Homo sapiens
ctccaaactcacacatacttcatctctcaaatgggctctaagactagatatgaggatggaaaagaacagctagcctttcacacacacatacctggaagcaggaatcatttcaccttcccaaacacatctgtccctgacctttctctttgtgctgctcttcattccacataccttccaaatgtcttccagcatttcagaccttgggaccaggtagagacagcacccccatttcagcgtcaggcccctctttcaatgcatagttcccctaacagaaatcttgtctccccacttgtcttactccagctt

SEQ ID NO: 336218 - DNA, 782 bp, Homo sapiens
gagaactactgcctttttaaggctgagtaatattccattgtaagcctattctgccttttgtttattcgtttgtttgtagatggcggagtgtgttacttccagcattgagctaatgtgaataatgttacttgaatatggatgtggaaatacctctttgagaccctgcttttagttcttttgggtatatatgcagaggtggaattgccagatcacagagtaaatctatttttagctctttgaagaccgtcatactgttttccatagtgaccataccatttcacctttggaggacatcttatagcaatgctttgttgtccccttttcaccacgattatgtggccattacttcttgttttcaaaccttgagagtgagctcaggttaaatttacacttccctttgtgccctggatcccaactggtcaaggtgaaccacacatttctaattggaatgtatgaccccagtgactttgcctgtaacttccttttggctaggccagtaagcgcatttttaaccaaaccgaccccattatcaacaaatgcttgcactgcacgataaattcagtttgctttaataaattcccagtagtcctcacccagagctccttctcctcttatctcactccttgctgccaaaccctttacaatttatgtgtctgcctttcggttctgccttcagccccctccaagtttcctctttcccaccagctcactgtggcctttgtgtctcacataaattttgtcttctgtgtctgaaactcttactgacttctgcttccttgttc

SEQ ID NO: 336219 - DNA, 277 bp, Homo sapiens
tcacttctcactgaaagaaccagagcccacatttgtatggtgcttttgactacataggcaaaagacactacgtggaaactgctctcatttacaggaaacggatggggtggataatacaaacatcatcaactgcctccctcttcccttcactagaatttaagaaacatttggttagtgacaaaacaaaaacttgaaaagcagaagttcacagctgaaacaggacttgaatatgcatcaaggaacatgttatgagcatcatagtggtcagtcctaaatg

SEQ ID NO: 336220 - DNA, 437 bp, Homo sapiens
tcaacagagagataagagtcattagtctcacagaagcagaaattaaaatagcaatgagagctgagtaatgcctagtgttggtgggaatgtggtgatgggggccatggaaacccgcacatgttatgaatgggagtgaggcttggtgcagcctttctggagggcagcccagtaaccccacccaaggtgtacatcaaagagattcttccacaggtctgtgaggaacatacacaagaatgttgtttgcagtagtacgatctggagccaattgaagtggctgtcatggagtaatggctaagtcagattccacaccatggaattccatagagcacagagcagcaatgggctcatccagcaacacaaataggcctttcaaacatcatgctaagcaaagtaaagggaaaaaagaaaaaaggaaaggaaaaaagagagaaaaggat

SEQ ID NO: 336221 - DNA, 449 bp, Homo sapiens
cgggattttgccatgttgcccaggctggtctcgaactcctgagctcaggtgacaggtgatccacccaccttggcctcccaaagtgctgggattacaggcacgagccacacacctggcttatttcctggaattctttaagtgaaaggcatggttaaacattatggcatcagtgaggtagtggtgtggggttttttgttgttgttttttaatttttgtgggtacatagtaggtgtatatatttatgggatactttgatacaggtatgcaatgcataataatcacagggtaaagggggtatccatcccctcaagcatttattctttgtgttacaaacaatgcaattatgctctttatttttaaattgaggctggacacggtagctcacccatgtaattccagcactttgggtggctaaggcaagcgtattgcttgtgctcaggagtttgaga

SEQ ID NO: 336222 - DNA, 84 bp, Homo sapiens
tgagaccatgtcttcagggggaaaaaaaaagcgctgggcatgggcatatacctatagtctcagctactctggaggatgaggtga

SEQ ID NO: 336223 - DNA, 679 bp, Homo sapiens
tctacggatccttaacacgcatctcaaacatgaccttcttcacatggcggcaggagagagaaatgagagcctaacaaagggggaaatcccttataaaaccgtcagatcttgtgagaacttactatcatgagactagcatgggggaaaccacgtccatgatttgattacttcccaccaggtccctcccatgacacatgggaactacaattcaagataagatttgggtacagacacagccaaaccatatcacccagttaaggagaacaggggaggttgagctaccagatgaggtttaggaaatggagtcaaagtaaacggaacaagattaggtaaggttaagagaatgaggttgattgaagttgtgaggacaaggtcagttgaagtcaagggaatgaggttaaaagaaggaggatggttaaggtctgtaggaggaagatgagaggacatggttgaggtgagaaggatcagaagacaaggcttatgacatttagaggccgaggttggttgatgatgttgaaaagtcaaactcaggtgatcaagagtcagtgtttgggtgaggttgagttccagttaggtagagaggatgaggtaatgttgagaggagttaagaggttgagttttgttcttcaggattgaagatcaagattgtttgagctgatagtggttgcatgggttgaga

SEQ ID NO: 336224 - DNA, 689 bp, Homo sapiens
gcctcaggaaacttagtcatggcagaaggggaagcaaacatgaccttcttcacatggcggcaggagagagaaatgagagcctaacaaagggggaaatcccttataaaaccgtcagatcttgtgagaacttactatcatgagactagcatgggggaaaccacgtccatgatttgattacttcccaccaggtccctcccatgacacatgggaactacaattcaagataagatttgggtacagacacagccaaaccatatcacccagttaaggagaacaggggaggttgagctaccagatgaggtttaggaaatggagtcaaagtaaacggaacaagattaggtaaggttaagagaatgaggttgattgaagttgtgaggacaaggtcagttgaagtcaagggaatgaggttaaaagaaggaggatggttaaggtctgtaggaggaagatgagaggacatggttgaggtgagaaggatcagaagacaaggcttatgacatttagaggccgaggttggttgatgatgttgaaaagtcaaactcaggtgatcaagagtcagtgtttgggtgaggttgagttccagttaggtagagaggatgaggtaatgttgagaggagttaagaggttgagttttgttcttcaggattgaagatcaagattgtttgagctgatagtggttgcatgggttgaga

SEQ ID NO: 336225 - DNA, 500 bp, Homo sapiens
acccagtgtattagtctgttttcacactgctaataaagacctactcaagactgggtaatttatacagaaaagaggtttaattgacttacagtttcacaagactggggaggcctcaggaaacttagtcatggcagaaggggaagcaaacatgaccttcttcacatggcggcaggagagagaaatgagagcctaacaaagggggaaatcccttataaaaccgtcagatcttgtgagaacttactatcatgagactagcatgggggaaaccacgtccatgatttgattacttcccaccaggtccctcccatgacacatgggaactacaattcaagataagatttgggtacagacacagccaaaccatatcacccagttaaggagaacaggggaggttgagctaccagatgaggtttaggaaatggagtcaaagtaaacggaacaagattaggtaaggttaagagaatgaggttgattgaagttgtgaggacaaggtcagttga

SEQ ID NO: 336226 - DNA, 415 bp, Homo sapiens
ggaagaggggggttctacgagtagcgcaggagggaggcgaggcaggcaccgcagagcttccagctgcctcagggccgacttccatttggcactttgagtccaaggtgcctgtgcaccttgtccagatgctctggaggtggttgctcgggtatgtgggtctgagactccaaacagctcggccaaagccgacatggagatccatcagttcacaagtagtgaatgagccttctcaggtgggtggcagtcccagggtggccaagggtccagggagtgcaccctcactctgcaggtgagtcagaatcaggcaccacagagccagggttgcacccctgctggggggaacaggagccccttttcctctccccgacacacagggacaaagttatcatgctctttgggtgccactgggaggcac

SEQ ID NO: 336227 - DNA, 490 bp, Homo sapiens
catctcaaaaacaaaacaaaacaagaatgatgaccaaactatttttaatacttaccgaataaagtttttgacttgatttttatagatattttctactacttattttcatatgtgtatataaatggaaattcaacattatgtaaattatgaaagaggcattataattttaagtaaattcattttgttctaaagcagaacttttgtttcttactcagattttctgaggaaaaggagtattattctcaaggtttgtatattaacaaacgcatgggagaccactaacaaatttcttctcagatccagattgcggtgtttgcaaacaccggcaatctcaacccttctgctgggtgatcgggaaccagcaatgatcggccctcagcagggcacaccccgaacaaggaggccagcagcaacaaggtccaccacctcctcagggaaagccacaaggaccaccctcaacagggaggccaatcccacctcctcctcaagg

SEQ ID NO: 336228 - DNA, 553 bp, Homo sapiens
tgcggatttcacctagttgaagccaaaagccgtggaaatacattaccacgtggaagatgtggaactccagtatctcactgcctgcatggccagcccctaaataaattatcaatggtggccaagtgactactgggtgctttgtgggagaaacagctcttgctacaaaatccaaatgaaaggcatgaagaatccaaggactgccgggtgcgcttgctacttctaactgccctgtacagcttaaagtgaggtaataacacactctgtcctcacagggcctctctaccactctacataaagtacgagtatctcttctcttctgcagccacaggcctgagatatcccagaaccaaaagcagtctgactccaccaatctgcagactggcgcattatacagccagaaggatgtgttgtttccttgctccttgagtgacagtcagggtatggtttgggaaagagtggaaccctcaccttaggagtggggatgcactgggggctcacaaccccactgaacccttgctcctctctctggctgcttcaggctgttatgccctcc

SEQ ID NO: 336229 - DNA, 175 bp, Homo sapiens
gggagagtgcagcactgggtgggagggcgctcctcgggctcagtcagacgcatcagccttcagacagcttctggaagcaccagttgtgggtatctgaaccccccacaggggagaggcatctccccaaaattttccatggaacttaattagcctcaaagccaataaaatcctcgtg

SEQ ID NO: 336230 - DNA, 300 bp, Homo sapiens
actccttaaaaatatctaaccttccattatagttagaggtgatcctatgacaaattttgaccagtgaaatgaattcactgcatggagtttttgaataataatttaatggtaactgattctgttgtcatgggaaacttgtctttttccttacttcctgaaatgtaagtagaagaggaaaaaaaattaaaaatagaaacaataaaataagaacttacatatgacgtctttgaactgttgaacaaatgccaatatccaactatgttggacttctctgtatatggcagaaaaaaaatcatattt

SEQ ID NO: 336231 - DNA, 585 bp, Homo sapiens
atgcccctctactgtgatccaattatagtttcgacatatttgtttcttatcacctgtatgttatagtatattgtaattgtctgttaattcatattccctctcacacctcttcactcactttaaccattccaggcaagaaggaagacggttgcttatactatgccaacattttgttgttcttgtttttgtttctagaacaaatgctggaaattctttgacataacttccttcaagagttgagctttatttttttccaccccttatgttaaggcaggagtatcacttgcttgtaaccaacagaatgtagctgtgtgatttctaaggttaggtcaaagaagtgatgccagtttttcttgttccctgggacgtttgttttgggggccttgttttaagaggtctgactgccctgaggtggccacactgtgaggaagcccaggctataggaagaggccaggtgtaggtgctccgttgaggccccactggggtgtctgcatcaaccagcaggcactaaagacacctctatgtgattctggcctctagctgtcttgcaaccctagcctttgaaactctcctggccaatatccc

SEQ ID NO: 336232 - DNA, 159 bp, Homo sapiens
ctgtgaggcactggaagagtccagcagctgcgggagggagtgtttccggccatctcgggagacctccaacatccggatccgggggtccccattccgcaccatcagctcgttatattcttcaactgactcaaggcggtgtacacccccttgagaaaacag

SEQ ID NO: 336233 - DNA, 347 bp, Homo sapiens
atggggctgcagggaaggccttctcaactcctctcaggctgatggtgagttagagaccagccagggaaattgacatctgaggcagatctggctgagtccaccaggggaagagggtgggatggtggagggaaggggcttgaaggaccgagtgtagagtcctttgtcacataggaagatgtccgtgctttgtgagcaggcaggagtcttcgaaggttccaaagcagggaaatgacataagactactgaaggccaggcatggtggctcacgcctgtagtcccagcactttgggaggccgaagtgggtggatcacgaggtcaggagtttgagaccagcctggccaacatgg

SEQ ID NO: 336234 - DNA, 114 bp, Homo sapiens
tggaggcccagtcagcccttccaccctctttggctctggtgggcatctcccccaaacctgagagccccaccgggcacacttggacttctttacttcatacaacccttccactcc

SEQ ID NO: 336235 - DNA, 260 bp, Homo sapiens
ccagaggataaagttgtgtttattttttcctcataaaaacaatatagctaacgtgtgggaagtttgggattcagagagaaccaaccacccatggcccagccctcatgactgtccttttccctttgacttacctctctccagtccatgcccaagttcacatgaatgtttacttaattgcagtcatcatcaaaaaaatttaatcatttttttacttgcgttatgtacgtgtgtgtgtgtgtgtgtgtatatacttttttttt

SEQ ID NO: 336236 - DNA, 466 bp, Homo sapiens
ttccttccagagtactgctgctccttcaatgctggggactcagaggaagtatgaaaggaaaatgtattataattaatgaccaataatttttttaaagttttaatttagggaaaatattcaaggttgtaccagcctgtactataacaatcaactaacactaacaaagtagcaattttctgtcccaggccatattagcataattactagactctgaggaccaaatatctcatgggaaagagtaaccagtgtacccgtgaactttctagtctttctgttcacatccagcccctatccatgattctggccaatgcgttgactcctgttcactgctgttcctccagagagcactcactctgcttcatgtcctcccactagcagtctctcagctgacagggaatctgctccccaacctgtgttgcccttttgtttcagggctcaaattgccccaagttctgccttcagccat

SEQ ID NO: 336237 - DNA, 523 bp, Homo sapiens
ttgaaacttgtgtgtttgtgacttgaattcaggggagtgggtcctgcattgaaaaggacacgtgtgtcactcatgcggcctcctgggggctggtggtggcccaaggatgtcttcattcctcagcaaacacagagggctgcaggcttcccagggatcaggcactgccccagcggggtgctggagatgcagctacgggtgggacctcgtggaactcgtgctgagggaagacagtccatagaaacagaggggagtgcaaagcaggagtccagcagggtggggcgggaggcttggagggacaggccccgtcaggcagtgttcagggaaggcctgcccgctgaggcagtgttgccggagaaccctgggtagggagacgtgtcctggcctttggtcctcccagacgacgtgggcagcgcagaggcaccagattctcttgaggaaaactgcacctgtccttgtcctctctcatctctctgccacccgcgcccgcttgtccttctctccacccgacattcagttcccacag

SEQ ID NO: 336238 - DNA, 644 bp, Homo sapiens
tgacacccagtttgcactaggtactccctaagcattcttaacatttcttaggaaagggcccaggatatcttctgaattagggactagagtattttattttctccaaataatcaaacccacaataattttcttgtccagaagacaagaaaatctggagaaacttagggtgcatttgtaaattctggatttgcagtgctaagctggaaaaggtcaggtcttctacatcactttaacaatgccatgcagccatgtgctggcctcatttccaacaacaaaaaaagaagaaacaaaagctgcagatccctttgtctgaattttctgacacctattttttatagagtgatctttcttttcctcctggcttgatcacgtcactcatggtgctcaagagtgcttcatagggagatcagcgactttctcaagcacgtgattggatggcacataattctctttggctgaaggagcagtagcttctttacagttgaatagatttcatagtcagcaatctcagaattatattagaagataatttcttgctgactaaacaaatcatggtacaatataagttagacaccttctctggaattaaagcagccttggttgctctaaatataaaaagagaacattgacctttcaatactgac

SEQ ID NO: 336239 - DNA, 164 bp, Homo sapiens
ggtgatgatgttacatgaaacctttgtggccacctgacccaaccatttcatattgaggacgtggaaagtaagtgccagggatattagatgactcctttcctgggtgattcattgcataccttttgttaacgccttaccaatatagttgtttatttgtgtgtctg

SEQ ID NO: 336240 - DNA, 191 bp, Homo sapiens
gatgttgaactgaatggtcttgctgctcttccttccttcattaacatgagaacagatagttgatgcctctgatgttcatgttgttcccattgcccttttctctttaagcgcactgcctagtttcctttaaagtcgttgccttctttagttttctttttaagctgtttctgtgtgggctagtgttccctttt

SEQ ID NO: 336241 - DNA, 332 bp, Homo sapiens
atctcctgactctctacttcctaacattgtttctatatcacattatattaatatttcttttctatgccccagagtttacaataatgttcggcacataataaatgctcagtgaatcatgccgattttgatttcttaaagtgttttgtctaacacactgtgaagcatgattccatattttcctttcatatatttagttatacttttgcacctacacagatgacatatggctggtcatatagcactgctctgctgagaactcaatatgtctgcatttcttctgtcatccttcttccatctctccccaatctgtgcgcttaaaaataaaggtgcag

SEQ ID NO: 336242 - DNA, 247 bp, Homo sapiens
ttttcacacaggcacaaacagtaagacaacgtattacatttgttaagaggacgtttagggtgctgtggggttctgggctgtgattcagccgctggcgatgctggcaggaaaggtcctccctccctctgcttggccatcctcagtggctacatctgctccccttgtagttgtgagatggcttcaggagttctgggtctcaaacccagacatttgacatccagggaacaggacagaaacagaccatctc

SEQ ID NO: 336243 - DNA, 392 bp, Homo sapiens
cctggaatttgttttctcctggctttggcccaagggtgagctgaatcatgagacctcccagcagtcatagacagcaacaaccccaagaaatggcccatctttctggatagataatctggaaaaggggcctctgcaagacaaaaagtgtggggaaaatctttgtctttttttctctctcagcttggacacacagtcagatgcagcccccaaactgtatcgccatcaccttggcagcagcttgagcactaaaatctcaagagaaaacctgtccctttgggtacagaaattcagaaaaggggtccctgttatgtcaaaagtatcaggggagtcctcacttttttccccttgcactttgctctaaggtctggccaagtggcatgaaactttgtgac

SEQ ID NO: 336244 - DNA, 513 bp, Homo sapiens
agttaaccaaggaggaagggaaggaagccagcgcttccttttcagacaggaagtaacattggcccttcctgtccagttttaaacaaattgtccagctaaatttcaatgctaacatcctctcctgaatttgttccacaatttaaaaccacagatacagtctaaagttttcccttcctcccaataggcgagtcctccataccatgctaagtgttggcataacccccaaatcaagaggtaacatctttaattccaaaacaatacaggacacagaggtaaatcacttcacttcaaattaacgaccttctcgtcatgtctactacaataaaccatcttctgtacttctcttgttttgtgtgtgtgtgtgtgtgtgttgttttttttttttttcgagacggggtctccctatattgccaaagctggtgtcaaactcctgacttcatgatccggctgacttggcctcccagattacagtcttgagccagtgcgcccgggcagaattttatcttacagcct

SEQ ID NO: 336245 - DNA, 92 bp, Homo sapiens
ttcaagatgctgtcgtttggggtgtctgcccttggcaagtccatcgaggcctcagcggatgtgtctgcgttgaaggtggaggccgacgtgag

SEQ ID NO: 336246 - DNA, 759 bp, Homo sapiens
ctctccctcgggctgctggttgctgactttggcgccatggtcaataacccacacctgagtgatgtccagtttcagacggacagcggggaggtgctttacgcccacaagttcgtgctttatgcccgatgcccgctcctcatccagtatgtgaacaatgaaggcttctccgctgtagaggacggggttctgacccagcgtgtcctgctgggtgacgtgagcaccgaggccgcccgcacgttcctgcactatctctacactgcggacactggccttcctcctggccttagctctgagctgagctccctggcccacaggtttggcgtgagtgagctcgttcacctgtgcgaacaggtgcctattgccactgactcagagggcaaaccatgggaggagaaggaagcagagaattgcgaaagcagggccgagaatttccaggaactcttgaggtcaatgtgggcagatgaagaggaggaagcggagactttgttgaaatccaaggaccacgaagaagatcaagaaaacgtgaatgaagcagaaatggaagaaatttatgaatttgcagctactcagcgaaagcttctccaggaagaaagggcagcgggtgccggcgaggacgctgactggctggagggtggcagtccggtttctgggcaactcctagcaggtgtccaggtgcagaaacagtgggacaaggtggaggagatggagccgttggagccaggaagagatgaggccgccaccacctgggagaagatggga

SEQ ID NO: 336247 - DNA, 516 bp, Homo sapiens
tgtcctgaacgaaaataacaaggaaccccaagagtgtatgaccatggcaccccactttgctgaaggactggacagggcatctcagaggaggtgatggttgacctgaaggcctaaagggtaagtaagaactaaccaggcaaaggggtgcgggagaagggcagtacaagcagagggaaaggcacacacaaaggccctgtggaaagtggaaaacatggtgaggtcggaagaacagaatgaaggccagaaggactggagaggggatcatgagagagagctggcttgagacgaggccggggaggcaggcaggggtactctgcagggccccaaaggccatgataaaggcttctcctgttttctaaaagcagtatgtagcctctgagatgtgtaagtgggctgtgcatacgtgtgaaagagacaggccctgtggaactctggctacgtgtgaccaacagattgcgggtagcagggatagaagtggggagcagatgagatggatgctcatgagtcacaggtacc

SEQ ID NO: 336248 - DNA, 406 bp, Homo sapiens
atcacccaatgcaggcatctgtcctcaataaccatgacaggtggacattcagacacaacctggacacttaccatgcacagtggcaaaagttcactactcccaactactgaatctagttcttccttcagccatatgcaaaataaatataatttctttcaggtactcttcagatacctaaaggaaacaccacgtcttttttccattttaaatagtccagctttccttagcatggttttcagatgtcttaggatcctggcaacctcgttctattcataaatgagaactgaacacaaaacagtaaattggatcctcattctagacattatatggccactaatgaaatctattattgccctagggagtgccagggagtgcggggttggcacatcacactattaagtttgca

SEQ ID NO: 336249 - DNA, 351 bp, Homo sapiens
cactagcatctgaaactatatccagaatgacactggttttcataaaagtgttgatcctcacacctctttatagtcttgcacctagcacagtggagtgaaacactttaaatagcacttgttccttgagtatatatggaaaaaagtgaagtattgataagtgctcagctaatatgagcagcatctcaggagtctccaattcttgaattaccagggagtatttttaccattttcccccagtgaaaggcctattttgagagacttaccctccaaaatgaatgtattaagtcatgttccttttttttttttttttttgagacagggccttgctctgttgcccaggctggagtgcag

SEQ ID NO: 336250 - DNA, 312 bp, Homo sapiens
agtccagaatagtgggtgtattccattttgatctgcatatcttattctgttgttgattaagagcagtgagagtccataaactatggtatatgatagctgtgatctctgatacaagcttcatgtagatgacactcaaatctgcacattcagcttgcacttccctactgcctgctggacatctgcattttgagatcccgctggttcctgaaacctagtgtgtcttctaccaaagtcattggcattttgcagtgatatttttttgcattcccataaacctatacctcctctagttttacttatcttgattaatgg

SEQ ID NO: 336251 - DNA, 422 bp, Homo sapiens
tcactttccttggggcatttgtttccttttggtgaattccagaatattacttcccaccttcaaataattcattttttacctgtaaaattttccatctcgaatccagccgaatacagataagggaccttgatttctacaccccttcttgtttctgcttttgtttttcatttgaatcctattaaagccaatagatatggcaacgttggcaaaaatagaagcaaaacgtaggcgtgcggatattgatgccctccaccttcctgccagcctctatgggggatgattacctgctctcctcatctgtaacaaggctctttcaacagcaccttcatctgctacattacttggaatgcacatctcactaaacggtgcccctcatcaaactccatacaacacttccttgaattttactatcataaacagaa

SEQ ID NO: 336252 - DNA, 229 bp, Homo sapiens
catcaaagccgcttggctcattccaccacttctctcctgaaatgccgcagcagatgttgagctggtcccttcatgcgtcattctgacacccattcccacctattcttcacactgcagccggagcaaacggggtggtcccagctctcccacccaacctcaggtcctcgggttccatcaagctccccaggatccagactctagcccacccaatcgggagctccaggcttgg

SEQ ID NO: 336253 - DNA, 559 bp, Homo sapiens
tgtgaccacagtcaagatacttaacctctttgtgctccagttttcttatctgtaaaatgggctgaggattaaatgagctggtgtgtagaaagcatgtacagagtagctggcacacagcactgaatagtgctgcaccatcttcagatctaaatgatacaactaaagcatcaccattttcaggacccgcaatgcaagctgtgtgctggtgatacgactgatttttcctggctgcaaatacacacacggctctttccatactacctacttcatactacctactgtacaccagcctgggtcacgaatgtgtattcatgggctggatcgggaagagagcggtggccatgactgtggtaaagatgtctgatctggacctagatggtaccctgtccttggtcccccagcatctctctggggctgacctgccaggcaactgagcatcagtactcctatcagacgaatttctcaattgtatccaagtgttaatacatgctttgaaagacggccagaagaatgccctgagaaccatcagaaagcaaagattagctccaggtgaggcagt

SEQ ID NO: 336254 - DNA, 301 bp, Homo sapiens
tgcggttgtcaccaccggggtgggggaagcccaaggatgctgctcatcactcacagagcttggggcagccccaccaccgagggcgggccaggagacgccaagagctgtgcctttcatcgcctggggtcccgggcaccgaccgccgccgggtgtcgctccgtgttcgtgtacatgccttctcctgggggtagccctgcttttatttcctgagtgcttcctgggaccatgcatgtccggcaggccctggccaagatccaggcttgctgcgtgcagtccccgcccactgtgtccccctgaggga

SEQ ID NO: 336255 - DNA, 501 bp, Homo sapiens
tgaaggtggtttgtagtcattcactcatccctttacctgtctgtcagtccatccaccaagtcgtcaatctggtcattctaccaacactcatcaaactcctgccagcctcagatgggttgaagacggcaatgctcgactcccacccacgatgaacagcaatgccagctgctgtttatggagtcccatctaaccaggcttgctccaacttctttcatccctatagctgttactatgcccattttacagatgaggacgccgaggctcagagagcctgaggccaggacccagctcaacatgagtggcccttctggctgtggggccacgtccctctccctctggctgccctgaagtcccctccctcctgccttcacaggcaacgtctcgctctccacagcccccgcctcctgggttcaagtgattctcctgcctcagccttccgagtagctgggattacaggcatgcaccaccatgcccggctaattttgtatttttagtagagat

SEQ ID NO: 336256 - DNA, 101 bp, Homo sapiens
gctacacggaaaagaatatggggtatttaatttacatttggggcagtggagatgtgtcctggaagtcgtctttgaaatactttgaaatttatgtcaagacc

SEQ ID NO: 336257 - DNA, 1162 bp, Homo sapiens
agggcagtgaacctaagccaggagctgcttaggcattaaggcttctatacccagaatcgtgtgctaagctttctctccaagtcagcacaacaaagcaaaccagagcatcgtaccaacaacctgaaaggtcacctgactccttccttctcactcccattctgtacttctgcatacgtgggcaggcaagtgaatggtaagtaagcctgcaaacagcctttctttgtatagggaatgacaggcatttcatcagcaactccaggatggcaggccgttatcctgaaacctatcagaacagctcctgcttggcttccaaaatatcacaattttggaaatgtacaaaggttagttttcacagtccttgaagcctctttccaccctggccatagcccatgtcagcagtaacctatgtctttgttttacatatcatgttgttttactcacctggtgcctccagtgccctatagggtccctgagctgtcctgatactctttcttagatcctgtcaaaacactcacttcaacaaattctgcccttggactctgatgggaggttctgataaagaaaattattgaaaaccgcattatttaaatgtggttatatttcagctggacctggaaataaagacgaaatactgcttcgtgactgtgctttaaggaatttttgcttctaggagatgattgtgagccaggcagaggtgaaggagcaggagcaaatagccaaggcacagttcacagtgctggattttcttgtggatatagctgcattgttgttccttctgccttgtccaactgcttcctggtatccctaccctcaccttttcgttatcttttcatctctctaatcattgagaaaaagagtacaaaaagccagattttgcagttccctattttgtattccaggttgaagagtgctctggctgtagagggtccccacgatctgtcatctagtaactcaccagatacataagatattttgcctgctatgaagccattggagaatcaggtccagctgtgtcctacagatttataccctcactttggatgcactgtgaatcttgaaacaagtatgtaaatagaatccagcccctctctgccacagcctcagagcaggattggtaactccaaaagacaccaggacacatcctaattttcttaaattttat

SEQ ID NO: 336258 - DNA, 1628 bp, Homo sapiens
agggcagtgaacctaagccaggagctgcttaggcattaaggcttctatacccagaatcgtgtgctaagctttctctccaagtcagcacaacaaagcaaaccagagcatcgtaccaacaacctgaaaggtcacctgactccttccttctcactcccattctgtacttctgcatacgtgggcaggcaagtgaatggtaagtaagcctgcaaacagcctttctttgtatagggaatgacaggcatttcatcagcaactccaggatggcaggccgttatcctgaaacctatcagaacagctcctgcttggcttccaaaatatcacaattttggaaatgtacaaaggttagttttcacagtccttgaagcctctttccaccctggccatagcccatgtcagcagtaacctatgtctttgttttacatatcatgttgttttactcacctggtgcctccagtgccctatagggtccctgagctgtcctgatactctttcttagatcctgtcaaaacactcacttcaacaaattctgcccttggactctgatgggaggttctgataaagaaaattattgaaaaccgcattatttaaatgtggttatatttcagctggacctggaaataaagacgaaatactgcttcgtgactgtgctttaaggaatttttgcttctaggagatgattgtgagccaggcagaggtgaaggagcaggagcaaatagccaaggcacagttcacagtgctggattttcttgtggatatagctgcattgttgttccttctgccttgtccaactgcttcctggtatccctaccctcaccttttcgttatcttttcatctctctaatcattgagaaaaagagtacaaaaagccagattttgcagttccctattttgtattccaggttgaagagtgctctggctgtagagggtccccacgatctgtcatctagtaactcaccagatacataagatattttgcctgctatgaagccattggagaatcaggtccagctgtgtcctacagatttataccctcactttggatgcactgtgaatcttgaaacaattcattttatacttaaccctttaagtataaagtatatacttcaagtataaagtgtaaggttgcttcatttcatgggcccacccaggatttaaaggtgtattccctgaaagaattggttccttccggtgggttcctggctgacttcaagaatgaagctgcagacacttatggactgggaggaggcccacgagaaaaacaggaagaacaagagaaaggctgaggctctagtggctgctttgcagacttgcagagtccaggatcccccaggaacttccactgattgctacctgttaccagtgttaaagccagggcactttaagaagaattgcccaagccacaagaaaaagccaccttgaccacttttgtggtgaagaccactggagattgcactactgaccaccaagacagagacacaatagcgaatctagaagtggaagtgtgagagatacctgcagctgttaagatgtctgggaatagacacacaaactctctctcccagataagcaacacaaagcagcacagagcaacagagactgaaagtctgcctacctgatcagggaataag

SEQ ID NO: 336259 - DNA, 840 bp, Homo sapiens
aacagactcagtgctctctgtgccagtttgcctgcctgcttgcctgctctttagcaagtaacctataaatattcgtggtctatgaattctctctttgatgatgtatttacttcttggttagctgttttatcacttaatctgccatcagttcaagagataaagtgcatacaaatcgtaacctgactaaaaaagtgggcaccatttcattcatttcttcaacagatattatctagataatagttcaactgctttactagttaaatcttgtagtcaaataggtctagtaatttgacctgttccccattacattttttttgagtgagtattataaaatgtacatggtaaaaaaaaaatttaaatagttcaaaacagtatactataaaaaaagttggccgggggcggtgactcacgcctgtaatcccagcattttgggaggctgaggcgggcggatcacgaggtcaggagatagagcccatcctggctaacatggtgaaaccccgtctctactaaaaatacaaaaaattagccggccgtggcggcgggcaactgtagtcccagctactcggggcaggagaatggcgtgaacctaggaggtggagcttgcagtgagcagagatcgcgccactgcactccagcctgggcgacaaagcgagacgccgtctcaaaaaaaaaaaaaaaaaaaaattccctcgtatatccagctctgagacttttagttccccttccctggaggtaaccagccatcatttttttgttgttgtttactcttccaaagattccatgcattcataaggatggatggatggatagacagacaaaccaaccatcatttcctttaaa

SEQ ID NO: 336260 - DNA, 281 bp, Homo sapiens
tgtgctgtagtaaagtttggagtttaatgcacagagatgtttgaacatttagctcatcctttagtctgtgaccagctttgctacgtaggcattaacctttaatagtgtcagactaaatatacatgccatgatgaatgattatgagtttgcctgaattttcatttacagtgtaaggctctgaaaattggtgtaaaggtctggttcctcctcacttgataatgtgcgtgtcattttcatatgtcaccggattccttgcttaaccgcatgggagaagctatttt

SEQ ID NO: 336261 - DNA, 288 bp, Homo sapiens
catcagatgcttcaagtacaaaccagagctgaggattttgaatagactccatttagtttctcttctggaggcccaacccacacaatcctaatttctctgcctcttaagttgatgccataaccaagtactgtggagacatcaaaagatgaagacaaagaaaacatacagaattggaaggttaggttaaggctgttcactgggactgaataatccctaaaagtctctagtaattctatgattagatgattctaattattcctaaataaatgttcctatattggcaatttg

SEQ ID NO: 336262 - DNA, 233 bp, Homo sapiens
tacaaagtgttagtatgaattatacagttataacgcagtgagaggcgtccctattgatgccataaccaagtactgtggagacatcaaaagatgaagacaaagaaaacatacagaattggaaggttaggttaaggctgttcactgggactgaataatccctaaaagtctctagtaattctatgattagatgattctaattattcctaaataaatgttcctatattggcaatttg

SEQ ID NO: 336263 - DNA, 876 bp, Homo sapiens
catcagatgcttcaagtacaaaccagagctgaggattttgaatagactccatttagtttctcttctggaggcccaacccacacaatcctaatttctctgcctcttaagttgatgccataaccaagtactgtggagacatcaaaagatgaagacaaagaaaacatacagaattggaaggttaggttaaggctgttcactgggactgaataatccctaaaagtctctagtaattctatgattagatgattctaattattcctaaataaatgttcctatattggcaatttgaatattttctttttatacatacacatgtgcatgtgcattttcctctacacatacacacacactcacaaatggttaattctctaaacaagatatacattggtaatcattgaattatgattattttctagtaaagctttttaagttttaggtgcttttctgataatccactgacctagagtattgccaactttgcaaattatgaggatattgggtaatttatctgcattaactaaatatttttaaactgttgctattaactctttctgtatctgattataaaacaccatgtcaccagatttattgggggtggagttgagatgcatgtttcatatgccattcctaatatttaagttggtaattttaaaagtacacttaaatatttctattgtcaggagtagaaatgtttctttgcacatcaattcctctgttatatctttctccaacagttgaaaatcatgacctaaggcaaaatgtaaattttatgcctctcctaatagatgtcgtgtttatagaattaggctgagtgttcctattactgtgttgtcctcagtgaatacttaaactgcttttgcttactacagtcaactc

SEQ ID NO: 336264 - DNA, 1019 bp, Homo sapiens
  misc_feature (940)..(940): n is a, c, g, or t
tacaaagtgttagtatgaattatacagttataacgcagtgagaggcgtccctattgatgccataaccaagtactgtggagacatcaaaagatgaagacaaagaaaacatacagaattggaagccctgcctccccaaggcacagacagagtctcctccgtcttacttgagctccaccaaactcaggaagcgtgcaaatactttcatcctgccagcttcactctggaactttgctttcttggctactatggaagatctaactctagaagtctccatcaacaatttggaatgatttttgcttacctgtgacacccagaaaaaaacaacgttcacaattttacacagaaatcagtgacatgcgtggaaagaaaatggaacagaaggtagaaacctgcgttctggaattagactgccggcgtttaaagctcatctctgccactaaccacttatatgatgttaggcaaattagtttatctctctgtgctactattttctcaaaagtaaaatgtgagttgcaatgtagtttgtttaactcgaaaattttgagatttgaatataacattcaaacgctaagatgtgtacctgacacagaataaatgctcaataacaataatctcttttttaaaaatgcacaaaatgtagaaagcaatacattgaattccattctttaaaacgagcacatatctaaatgctgagtaatttcttacggagaccttacagatacagttcttttttctattgtttccccggaattattcagaaaagcattttctttaagcaagttctaatggctgtcactatgatttaaagctttctacagaatctttcacatagggtatgcctgcctaaattactttggacctagttttagataaacttccataacaagtgttgataaacgcatgagtaagtaaataaagcaaaacagaatttaacaaaaanaaaaaactggtctccttgcgccccagtggtggagctttgaggaaccttacctttaggggagggttaatcatgatcctcg

SEQ ID NO: 336265 - DNA, 954 bp, Homo sapiens
  misc_feature (875)..(875): n is a, c, g, or t
tacaaagtgttagtatgaattatacagttataacgcagtgagaggcgtccctattgatgccataaccaagtactgtggagacatcaaaagatgaagacaaagaaaacatacagaattggaagccctgcctccccaaggcacagacagagtctcctccgtcttacttgagctccaccaaactcaggaagcgtgcaaatactttcatcctgccagcttcactctggaactttgctttcttggctactatggaaaaaaacaacgttcacaattttacacagaaatcagtgacatgcgtggaaagaaaatggaacagaaggtagaaacctgcgttctggaattagactgccggcgtttaaagctcatctctgccactaaccacttatatgatgttaggcaaattagtttatctctctgtgctactattttctcaaaagtaaaatgtgagttgcaatgtagtttgtttaactcgaaaattttgagatttgaatataacattcaaacgctaagatgtgtacctgacacagaataaatgctcaataacaataatctcttttttaaaaatgcacaaaatgtagaaagcaatacattgaattccattctttaaaacgagcacatatctaaatgctgagtaatttcttacggagaccttacagatacagttcttttttctattgtttccccggaattattcagaaaagcattttctttaagcaagttctaatggctgtcactatgatttaaagctttctacagaatctttcacatagggtatgcctgcctaaattactttggacctagttttagataaacttccataacaagtgttgataaacgcatgagtaagtaaataaagcaaaacagaatttaacaaaaanaaaaaactggtctccttgcgccccagtggtggagctttgaggaaccttacctttaggggagggttaatcatgatcctcg

SEQ ID NO: 336266 - DNA, 947 bp, Homo sapiens
  misc_feature (868)..(868): n is a, c, g, or t
catcagatgcttcaagtacaaaccagagctgaggattttgaatagactccatttagtttctcttctggaggcccaacccacacaatcctaatttctctgcctcttaagttgatgccataaccaagtactgtggagacatcaaaagatgaagacaaagaaaacatacagaattggaagaagatctaactctagaagtctccatcaacaatttggaatgatttttgcttacctgtgacacccagaaaaaaacaacgttcacaattttacacagaaatcagtgacatgcgtggaaagaaaatggaacagaaggtagaaacctgcgttctggaattagactgccggcgtttaaagctcatctctgccactaaccacttatatgatgttaggcaaattagtttatctctctgtgctactattttctcaaaagtaaaatgtgagttgcaatgtagtttgtttaactcgaaaattttgagatttgaatataacattcaaacgctaagatgtgtacctgacacagaataaatgctcaataacaataatctcttttttaaaaatgcacaaaatgtagaaagcaatacattgaattccattctttaaaacgagcacatatctaaatgctgagtaatttcttacggagaccttacagatacagttcttttttctattgtttccccggaattattcagaaaagcattttctttaagcaagttctaatggctgtcactatgatttaaagctttctacagaatctttcacatagggtatgcctgcctaaattactttggacctagttttagataaacttccataacaagtgttgataaacgcatgagtaagtaaataaagcaaaacagaatttaacaaaaanaaaaaactggtctccttgcgccccagtggtggagctttgaggaaccttacctttaggggagggttaatcatgatcctcg

SEQ ID NO: 336267 - DNA, 405 bp, Homo sapiens
gatgtgggacttgcagagctaaaacgaggatagtcttgtgaaaactgggatagttgatcatcctaccttctactgaatatttagatcatttcaaatatttacttacagaaacaatactgtgctgaaaattttggtgcctaggtatttagccacattttttttttcattatttccttaggtgagagtcgtagaaatggaattaatggctcaatgactgtggacatgttttggagctcatggcagtgctcatggttctttattgcattttttgctgtattcagctagactggcaggagtctgcctggacatttgcaccacctctgcctccgcaagttcttagggagatgagccaaagacttgttcttcactagctgcaacttgtgttccaaatctttagctggccag

SEQ ID NO: 336268 - DNA, 508 bp, Homo sapiens
tccctgaccaggaggctcagggtgagagtggatgaagcacaggcaaccagggattcgcaatgaatattttcgttattcatacccgtgtaagacagctggcccctccactcccgcctctaacccgaccctttgcgatttgtaggggttgtatcgtatgtttttgagaacggagtctcgctctgtcgcccaggctggagtgcagtggcgggacctcggctcactgcaagctccgcctcccgggttcacgccattctcctgcctcagcctcccaagtagctgggactacaggcgcccgcacctacgcccggctaattttttgtatttttagtagagacggggtttcaccgtgttcgccaggatagtctccatctcttgacctcgtgatctgcctgcctcagcctcccagtgctgggattacaggcgtgagccaccgcgcctggccaaaatatataaccttaagtgtaagtttactaactttggaaagtacatacaccagcataaaccaacc

SEQ ID NO: 336269 - DNA, 97 bp, Homo sapiens
agacagagaggccccagggcatcgtggctaaggttgggctcccctactccacagcctccaggaggggctgaggtctggaaacatgggcgggggtggg

SEQ ID NO: 336270 - DNA, 606 bp, Homo sapiens
ggaaaagctgcaggtcccgcaagacacagagcaaccctgcaagccaggtcaccttccctcttctctgctgtccgactggccctccaccatgtgacattcaaaagctcaagttacttaacctctcaaaactcagcatccttttctgtacagtggggaagatactggactgttgtgaggattaagtgaggagagtggcccaatgaggttgacagttattactgtcattgtcattattgccttctcacaggcaggcgtgccacagtcattttactgaagctgcttcagtgggtcctgaattaggccctgtcctttgggagagacagtcctggttcaacacacagctccctgcccagggcagcttgggagtgtgggccagtttcgcctttagaaccacaattctctgatatgtgcaatgagagaattaattatagactcaaaggattgcatgcagacacacacagatacaaacacatacacacaacacacagagttacacacagacatgctcacaatacacagaaatacaccaaaagatactcctcgagaagagcaacccagacacatattgtcagatcacccaggttgaatgaggaaaactgttaggcg

SEQ ID NO: 336271 - DNA, 389 bp, Homo sapiens
ggaaaagctgcaggtcccgcaagacacagagcaaccctgcaagccaggtcaccttccctcttctctgctgtccgactggccctccaccatgtgacattcaaaagctcaagttacttaacctctcaaaactcagcatccttttctgtacatgtgggccagtttcgcctttagaaccacaattctctgatatgtgcaatgagagaattaattatagactcaaaggattgcatgcagacacacacagatacaaacacatacacacaacacacagagttacacacagacatgctcacaatacacagaaatacaccaaaagatactcctcgagaagagcaacccagacacatattgtcagatcacccaggttgaatgaggaaaactgttaggcg

SEQ ID NO: 336272 - DNA, 478 bp, Homo sapiens
ttatagcaccagtggatcatttggttgtatgcatattattgtaccttctctgctacaaaatatattcctttgtcctaaggtgtgttacaaagaacattaggcattctatgcatctttggatagtttaatggccaaggcattgatggcaggagagtcaaagccacaggtggaaaacacatttatcccagtaagaacaaattgctattcttccactgtagagagggtaaacaatgtgccattacgttgccaattgaatgcctcaatcatgtcaagggctgaacatctatgactgtttctgaaaggtcaaacattcaacagaggctgtagctagaactgccttaatgataagagatcatgctgaattacccatgcaaaaccttaatacttgacacttatcactactttattcaagagcctattgtgcaagcataagtggctggtcgacgcggccgcgaatttagtagtagtaggcggccgc

SEQ ID NO: 336273 - DNA, 98 bp, Homo sapiens
gggaacagcaacagagctctattagacacctactatgtgccagcgccaagcacttcacgaaataatagtaaaagcatctatttattgaacacctacta

SEQ ID NO: 336274 - DNA, 360 bp, Homo sapiens
attcaatttatttttcaaagtgtttctggacaaagtaagacatttaataacatggaaagtaaccgctgaaaggaacaagaaaaggaactgcacctacagcaaaatctcacccaccagctcttccgcggcccccgtcacaggaaggtcatctccactcacaaacaagaagagaaacccaactggcggggaacacacaatcactgccggaacaagactccggggcttccctctgcatggaaaacaggactgagggttcttacccaataaacaatctcttcaaaacataagcaaaaggcaatacagatttataaaaaacacaagaaagcaaggcggccagaagcagcagccaacattctgagg

SEQ ID NO: 336275 - DNA, 492 bp, Homo sapiens
ataaagtgtttctcatctctcatgtgttttgcctgttgtgtgtaatgagcggtttcgctgtgggtgctcctttcatttctggctaacacattagagtgtgtttatgtaaattgctgtgatactggtcagcagtcacagccagaaaacataaaacatgtgggcattacacactgacacattagctctttctaaagaagaacatgtcccattctgaaaagaaaattattgctttgtttttgatattgagtctgtattaaaattttttttttatttttgagacagggtctcactctgttgcccaggctggagtgcagtggtgtgatcatagctcactgcagccttgaactctgggactcaagagttcctcctgcctcagcctcttgagtagctgggactacaggcacatgccaccatgcccagctaatttttctgttttttgtagagacaggatttcgctgtggtgctcaggctggtctccaactcctgggctca

SEQ ID NO: 336276 - DNA, 379 bp, Homo sapiens
caatttccttctttgctttccctgagcccagcccccttcactctgaagagagccaggtgtggggcactagtgaacaggccacacagtgcccccagcacacctcaacacagcggcattgttaaggcatttggactctctgagacagatggaactgtagctaccagttgttggtctgtggtctctatttggattctgaagataggtctggtaattaagatgtggcctttcaatagtttacctggaaacattctctacatgcatagagagaagttcagggatgctggctcaaccacaagagccagagacccttctgggactatagtgaatatccctggagagaccaatcaggaatttcctggaggtgagggtacaggactgg

SEQ ID NO: 336277 - DNA, 467 bp, Homo sapiens
agtgagtaaagtaggaccagttttaaacaagcattagtgtgttttgctaggtggaggctctgactataatttcatcactttaaagtgacattacttcagtgaattgaaactggcagagatattttactgattcttatttggatgtaaaaaacagcagtgcacttgaattttaaactcagattactttttagagaaagcacaagagttcttaactcttgcaggcttttgaaagcccttcttttcaggaatacttgcaattttgatcctttcagttggtaaaaatacattgcacactcattaggttggttggaaataagttgcagcttactgaagatgttattaaagtagagaactgttttgaactttggtagcgtaaaactgtaaatattatattagcaaatgtggcttatcgaagtaccagtgtgaaataatgacattttaaagttgatgccctgaggatgtcagtg

SEQ ID NO: 336278 - DNA, 111 bp, Homo sapiens
tgtgtgtgtgtgagtgtgtgtgtgtgtgtgtgtgtcacaagagcttggggcaggaatagggctgtacgacacagtggggcaggagcaggaacctgggtcctgtgtctgtgc

SEQ ID NO: 336279 - DNA, 757 bp, Homo sapiens
  misc_feature (68)..(68): n is a, c, g, or t
  misc_feature (70)..(70): n is a, c, g, or t
  misc_feature (83)..(83): n is a, c, g, or t
  misc_feature (93)..(93): n is a, c, g, or t
  misc_feature (124)..(124): n is a, c, g, or t
  misc_feature (131)..(131): n is a, c, g, or t
  misc_feature (159)..(159): n is a, c, g, or t
  misc_feature (213)..(213): n is a, c, g, or t
  misc_feature (217)..(217): n is a, c, g, or t
actgctttatgatctggtgctcctgttattggggcaaaaatatttagattagttagctcttcttgtgnantgatcccttaccnttatgtatgnccttcttttgtctcttctgatctttgttggnttaaagnctgttttatcagagactaggattttgcnacccctgcctttttttgttttccatttgcttggtagatcttcctccatcccttnattntaagcctatgtgtgtctctgcacgtgagatgggtttcctgaatacagcacactgatgggtcttgactctttatccaatttgccagtctgtgtcttttaattggagcatttagcccatttacatttaaggttaatattgttatgtgtgaatttgatcctgtcattatgatgttagctggttattttgctcgttagttgatgcagtttcttcctagcctcgatagtctttacaatatattttgaaggtgcagattatgaaagtcaccttctgcgtgagaacacagagctggcaagtattttgagggtaccatgaagtgaaatggatccttaggacttgaagatgtgatgcagatttgtttctttcttacactgaagattggtgtgatggcagagttttaaaatcactgttaaatactgatattcagaaattttcaagccataattcatatatatgtattttttcctcccaagccatgtctattacagttttgtctgtaagcagtggtgctttttaaaataaagaacacttatacccatggtt

SEQ ID NO: 336280 - DNA, 7733 bp, Homo sapiens
gcggccgcggaggcggaggcagccgcggaggcggaggcggccggcggggggtggcgaggggcgccgggcccccgcggacctgtcgtcctcggcccgtcctccggccccggccccgcgcggctgaggaggcgcggccaggaccatgtcggcgggcggccgtgacgaggagcggcggaagctggccgacatcatccaccactggaacgccaaccggctggacctgttcgagatcagccagccgaccgaggatttggagttccatggagtgatgagattttattttcaagataaagctgctggaaactttgcaacaaaatgtattcgggtctctagtactgccaccactcaagatgtaatcgaaacgctcgcggagaaatttcgacctgatatgcgaatgctgtcctctcccaagtattcactctatgaagtgcatgtcagcggagaaagaagattggatatagatgagaaacctctagttgtacaactgaattggaacaaagatgatcgggaaggcagatttgttcttaagaatgagaatgacgccattcctcctaaggctcaaagtaatggacctgaaaagcaggaaaaagaaggggttatccagaacttcaagagaactctctcaaagaaagaaaagaaggaaaaaaagaagagagaaaaagaggcattgcgacaggcatctgataaagatgatagacctttccaaggggaggatgttgaaaattctcgactggctgctgaggtttacaaagacatgccggaaaccagctttactcgaaccatttctaatcctgaggtggttatgaaacgacggaggcagcaaaaattggaaaagagaatgcaggaatttcggagctcagatgggcggcctgattcaggtggaacattgagaatttatgcagatagtttaaaaccaaatattccctacaagacaatcctgctgtctactacagatcctgcagactttgctgtggctgaagctttagagaagtatggtctggaaaaagaaaaccctaaggattactgcatcgcccgggttatgcttcctcctggagcccagcattctgatgaaaagggtgctaaagaaattattcttgatgatgatgagtgtcctttacaaatcttcagggaatggccaagtgacaaagggattttagtctttcagttgaagaggaggccaccagaccacatcccaaagaaaaccaagaaacacttggaaggcaagacacccaagggaaaggagagagctgacgggtctggctatggctccacccttcctccggagaagctgccctatttagtagagttaagcccagggagaaggaatcactttgcctactacaactatcacacttacgaagatggttctgactctagagataagccaaagctttaccgccttcagttaagtgttactgaagttgggacagaaaagttggatgacaactctatccagttgtttggcccaggaattcagccccatcactgtgaccttaccaacatggatggagtggtcactgtgacgcccagaagtatggacgcagaaacctacgtggaaggccagcgcatctcagaaaccaccatgctgcagagtggcatgaaagtgcagtttggggcgtcccatgtatttaagtttgtggaccccagtcaggatcatgctcttgcaaaaagatctgtggatggaggcctgatggttaagggcccaagacataaacctggaattgttcaggagacaacttttgatttgggaggagatattcatagtgggacagcattaccgacaagcaagagcaccactaggctggacagcgacagagtgtcgtctgcctctagcacagccgagcggggaatggtgaagccgatgatcagagtagaacagcagccagattatcgcaggcaagaaagcagaacacaggatgcttctgggcctgagctgatactacctgcaagcattgaattcagggaaagttctgaagattcatttttgtctgccattataaattatactaatagctctacagtccactttaagttgtcccctacatatgtattatatatggcatgccggtatgtattgtccaaccagtacagacctgacatcagccctacagagcgcacacataaagtcattgcagtcgtcaacaagatggtgagcatgatggagggtgtcatccagaaacagaagaatattgcaggggcacttgccttctggatggcaaatgcatctgaacttctcaacttcattaagcaagaccgagaccttagtcggatcacactggatgctcaagatgttttagcacatttggttcaaatggcatttaaatacttggttcactgtcttcaatcagaacttaataattacatgccagcctttctagatgaccctgaagagaacagtctgcaacgaccaaaaatagatgatgtgctgcacacgctcacaggagccatgtccttgctacgacgctgcagagtcaatgccgccctgaccatccagctcttctctcagctcttccacttcatcaatatgtggctgttcaatagattggtgaccgacccagattcggggctgtgctcccattactggggtgcgattatccgtcagcagttgggccatattgaagcctgggctgagaagcaggggctggaactggctgcggactgtcatctgagcaggatcgtgcaggcaacgactttgcttaccatggataagtatgcacctgatgacattccaaatataaacagcacctgctttaagttaaattcattacaacttcaagccttattacagaactatcactgtgcacctgatgagccttttatcccaacggatcttatagaaaatgtagtgactgtggctgaaaacactgccgatgagctggcccgcagtgatggaagggaagtgcagttggaggaggatcctgatctgcagctgccgtttcttttgccagaagatggttattcttgtgatgttgtcagaaacattccaaatggtttacaagaatttttagaccctctgtgccagagaggattttgcaggttaattcctcacacacgttcaccaggtacttggacaatatattttgaaggtgcagattatgaaagtcaccttctgcgtgagaacacagagctggctcagcctctgaggaaagaacctgaaataatcactgtgaccctaaaaaagcagaatggaatgggccttagcattgttgcagcaaagggtgctggtcaagataaactaggaatctacgtgaagtcggttgtgaaaggaggtgctgcagatgtggatggacgtctagctgcaggtgatcagctcctcagtgtggatggacgaagtctggttggactctctcaggaaagggcggcagaactcatgacaagaacaagctctgtggtgacactggaagtagcaaagcagggtgccatctaccacggtctggccacccttctcaatcagccatcccccatgatgcagagaatttcagatcgtcgtggctcaggtaaaccccgaccaaagagtgaaggctttgagctctataataattcaactcaaaatgggtctcctgagagtcctcagctgccttgggcagaatatagtgaaccaaagaaattgcctggtgatgacagactgatgaaaaatagagctgatcaccgttccagccccaacgtagcaaatcagcctcctagtcctggagggaaaagtgcatatgcctctggaacaacagcgaagataacatctgtctctactggaaacctctgcactgaggagcagacgcctccgcctagacctgaagcctaccccatccccactcagacgtacaccagagagtattttaccttcccagcttccaaatcccaggatcggatggctcctcctcagaaccagtggccaaattatgaggaaaagccacatatgcacacagatagtaatcattccagtattgcaattcagcgtgttacacgttcccaagaagaacttcgagaagataaagcttaccaacttgagcggcatcgaatagaggcagctatggaccgaaagtctgatagtgatatgtggataaatcagagctcctcactggactccagtacctctagccaggagcatctgaaccattcctctaagtcggtcacccctgcttccacactgaccaaaagtggccctggccgttggaaaacaccagcagccataccggccacccctgtggccgtctcccagccaatccgaacagacctgcctccgccacccccgccacctccagtccactatgccggtgatttcgatggaatgtccatggatttgcctctcccaccacccccttccgccaaccagatagggctgccgtctgcgcaggtggctgctgctgaacggagaaagagagaagaacatcagcgttggtatgagaaggagaaggcccgcctggaggaggagcgggagaggaagcggagagagcaggagaggaagttgggccagatgcgcactcagtccttaaaccctgctccgttttctcccctgactgcacagcagatgaagcccgaaaagccttccacactccagcggccacaggaaacagtcattcgggagctgcagcctcagcagcagccccgcacgatcgagcgcagagacttgcagtacattacagtcagcaaagaggagctttcctcgggggacagtctgtcccccgacccgtggaagcgggacgccaaggagaagctggagaagcagcagcagatgcacatcgtggacatgctgagcaaggagatccaggagctccagagcaaaccggaccgcagcgccgaggagagcgaccggctgcgcaagctcatgctggagtggcagttccagaagagactccaggagtcgaagcagaaggacgaagatgacgaggaggaggaggacgatgatgtggacaccatgctgatcatgcagcgcctggaggctgaacgaagagcgaggactgctatgccagcaatctctgttctagatttgttgcaggacgaggagcggaggcggcagcagcagttagaagagatgcgcaagcgggaagcggaagaccgagcgaggcaagaggaagagcgccggcggcaggaggaggagcgaacaaaacgagacgctgaagaaaagaggcgacaggaagaagggtattacagccgcctggaagccgagaggcgcagacagcacgacgaggcggcgcgcaggttgctggagcccgaggcgcccggtctgtgccgccctccgcttccccgggactacgagcccccgtccccgtcccccgcccggcgcccctcctcccccgcctcagcgaaacgcctcctacctcaaaacacaggtcctctcccccgactcgctgttcactgccaagtttgttgcatacaatgaggaggaggaggaggaggactgcagcctagcaggaccaaactcttacccaggatctactggagcagctgttggagcccatgacgcctgtcgggatgcaaaagagaagcgctctaaaagccaagatgcagattcacctggaagttctggggcccctgaaaacttgacattcaaggaacgccagcgtcttttttcacaaggtcaagatgtatccaataaagtgaaagcttctcgtaaattaacagaactggagaatgaactgaacacaaagtgaaagaaaatgaggagaacactttgtatttaccccaaaatcttttcagttgtgggtttgtaggtgcgagtttgaagaggaaaagaggaagggggttatatttctaagtgatttacaatttctgtttctaaaattgttgggatttagaaatgtttcaattccaagaaattttattttactttaccatgagattgccatttatgtaatttaaacactgtctagtttcttaattatctaactcacacgagggtaagttttttgttggtttcttttttggagtcctgagttcaaaggggacagaactaagggcaggagaagagaatggatgtgtcttctctcccatcttcccctcatcatcgaccgaggagcacaaagaagttctgtttctgtttttttcagaaactttattttagctgtcaagcagagaatagcttgaactattcagactattgttggcactgtttagtagtgaccacacgctcttctacccgggaaggaacatatgacgacatgctcctcccatgtcccctgatggtgtctgttcccacaatatccttctagtctgcatcgtgaagtggcttaggccaaagcttcctgtgtgatgacgcacgtccgagactgttccatctcattcctcgcaaatttgagctcttctgatcaattctaaatatttgattaattttaattctgaaagaaaattttgaggatttaagcttaggggattttatttttataaataccagattattgttagacttaataaatcactgttaaatttaaagatgacagttaccttggaaagttcactaatacttcgctccaaggcgtctgtaaaagaagatatctttattggagcaatgttcatgtgactgggaatgacagaagaatgggagatgagtagggacccctcaagcacagctgtcactcagaaattttaaatttgaaaaagaaatcgattttcatctgtatgccgtcaaggaaggaattcagttacagggcatctgtaacttaaatattgtaagaataactcatatggaagttcaagctatttttatactataatagagttatttaattttaatttgttgaattattagttaccactgtcatttcttcagctatggatatgtggctgatgttggggagacggacctcagtgtgttttatattgtctggtgttaagatgataaattactttgtgattacaagcaaattttctatttgacaaagcccttggtggagtccaaatgatttttctgtaccatattgttctcttacacatacgtatgttaggaaaataggcacactttcaaagagaatgttctcttacacatacgtatgttaggaaaatagacacattttcaaagagaatgttctcttacatatgttaggaaaataggcacactttcaaagagaggtataggggctttttactgccttcgaaatcacttttaataaaagttgtatgataaatcattaaaaatgcgagtgtaaatatttttttttacctctatcagggtttttatttgaaagtgtgctcttaccatttccttgtttgagtaagagagtgaatggttctgagtgtttaggaaggatttgcttgcttgcagcagaagttctaggaaaagcaggcacctcccaaatatcttgaggacactggcagccttatggtgactaaatccacactttctttaaagagatgcagatgaattacttttctgttaatatatagaaaaatacacaggagaacatgcagatacatgtaaatatctacatacagggatatttgtatgtgtggttgtgaaacccatacacaagtggatttggccatctttgggcagtgaggtcaaatgtgaatatgtgtaaaagtgcttttcagaactgcattactatgagaaaacatcaaaactgctgtagttttccatttctactgtatttcagttgcaacctatttttaataaactttgtatgtatttaagtgtatttgctattgttttgaaagtgctgacaaagtttatatttgtaacatcagccttcctcgcccatctctttccatctgtctcttcttcattaaacacttactgagtatga

SEQ ID NO: 336281 - DNA, 6878 bp, Homo sapiens
ctcatgacttgcgtccgatgcagcgtggaacattgagacagtcctgtctatgtcgaaatcccagtttccctacaagacgttccggtcgtctacaaccgatccggcagactgcgctgtggccgcagcccgtcagaagtctggttcgtaactggaaaacccttgcggttactgcatcgcccgggttatgcttcctcctggagcccagcattctgatgaaaagggtgctaaagaaattattcttgatgatgatgagtgtcctttacaaatcttcagggaatggccaagtgacaaagggattttagtctttcagttgaagaggaggccaccagaccacatcccaaagaaaaccaagaaacacttggaaggcaagacacccaagggaaaggagagagctgacgggtctggctatggctccacccttcctccggagaagctgccctatttagtagagttaagcccagggagaaggaatcactttgcctactacaactatcacacttacgaagatggttctgactctagagataagccaaagctttaccgccttcagttaagtgttactgaagttgggacagaaaagttggatgacaactctatccagttgtttggcccaggaattcagccccatcactgtgaccttaccaacatggatggagtggtcactgtgacgcccagaagtatggacgcagaaacctacgtggaaggccagcgcatctcagaaaccaccatgctgcagagtggcatgaaagtgcagtttggggcgtcccatgtatttaagtttgtggaccccagtcaggatcatgctcttgcaaaaagatctgtggatggaggcctgatggttaagggcccaagacataaacctggaattgttcaggagacaacttttgatttgggaggagatattcatagtgggacagcattaccgacaagcaagagcaccactaggctggacagcgacagagtgtcgtctgcctctagcacagccgagcggggaatggtgaagccgatgatcagagtagaacagcagccagattatcgcaggcaagaaagcagaacacaggatgcttctgggcctgagctgatactacctgcaagcattgaattcagggaaagttctgaagattcatttttgtctgccattataaattatactaatagctctacagtccactttaagttgtcccctacatatgtattatatatggcatgccggtatgtattgtccaaccagtacagacctgacatcagccctacagagcgcacacataaagtcattgcagtcgtcaacaagatggtgagcatgatggagggtgtcatccagaaacagaagaatattgcaggggcacttgccttctggatggcaaatgcatctgaacttctcaacttcattaagcaagaccgagaccttagtcggatcacactggatgctcaagatgttttagcacatttggttcaaatggcatttaaatacttggttcactgtcttcaatcagaacttaataattacatgccagcctttctagatgaccctgaagagaacagtctgcaacgaccaaaaatagatgatgtgctgcacacgctcacaggagccatgtccttgctacgacgctgcagagtcaatgccgccctgaccatccagctcttctctcagctcttccacttcatcaatatgtggctgttcaatagattggtgaccgacccagattcggggctgtgctcccattactggggtgcgattatccgtcagcagttgggccatattgaagcctgggctgagaagcaggggctggaactggctgcggactgtcatctgagcaggatcgtgcaggcaacgactttgcttaccatggataagtatgcacctgatgacattccaaatataaacagcacctgctttaagttaaattcattacaacttcaagccttattacagaactatcactgtgcacctgatgagccttttatcccaacggatcttatagaaaatgtagtgactgtggctgaaaacactgccgatgagctggcccgcagtgatggaagggaagtgcagttggaggaggatcctgatctgcagctgccgtttcttttgccagaagatggttattcttgtgatgttgtcagaaacattccaaatggtttacaagaatttttagaccctctgtgccagagaggattttgcaggttaattcctcacacacgttcaccaggtacttggacaatatattttgaaggtgcagattatgaaagtcaccttctgcgtgagaacacagagctggctcagcctctgaggaaagaacctgaaataatcactgtgaccctaaaaaagcagaatggaatgggccttagcattgttgcagcaaagggtgctggtcaagataaactaggaatctacgtgaagtcggttgtgaaaggaggtgctgcagatgtggatggacgtctagctgcaggtgatcagctcctcagtgtggatggacgaagtctggttggactctctcaggaaagggcggcagaactcatgacaagaacaagctctgtggtgacactggaagtagcaaagcagggtgccatctaccacggtctggccacccttctcaatcagccatcccccatgatgcagagaatttcagatcgtcgtggctcaggtaaaccccgaccaaagagtgaaggctttgagctctataataattcaactcaaaatgggtctcctgagagtcctcagctgccttgggcagaatatagtgaaccaaagaaattgcctggtgatgacagactgatgaaaaatagagctgatcaccgttccagccccaacgtagcaaatcagcctcctagtcctggagggaaaagtgcatatgcctctggaacaacagcgaagataacatctgtctctactggaaacctctgcactgaggagcagacgcctccgcctagacctgaagcctaccccatccccactcagacgtacaccagagagtattttaccttcccagcttccaaatcccaggatcggatggctcctcctcagaaccagtggccaaattatgaggaaaagccacatatgcacacagatagtaatcattccagtattgcaattcagcgtgttacacgttcccaagaagaacttcgagaagataaagcttaccaacttgagcggcatcgaatagaggcagctatggaccgaaagtctgatagtgatatgtggataaatcagagctcctcactggactccagtacctctagccaggagcatctgaaccattcctctaagtcggtcacccctgcttccacactgaccaaaagtggccctggccgttggaaaacaccagcagccataccggccacccctgtggccgtctcccagccaatccgaacagacctgcctccgccacccccgccacctccagtccactatgccggtgatttcgatggaatgtccatggatttgcctctcccaccacccccttccgccaaccagatagggctgccgtctgcgcaggtggctgctgctgaacggagaaagagagaagaacatcagcgttggtatgagaaggagaaggcccgcctggaggaggagcgggagaggaagcggagagagcaggagaggaagttgggccagatgcgcactcagtccttaaaccctgctccgttttctcccctgactgcacagcagatgaagcccgaaaagccttccacactccagcggccacaggaaacagtcattcgggagctgcagcctcagcagcagccccgcacgatcgagcgcagagacttgcagtacattacagtcagcaaagaggagctttcctcgggggacagtctgtcccccgacccgtggaagcgggacgccaaggagaagctggagaagcagcagcagatgcacatcgtggacatgctgagcaaggagatccaggagctccagagcaaaccggaccgcagcgccgaggagagcgaccggctgcgcaagctcatgctggagtggcagttccagaagagactccaggagtcgaagcagaaggacgaagatgacgaggaggaggaggacgatgatgtggacaccatgctgatcatgcagcgcctggaggctgaacgaagagcgaggactgctatgccagcaatctctgttctagatttgttgcaggacgaggagcggaggcggcagcagcagttagaagagatgcgcaagcgggaagcggaagaccgagcgaggcaagaggaagagcgccggcggcaggaggaggagcgaacaaaacgagacgctgaagaaaagaggcgacaggaagaagggtattacagccgcctggaagccgagaggcgcagacagcacgacgaggcggcgcgcaggttgctggagcccgaggcgcccggtctgtgccgccctccgcttccccgggactacgagcccccgtccccgtcccccgcccggcgcccctcctcccccgcctcagcgaaacgcctcctacctcaaaacacaggtcctctcccccgactcgctgttcactgccaagtttgttgcatacaatgaggaggaggaggaggaggactgcagcctagcaggaccaaactcttacccaggatctactggagcagctgttggagcccatgacgcctgtcgggatgcaaaagagaagcgctctaaaagccaagatgcagattcacctggaagttctggggcccctgaaaacttgacattcaaggaacgccagcgtcttttttcacaaggtcaagatgtatccaataaagtgaaagcttctcgtaaattaacagaactggagaatgaactgaacacaaagtgaaagaaaatgaggagaacactttgtatttaccccaaaatcttttcagttgtgggtttgtaggtgcgagtttgaagaggaaaagaggaagggggttatatttctaagtgatttacaatttctgtttctaaaattgttgggatttagaaatgtttcaattccaagaaattttattttactttaccatgagattgccatttatgtaatttaaacactgtctagtttcttaattatctaactcacacgagggtaagttttttgttggtttcttttttggagtcctgagttcaaaggggacagaactaagggcaggagaagagaatggatgtgtcttctctcccatcttcccctcatcatcgaccgaggagcacaaagaagttctgtttctgtttttttcagaaactttattttagctgtcaagcagagaatagcttgaactattcagactattgttggcactgtttagtagtgaccacacgctcttctacccgggaaggaacatatgacgacatgctcctcccatgtcccctgatggtgtctgttcccacaatatccttctagtctgcatcgtgaagtggcttaggccaaagcttcctgtgtgatgacgcacgtccgagactgttccatctcattcctcgcaaatttgagctcttctgatcaattctaaatatttgattaattttaattctgaaagaaaattttgaggatttaagcttaggggattttatttttataaataccagattattgttagacttaataaatcactgttaaatttaaagatgacagttaccttggaaagttcactaatacttcgctccaaggcgtctgtaaaagaagatatctttattggagcaatgttcatgtgactgggaatgacagaagaatgggagatgagtagggacccctcaagcacagctgtcactcagaaattttaaatttgaaaaagaaatcgattttcatctgtatgccgtcaaggaaggaattcagttacagggcatctgtaacttaaatattgtaagaataactcatatggaagttcaagctatttttatactataatagagttatttaattttaatttgttgaattattagttaccactgtcatttcttcagctatggatatgtggctgatgttggggagacggacctcagtgtgttttatattgtctggtgttaagatgataaattactttgtgattacaagcaaattttctatttgacaaagcccttggtggagtccaaatgatttttctgtaccatattgttctcttacacatacgtatgttaggaaaataggcacactttcaaagagaatgttctcttacacatacgtatgttaggaaaatagacacattttcaaagagaatgttctcttacatatgttaggaaaataggcacactttcaaagagaggtataggggctttttactgccttcgaaatcacttttaataaaagttgtatgataaatcattaaaaatgcgagtgtaaatatttttttttacctctatcagggtttttatttgaaagtgtgctcttaccatttccttgtttgagtaagagagtgaatggttctgagtgtttaggaaggatttgcttgcttgcagcagaagttctaggaaaagcaggcacctcccaaatatcttgaggacactggcagccttatggtgactaaatccacactttctttaaagagatgcagatgaattacttttctgttaatatatagaaaaatacacaggagaacatgcagatacatgtaaatatctacatacagggatatttgtatgtgtggttgtgaaacccatacacaagtggatttggccatctttgggcagtgaggtcaaatgtgaatatgtgtaaaagtgcttttcagaactgcattactatgagaaaacatcaaaactgctgtagttttccatttctactgtatttcagttgcaacctatttttaataaactttgtatgtatttaagtgtatttgctattgttttgaaagtgctgacaaagtttatatttgtaacatcagccttcctcgcccatctctttccatctgtctcttcttcattaaacacttactgagtatga

SEQ ID NO: 336282 - DNA, 7900 bp, Homo sapiens
gcggccgcggaggcggaggcagccgcggaggcggaggcggccggcggggggtggcgaggggcgccgggcccccgcggacctgtcgtcctcggcccgtcctccggccccggccccgcgcggctgaggaggcgcggccaggaccatgtcggcgggcggccgtgacgaggagcggcggaagctggccgacatcatccaccactggaacgccaaccggctggacctgttcgagatcagccagccgaccgaggatttggagttccatggagtgatgagattttattttcaagataaagctgctggaaactttgcaacaaaatgtattcgggtctctagtactgccaccactcaagatgtaatcgaaacgctcgcggagaaatttcgacctgatatgcgaatgctgtcctctcccaagtattcactctatgaagtgcatgtcagcggagaaagaagattggatatagatgagaaacctctagttgtacaactgaattggaacaaagatgatcgggaaggcagatttgttcttaagaatgagaatgacgccattcctcctaaggctcaaagtaatggacctgaaaagcaggaaaaagaaggggttatccagaacttcaagagaactctctcaaagaaagaaaagaaggaaaaaaagaagagagaaaaagaggcattgcgacaggcatctgataaagatgatagacctttccaaggggaggatgttgaaaattctcgactggctgctgaggtttacaaagacatgccggaaaccagctttactcgaaccatttctaatcctgaggtggttatgaaacgacggaggcagcaaaaattggaaaagagaatgcaggaatttcggagctcagatgggcggcctgattcaggtggaacattgagaatttatgcagatagtttaaaaccaaatattccctacaagacaatcctgctgtctactacagatcctgcagactttgctgtggctgaagctttagagaagtatggtctggaaaaagaaaaccctaaggattactgcatcgcccgggttatgcttcctcctggagcccagcattctgatgaaaagggtgctaaagaaattattcttgatgatgatgagtgtcctttacaaatcttcagggaatggccaagtgacaaagggattttagtctttcagttgaagaggaggccaccagaccacatcccaaagaaaaccaagaaacacttggaaggcaagacacccaagggaaaggagagagctgacgggtctggctatggctccacccttcctccggagaagctgccctatttagtagagttaagcccagatggttctgactctagagataagccaaagctttaccgccttcagttaagtgttactgaagttgggacagaaaagttggatgacaactctatccagttgtttggcccaggaattcagccccatcactgtgaccttaccaacatggatggagtggtcactgtgacgcccagaagtatggacgcagaaacctacgtggaaggccagcgcatctcagaaaccaccatgctgcagagtggcatgaaagtgcagtttggggcgtcccatgtatttaagtttgtggaccccagtcaggatcatgctcttgcaaaaagatctgtggatggaggcctgatggttaagggcccaagacataaacctggaattgttcaggagacaacttttgatttgggaggagatattcatagtgggacagcattaccgacaagcaagagcaccactaggctggacagcgacagagtgtcgtctgcctctagcacagccgagcggggaatggtgaagccgatgatcagagtagaacagcagccagattatcgcaggcaagaaagcagaacacaggatgcttctgggcctgagctgatactacctgcaagcattgaattcagggaaagttctgaagattcatttttgtctgccattataaattatactaatagctctacagtccactttaagttgtcccctacatatgtattatatatggcatgccggtatgtattgtccaaccagtacagacctgacatcagccctacagagcgcacacataaagtcattgcagtcgtcaacaagatggtgagcatgatggagggtgtcatccaggaagtgtgttctgtctacagaaacagaagaatattgcaggggcacttgccttctggatggcaaatgcatctgaacttctcaacttcattaagcaagaccgagaccttagtcggatcacactggatgctcaagatgttttagcacatttggttcaaatggcatttaaatacttggttcactgtcttcaatcagaacttaataattacatgccagcctttctagatgaccctgaagagaacagtctgcaacgaccaaaaatagatgatgtgctgcacacgctcacaggagccatgtccttgctacgacgctgcagagtcaatgccgccctgaccatccagctcttctctcagctcttccacttcatcaatatgtggctgttcaatagattggtgaccgacccagattcggggctgtgctcccattactggggtgcgattatccgtcagcagttgggccatattgaagcctgggctgagaagcaggggctggaactggctgcggactgtcatctgagcaggatcgtgcaggcaacgactttgcttaccatggataagtatgcacctgatgacattccaaatataaacagcacctgctttaagttaaattcattacaacttcaagccttattacagaactatcactgtgcacctgatgagccttttatcccaacggatcttatagaaaatgtagtgactgtggctgaaaacactgccgatgagctggcccgcagtgatggaagggaagtgcagttggaggaggatcctgatctgcagctgccgtttcttttgccagaagatggttattcttgtgatgttgtcagaaacattccaaatggtttacaagaatttttagaccctctgtgccagagaggattttgcaggttaattcctcacacacgttcaccaggtacttggacaatatattttgaaggtgcagattatgaaagtcaccttctgcgtgagaacacagagctggctcagcctctgaggaaagaacctgaaataatcactgtgaccctaaaaaagcagaatggaatgggccttagcattgttgcagcaaagggtgctggtcaagataaactaggaatctacgtgaagtcggttgtgaaaggaggtgctgcagatgtggatggacgtctagctgcaggtgatcagctcctcagtgtggatggacgaagtctggttggactctctcaggaaagggcggcagaactcatgacaagaacaagctctgtggtgacactggaagtagcaaagcagggtgccatctaccacggtctggccacccttctcaatcagccatcccccatgatgcagagaatttcagatcgtcgtggctcaggtaaaccccgaccaaagagtgaaggctttgagctctataataattcaactcaaaatgggtctcctgagagtcctcagctgccttgggcagaatatagtgaaccaaagaaattgcctggtgatgacagactgatgaaaaatagagctgatcaccgttccagccccaacgtagcaaatcagcctcctagtcctggagggaaaagtgcatatgcctctggaacaacagcgaagataacatctgtctctactggaaacctctgcactgaggagcagacgcctccgcctagacctgaagcctaccccatccccactcagacgtacaccagagagtattttaccttcccagcttccaaatcccaggatcggatggctcctcctcagaaccagtggccaaattatgaggaaaagccacatatgcacacagatagtaatcattccagtattgcaattcagcgtgttacacgttcccaagaagaacttcgagaagataaagcttaccaacttgagcggcatcgaatagaggcagctatggaccgaaagtctgatagtgatatgtggataaatcagagctcctcactggactccagtacctctagccaggagcatctgaaccattcctctaagtcggtcacccctgcttccacactgaccaaaagtggccctggccgttggaaaacaccagcagccataccggccacccctgtggccgtctcccagccaatccgaacagacctgcctccgccacccccgccacctccagtccactatgccggtgatttcgatggaatgtccatggatttgcctctcccaccacccccttccgccaaccagatagggctgccgtctgcgcaggtggctgctgctgaacggagaaagagagaagaacatcagcgttggtatgagaaggagaaggcccgcctggaggaggagcgggagaggaagcggagagagcaggagaggaagttgggccagatgcgcactcagtccttaaaccctgctccgttttctcccctgactgcacagcagatgaagcccgaaaagccttccacactccagcggccacaggaaacagtcattcgggagctgcagcctcagcagcagccccgcacgatcgagcgcagagacttgcagtacattacagtcagcaaagaggagctttcctcgggggacagtctgtcccccgacccgtggaagcgggacgccaaggagaagctggagaagcagcagcagatgcacatcgtggacatgctgagcaaggagatccaggagctccagagcaaaccggaccgcagcgccgaggagagcgaccggctgcgcaagctcatgctggagtggcagttccagaagagactccaggagtcgaagcagaaggacgaagatgacgaggaggaggaggacgatgatgtggacaccatgctgatcatgcagcgcctggaggctgaacgaagagcgaggttgcaggacgaggagcggaggcggcagcagcagttagaagagatgcgcaagcgggaagcggaagaccgagcgaggcaagaggaagagcgccggcggcaggaggaggagcgaacaaaacgagacgctgaagaaaagaggcgacaggaagaagggtattacagccgcctggaagccgagaggcgcagacagcacgacgaggcggcgcgcaggttgctggagcccgaggcgcccggtctgtgccgccctccgcttccccgggactacgagcccccgtccccgtcccccgcccggcgcccctcctcccccgcctcagcgaaacgcctcctacctcaaaacacaggtcctctcccccgactcgctgttcactgccaagtttgttgcatacaatgaggaggaggaggaggaggactgcagcctagcaggtcaggataagtactccagcacaagaaagtctcatggggaccttcttcctgcccctcttaaaccacggccacccccctgccagccacgcccggcctccgatggcgtctttctctccaactcattccagccaccctcagccaaagccaacagtactgctcacaaaaaaggccagcccctgccccctccaaaaaaatccagctcctaccatcccagccactgcaaaggaccaaactcttacccaggatctactggagcagctgttggagcccatgacgcctgtcgggatgcaaaagagaagcgctctaaaagccaagatgcagattcacctggaagttctggggcccctgaaaacttgacattcaaggaacgccagcgtcttttttcacaaggtcaagatgtatccaataaagtgaaagcttctcgtaaattaacagaactggagaatgaactgaacacaaagtgaaagaaaatgaggagaacactttgtatttaccccaaaatcttttcagttgtgggtttgtaggtgcgagtttgaagaggaaaagaggaagggggttatatttctaagtgatttacaatttctgtttctaaaattgttgggatttagaaatgtttcaattccaagaaattttattttactttaccatgagattgccatttatgtaatttaaacactgtctagtttcttaattatctaactcacacgagggtaagttttttgttggtttcttttttggagtcctgagttcaaaggggacagaactaagggcaggagaagagaatggatgtgtcttctctcccatcttcccctcatcatcgaccgaggagcacaaagaagttctgtttctgtttttttcagaaactttattttagctgtcaagcagagaatagcttgaactattcagactattgttggcactgtttagtagtgaccacacgctcttctacccgggaaggaacatatgacgacatgctcctcccatgtcccctgatggtgtctgttcccacaatatccttctagtctgcatcgtgaagtggcttaggccaaagcttcctgtgtgatgacgcacgtccgagactgttccatctcattcctcgcaaatttgagctcttctgatcaattctaaatatttgattaattttaattctgaaagaaaattttgaggatttaagcttaggggattttatttttataaataccagattattgttagacttaataaatcactgttaaatttaaagatgacagttaccttggaaagttcactaatacttcgctccaaggcgtctgtaaaagaagatatctttattggagcaatgttcatgtgactgggaatgacagaagaatgggagatgagtagggacccctcaagcacagctgtcactcagaaattttaaatttgaaaaagaaatcgattttcatctgtatgccgtcaaggaaggaattcagttacagggcatctgtaacttaaatattgtaagaataactcatatggaagttcaagctatttttatactataatagagttatttaattttaatttgttgaattattagttaccactgtcatttcttcagctatggatatgtggctgatgttggggagacggacctcagtgtgttttatattgtctggtgttaagatgataaattactttgtgattacaagcaaattttctatttgacaaagcccttggtggagtccaaatgatttttctgtaccatattgttctcttacacatacgtatgttaggaaaataggcacactttcaaagagaatgttctcttacacatacgtatgttaggaaaatagacacattttcaaagagaatgttctcttacatatgttaggaaaataggcacactttcaaagagaggtataggggctttttactgccttcgaaatcacttttaataaaagttgtatgataaatcattaaaaatgcgagtgtaaatatttttttttacctctatcagggtttttatttgaaagtgtgctcttaccatttccttgtttgagtaagagagtgaatggttctgagtgtttaggaaggatttgcttgcttgcagcagaagttctaggaaaagcaggcacctcccaaatatcttgaggacactggcagccttatggtgactaaatccacactttctttaaagagatgcagatgaattacttttctgttaatatatagaaaaatacacaggagaacatgcagatacatgtaaatatctacatacagggatatttgtatgtgtggttgtgaaacccatacacaagtggatttggccatctttgggcagtgaggtcaaatgtgaatatgtgtaaaagtgcttttcagaactgcattactatgagaaaacatcaaaactgctgtagttttccatttctactgtatttcagttgcaacctatttttaataaactttgtatgtatttaagtgtatttgctattgttttgaaagtgctgacaaagtttatatttgtaacatcagccttcctcgcccatctctttccatctgtctcttcttcattaaacacttactgagtatga

SEQ ID NO: 336283 - DNA, 7755 bp, Homo sapiens
gcggccgcggaggcggaggcagccgcggaggcggaggcggccggcggggggtggcgaggggcgccgggcccccgcggacctgtcgtcctcggcccgtcctccggccccggccccgcgcggctgaggaggcgcggccaggaccatgtcggcgggcggccgtgacgaggagcggcggaagctggccgacatcatccaccactggaacgccaaccggctggacctgttcgagatcagccagccgaccgaggatttggagttccatggagtgatgagattttattttcaagataaagctgctggaaactttgcaacaaaatgtattcgggtctctagtactgccaccactcaagatgtaatcgaaacgctcgcggagaaatttcgacctgatatgcgaatgctgtcctctcccaagtattcactctatgaagtgcatgtcagcggagaaagaagattggatatagatgagaaacctctagttgtacaactgaattggaacaaagatgatcgggaaggcagatttgttcttaagaatgagaatgacgccattcctcctaaggctcaaagtaatggacctgaaaagcaggaaaaagaaggggttatccagaacttcaagagaactctctcaaagaaagaaaagaaggaaaaaaagaagagagaaaaagaggcattgcgacaggcatctgataaagatgatagacctttccaaggggaggatgttgaaaattctcgactggctgctgaggtttacaaagacatgccggaaaccagctttactcgaaccatttctaatcctgaggtggttatgaaacgacggaggcagcaaaaattggaaaagagaatgcaggaatttcggagctcagatgggcggcctgattcaggtggaacattgagaatttatgcagatagtttaaaaccaaatattccctacaagacaatcctgctgtctactacagatcctgcagactttgctgtggctgaagctttagagaagtatggtctggaaaaagaaaaccctaaggattactgcatcgcccgggttatgcttcctcctggagcccagcattctgatgaaaagggtgctaaagaaattattcttgatgatgatgagtgtcctttacaaatcttcagggaatggccaagtgacaaagggattttagtctttcagttgaagaggaggccaccagaccacatcccaaagaaaaccaagaaacacttggaaggcaagacacccaagggaaaggagagagctgacgggtctggctatggctccacccttcctccggagaagctgccctatttagtagagttaagcccagatggttctgactctagagataagccaaagctttaccgccttcagttaagtgttactgaagttgggacagaaaagttggatgacaactctatccagttgtttggcccaggaattcagccccatcactgtgaccttaccaacatggatggagtggtcactgtgacgcccagaagtatggacgcagaaacctacgtggaaggccagcgcatctcagaaaccaccatgctgcagagtggcatgaaagtgcagtttggggcgtcccatgtatttaagtttgtggaccccagtcaggatcatgctcttgcaaaaagatctgtggatggaggcctgatggttaagggcccaagacataaacctggaattgttcaggagacaacttttgatttgggaggagatattcatagtgggacagcattaccgacaagcaagagcaccactaggctggacagcgacagagtgtcgtctgcctctagcacagccgagcggggaatggtgaagccgatgatcagagtagaacagcagccagattatcgcaggcaagaaagcagaacacaggatgcttctgggcctgagctgatactacctgcaagcattgaattcagggaaagttctgaagattcatttttgtctgccattataaattatactaatagctctacagtccactttaagttgtcccctacatatgtattatatatggcatgccggtatgtattgtccaaccagtacagacctgacatcagccctacagagcgcacacataaagtcattgcagtcgtcaacaagatggtgagcatgatggagggtgtcatccagaaacagaagaatattgcaggggcacttgccttctggatggcaaatgcatctgaacttctcaacttcattaagcaagaccgagaccttagtcggatcacactggatgctcaagatgttttagcacatttggttcaaatggcatttaaatacttggttcactgtcttcaatcagaacttaataattacatgccagcctttctagatgaccctgaagagaacagtctgcaacgaccaaaaatagatgatgtgctgcacacgctcacaggagccatgtccttgctacgacgctgcagagtcaatgccgccctgaccatccagctcttctctcagctcttccacttcatcaatatgtggctgttcaatagattggtgaccgacccagattcggggctgtgctcccattactggggtgcgattatccgtcagcagttgggccatattgaagcctgggctgagaagcaggggctggaactggctgcggactgtcatctgagcaggatcgtgcaggcaacgactttgcttaccatggataagtatgcacctgatgacattccaaatataaacagcacctgctttaagttaaattcattacaacttcaagccttattacagaactatcactgtgcacctgatgagccttttatcccaacggatcttatagaaaatgtagtgactgtggctgaaaacactgccgatgagctggcccgcagtgatggaagggaagtgcagttggaggaggatcctgatctgcagctgccgtttcttttgccagaagatggttattcttgtgatgttgtcagaaacattccaaatggtttacaagaatttttagaccctctgtgccagagaggattttgcaggttaattcctcacacacgttcaccaggtacttggacaatatattttgaaggtgcagattatgaaagtcaccttctgcgtgagaacacagagctggctcagcctctgaggaaagaacctgaaataatcactgtgaccctaaaaaagcagaatggaatgggccttagcattgttgcagcaaagggtgctggtcaagataaactaggaatctacgtgaagtcggttgtgaaaggaggtgctgcagatgtggatggacgtctagctgcaggtgatcagctcctcagtgtggatggacgaagtctggttggactctctcaggaaagggcggcagaactcatgacaagaacaagctctgtggtgacactggaagtagcaaagcagggtgccatctaccacggtctggccacccttctcaatcagccatcccccatgatgcagagaatttcagatcgtcgtggctcaggtaaaccccgaccaaagagtgaaggctttgagctctataataattcaactcaaaatgggtctcctgagagtcctcagctgccttgggcagaatatagtgaaccaaagaaattgcctggtgatgacagactgatgaaaaatagagctgatcaccgttccagccccaacgtagcaaatcagcctcctagtcctggagggaaaagtgcatatgcctctggaacaacagcgaagataacatctgtctctactggaaacctctgcactgaggagcagacgcctccgcctagacctgaagcctaccccatccccactcagacgtacaccagagagtattttaccttcccagcttccaaatcccaggatcggatggctcctcctcagaaccagtggccaaattatgaggaaaagccacatatgcacacagatagtaatcattccagtattgcaattcagcgtgttacacgttcccaagaagaacttcgagaagataaagcttaccaacttgagcggcatcgaatagaggcagctatggaccgaaagtctgatagtgatatgtggataaatcagagctcctcactggactccagtacctctagccaggagcatctgaaccattcctctaagtcggtcacccctgcttccacactgaccaaaagtggccctggccgttggaaaacaccagcagccataccggccacccctgtggccgtctcccagccaatccgaacagacctgcctccgccacccccgccacctccagtccactatgccggtgatttcgatggaatgtccatggatttgcctctcccaccacccccttccgccaaccagatagggctgccgtctgcgcaggtggctgctgctgaacggagaaagagagaagaacatcagcgttggtatgagaaggagaaggcccgcctggaggaggagcgggagaggaagcggagagagcaggagaggaagttgggccagatgcgcactcagtccttaaaccctgctccgttttctcccctgactgcacagcagatgaagcccgaaaagccttccacactccagcggccacaggaaacagtcattcgggagctgcagcctcagcagcagccccgcacgatcgagcgcagagacttgcagtacattacagtcagcaaagaggagctttcctcgggggacagtctgtcccccgacccgtggaagcgggacgccaaggagaagctggagaagcagcagcagatgcacatcgtggacatgctgagcaaggagatccaggagctccagagcaaaccggaccgcagcgccgaggagagcgaccggctgcgcaagctcatgctggagtggcagttccagaagagactccaggagtcgaagcagaaggacgaagatgacgaggaggaggaggacgatgatgtggacaccatgctgatcatgcagcgcctggaggctgaacgaagagcgaggttgcaggacgaggagcggaggcggcagcagcagttagaagagatgcgcaagcgggaagcggaagaccgagcgaggcaagaggaagagcgccggcggcaggaggaggagcgaacaaaacgagacgctgaagaaaagaggcgacaggaagaagggtattacagccgcctggaagccgagaggcgcagacagcacgacgaggcggcgcgcaggttgctggagcccgaggcgcccggtctgtgccgccctccgcttccccgggactacgagcccccgtccccgtcccccgcccggcgcccctcctcccccgcctcagcgaaacgcctcctacctcaaaacacaggtcctctcccccgactcgctgttcactgccaagtttgttgcatacaatgaggaggaggaggaggaggactgcagcctagcaggtcaggataagtactccagcacaagaaagtctcatggggaccttcttcctgcccctcttaaaccacggccacccccctgccagccacgcccggcctccgatggcgtctttctctccaactcattccagccaccctcagccaaagccaacagtactgctcacaaaaaaggccagcccctgccccctccaaaaaaatccagctcctaccatcccagccactgcaaaggaccaaactcttacccaggatctactggagcagctgttggagcccatgacgcctgtcgggatgcaaaagagaagcgctctaaaagccaagatgcagattcacctggaagttctggggcccctgaaaacttgacattcaaggaacgccagcgtcttttttcacaaggtcaagatgtatccaataaagtgaaagcttctcgtaaattaacagaactggagaatgaactgaacacaaagtgaaagaaaatgaggagaacactttgtatttaccccaaaatcttttcagttgtgggtttgtaggtgcgagtttgaagaggaaaagaggaagggggttatatttctaagtgatttacaatttctgtttctaaaattgttgggatttagaaatgtttcaattccaagaaattttattttactttaccatgagattgccatttatgtaatttaaacactgtctagtttcttaattatctaactcacacgagggtaagttttttgttggtttcttttttggagtcctgagttcaaaggggacagaactaagggcaggagaagagaatggatgtgtcttctctcccatcttcccctcatcatcgaccgaggagcacaaagaagttctgtttctgtttttttcagaaactttattttagctgtcaagcagagaatagcttgaactattcagactattgttggcactgtttagtagtgaccacacgctcttctacccgggaaggaacatatgacgacatgctcctcccatgtcccctgatggtgtctgttcccacaatatccttctagtctgcatcgtgaagtggcttaggccaaagcttcctgtgtgatgacgcacgtccgagactgttccatctcattcctcgcaaatttgagctcttctgatcaattctaaatatttgattaattttaattctgaaagaaaattttgaggatttaagcttaggggattttatttttataaataccagattattgttagacttaataaatcactgttaaatttaaagatgacagttaccttggaaagttcactaatacttcgctccaaggcgtctgtaaaagaagatatctttattggagcaatgttcatgtgactgggaatgacagaagaatgggagatgagtagggacccctcaagcacagctgtcactcagaaattttaaatttgaaaaagaaatcgattttcatctgtatgccgtcaaggaaggaattcagttacagggcatctgtaacttaaatattgtaagaataactcagtgtgttttatattgtctggtgttaagatgataaattactttgtgattacaagcaaattttctatttgacaaagcccttggtggagtccaaatgatttttctgtaccatattgttctcttacacatacgtatgttaggaaaataggcacactttcaaagagaatgttctcttacacatacgtatgttaggaaaatagacacattttcaaagagaatgttctcttacatatgttaggaaaataggcacactttcaaagagaggtataggggctttttactgccttcgaaatcacttttaataaaagttgtatgataaatcattaaaaatgcgagtgtaaatatttttttttacctctatcagggtttttatttgaaagtgtgctcttaccatttccttgtttgagtaagagagtgaatggttctgagtgtttaggaaggatttgcttgcttgcagcagaagttctaggaaaagcaggcacctcccaaatatcttgaggacactggcagccttatggtgactaaatccacactttctttaaagagatgcagatgaattacttttctgttaatatatagaaaaatacacaggagaacatgcagatacatgtaaatatctacatacagggatatttgtatgtgtggttgtgaaacccatacacaagtggatttggccatctttgggcagtgaggtcaaatgtgaatatgtgtaaaagtgcttttcagaactgcattactatgagaaaacatcaaaactgctgtagttttccatttctactgtatttcagttgcaacctatttttaataaactttgtatgtatttaagtgtatttgctattgttttgaaagtgctgacaaagtttatatttgtaacatcagccttcctcgcccatctctttccatctgtctcttcttcattaaacacttactgagtatga

SEQ ID NO: 336284 - DNA, 4503 bp, Homo sapiens
aatcggtctctgggctgggataccatgtgaaccttctgacctggagcccacacttttcagatcgtcgtggctcaggtaaaccccgaccaaagagtgaaggctttgagctctataataattcaactcaaaatgggtctcctgagagtcctcagctgccttgggcagaatatagtgaaccaaagaaattgcctggtgatgacagactgatgaaaaatagagctgatcaccgttccagccccaacgtagcaaatcagcctcctagtcctggagggaaaagtgcatatgcctctggaacaacagcgaagataacatctgtctctactggaaacctctgcactgaggagcagacgcctccgcctagacctgaagcctaccccatccccactcagacgtacaccagagagtattttaccttcccagcttccaaatcccaggatcggatggctcctcctcagaaccagtggccaaattatgaggaaaagccacatatgcacacagatagtaatcattccagtattgcaattcagcgtgttacacgttcccaagaagaacttcgagaagataaagcttaccaacttgagcggcatcgaatagaggcagctatggaccgaaagtctgatagtgatatgtggataaatcagagctcctcactggactccagtacctctagccaggagcatctgaaccattcctctaagtcggtcacccctgcttccacactgaccaaaagtggccctggccgttggaaaacaccagcagccataccggccacccctgtggccgtctcccagccaatccgaacagacctgcctccgccacccccgccacctccagtccactatgccggtgatttcgatggaatgtccatggatttgcctctcccaccacccccttccgccaaccagatagggctgccgtctgcgcaggtggctgctgctgaacggagaaagagagaagaacatcagcgttggtatgagaaggagaaggcccgcctggaggaggagcgggagaggaagcggagagagcaggagaggaagttgggccagatgcgcactcagtccttaaaccctgctccgttttctcccctgactgcacagcagatgaagcccgaaaagccttccacactccagcggccacaggaaacagtcattcgggagctgcagcctcagcagcagccccgcacgatcgagcgcagagacttgcagtacattacagtcagcaaagaggagctttcctcgggggacagtctgtcccccgacccgtggaagcgggacgccaaggagaagctggagaagcagcagcagatgcacatcgtggacatgctgagcaaggagatccaggagctccagagcaaaccggaccgcagcgccgaggagagcgaccggctgcgcaagctcatgctggagtggcagttccagaagagactccaggagtcgaagcagaaggacgaagatgacgaggaggaggaggacgatgatgtggacaccatgctgatcatgcagcgcctggaggctgaacgaagagcgaggttgcaggacgaggagcggaggcggcagcagcagttagaagagatgcgcaagcgggaagcggaagaccgagcgaggcaagaggaagagcgccggcggcaggaggaggagcgaacaaaacgagacgctgaagaaaagaggcgacaggaagaagggtattacagccgcctggaagccgagaggcgcagacagcacgacgaggcggcgcgcaggttgctggagcccgaggcgcccggtctgtgccgccctccgcttccccgggactacgagcccccgtccccgtcccccgcccggcgcccctcctcccccgcctcagcgaaacgcctcctacctcaaaacacaggtcctctcccccgactcgctgttcactgccaagtttgttgcatacaatgaggaggaggaggaggaggactgcagcctagcaggtcaggataagtactccagcacaagaaagtctcatggggaccttcttcctgcccctcttaaaccacggccacccccctgccagccacgcccggcctccgatggcgtctttctctccaactcattccagccaccctcagccaaagccaacagtactgctcacaaaaaaggccagcccctgccccctccaaaaaaatccagctcctaccatcccagccactgcaaaggaccaaactcttacccaggatctactggagcagctgttggagcccatgacgcctgtcgggatgcaaaagagaagcgctctaaaagccaagatgcagattcacctggaagttctggggcccctgaaaacttgacattcaaggaacgccagcgtcttttttcacaaggtcaagatgtatccaataaagtgaaagcttctcgtaaattaacagaactggagaatgaactgaacacaaagtgaaagaaaatgaggagaacactttgtatttaccccaaaatcttttcagttgtgggtttgtaggtgcgagtttgaagaggaaaagaggaagggggttatatttctaagtgatttacaatttctgtttctaaaattgttgggatttagaaatgtttcaattccaagaaattttattttactttaccatgagattgccatttatgtaatttaaacactgtctagtttcttaattatctaactcacacgagggtaagttttttgttggtttcttttttggagtcctgagttcaaaggggacagaactaagggcaggagaagagaatggatgtgtcttctctcccatcttcccctcatcatcgaccgaggagcacaaagaagttctgtttctgtttttttcagaaactttattttagctgtcaagcagagaatagcttgaactattcagactattgttggcactgtttagtagtgaccacacgctcttctacccgggaaggaacatatgacgacatgctcctcccatgtcccctgatggtgtctgttcccacaatatccttctagtctgcatcgtgaagtggcttaggccaaagcttcctgtgtgatgacgcacgtccgagactgttccatctcattcctcgcaaatttgagctcttctgatcaattctaaatatttgattaattttaattctgaaagaaaattttgaggatttaagcttaggggattttatttttataaataccagattattgttagacttaataaatcactgttaaatttaaagatgacagttaccttggaaagttcactaatacttcgctccaaggcgtctgtaaaagaagatatctttattggagcaatgttcatgtgactgggaatgacagaagaatgggagatgagtagggacccctcaagcacagctgtcactcagaaattttaaatttgaaaaagaaatcgattttcatctgtatgccgtcaaggaaggaattcagttacagggcatctgtaacttaaatattgtaagaataactcatatggaagttcaagctatttttatactataatagagttatttaattttaatttgttgaattattagttaccactgtcatttcttcagctatggatatgtggctgatgttggggagacggacctcagtgtgttttatattgtctggtgttaagatgataaattactttgtgattacaagcaaattttctatttgacaaagcccttggtggagtccaaatgatttttctgtaccatattgttctcttacacatacgtatgttaggaaaataggcacactttcaaagagaatgttctcttacacatacgtatgttaggaaaatagacacattttcaaagagaatgttctcttacatatgttaggaaaataggcacactttcaaagagaggtataggggctttttactgccttcgaaatcacttttaataaaagttgtatgataaatcattaaaaatgcgagtgtaaatatttttttttacctctatcagggtttttatttgaaagtgtgctcttaccatttccttgtttgagtaagagagtgaatggttctgagtgtttaggaaggatttgcttgcttgcagcagaagttctaggaaaagcaggcacctcccaaatatcttgaggacactggcagccttatggtgactaaatccacactttctttaaagagatgcagatgaattacttttctgttaatatatagaaaaatacacaggagaacatgcagatacatgtaaatatctacatacagggatatttgtatgtgtggttgtgaaacccatacacaagtggatttggccatctttgggcagtgaggtcaaatgtgaatatgtgtaaaagtgcttttcagaactgcattactatgagaaaacatcaaaactgctgtagttttccatttctactgtatttcagttgcaacctatttttaataaactttgtatgtatttaagtgtatttgctattgttttgaaagtgctgacaaagtttatatttgtaacatcagccttcctcgcccatctctttccatctgtctcttcttcattaaacacttactgagtatga

SEQ ID NO: 336285 - DNA, 4290 bp, Homo sapiens
ttaaattttagtcgagacagagactatgttacccaggctggtctcgaactcctgggctcaagcagtccacccacctcagcctcccaaagtgctgggattataggcgtgagccaccacgcttggccgcttttccttctttacacagataaatgcactgttactccacattagccaatgagccttgtagggcagtctcagtctctttctgtacactgatttaacagtttttcttctgtctgaagataaaatgtttgtggatatttggtaatttctagtaaatggctgaaatataataattctttttctttttgcagcgtgttacacgttcccaagaagaacttcgagaagataaagcttaccaacttgagcggcatcgaatagaggcagctatggaccgaaagtctgatagtgatatgtggataaatcagagctcctcactggactccagtacctctagccaggagcatctgaaccattcctctaagtcggtcacccctgcttccacactgaccaaaagtggccctggccgttggaaaacaccagcagccataccggccacccctgtggccgtctcccagccaatccgaacagacctgcctccgccacccccgccacctccagtccactatgccggtgatttcgatggaatgtccatggatttgcctctcccaccacccccttccgccaaccagatagggctgccgtctgcgcaggtggctgctgctgaacggagaaagagagaagaacatcagcgttggtatgagaaggagaaggcccgcctggaggaggagcgggagaggaagcggagagagcaggagaggaagttgggccagatgcgcactcagtccttaaaccctgctccgttttctcccctgactgcacagcagatgaagcccgaaaagccttccacactccagcggccacaggaaacagtcattcgggagctgcagcctcagcagcagccccgcacgatcgagcgcagagacttgcagtacattacagtcagcaaagaggagctttcctcgggggacagtctgtcccccgacccgtggaagcgggacgccaaggagaagctggagaagcagcagcagatgcacatcgtggacatgctgagcaaggagatccaggagctccagagcaaaccggaccgcagcgccgaggagagcgaccggctgcgcaagctcatgctggagtggcagttccagaagagactccaggagtcgaagcagaaggacgaagatgacgaggaggaggaggacgatgatgtggacaccatgctgatcatgcagcgcctggaggctgaacgaagagcgaggttgcaggacgaggagcggaggcggcagcagcagttagaagagatgcgcaagcgggaagcggaagaccgagcgaggcaagaggaagagcgccggcggcaggaggaggagcgaacaaaacgagacgctgaagaaaagaggcgacaggaagaagggtattacagccgcctggaagccgagaggcgcagacagcacgacgaggcggcgcgcaggttgctggagcccgaggcgcccggtctgtgccgccctccgcttccccgggactacgagcccccgtccccgtcccccgcccggcgcccctcctcccccgcctcagcgaaacgcctcctacctcaaaacacaggtcctctcccccgactcgctgttcactgccaagtttgttgcatacaatgaggaggaggaggaggaggactgcagcctagcaggtcaggataagtactccagcacaagaaagtctcatggggaccttcttcctgcccctcttaaaccacggccacccccctgccagccacgcccggcctccgatggcgtctttctctccaactcattccagccaccctcagccaaagccaacagtactgctcacaaaaaaggccagcccctgccccctccaaaaaaatccagctcctaccatcccagccactgcaaaggaccaaactcttacccaggatctactggagcagctgttggagcccatgacgcctgtcgggatgcaaaagagaagcgctctaaaagccaagatgcagattcacctggaagttctggggcccctgaaaacttgacattcaaggaacgccagcgtcttttttcacaaggtcaagatgtatccaataaagtgaaagcttctcgtaaattaacagaactggagaatgaactgaacacaaagtgaaagaaaatgaggagaacactttgtatttaccccaaaatcttttcagttgtgggtttgtaggtgcgagtttgaagaggaaaagaggaagggggttatatttctaagtgatttacaatttctgtttctaaaattgttgggatttagaaatgtttcaattccaagaaattttattttactttaccatgagattgccatttatgtaatttaaacactgtctagtttcttaattatctaactcacacgagggtaagttttttgttggtttcttttttggagtcctgagttcaaaggggacagaactaagggcaggagaagagaatggatgtgtcttctctcccatcttcccctcatcatcgaccgaggagcacaaagaagttctgtttctgtttttttcagaaactttattttagctgtcaagcagagaatagcttgaactattcagactattgttggcactgtttagtagtgaccacacgctcttctacccgggaaggaacatatgacgacatgctcctcccatgtcccctgatggtgtctgttcccacaatatccttctagtctgcatcgtgaagtggcttaggccaaagcttcctgtgtgatgacgcacgtccgagactgttccatctcattcctcgcaaatttgagctcttctgatcaattctaaatatttgattaattttaattctgaaagaaaattttgaggatttaagcttaggggattttatttttataaataccagattattgttagacttaataaatcactgttaaatttaaagatgacagttaccttggaaagttcactaatacttcgctccaaggcgtctgtaaaagaagatatctttattggagcaatgttcatgtgactgggaatgacagaagaatgggagatgagtagggacccctcaagcacagctgtcactcagaaattttaaatttgaaaaagaaatcgattttcatctgtatgccgtcaaggaaggaattcagttacagggcatctgtaacttaaatattgtaagaataactcatatggaagttcaagctatttttatactataatagagttatttaattttaatttgttgaattattagttaccactgtcatttcttcagctatggatatgtggctgatgttggggagacggacctcagtgtgttttatattgtctggtgttaagatgataaattactttgtgattacaagcaaattttctatttgacaaagcccttggtggagtccaaatgatttttctgtaccatattgttctcttacacatacgtatgttaggaaaataggcacactttcaaagagaatgttctcttacacatacgtatgttaggaaaatagacacattttcaaagagaatgttctcttacatatgttaggaaaataggcacactttcaaagagaggtataggggctttttactgccttcgaaatcacttttaataaaagttgtatgataaatcattaaaaatgcgagtgtaaatatttttttttacctctatcagggtttttatttgaaagtgtgctcttaccatttccttgtttgagtaagagagtgaatggttctgagtgtttaggaaggatttgcttgcttgcagcagaagttctaggaaaagcaggcacctcccaaatatcttgaggacactggcagccttatggtgactaaatccacactttctttaaagagatgcagatgaattacttttctgttaatatatagaaaaatacacaggagaacatgcagatacatgtaaatatctacatacagggatatttgtatgtgtggttgtgaaacccatacacaagtggatttggccatctttgggcagtgaggtcaaatgtgaatatgtgtaaaagtgcttttcagaactgcattactatgagaaaacatcaaaactgctgtagttttccatttctactgtatttcagttgcaacctatttttaataaactttgtatgtatttaagtgtatttgctattgttttgaaagtgctgacaaagtttatatttgtaacatcagccttcctcgcccatctctttccatctgtctcttcttcattaaacacttactgagtatga

SEQ ID NO: 336286 - DNA, 2567 bp, Homo sapiens
gtatcatggcatagctgttcctgagtatccctagagatacatgatatcgtagtcactgacagtatcgaagagccgagccgcgctgcgaatcatgcactggtcgtccgattgctgtctctctgctgccaactcgagttcctagcgatacctcagccaaagccaacagtactgctcacaaaaaaggccagcccctgccccctccaaaaaaatccagctcctaccatcccagccactgcaaaggaccaaactcttacccaggatctactggagcagctgttggagcccatgacgcctgtcgggatgcaaaagagaagcgctctaaaagccaagatgcagattcacctggaagttctggggcccctgaaaacttgacattcaaggaacgccagcgtcttttttcacaaggtcaagatgtatccaataaagtgaaagcttctcgtaaattaacagaactggagaatgaactgaacacaaagtgaaagaaaatgaggagaacactttgtatttaccccaaaatcttttcagttgtgggtttgtaggtgcgagtttgaagaggaaaagaggaagggggttatatttctaagtgatttacaatttctgtttctaaaattgttgggatttagaaatgtttcaattccaagaaattttattttactttaccatgagattgccatttatgtaatttaaacactgtctagtttcttaattatctaactcacacgagggtaagttttttgttggtttcttttttggagtcctgagttcaaaggggacagaactaagggcaggagaagagaatggatgtgtcttctctcccatcttcccctcatcatcgaccgaggagcacaaagaagttctgtttctgtttttttcagaaactttattttagctgtcaagcagagaatagcttgaactattcagactattgttggcactgtttagtagtgaccacacgctcttctacccgggaaggaacatatgacgacatgctcctcccatgtcccctgatggtgtctgttcccacaatatccttctagtctgcatcgtgaagtggcttaggccaaagcttcctgtgtgatgacgcacgtccgagactgttccatctcattcctcgcaaatttgagctcttctgatcaattctaaatatttgattaattttaattctgaaagaaaattttgaggatttaagcttaggggattttatttttataaataccagattattgttagacttaataaatcactgttaaatttaaagatgacagttaccttggaaagttcactaatacttcgctccaaggcgtctgtaaaagaagatatctttattggagcaatgttcatgtgactgggaatgacagaagaatgggagatgagtagggacccctcaagcacagctgtcactcagaaattttaaatttgaaaaagaaatcgattttcatctgtatgccgtcaaggaaggaattcagttacagggcatctgtaacttaaatattgtaagaataactcatatggaagttcaagctatttttatactataatagagttatttaattttaatttgttgaattattagttaccactgtcatttcttcagctatggatatgtggctgatgttggggagacggacctcagtgtgttttatattgtctggtgttaagatgataaattactttgtgattacaagcaaattttctatttgacaaagcccttggtggagtccaaatgatttttctgtaccatattgttctcttacacatacgtatgttaggaaaataggcacactttcaaagagaatgttctcttacacatacgtatgttaggaaaatagacacattttcaaagagaatgttctcttacatatgttaggaaaataggcacactttcaaagagaggtataggggctttttactgccttcgaaatcacttttaataaaagttgtatgataaatcattaaaaatgcgagtgtaaatatttttttttacctctatcagggtttttatttgaaagtgtgctcttaccatttccttgtttgagtaagagagtgaatggttctgagtgtttaggaaggatttgcttgcttgcagcagaagttctaggaaaagcaggcacctcccaaatatcttgaggacactggcagccttatggtgactaaatccacactttctttaaagagatgcagatgaattacttttctgttaatatatagaaaaatacacaggagaacatgcagatacatgtaaatatctacatacagggatatttgtatgtgtggttgtgaaacccatacacaagtggatttggccatctttgggcagtgaggtcaaatgtgaatatgtgtaaaagtgcttttcagaactgcattactatgagaaaacatcaaaactgctgtagttttccatttctactgtatttcagttgcaacctatttttaataaactttgtatgtatttaagtgtatttgctattgttttgaaagtgctgacaaagtttatatttgtaacatcagccttcctcgcccatctctttccatctgtctcttcttcattaaacacttactgagtatga

SEQ ID NO: 336287 - DNA, 2543 bp, Homo sapiens
atgttacactcacccagagttgctgtgccagtcagaggcagagctgggccagtgggcagtattcctccctcatagtgaagggcgtcaggtcaacattttagcaccttttgagagtagtaattggattactcaggccaccaacagggatgaatttcaaactgatgaaactttgatacaatatgaggggtcttttaccttcctacttactcagtaaaggaccaaactcttacccaggatctactggagcagctgttggagcccatgacgcctgtcgggatgcaaaagagaagcgctctaaaagccaagatgcagattcacctggaagttctggggcccctgaaaacttgacattcaaggaacgccagcgtcttttttcacaaggtcaagatgtatccaataaagtgaaagcttctcgtaaattaacagaactggagaatgaactgaacacaaagtgaaagaaaatgaggagaacactttgtatttaccccaaaatcttttcagttgtgggtttgtaggtgcgagtttgaagaggaaaagaggaagggggttatatttctaagtgatttacaatttctgtttctaaaattgttgggatttagaaatgtttcaattccaagaaattttattttactttaccatgagattgccatttatgtaatttaaacactgtctagtttcttaattatctaactcacacgagggtaagttttttgttggtttcttttttggagtcctgagttcaaaggggacagaactaagggcaggagaagagaatggatgtgtcttctctcccatcttcccctcatcatcgaccgaggagcacaaagaagttctgtttctgtttttttcagaaactttattttagctgtcaagcagagaatagcttgaactattcagactattgttggcactgtttagtagtgaccacacgctcttctacccgggaaggaacatatgacgacatgctcctcccatgtcccctgatggtgtctgttcccacaatatccttctagtctgcatcgtgaagtggcttaggccaaagcttcctgtgtgatgacgcacgtccgagactgttccatctcattcctcgcaaatttgagctcttctgatcaattctaaatatttgattaattttaattctgaaagaaaattttgaggatttaagcttaggggattttatttttataaataccagattattgttagacttaataaatcactgttaaatttaaagatgacagttaccttggaaagttcactaatacttcgctccaaggcgtctgtaaaagaagatatctttattggagcaatgttcatgtgactgggaatgacagaagaatgggagatgagtagggacccctcaagcacagctgtcactcagaaattttaaatttgaaaaagaaatcgattttcatctgtatgccgtcaaggaaggaattcagttacagggcatctgtaacttaaatattgtaagaataactcatatggaagttcaagctatttttatactataatagagttatttaattttaatttgttgaattattagttaccactgtcatttcttcagctatggatatgtggctgatgttggggagacggacctcagtgtgttttatattgtctggtgttaagatgataaattactttgtgattacaagcaaattttctatttgacaaagcccttggtggagtccaaatgatttttctgtaccatattgttctcttacacatacgtatgttaggaaaataggcacactttcaaagagaatgttctcttacacatacgtatgttaggaaaatagacacattttcaaagagaatgttctcttacatatgttaggaaaataggcacactttcaaagagaggtataggggctttttactgccttcgaaatcacttttaataaaagttgtatgataaatcattaaaaatgcgagtgtaaatatttttttttacctctatcagggtttttatttgaaagtgtgctcttaccatttccttgtttgagtaagagagtgaatggttctgagtgtttaggaaggatttgcttgcttgcagcagaagttctaggaaaagcaggcacctcccaaatatcttgaggacactggcagccttatggtgactaaatccacactttctttaaagagatgcagatgaattacttttctgttaatatatagaaaaatacacaggagaacatgcagatacatgtaaatatctacatacagggatatttgtatgtgtggttgtgaaacccatacacaagtggatttggccatctttgggcagtgaggtcaaatgtgaatatgtgtaaaagtgcttttcagaactgcattactatgagaaaacatcaaaactgctgtagttttccatttctactgtatttcagttgcaacctatttttaataaactttgtatgtatttaagtgtatttgctattgttttgaaagtgctgacaaagtttatatttgtaacatcagccttcctcgcccatctctttccatctgtctcttcttcattaaacacttactgagtatga

SEQ ID NO: 336288 - DNA, 2638 bp, Homo sapiens
atgttacactcacccagagttgctgtgccagtcagaggcagagctgggccagtgggcagtattcctccctcatagtgaagggcgtcaggtcaacattttagcaccttttgagagtagtaattggattactcaggccaccaacagggatgaatttcaaactgatgaaactttgatacaatatgaggggtcttttaccttcctacttactcagtaaaggtatttttgtattctctgagcactgcatctttatcatgagtaaagcttagaaataatcaggtactttaacttgtactgtttctttcatggaaaaggaccaaactcttacccaggatctactggagcagctgttggagcccatgacgcctgtcgggatgcaaaagagaagcgctctaaaagccaagatgcagattcacctggaagttctggggcccctgaaaacttgacattcaaggaacgccagcgtcttttttcacaaggtcaagatgtatccaataaagtgaaagcttctcgtaaattaacagaactggagaatgaactgaacacaaagtgaaagaaaatgaggagaacactttgtatttaccccaaaatcttttcagttgtgggtttgtaggtgcgagtttgaagaggaaaagaggaagggggttatatttctaagtgatttacaatttctgtttctaaaattgttgggatttagaaatgtttcaattccaagaaattttattttactttaccatgagattgccatttatgtaatttaaacactgtctagtttcttaattatctaactcacacgagggtaagttttttgttggtttcttttttggagtcctgagttcaaaggggacagaactaagggcaggagaagagaatggatgtgtcttctctcccatcttcccctcatcatcgaccgaggagcacaaagaagttctgtttctgtttttttcagaaactttattttagctgtcaagcagagaatagcttgaactattcagactattgttggcactgtttagtagtgaccacacgctcttctacccgggaaggaacatatgacgacatgctcctcccatgtcccctgatggtgtctgttcccacaatatccttctagtctgcatcgtgaagtggcttaggccaaagcttcctgtgtgatgacgcacgtccgagactgttccatctcattcctcgcaaatttgagctcttctgatcaattctaaatatttgattaattttaattctgaaagaaaattttgaggatttaagcttaggggattttatttttataaataccagattattgttagacttaataaatcactgttaaatttaaagatgacagttaccttggaaagttcactaatacttcgctccaaggcgtctgtaaaagaagatatctttattggagcaatgttcatgtgactgggaatgacagaagaatgggagatgagtagggacccctcaagcacagctgtcactcagaaattttaaatttgaaaaagaaatcgattttcatctgtatgccgtcaaggaaggaattcagttacagggcatctgtaacttaaatattgtaagaataactcatatggaagttcaagctatttttatactataatagagttatttaattttaatttgttgaattattagttaccactgtcatttcttcagctatggatatgtggctgatgttggggagacggacctcagtgtgttttatattgtctggtgttaagatgataaattactttgtgattacaagcaaattttctatttgacaaagcccttggtggagtccaaatgatttttctgtaccatattgttctcttacacatacgtatgttaggaaaataggcacactttcaaagagaatgttctcttacacatacgtatgttaggaaaatagacacattttcaaagagaatgttctcttacatatgttaggaaaataggcacactttcaaagagaggtataggggctttttactgccttcgaaatcacttttaataaaagttgtatgataaatcattaaaaatgcgagtgtaaatatttttttttacctctatcagggtttttatttgaaagtgtgctcttaccatttccttgtttgagtaagagagtgaatggttctgagtgtttaggaaggatttgcttgcttgcagcagaagttctaggaaaagcaggcacctcccaaatatcttgaggacactggcagccttatggtgactaaatccacactttctttaaagagatgcagatgaattacttttctgttaatatatagaaaaatacacaggagaacatgcagatacatgtaaatatctacatacagggatatttgtatgtgtggttgtgaaacccatacacaagtggatttggccatctttgggcagtgaggtcaaatgtgaatatgtgtaaaagtgcttttcagaactgcattactatgagaaaacatcaaaactgctgtagttttccatttctactgtatttcagttgcaacctatttttaataaactttgtatgtatttaagtgtatttgctattgttttgaaagtgctgacaaagtttatatttgtaacatcagccttcctcgcccatctctttccatctgtctcttcttcattaaacacttactgagtatga

SEQ ID NO: 336289 - DNA, 7820 bp, Homo sapiens
gcggccgcggaggcggaggcagccgcggaggcggaggcggccggcggggggtggcgaggggcgccgggcccccgcggacctgtcgtcctcggcccgtcctccggccccggccccgcgcggctgaggaggcgcggccaggaccatgtcggcgggcggccgtgacgaggagcggcggaagctggccgacatcatccaccactggaacgccaaccggctggacctgttcgagatcagccagccgaccgaggatttggagttccatggagtgatgagattttattttcaagataaagctgctggaaactttgcaacaaaatgtattcgggtctctagtactgccaccactcaagatgtaatcgaaacgctcgcggagaaatttcgacctgatatgcgaatgctgtcctctcccaagtattcactctatgaagtgcatgtcagcggagaaagaagattggatatagatgagaaacctctagttgtacaactgaattggaacaaagatgatcgggaaggcagatttgttcttaagaatgagaatgacgccattcctcctaaggctcaaagtaatggacctgaaaagcaggaaaaagaaggggttatccagaacttcaagagaactctctcaaagaaagaaaagaaggaaaaaaagaagagagaaaaagaggcattgcgacaggcatctgataaagatgatagacctttccaaggggaggatgttgaaaattctcgactggctgctgaggtttacaaagacatgccggaaaccagctttactcgaaccatttctaatcctgaggtggttatgaaacgacggaggcagcaaaaattggaaaagagaatgcaggaatttcggagctcagatgggcggcctgattcaggtggaacattgagaatttatgcagatagtttaaaaccaaatattccctacaagacaatcctgctgtctactacagatcctgcagactttgctgtggctgaagctttagagaagtatggtctggaaaaagaaaaccctaaggattactgcatcgcccgggttatgcttcctcctggagcccagcattctgatgaaaagggtgctaaagaaattattcttgatgatgatgagtgtcctttacaaatcttcagggaatggccaagtgacaaagggattttagtctttcagttgaagaggaggccaccagaccacatcccaaagaaaaccaagaaacacttggaaggcaagacacccaagggaaaggagagagctgacgggtctggctatggctccacccttcctccggagaagctgccctatttagtagagttaagcccagatggttctgactctagagataagccaaagctttaccgccttcagttaagtgttactgaagttgggacagaaaagttggatgacaactctatccagttgtttggcccaggaattcagccccatcactgtgaccttaccaacatggatggagtggtcactgtgacgcccagaagtatggacgcagaaacctacgtggaaggccagcgcatctcagaaaccaccatgctgcagagtggcatgaaagtgcagtttggggcgtcccatgtatttaagtttgtggaccccagtcaggatcatgctcttgcaaaaagatctgtggatggaggcctgatggttaagggcccaagacataaacctggaattgttcaggagacaacttttgatttgggaggagatattcatagtgggacagcattaccgacaagcaagagcaccactaggctggacagcgacagagtgtcgtctgcctctagcacagccgagcggggaatggtgaagccgatgatcagagtagaacagcagccagattatcgcaggcaagaaagcagaacacaggatgcttctgggcctgagctgatactacctgcaagcattgaattcagggaaagttctgaagattcatttttgtctgccattataaattatactaatagctctacagtccactttaagttgtcccctacatatgtattatatatggcatgccggtatgtattgtccaaccagtacagacctgacatcagccctacagagcgcacacataaagtcattgcagtcgtcaacaagatggtgagcatgatggagggtgtcatccagaaacagaagaatattgcaggggcacttgccttctggatggcaaatgcatctgaacttctcaacttcattaagcaagaccgagaccttagtcggatcacactggatgctcaagatgttttagcacatttggttcaaatggcatttaaatacttggttcactgtcttcaatcagaacttaataattacatgccagcctttctagatgaccctgaagagaacagtctgcaacgaccaaaaatagatgatgtgctgcacacgctcacaggagccatgtccttgctacgacgctgcagagtcaatgccgccctgaccatccagctcttctctcagctcttccacttcatcaatatgtggctgttcaatagattggtgaccgacccagattcggggctgtgctcccattactggggtgcgattatccgtcagcagttgggccatattgaagcctgggctgagaagcaggggctggaactggctgcggactgtcatctgagcaggatcgtgcaggcaacgactttgcttaccatggataagtatgcacctgatgacattccaaatataaacagcacctgctttaagttaaattcattacaacttcaagccttattacagaactatcactgtgcacctgatgagccttttatcccaacggatcttatagaaaatgtagtgactgtggctgaaaacactgccgatgagctggcccgcagtgatggaagggaagtgcagttggaggaggatcctgatctgcagctgccgtttcttttgccagaagatggttattcttgtgatgttgtcagaaacattccaaatggtttacaagaatttttagaccctctgtgccagagaggattttgcaggttaattcctcacacacgttcaccaggtacttggacaatatattttgaaggtgcagattatgaaagtcaccttctgcgtgagaacacagagctggctcagcctctgaggaaagaacctgaaataatcactgtgaccctaaaaaagcagaatggaatgggccttagcattgttgcagcaaagggtgctggtcaagataaactaggaatctacgtgaagtcggttgtgaaaggaggtgctgcagatgtggatggacgtctagctgcaggtgatcagctcctcagtgtggatggacgaagtctggttggactctctcaggaaagggcggcagaactcatgacaagaacaagctctgtggtgacactggaagtagcaaagcagggtgccatctaccacggtctggccacccttctcaatcagccatcccccatgatgcagagaatttcagatcgtcgtggctcaggtaaaccccgaccaaagagtgaaggctttgagctctataataattcaactcaaaatgggtctcctgagagtcctcagctgccttgggcagaatatagtgaaccaaagaaattgcctggtgatgacagactgatgaaaaatagagctgatcaccgttccagccccaacgtagcaaatcagcctcctagtcctggagggaaaagtgcatatgcctctggaacaacagcgaagataacatctgtctctactggaaacctctgcactgaggagcagacgcctccgcctagacctgaagcctaccccatccccactcagacgtacaccagagagtattttaccttcccagcttccaaatcccaggatcggatggctcctcctcagaaccagtggccaaattatgaggaaaagccacatatgcacacagatagtaatcattccagtattgcaattcagcgtgttacacgttcccaagaagaacttcgagaagataaagcttaccaacttgagcggcatcgaatagaggcagctatggaccgaaagtctgatagtgatatgtggataaatcagagctcctcactggactccagtacctctagccaggagcatctgaaccattcctctaagtcggtcacccctgcttccacactgaccaaaagtggccctggccgttggaaaacaccagcagccataccggccacccctgtggccgtctcccagccaatccgaacagacctgcctccgccacccccgccacctccagtccactatgccggtgatttcgatggaatgtccatggatttgcctctcccaccacccccttccgccaaccagatagggctgccgtctgcgcaggtggctgctgctgaacggagaaagagagaagaacatcagcgttggtatgagaaggagaaggcccgcctggaggaggagcgggagaggaagcggagagagcaggagaggaagttgggccagatgcgcactcagtccttaaaccctgctccgttttctcccctgactgcacagcagatgaagcccgaaaagccttccacactccagcggccacaggaaacagtcattcgggagctgcagcctcagcagcagccccgcacgatcgagcgcagagacttgcagtacattacagtcagcaaagaggagctttcctcgggggacagtctgtcccccgacccgtggaagcgggacgccaaggagaagctggagaagcagcagcagatgcacatcgtggacatgctgagcaaggagatccaggagctccagagcaaaccggaccgcagcgccgaggagagcgaccggctgcgcaagctcatgctggagtggcagttccagaagagactccaggagtcgaagcagaaggacgaagatgacgaggaggaggaggacgatgatgtggacaccatgctgatcatgcagcgcctggaggctgaacgaagagcgaggttgcaggacgaggagcggaggcggcagcagcagttagaagagatgcgcaagcgggaagcggaagaccgagcgaggcaagaggaagagcgccggcggcaggaggaggagcgaacaaaacgagacgctgaagaaaagaggcgacaggaagaagggtattacagccgcctggaagccgagaggcgcagacagcacgacgaggcggcgcgcaggttgctggagcccgaggcgcccggtctgtgccgccctccgcttccccgggactacgagcccccgtccccgtcccccgcccggcgcccctcctcccccgcctcagcgaaacgcctcctacctcaaaacacaggtcctctcccccgactcgctgttcactgccaagtttgttgcatacaatgaggaggaggaggaggaggactgcagcctagcaggtcaggataagtactccagcacaagaaagtctcatggggaccttcttcctgcccctcttaaaccacggccacccccctgccagccacgcccggcctccgatggcgtctttctctccaactcattccagccaccctcagccaaagccaacagtactgctcacaaaaaaggccagcccctgccccctccaaaaaaatccagctcctaccatcccagccactgcaaaggaccaaactcttacccaggatctactggagcagctgttggagcccatgacgcctgtcgggatgcaaaagagaagcgctctaaaagccaagatgcagattcacctggaagttctggggcccctgaaaacttgacattcaaggaacgccagcgtcttttttcacaaggtcaagatgtatccaataaagtgaaagcttctcgtaaattaacagaactggagaatgaactgaacacaaagtgaaagaaaatgaggagaacactttgtatttaccccaaaatcttttcagttgtgggtttgtaggtgcgagtttgaagaggaaaagaggaagggggttatatttctaagtgatttacaatttctgtttctaaaattgttgggatttagaaatgtttcaattccaagaaattttattttactttaccatgagattgccatttatgtaatttaaacactgtctagtttcttaattatctaactcacacgagggtaagttttttgttggtttcttttttggagtcctgagttcaaaggggacagaactaagggcaggagaagagaatggatgtgtcttctctcccatcttcccctcatcatcgaccgaggagcacaaagaagttctgtttctgtttttttcagaaactttattttagctgtcaagcagagaatagcttgaactattcagactattgttggcactgtttagtagtgaccacacgctcttctacccgggaaggaacatatgacgacatgctcctcccatgtcccctgatggtgtctgttcccacaatatccttctagtctgcatcgtgaagtggcttaggccaaagcttcctgtgtgatgacgcacgtccgagactgttccatctcattcctcgcaaatttgagctcttctgatcaattctaaatatttgattaattttaattctgaaagaaaattttgaggatttaagcttaggggattttatttttataaataccagattattgttagacttaataaatcactgttaaatttaaagatgacagttaccttggaaagttcactaatacttcgctccaaggcgtctgtaaaagaagatatctttattggagcaatgttcatgtgactgggaatgacagaagaatgggagatgagtagggacccctcaagcacagctgtcactcagaaattttaaatttgaaaaagaaatcgattttcatctgtatgccgtcaaggaaggaattcagttacagggcatctgtaacttaaatattgtaagaataactcatatggaagttcaagctatttttatactataatagagttatttaattttaatttgttgaattattagttaccactgtcatttcttcagctatggatatgtggctgatgttggggagacggacctcagtgtgttttatattgtctggtgttaagatgataaattactttgtgattacaagcaaattttctatttgacaaagcccttggtggagtccaaatgatttttctgtaccatattgttctcttacacatacgtatgttaggaaaataggcacactttcaaagagaatgttctcttacacatacgtatgttaggaaaatagacacattttcaaagagaatgttctcttacatatgttaggaaaataggcacactttcaaagagaggtataggggctttttactgccttcgaaatcacttttaataaaagttgtatgataaatcattaaaaatgcgagtgtaaatatttttttttacctctatcagggtttttatttgaaagtgtgctcttaccatttccttgtttgagtaagagagtgaatggttctgagtgtttaggaaggatttgcttgcttgcagcagaagttctaggaaaagcaggcacctcccaaatatcttgaggacactggcagccttatggtgactaaatccacactttctttaaagagatgcagatgaattacttttctggatatttgtatgtgtggttgtgaaacccatacacaagtggatttggccatctttgggcagtgaggtcaaatgtgaatatgtgtaaaagtgcttttcagaactgcattactatgagaaaacatcaaaactgctgtagttttccatttctactgtatttcagttgcaacctatttttaataaactttgtatgtatttaagtgtatttgctattgttttgaaagtgctgacaaagtttatatttgtaacatcagccttcctcgcccatctctttccatctgtctcttcttcattaaacacttactgagtatga

SEQ ID NO: 336290 - DNA, 5937 bp, Homo sapiens
gcggccgcggaggcggaggcagccgcggaggcggaggcggccggcggggggtggcgaggggcgccgggcccccgcggacctgtcgtcctcggcccgtcctccggccccggccccgcgcggctgaggaggcgcggccaggaccatgtcggcgggcggccgtgacgaggagcggcggaagctggccgacatcatccaccactggaacgccaaccggctggacctgttcgagatcagccagccgaccgaggatttggagttccatggagtgatgagattttattttcaagataaagctgctggaaactttgcaacaaaatgtattcgggtctctagtactgccaccactcaagatgtaatcgaaacgctcgcggagaaatttcgacctgatatgcgaatgctgtcctctcccaagtattcactctatgaagtgcatgtcagcggagaaagaagattggatatagatgagaaacctctagttgtacaactgaattggaacaaagatgatcgggaaggcagatttgttcttaagaatgagaatgacgccattcctcctaaggctcaaagtaatggacctgaaaagcaggaaaaagaaggggttatccagaacttcaagagaactctctcaaagaaagaaaagaaggaaaaaaagaagagagaaaaagaggcattgcgacaggcatctgataaagatgatagacctttccaaggggaggatgttgaaaattctcgactggctgctgaggtttacaaagacatgccggaaaccagctttactcgaaccatttctaatcctgaggtggttatgaaacgacggaggcagcaaaaattggaaaagagaatgcaggaatttcggagctcagatgggcggcctgattcaggtggaacattgagaatttatgcagatagtttaaaaccaaatattccctacaagacaatcctgctgtctactacagatcctgcagactttgctgtggctgaagctttagagaagtatggtctggaaaaagaaaaccctaaggattactgcatcgcccgggttatgcttcctcctggagcccagcattctgatgaaaagggtgctaaagaaattattcttgatgatgatgagtgtcctttacaaatcttcagggaatggccaagtgacaaagggattttagtctttcagttgaagaggaggccaccagaccacatcccaaagaaaaccaagaaacacttggaaggcaagacacccaagggaaaggagagagctgacgggtctggctatggctccacccttcctccggagaagctgccctatttagtagagttaagcccagatggttctgactctagagataagccaaagctttaccgccttcagttaagtgttactgaagttgggacagaaaagttggatgacaactctatccagttgtttggcccaggaattcagccccatcactgtgaccttaccaacatggatggagtggtcactgtgacgcccagaagtatggacgcagaaacctacgtggaaggccagcgcatctcagaaaccaccatgctgcagagtggcatgaaagtgcagtttggggcgtcccatgtatttaagtttgtggaccccagtcaggatcatgctcttgcaaaaagatctgtggatggaggcctgatggttaagggcccaagacataaacctggaattgttcaggagacaacttttgatttgggaggagatattcatagtgggacagcattaccgacaagcaagagcaccactaggctggacagcgacagagtgtcgtctgcctctagcacagccgagcggggaatggtgaagccgatgatcagagtagaacagcagccagattatcgcaggcaagaaagcagaacacaggatgcttctgggcctgagctgatactacctgcaagcattgaattcagggaaagttctgaagattcatttttgtctgccattataaattatactaatagctctacagtccactttaagttgtcccctacatatgtattatatatggcatgccggtatgtattgtccaaccagtacagacctgacatcagccctacagagcgcacacataaagtcattgcagtcgtcaacaagatggtgagcatgatggagggtgtcatccagaaacagaagaatattgcaggggcacttgccttctggatggcaaatgcatctgaacttctcaacttcattaagcaagaccgagaccttagtcggatcacactggatgctcaagatgttttagcacatttggttcaaatggcatttaaatacttggttcactgtcttcaatcagaacttaataattacatgccagcctttctagatgaccctgaagagaacagtctgcaacgaccaaaaatagatgatgtgctgcacacgctcacaggagccatgtccttgctacgacgctgcagagtcaatgccgccctgaccatccagctcttctctcagctcttccacttcatcaatatgtggctgttcaatagattggtgaccgacccagattcggggctgtgctcccattactggggtgcgattatccgtcagcagttgggccatattgaagcctgggctgagaagcaggggctggaactggctgcggactgtcatctgagcaggatcgtgcaggcaacgactttgcttaccatggataagtatgcacctgatgacattccaaatataaacagcacctgctttaagttaaattcattacaacttcaagccttattacagaactatcactgtgcacctgatgagccttttatcccaacggatcttatagaaaatgtagtgactgtggctgaaaacactgccgatgagctggcccgcagtgatggaagggaagtgcagttggaggaggatcctgatctgcagctgccgtttcttttgccagaagatggttattcttgtgatgttgtcagaaacattccaaatggtttacaagaatttttagaccctctgtgccagagaggattttgcaggttaattcctcacacacgttcaccaggtacttggacaatatattttgaaggtgcagattatgaaagtcaccttctgcgtgagaacacagagctggctcagcctctgaggaaagaacctgaaataatcactgtgaccctaaaaaagcagaatggaatgggccttagcattgttgcagcaaagggtgctggtcaagataaactaggaatctacgtgaagtcggttgtgaaaggaggtgctgcagatgtggatggacgtctagctgcaggtgatcagctcctcagtgtggatggacgaagtctggttggactctctcaggaaagggcggcagaactcatgacaagaacaagctctgtggtgacactggaagtagcaaagcagggtgccatctaccacggtctggccacccttctcaatcagccatcccccatgatgcagagaatttcagatcgtcgtggctcaggtaaaccccgaccaaagagtgaaggctttgagctctataataattcaactcaaaatgggtctcctgagagtcctcagctgccttgggcagaatatagtgaaccaaagaaattgcctggtgatgacagactgatgaaaaatagagctgatcaccgttccagccccaacgtagcaaatcagcctcctagtcctggagggaaaagtgcatatgcctctggaacaacagcgaagataacatctgtctctactggaaacctctgcactgaggagcagacgcctccgcctagacctgaagcctaccccatccccactcagacgtacaccagagagtattttaccttcccagcttccaaatcccaggatcggatggctcctcctcagaaccagtggccaaattatgaggaaaagccacatatgcacacagatagtaatcattccagtattgcaattcagcgtgttacacgttcccaagaagaacttcgagaagataaagcttaccaacttgagcggcatcgaatagaggcagctatggaccgaaagtctgatagtgatatgtggataaatcagagctcctcactggactccagtacctctagccaggagcatctgaaccattcctctaagtcggtcacccctgcttccacactgaccaaaagtggccctggccgttggaaaacaccagcagccataccggccacccctgtggccgtctcccagccaatccgaacagacctgcctccgccacccccgccacctccagtccactatgccggtgatttcgatggaatgtccatggatttgcctctcccaccacccccttccgccaaccagatagggctgccgtctgcgcaggtggctgctgctgaacggagaaagagagaagaacatcagcgttggtatgagaaggagaaggcccgcctggaggaggagcgggagaggaagcggagagagcaggagaggaagttgggccagatgcgcactcagtccttaaaccctgctccgttttctcccctgactgcacagcagatgaagcccgaaaagccttccacactccagcggccacaggaaacagtcattcgggagctgcagcctcagcagcagccccgcacgatcgagcgcagagacttgcagtacattacagtcagcaaagaggagctttcctcgggggacagtctgtcccccgacccgtggaagcgggacgccaaggagaagctggagaagcagcagcagatgcacatcgtggacatgctgagcaaggagatccaggagctccagagcaaaccggaccgcagcgccgaggagagcgaccggctgcgcaagctcatgctggagtggcagttccagaagagactccaggagtcgaagcagaaggacgaagatgacgaggaggaggaggacgatgatgtggacaccatgctgatcatgcagcgcctggaggctgaacgaagagcgaggttgcaggacgaggagcggaggcggcagcagcagttagaagagatgcgcaagcgggaagcggaagaccgagcgaggcaagaggaagagcgccggcggcaggaggaggagcgaacaaaacgagacgctgaagaaaagaggcgacaggaagaagggtattacagccgcctggaagccgagaggcgcagacagcacgacgaggcggcgcgcaggttgctggagcccgaggcgcccggtctgtgccgccctccgcttccccgggactacgagcccccgtccccgtcccccgcccggcgcccctcctcccccgcctcagcgaaacgcctcctacctcaaaacacaggtcctctcccccgactcgctgttcactgccaagtttgttgcatacaatgaggaggaggaggaggaggactgcagcctagcaggtcaggataagtactccagcacaagaaagtctcatggggaccttcttcctgcccctcttaaaccacggccacccccctgccagccacgcccggcctccgatggcgtctttctctccaactcattccagccaccctcagccaaagccaacagtactgctcacaaaaaaggccagcccctgccccctccaaaaaaatccagctcctaccatcccagccactgcaaaggtagaggtaaaagagtgacaaatcagctctctttgtcttaatgattggaacctcagcatcactctgcacacttgccctgtagtatggtccatggcgatcatacttgccttggaatttggatgtcatgtgatcactggtctcggcatggtgatcctcctctgcctctgattgtgatgttctgtgctattactctttggtagatatcttagtactccgatttcttttacactttaaaaagttccatttctttgatcagctgacaatcagtccttctctgttgttcccaaatcacttgaagtactgttggtcttggctttcattttctctctctaccaatgatcttctatttgtttgaacaagtgcttttcacacgctgtagtgtct

SEQ ID NO: 336291 - DNA, 5261 bp, Homo sapiens
gcggccgcggaggcggaggcagccgcggaggcggaggcggccggcggggggtggcgaggggcgccgggcccccgcggacctgtcgtcctcggcccgtcctccggccccggccccgcgcggctgaggaggcgcggccaggaccatgtcggcgggcggccgtgacgaggagcggcggaagctggccgacatcatccaccactggaacgccaaccggctggacctgttcgagatcagccagccgaccgaggatttggagttccatggagtgatgagattttattttcaagataaagctgctggaaactttgcaacaaaatgtattcgggtctctagtactgccaccactcaagatgtaatcgaaacgctcgcggagaaatttcgacctgatatgcgaatgctgtcctctcccaagtattcactctatgaagtgcatgtcagcggagaaagaagattggatatagatgagaaacctctagttgtacaactgaattggaacaaagatgatcgggaaggcagatttgttcttaagaatgagaatgacgccattcctcctaaggctcaaagtaatggacctgaaaagcaggaaaaagaaggggttatccagaacttcaagagaactctctcaaagaaagaaaagaaggaaaaaaagaagagagaaaaagaggcattgcgacaggcatctgataaagatgatagacctttccaaggggaggatgttgaaaattctcgactggctgctgaggtttacaaagacatgccggaaaccagctttactcgaaccatttctaatcctgaggtggttatgaaacgacggaggcagcaaaaattggaaaagagaatgcaggaatttcggagctcagatgggcggcctgattcaggtggaacattgagaatttatgcagatagtttaaaaccaaatattccctacaagacaatcctgctgtctactacagatcctgcagactttgctgtggctgaagctttagagaagtatggtctggaaaaagaaaaccctaaggattactgcatcgcccgggttatgcttcctcctggagcccagcattctgatgaaaagggtgctaaagaaattattcttgatgatgatgagtgtcctttacaaatcttcagggaatggccaagtgacaaagggattttagtctttcagttgaagaggaggccaccagaccacatcccaaagaaaaccaagaaacacttggaaggcaagacacccaagggaaaggagagagctgacgggtctggctatggctccacccttcctccggagaagctgccctatttagtagagttaagcccagatggttctgactctagagataagccaaagctttaccgccttcagttaagtgttactgaagttgggacagaaaagttggatgacaactctatccagttgtttggcccaggaattcagccccatcactgtgaccttaccaacatggatggagtggtcactgtgacgcccagaagtatggacgcagaaacctacgtggaaggccagcgcatctcagaaaccaccatgctgcagagtggcatgaaagtgcagtttggggcgtcccatgtatttaagtttgtggaccccagtcaggatcatgctcttgcaaaaagatctgtggatggaggcctgatggttaagggcccaagacataaacctggaattgttcaggagacaacttttgatttgggaggagatattcatagtgggacagcattaccgacaagcaagagcaccactaggctggacagcgacagagtgtcgtctgcctctagcacagccgagcggggaatggtgaagccgatgatcagagtagaacagcagccagattatcgcaggcaagaaagcagaacacaggatgcttctgggcctgagctgatactacctgcaagcattgaattcagggaaagttctgaagattcatttttgtctgccattataaattatactaatagctctacagtccactttaagttgtcccctacatatgtattatatatggcatgccggtatgtattgtccaaccagtacagacctgacatcagccctacagagcgcacacataaagtcattgcagtcgtcaacaagatggtgagcatgatggagggtgtcatccagaaacagaagaatattgcaggggcacttgccttctggatggcaaatgcatctgaacttctcaacttcattaagcaagaccgagaccttagtcggatcacactggatgctcaagatgttttagcacatttggttcaaatggcatttaaatacttggttcactgtcttcaatcagaacttaataattacatgccagcctttctagatgaccctgaagagaacagtctgcaacgaccaaaaatagatgatgtgctgcacacgctcacaggagccatgtccttgctacgacgctgcagagtcaatgccgccctgaccatccagctcttctctcagctcttccacttcatcaatatgtggctgttcaatagattggtgaccgacccagattcggggctgtgctcccattactggggtgcgattatccgtcagcagttgggccatattgaagcctgggctgagaagcaggggctggaactggctgcggactgtcatctgagcaggatcgtgcaggcaacgactttgcttaccatggataagtatgcacctgatgacattccaaatataaacagcacctgctttaagttaaattcattacaacttcaagccttattacagaactatcactgtgcacctgatgagccttttatcccaacggatcttatagaaaatgtagtgactgtggctgaaaacactgccgatgagctggcccgcagtgatggaagggaagtgcagttggaggaggatcctgatctgcagctgccgtttcttttgccagaagatggttattcttgtgatgttgtcagaaacattccaaatggtttacaagaatttttagaccctctgtgccagagaggattttgcaggttaattcctcacacacgttcaccaggtacttggacaatatattttgaaggtgcagattatgaaagtcaccttctgcgtgagaacacagagctggctcagcctctgaggaaagaacctgaaataatcactgtgaccctaaaaaagcagaatggaatgggccttagcattgttgcagcaaagggtgctggtcaagataaactaggaatctacgtgaagtcggttgtgaaaggaggtgctgcagatgtggatggacgtctagctgcaggtgatcagctcctcagtgtggatggacgaagtctggttggactctctcaggaaagggcggcagaactcatgacaagaacaagctctgtggtgacactggaagtagcaaagcagggtgccatctaccacggtctggccacccttctcaatcagccatcccccatgatgcagagaatttcagatcgtcgtggctcaggtaaaccccgaccaaagagtgaaggctttgagctctataataattcaactcaaaatgggtctcctgagagtcctcagctgccttgggcagaatatagtgaaccaaagaaattgcctggtgatgacagactgatgaaaaatagagctgatcaccgttccagccccaacgtagcaaatcagcctcctagtcctggagggaaaagtgcatatgcctctggaacaacagcgaagataacatctgtctctactggaaacctctgcactgaggagcagacgcctccgcctagacctgaagcctaccccatccccactcagacgtacaccagagagtattttaccttcccagcttccaaatcccaggatcggatggctcctcctcagaaccagtggccaaattatgaggaaaagccacatatgcacacagatagtaatcattccagtattgcaattcagcgtgttacacgttcccaagaagaacttcgagaagataaagcttaccaacttgagcggcatcgaatagaggcagctatggaccgaaagtctgatagtgatatgtggataaatcagagctcctcactggactccagtacctctagccaggagcatctgaaccattcctctaagtcggtcacccctgcttccacactgaccaaaagtggccctggccgttggaaaacaccagcagccataccggccacccctgtggccgtctcccagccaatccgaacagacctgcctccgccacccccgccacctccagtccactatgccggtgatttcgatggaatgtccatggatttgcctctcccaccacccccttccgccaaccagatagggctgccgtctgcgcaggtggctgctgctgaacggagaaagagagaagaacatcagcgttggtatgagaaggagaaggcccgcctggaggaggagcgggagaggaagcggagagagcaggagaggaagttgggccagatgcgcactcagtccttaaaccctgctccgttttctcccctgactgcacagcagatgaagcccgaaaagccttccacactccagcggccacaggaaacagtcattcgggagctgcagcctcagcagcagccccgcacgatcgagcgcagagacttgcagtacattacagtcagcaaagaggagctttcctcgggggacagtctgtcccccgacccgtggaagcgggacgccaaggagaagctggagaagcagcagcagatgcacatcgtggacatgctgagcaaggagatccaggagctccagagcaaaccggaccgcagcgccgaggagagcgaccggctgcgcaagctcatgctggagtggcagttccagaagagactccaggagtcgaagcagaaggacgaagatgacgaggaggaggaggacgatgatgtggacaccatgctgatcatgcagcgcctggaggctgaacgaagagcgaggactgctatgccagcaatctctgttctagatttggtatgttcttgtttctttccctttggtacttttttcctgtcttgattttcttttctttcagtggtggctgtttgatgttttcagtagatccagttctccttaggggtgtcctccatcaggagatggagtccctgacactttagaagcatgcctttgaatgttcctagatttagttactctttgcttttctccgttaattttaagtgttactgtttgtttatggttttgaccttttctcggtttcagtcataaattgattccgtgtattcttacgtagtcataaatacatgagcaaatgaaataaattttgtaatgagtaatc

SEQ ID NO: 336292 - DNA, 3337 bp, Homo sapiens
gcggccgcggaggcggaggcagccgcggaggcggaggcggccggcggggggtggcgaggggcgccgggcccccgcggacctgtcgtcctcggcccgtcctccggccccggccccgcgcggctgaggaggcgcggccaggaccatgtcggcgggcggccgtgacgaggagcggcggaagctggccgacatcatccaccactggaacgccaaccggctggacctgttcgagatcagccagccgaccgaggatttggagttccatggagtgatgagattttattttcaagataaagctgctggaaactttgcaacaaaatgtattcgggtctctagtactgccaccactcaagatgtaatcgaaacgctcgcggagaaatttcgacctgatatgcgaatgctgtcctctcccaagtattcactctatgaagtgcatgtcagcggagaaagaagattggatatagatgagaaacctctagttgtacaactgaattggaacaaagatgatcgggaaggcagatttgttcttaagaatgagaatgacgccattcctcctaaggctcaaagtaatggacctgaaaagcaggaaaaagaaggggttatccagaacttcaagagaactctctcaaagaaagaaaagaaggaaaaaaagaagagagaaaaagaggcattgcgacaggcatctgataaagatgatagacctttccaaggggaggatgttgaaaattctcgactggctgctgaggtttacaaagacatgccggaaaccagctttactcgaaccatttctaatcctgaggtggttatgaaacgacggaggcagcaaaaattggaaaagagaatgcaggaatttcggagctcagatgggcggcctgattcaggtggaacattgagaatttatgcagatagtttaaaaccaaatattccctacaagacaatcctgctgtctactacagatcctgcagactttgctgtggctgaagctttagagaagtatggtctggaaaaagaaaaccctaaggattactgcatcgcccgggttatgcttcctcctggagcccagcattctgatgaaaagggtgctaaagaaattattcttgatgatgatgagtgtcctttacaaatcttcagggaatggccaagtgacaaagggattttagtctttcagttgaagaggaggccaccagaccacatcccaaagaaaaccaagaaacacttggaaggcaagacacccaagggaaaggagagagctgacgggtctggctatggctccacccttcctccggagaagctgccctatttagtagagttaagcccagatggttctgactctagagataagccaaagctttaccgccttcagttaagtgttactgaagttgggacagaaaagttggatgacaactctatccagttgtttggcccaggaattcagccccatcactgtgaccttaccaacatggatggagtggtcactgtgacgcccagaagtatggacgcagaaacctacgtggaaggccagcgcatctcagaaaccaccatgctgcagagtggcatgaaagtgcagtttggggcgtcccatgtatttaagtttgtggaccccagtcaggatcatgctcttgcaaaaagatctgtggatggaggcctgatggttaagggcccaagacataaacctggaattgttcaggagacaacttttgatttgggaggagatattcatagtgggacagcattaccgacaagcaagagcaccactaggctggacagcgacagagtgtcgtctgcctctagcacagccgagcggggaatggtgaagccgatgatcagagtagaacagcagccagattatcgcaggcaagaaagcagaacacaggatgcttctgggcctgagctgatactacctgcaagcattgaattcagggaaagttctgaagattcatttttgtctgccattataaattatactaatagctctacagtccactttaagttgtcccctacatatgtattatatatggcatgccggtatgtattgtccaaccagtacagacctgacatcagccctacagagcgcacacataaagtcattgcagtcgtcaacaagatggtgagcatgatggagggtgtcatccagaaacagaagaatattgcaggggcacttgccttctggatggcaaatgcatctgaacttctcaacttcattaagcaagaccgagaccttagtcggatcacactggatgctcaagatgttttagcacatttggttcaaatggcatttaaatacttggttcactgtcttcaatcagaacttaataattacatgccagcctttctagatgaccctgaagagaacagtctgcaacgaccaaaaatagatgatgtgctgcacacgctcacaggagccatgtccttgctacgacgctgcagagtcaatgccgccctgaccatccagctcttctctcagctcttccacttcatcaatatgtggctgttcaatagattggtgaccgacccagattcggggctgtgctcccattactggggtgcgattatccgtcagcagttgggccatattgaagcctgggctgagaagcaggggctggaactggctgcggactgtcatctgagcaggatcgtgcaggcaacgactttgcttaccatggataagtatgcacctgatgacattccaaatataaacagcacctgctttaagttaaattcattacaacttcaagccttattacagaactatcactgtgcacctgatgagccttttatcccaacggatcttatagaaaatgtagtgactgtggctgaaaacactgccgatgagctggcccgcagtgatggaagggaagtgcagttggaggaggatcctgatctgcagctgccgtttcttttgccagaagatggttattcttgtgatgttgtcagaaacattccaaatggtttacaagaatttttagaccctctgtgccagagaggattttgcaggttaattcctcacacacgttcaccaggtacttggacaatatattttgaaggtgcagattatgaaagtcaccttctgcgtgagaacacagagctggcaagtattttgagggtaccatgaagtgaaatggatccttaggacttgaagatgtgatgcagatttgtttctttcttacactgaagattggtgtgatggcagagttttaaaatcactgttaaatactgatattcagaaattttcaagccataattcatatatatgtattttttcctcccaagccatgtctattacagttttgtctgtaagcagtggtgctttttaaaataaagaacacttatacccatggtt

SEQ ID NO: 336293 - DNA, 2849 bp, Homo sapiens
gcggccgcggaggcggaggcagccgcggaggcggaggcggccggcggggggtggcgaggggcgccgggcccccgcggacctgtcgtcctcggcccgtcctccggccccggccccgcgcggctgaggaggcgcggccaggaccatgtcggcgggcggccgtgacgaggagcggcggaagctggccgacatcatccaccactggaacgccaaccggctggacctgttcgagatcagccagccgaccgaggatttggagttccatggagtgatgagattttattttcaagataaagctgctggaaactttgcaacaaaatgtattcgggtctctagtactgccaccactcaagatgtaatcgaaacgctcgcggagaaatttcgacctgatatgcgaatgctgtcctctcccaagtattcactctatgaagtgcatgtcagcggagaaagaagattggatatagatgagaaacctctagttgtacaactgaattggaacaaagatgatcgggaaggcagatttgttcttaagaatgagaatgacgccattcctcctaaggctcaaagtaatggacctgaaaagcaggaaaaagaaggggttatccagaacttcaagagaactctctcaaagaaagaaaagaaggaaaaaaagaagagagaaaaagaggcattgcgacaggcatctgataaagatgatagacctttccaaggggaggatgttgaaaattctcgactggctgctgaggtttacaaagacatgccggaaaccagctttactcgaaccatttctaatcctgaggtggttatgaaacgacggaggcagcaaaaattggaaaagagaatgcaggaatttcggagctcagatgggcggcctgattcaggtggaacattgagaatttatgcagatagtttaaaaccaaatattccctacaagacaatcctgctgtctactacagatcctgcagactttgctgtggctgaagctttagagaagtatggtctggaaaaagaaaaccctaaggattactgcatcgcccgggttatgcttcctcctggagcccagcattctgatgaaaagggtgctaaagaaattattcttgatgatgatgagtgtcctttacaaatcttcagggaatggccaagtgacaaagggattttagtctttcagttgaagaggaggccaccagaccacatcccaaagaaaaccaagaaacacttggaaggcaagacacccaagggaaaggagagagctgacgggtctggctatggctccacccttcctccggagaagctgccctatttagtagagttaagcccagatggttctgactctagagataagccaaagctttaccgccttcagttaagtgttactgaagttgggacagaaaagttggatgacaactctatccagttgtttggcccaggaattcagccccatcactgtgaccttaccaacatggatggagtggtcactgtgacgcccagaagtatggacgcagaaacctacgtggaaggccagcgcatctcagaaaccaccatgctgcagagtggcatgaaagtgcagtttggggcgtcccatgtatttaagtttgtggaccccagtcaggatcatgctcttgcaaaaagatctgtggatggaggcctgatggttaagggcccaagacataaacctggaattgttcaggagacaacttttgatttgggaggagatattcatagtgggacagcattaccgacaagcaagagcaccactaggctggacagcgacagagtgtcgtctgcctctagcacagccgagcggggaatggtgaagccgatgatcagagtagaacagcagccagattatcgcaggcaagaaagcagaacacaggatgcttctgggcctgagctgatactacctgcaagcattgaattcagggaaagttctgaagattcatttttgtctgccattataaattatactaatagctctacagtccactttaagttgtcccctacatatgtattatatatggcatgccggtatgtattgtccaaccagtacagacctgacatcagccctacagagcgcacacataaagtcattgcagtcgtcaacaagatggtgagcatgatggagggtgtcatccaggtacgttccagccggccagccatgctcctccagtgattgtggttgtaattgctaagccagtgaattcagcttctttaaggcttctcatttggttacaagatttttttctaaaataaaagttatgtaaatattgtaggaaaatgtataactttaaagagttgaaaggaaatgcaagcttttttctattttgttttccctgtaaaacttcagcataagtgaagttaacttgtagtaatagttgtgagaaagtgctgagactgttgtgggcttttgtagaattttttctgtaaataatttgttgagatgaagttcatataatattaaccattttgaagtgaacaattcagtcgcatttggtgcattcacagtgttgtgcagccaccacccctgtcggttccaaaacgtctccatcacctcagagcgatacccctcaagtagttcctggggtttttcttttcccccgttccctggtaacgccttcttagactttttaaaaatggttctcaaaagtcacttgctcctgtgtaatgagcctagacgttggtagtaattgggctttttgatagcacatgtgtaggtgtaatggacattgtaacatacttctcacttaaaatgaaattctgtcataaacctgttttcaaaatttcagaagataaaggtattttgttggtagaatggtttgactcctttacgtactttctgtcccgatctacgaatt

SEQ ID NO: 336294 - DNA, 691 bp, Homo sapiens
  misc_feature (645)..(645): n is a, c, g, or t
gcggccgcggaggcggaggcagccgcggaggcggaggcggccggcggggggtggcgaggggcgccgggcccccgcggacctgtcgtcctcggcccgtcctccggccccggccccgcgcggctgaggaggcgcggccaggaccatgtcggcgggcggccgtgacgaggagcggcggaagctggccgacatcatccaccactggaacgccaaccggctggacctgttcgagatcagccagccgaccgaggatttggagttccatggagtgatgagattttattttcaagataaagctgctggaaactttgcaacaaaatgtattcgggtctctagtactgccaccactcaagatgtaatcgaaacgctcgcggagaaatttcgacctgatatgcgaatgctgtcctctcccaagtattcactctatgaagtgcatgtcagcggaggtcagtgtatacaggaagggtttgctagaggcatgacctgacctgtgaagagacagcttgtccagggtcattgtggtcatgtcaggtttactgctcgtctccatctttcttctcttttggtgggtaggagagtagctggcaggctgagaaaactgttttatgtctgggaagtgttcttataaatccctggcaacgtgactcnttgaggtcttatttcagactgcctgaggctgtctagctagataccg

SEQ ID NO: 336295 - DNA, 539 bp, Homo sapiens
  misc_feature (493)..(493): n is a, c, g, or t
aaaaaagtgaacagacttcctcatttattattacaaaaagtgaatccttttcagaatgttgttttccaaaaatgtaccattttgttttcttttaggatttggagttccatggagtgatgagattttattttcaagataaagctgctggaaactttgcaacaaaatgtattcgggtctctagtactgccaccactcaagatgtaatcgaaacgctcgcggagaaatttcgacctgatatgcgaatgctgtcctctcccaagtattcactctatgaagtgcatgtcagcggaggtcagtgtatacaggaagggtttgctagaggcatgacctgacctgtgaagagacagcttgtccagggtcattgtggtcatgtcaggtttactgctcgtctccatctttcttctcttttggtgggtaggagagtagctggcaggctgagaaaactgttttatgtctgggaagtgttcttataaatccctggcaacgtgactcnttgaggtcttatttcagactgcctgaggctgtctagctagataccg

SEQ ID NO: 336296 - DNA, 524 bp, Homo sapiens
caaatggataattttaaatgtctggtaattcagtttgcagaggggattaaaggtgtagagtaagaagaatcaataccgtgtgttggatattaagcaattggtaattaatcttgcttcctttatcttgacaagatgtgctttttcacttacaatttgcttgtttcctccttaggattttgcaggttaattcctcacacacgttcaccaggtacttggacaatatattttgaaggtgcagattatgaaagtcaccttctgcgtgagaacacagagctggcaagtattttgagggtaccatgaagtgaaatggatccttaggacttgaagatgtgatgcagatttgtttctttcttacactgaagattggtgtgatggcagagttttaaaatcactgttaaatactgatattcagaaattttcaagccataattcatatatatgtattttttcctcccaagccatgtctattacagttttgtctgtaagcagtggtgctttttaaaataaagaacacttatacccat

SEQ ID NO: 336297 - DNA, 395 bp, Homo sapiens
ttctaaacccgttgtgctttctctccatgtagagcaccactaggctggacagcgacagagtgtcgtctgcctctagcacagccgagcggggaatggtgaagccgatgatcagagtagaacagcagccagattatcgcaggcaagaaagcaggtaggaaacacatcatttttcaatggtgaaagtactgaaagtattcctaaaaaagggttgggataaagattgttgaatttataaaggttcagctgacatgtttacaatgttagcaataatattttaagggcatttcctttctgtgttattgaattgaaagaaatgctttaccaataattatatccctcacttatatgccacagtgttatcagattgaaataagagtacattgaattaaaatgtt

SEQ ID NO: 336298 - DNA, 4981 bp, Homo sapiens
gcggccgcggaggcggaggcagccgcggaggcggaggcggccggcggggggtggcgaggggcgccgggcccccgcggacctgtcgtcctcggcccgtcctccggccccggccccgcgcggctgaggaggcgcggccaggaccatgtcggcgggcggccgtgacgaggagcggcggaagctggccgacatcatccaccactggaacgccaaccggctggacctgttcgagatcagccagccgaccgaggatttggagttccatggagtgatgagattttattttcaagataaagctgctggaaactttgcaacaaaatgtattcgggtctctagtactgccaccactcaagatgtaatcgaaacgctcgcggagaaatttcgacctgatatgcgaatgctgtcctctcccaagtattcactctatgaagtgcatgtcagcggagaaagaagattggatatagatgagaaacctctagttgtacaactgaattggaacaaagatgatcgggaaggcagatttgttcttaagaatgagaatgacgccattcctcctaaggctcaaagtaatggacctgaaaagcaggaaaaagaaggggttatccagaacttcaagagaactctctcaaagaaagaaaagaaggaaaaaaagaagagagaaaaagaggcattgcgacaggcatctgataaagatgatagacctttccaaggggaggatgttgaaaattctcgactggctgctgaggtttacaaagacatgccggaaaccagctttactcgaaccatttctaatcctgaggtggttatgaaacgacggaggcagcaaaaattggaaaagagaatgcaggaatttcggagctcagatgggcggcctgattcaggtggaacattgagaatttatgcagatagtttaaaaccaaatattccctacaagacaatcctgctgtctactacagatcctgcagactttgctgtggctgaagctttagagaagtatggtctggaaaaagaaaaccctaaggattactgcatcgcccgggttatgcttcctcctggagcccagcattctgatgaaaagggtgctaaagaaattattcttgatgatgatgagtgtcctttacaaatcttcagggaatggccaagtgacaaagggattttagtctttcagttgaagaggaggccaccagaccacatcccaaagaaaaccaagaaacacttggaaggcaagacacccaagggaaaggagagagctgacgggtctggctatggctccacccttcctccggagaagctgccctatttagtagagttaagcccagatggttctgactctagagataagccaaagctttaccgccttcagttaagtgttactgaagttgggacagaaaagttggatgacaactctatccagttgtttggcccaggaattcagccccatcactgtgaccttaccaacatggatggagtggtcactgtgacgcccagaagtatggacgcagaaacctacgtggaaggccagcgcatctcagaaaccaccatgctgcagagtggcatgaaagtgcagtttggggcgtcccatgtatttaagtttgtggaccccagtcaggatcatgctcttgcaaaaagatctgtggatggaggcctgatggttaagggcccaagacataaacctggaattgttcaggagacaacttttgatttgggaggagatattcatagtgggacagcattaccgacaagcaagagcaccactaggctggacagcgacagagtgtcgtctgcctctagcacagccgagcggggaatggtgaagccgatgatcagagtagaacagcagccagattatcgcaggcaagaaagcagaacacaggatgcttctgggcctgagctgatactacctgcaagcattgaattcagggaaagttctgaagattcatttttgtctgccattataaattatactaatagctctacagtccactttaagttgtcccctacatatgtattatatatggcatgccggtatgtattgtccaaccagtacagacctgacatcagccctacagagcgcacacataaagtcattgcagtcgtcaacaagatggtgagcatgatggagggtgtcatccagaaacagaagaatattgcaggggcacttgccttctggatggcaaatgcatctgaacttctcaacttcattaagcaagaccgagaccttagtcggatcacactggatgctcaagatgttttagcacatttggttcaaatggcatttaaatacttggttcactgtcttcaatcagaacttaataattacatgccagcctttctagatgaccctgaagagaacagtctgcaacgaccaaaaatagatgatgtgctgcacacgctcacaggagccatgtccttgctacgacgctgcagagtcaatgccgccctgaccatccagctcttctctcagctcttccacttcatcaatatgtggctgttcaatagattggtgaccgacccagattcggggctgtgctcccattactggggtgcgattatccgtcagcagttgggccatattgaagcctgggctgagaagcaggggctggaactggctgcggactgtcatctgagcaggatcgtgcaggcaacgactttgcttaccatggataagtatgcacctgatgacattccaaatataaacagcacctgctttaagttaaattcattacaacttcaagccttattacagaactatcactgtgcacctgatgagccttttatcccaacggatcttatagaaaatgtagtgactgtggctgaaaacactgccgatgagctggcccgcagtgatggaagggaagtgcagttggaggaggatcctgatctgcagctgccgtttcttttgccagaagatggttattcttgtgatgttgtcagaaacattccaaatggtttacaagaatttttagaccctctgtgccagagaggattttgcaggttaattcctcacacacgttcaccaggtacttggacaatatattttgaaggtgcagattatgaaagtcaccttctgcgtgagaacacagagctggctcagcctctgaggaaagaacctgaaataatcactgtgaccctaaaaaagcagaatggaatgggccttagcattgttgcagcaaagggtgctggtcaagataaactaggaatctacgtgaagtcggttgtgaaaggaggtgctgcagatgtggatggacgtctagctgcaggtgatcagctcctcagtgtggatggacgaagtctggttggactctctcaggaaagggcggcagaactcatgacaagaacaagctctgtggtgacactggaagtagcaaagcagggtgccatctaccacggtctggccacccttctcaatcagccatcccccatgatgcagagaatttcagatcgtcgtggctcaggtaaaccccgaccaaagagtgaaggctttgagctctataataattcaactcaaaatgggtctcctgagagtcctcagctgccttgggcagaatatagtgaaccaaagaaattgcctggtgatgacagactgatgaaaaatagagctgatcaccgttccagccccaacgtagcaaatcagcctcctagtcctggagggaaaagtgcatatgcctctggaacaacagcgaagataacatctgtctctactggaaacctctgcactgaggagcagacgcctccgcctagacctgaagcctaccccatccccactcagacgtacaccagagagtattttaccttcccagcttccaaatcccaggatcggatggctcctcctcagaaccagtggccaaattatgaggaaaagccacatatgcacacagatagtaatcattccagtattgcaattcagcgtgttacacgttcccaagaagaacttcgagaagataaagcttaccaacttgagcggcatcgaatagaggcagctatggaccgaaagtctgatagtgatatgtggataaatcagagctcctcactggactccagtacctctagccaggagcatctgaaccattcctctaagtcggtcacccctgcttccacactgaccaaaagtggccctggccgttggaaaacaccagcagccataccggccacccctgtggccgtctcccagccaatccgaacagacctgcctccgccacccccgccacctccagtccactatgccggtgatttcgatggaatgtccatggatttgcctctcccaccacccccttccgccaaccagatagggctgccgtctgcgcaggtggctgctgctgaacggagaaagagagaagaacatcagcgttggtatgagaaggagaaggcccgcctggaggaggagcgggagaggaagcggagagagcaggagaggaagttgggccagatgcgcactcagtccttaaaccctgctccgttttctcccctgactgcacagcagatgaagcccgaaaagccttccacactccagcggccacaggaaacagtcattcgggagctgcagcctcagcagcagccccgcacgatcgagcgcagagacttgcagtacattacagtcagcaaagaggagctttcctcgggggacagtctgtcccccgacccgtggaagcgggacgccaaggagaagctggagaagcagcagcagatgcacatcgtggacatgctgagcaaggagatccaggagctccagagcaaaccggaccgcagcgccgaggagagcgaccggctgcgcaagctcatgctggagtggcagttccagaagagactccaggagtcgaagcagaaggacgaagatgacgaggaggaggaggacgatgatgtggacaccatgctgatcatgcagcgcctggaggctgaacgaagagcgagggtaaaggggggagtgctttggctgtgcccatctgtggtccctattttagcttctgcgtgtttcccatggggatag

SEQ ID NO: 336299 - DNA, 7700 bp, Homo sapiens
cccaaccccaggcctcctgaaccggcccaaccccttgctggcgttgccccccgtccgcccccacggcccacaggacaaggaccaggcagtggagagcgcccaagcggaggattactcgcagctgcccggagaagatcacatcctgtagcacctgcccgcccggctcaatgagggtgcgcacctgagggacgggaggcgaggaggcgaggcaggatggaaagagagagaggagagagacagattttattttcaagataaagctgctggaaactttgcaacaaaatgtattcgggtctctagtactgccaccactcaagatgtaatcgaaacgctcgcggagaaatttcgacctgatatgcgaatgctgtcctctcccaagtattcactctatgaagtgcatgtcagcggagaaagaagattggatatagatgagaaacctctagttgtacaactgaattggaacaaagatgatcgggaaggcagatttgttcttaagaatgagaatgacgccattcctcctaaggctcaaagtaatggacctgaaaagcaggaaaaagaaggggttatccagaacttcaagagaactctctcaaagaaagaaaagaaggaaaaaaagaagagagaaaaagaggcattgcgacaggcatctgataaagatgatagacctttccaaggggaggatgttgaaaattctcgactggctgctgaggtttacaaagacatgccggaaaccagctttactcgaaccatttctaatcctgaggtggttatgaaacgacggaggcagcaaaaattggaaaagagaatgcaggaatttcggagctcagatgggcggcctgattcaggtggaacattgagaatttatgcagatagtttaaaaccaaatattccctacaagacaatcctgctgtctactacagatcctgcagactttgctgtggctgaagctttagagaagtatggtctggaaaaagaaaaccctaaggattactgcatcgcccgggttatgcttcctcctggagcccagcattctgatgaaaagggtgctaaagaaattattcttgatgatgatgagtgtcctttacaaatcttcagggaatggccaagtgacaaagggattttagtctttcagttgaagaggaggccaccagaccacatcccaaagaaaaccaagaaacacttggaaggcaagacacccaagggaaaggagagagctgacgggtctggctatggctccacccttcctccggagaagctgccctatttagtagagttaagcccagggagaaggaatcactttgcctactacaactatcacacttacgaagatggttctgactctagagataagccaaagctttaccgccttcagttaagtgttactgaagttgggacagaaaagttggatgacaactctatccagttgtttggcccaggaattcagccccatcactgtgaccttaccaacatggatggagtggtcactgtgacgcccagaagtatggacgcagaaacctacgtggaaggccagcgcatctcagaaaccaccatgctgcagagtggcatgaaagtgcagtttggggcgtcccatgtatttaagtttgtggaccccagtcaggatcatgctcttgcaaaaagatctgtggatggaggcctgatggttaagggcccaagacataaacctggaattgttcaggagacaacttttgatttgggaggagatattcatagtgggacagcattaccgacaagcaagagcaccactaggctggacagcgacagagtgtcgtctgcctctagcacagccgagcggggaatggtgaagccgatgatcagagtagaacagcagccagattatcgcaggcaagaaagcagaacacaggatgcttctgggcctgagctgatactacctgcaagcattgaattcagggaaagttctgaagattcatttttgtctgccattataaattatactaatagctctacagtccactttaagttgtcccctacatatgtattatatatggcatgccggtatgtattgtccaaccagtacagacctgacatcagccctacagagcgcacacataaagtcattgcagtcgtcaacaagatggtgagcatgatggagggtgtcatccagaaacagaagaatattgcaggggcacttgccttctggatggcaaatgcatctgaacttctcaacttcattaagcaagaccgagaccttagtcggatcacactggatgctcaagatgttttagcacatttggttcaaatggcatttaaatacttggttcactgtcttcaatcagaacttaataattacatgccagcctttctagatgaccctgaagagaacagtctgcaacgaccaaaaatagatgatgtgctgcacacgctcacaggagccatgtccttgctacgacgctgcagagtcaatgccgccctgaccatccagctcttctctcagctcttccacttcatcaatatgtggctgttcaatagattggtgaccgacccagattcggggctgtgctcccattactggggtgcgattatccgtcagcagttgggccatattgaagcctgggctgagaagcaggggctggaactggctgcggactgtcatctgagcaggatcgtgcaggcaacgactttgcttaccatggataagtatgcacctgatgacattccaaatataaacagcacctgctttaagttaaattcattacaacttcaagccttattacagaactatcactgtgcacctgatgagccttttatcccaacggatcttatagaaaatgtagtgactgtggctgaaaacactgccgatgagctggcccgcagtgatggaagggaagtgcagttggaggaggatcctgatctgcagctgccgtttcttttgccagaagatggttattcttgtgatgttgtcagaaacattccaaatggtttacaagaatttttagaccctctgtgccagagaggattttgcaggttaattcctcacacacgttcaccaggtacttggacaatatattttgaaggtgcagattatgaaagtcaccttctgcgtgagaacacagagctggctcagcctctgaggaaagaacctgaaataatcactgtgaccctaaaaaagcagaatggaatgggccttagcattgttgcagcaaagggtgctggtcaagataaactaggaatctacgtgaagtcggttgtgaaaggaggtgctgcagatgtggatggacgtctagctgcaggtgatcagctcctcagtgtggatggacgaagtctggttggactctctcaggaaagggcggcagaactcatgacaagaacaagctctgtggtgacactggaagtagcaaagcagggtgccatctaccacggtctggccacccttctcaatcagccatcccccatgatgcagagaatttcagatcgtcgtggctcaggtaaaccccgaccaaagagtgaaggctttgagctctataataattcaactcaaaatgggtctcctgagagtcctcagctgccttgggcagaatatagtgaaccaaagaaattgcctggtgatgacagactgatgaaaaatagagctgatcaccgttccagccccaacgtagcaaatcagcctcctagtcctggagggaaaagtgcatatgcctctggaacaacagcgaagataacatctgtctctactggaaacctctgcactgaggagcagacgcctccgcctagacctgaagcctaccccatccccactcagacgtacaccagagagtattttaccttcccagcttccaaatcccaggatcggatggctcctcctcagaaccagtggccaaattatgaggaaaagccacatatgcacacagatagtaatcattccagtattgcaattcagcgtgttacacgttcccaagaagaacttcgagaagataaagcttaccaacttgagcggcatcgaatagaggcagctatggaccgaaagtctgatagtgatatgtggataaatcagagctcctcactggactccagtacctctagccaggagcatctgaaccattcctctaagtcggtcacccctgcttccacactgaccaaaagtggccctggccgttggaaaacaccagcagccataccggccacccctgtggccgtctcccagccaatccgaacagacctgcctccgccacccccgccacctccagtccactatgccggtgatttcgatggaatgtccatggatttgcctctcccaccacccccttccgccaaccagatagggctgccgtctgcgcaggtggctgctgctgaacggagaaagagagaagaacatcagcgttggtatgagaaggagaaggcccgcctggaggaggagcgggagaggaagcggagagagcaggagaggaagttgggccagatgcgcactcagtccttaaaccctgctccgttttctcccctgactgcacagcagatgaagcccgaaaagccttccacactccagcggccacaggaaacagtcattcgggagctgcagcctcagcagcagccccgcacgatcgagcgcagagacttgcagtacattacagtcagcaaagaggagctttcctcgggggacagtctgtcccccgacccgtggaagcgggacgccaaggagaagctggagaagcagcagcagatgcacatcgtggacatgctgagcaaggagatccaggagctccagagcaaaccggaccgcagcgccgaggagagcgaccggctgcgcaagctcatgctggagtggcagttccagaagagactccaggagtcgaagcagaaggacgaagatgacgaggaggaggaggacgatgatgtggacaccatgctgatcatgcagcgcctggaggctgaacgaagagcgaggactgctatgccagcaatctctgttctagatttgttgcaggacgaggagcggaggcggcagcagcagttagaagagatgcgcaagcgggaagcggaagaccgagcgaggcaagaggaagagcgccggcggcaggaggaggagcgaacaaaacgagacgctgaagaaaagaggcgacaggaagaagggtattacagccgcctggaagccgagaggcgcagacagcacgacgaggcggcgcgcaggttgctggagcccgaggcgcccggtctgtgccgccctccgcttccccgggactacgagcccccgtccccgtcccccgcccggcgcccctcctcccccgcctcagcgaaacgcctcctacctcaaaacacaggtcctctcccccgactcgctgttcactgccaagtttgttgcatacaatgaggaggaggaggaggaggactgcagcctagcaggaccaaactcttacccaggatctactggagcagctgttggagcccatgacgcctgtcgggatgcaaaagagaagcgctctaaaagccaagatgcagattcacctggaagttctggggcccctgaaaacttgacattcaaggaacgccagcgtcttttttcacaaggtcaagatgtatccaataaagtgaaagcttctcgtaaattaacagaactggagaatgaactgaacacaaagtgaaagaaaatgaggagaacactttgtatttaccccaaaatcttttcagttgtgggtttgtaggtgcgagtttgaagaggaaaagaggaagggggttatatttctaagtgatttacaatttctgtttctaaaattgttgggatttagaaatgtttcaattccaagaaattttattttactttaccatgagattgccatttatgtaatttaaacactgtctagtttcttaattatctaactcacacgagggtaagttttttgttggtttcttttttggagtcctgagttcaaaggggacagaactaagggcaggagaagagaatggatgtgtcttctctcccatcttcccctcatcatcgaccgaggagcacaaagaagttctgtttctgtttttttcagaaactttattttagctgtcaagcagagaatagcttgaactattcagactattgttggcactgtttagtagtgaccacacgctcttctacccgggaaggaacatatgacgacatgctcctcccatgtcccctgatggtgtctgttcccacaatatccttctagtctgcatcgtgaagtggcttaggccaaagcttcctgtgtgatgacgcacgtccgagactgttccatctcattcctcgcaaatttgagctcttctgatcaattctaaatatttgattaattttaattctgaaagaaaattttgaggatttaagcttaggggattttatttttataaataccagattattgttagacttaataaatcactgttaaatttaaagatgacagttaccttggaaagttcactaatacttcgctccaaggcgtctgtaaaagaagatatctttattggagcaatgttcatgtgactgggaatgacagaagaatgggagatgagtagggacccctcaagcacagctgtcactcagaaattttaaatttgaaaaagaaatcgattttcatctgtatgccgtcaaggaaggaattcagttacagggcatctgtaacttaaatattgtaagaataactcatatggaagttcaagctatttttatactataatagagttatttaattttaatttgttgaattattagttaccactgtcatttcttcagctatggatatgtggctgatgttggggagacggacctcagtgtgttttatattgtctggtgttaagatgataaattactttgtgattacaagcaaattttctatttgacaaagcccttggtggagtccaaatgatttttctgtaccatattgttctcttacacatacgtatgttaggaaaataggcacactttcaaagagaatgttctcttacacatacgtatgttaggaaaatagacacattttcaaagagaatgttctcttacatatgttaggaaaataggcacactttcaaagagaggtataggggctttttactgccttcgaaatcacttttaataaaagttgtatgataaatcattaaaaatgcgagtgtaaatatttttttttacctctatcagggtttttatttgaaagtgtgctcttaccatttccttgtttgagtaagagagtgaatggttctgagtgtttaggaaggatttgcttgcttgcagcagaagttctaggaaaagcaggcacctcccaaatatcttgaggacactggcagccttatggtgactaaatccacactttctttaaagagatgcagatgaattacttttctgttaatatatagaaaaatacacaggagaacatgcagatacatgtaaatatctacatacagggatatttgtatgtgtggttgtgaaacccatacacaagtggatttggccatctttgggcagtgaggtcaaatgtgaatatgtgtaaaagtgcttttcagaactgcattactatgagaaaacatcaaaactgctgtagttttccatttctactgtatttcagttgcaacctatttttaataaactttgtatgtatttaagtgtatttgctattgttttgaaagtgctgacaaagtttatatttgtaacatcagccttcctcgcccatctctttccatctgtctcttcttcattaaacacttactgagtatga

SEQ ID NO: 336300 - DNA, 7880 bp, Homo sapiens
gcggccgcggaggcggaggcagccgcggaggcggaggcggccggcggggggtggcgaggggcgccgggcccccgcggacctgtcgtcctcggcccgtcctccggccccggccccgcgcggctgaggaggcgcggccaggaccatgtcggcgggcggccgtgacgaggagcggcggaagctggccgacatcatccaccactggaacgccaaccggctggacctgttcgagatcagccagccgaccgaggatttggagttccatggagtgatgagattttattttcaagataaagctgctggaaactttgcaacaaaatgtattcgggtctctagtactgccaccactcaagatgtaatcgaaacgctcgcggagaaatttcgacctgatatgcgaatgctgtcctctcccaagtattcactctatgaagtgcatgtcagcggagaaagaagattggatatagatgagaaacctctagttgtacaactgaattggaacaaagatgatcgggaaggcagatttgttcttaagaatgagaatgacgccattcctcctaaggctcaaagtaatggacctgaaaagcaggaaaaagaaggggttatccagaacttcaagagaactctctcaaagaaagaaaagaaggaaaaaaagaagagagaaaaagaggcattgcgacaggcatctgataaagatgatagacctttccaaggggaggatgttgaaaattctcgactggctgctgaggtttacaaagacatgccggaaaccagctttactcgaaccatttctaatcctgaggtggttatgaaacgacggaggcagcaaaaattggaaaagagaatgcaggaatttcggagctcagatgggcggcctgattcaggtggaacattgagaatttatgcagatagtttaaaaccaaatattccctacaagacaatcctgctgtctactacagatcctgcagactttgctgtggctgaagctttagagaagtatggtctggaaaaagaaaaccctaaggattactgcatcgcccgggttatgcttcctcctggagcccagcattctgatgaaaagggtgctaaagaaattattcttgatgatgatgagtgtcctttacaaatcttcagggaatggccaagtgacaaagggattttagtctttcagttgaagaggaggccaccagaccacatcccaaagaaaaccaagaaacacttggaaggcaagacacccaagggaaaggagagagctgacgggtctggctatggctccacccttcctccggagaagctgccctatttagtagagttaagcccagatggttctgactctagagataagccaaagctttaccgccttcagttaagtgttactgaagttgggacagaaaagttggatgacaactctatccagttgtttggcccaggaattcagccccatcactgtgaccttaccaacatggatggagtggtcactgtgacgcccagaagtatggacgcagaaacctacgtggaaggccagcgcatctcagaaaccaccatgctgcagagtggcatgaaagtgcagtttggggcgtcccatgtatttaagtttgtggaccccagtcaggatcatgctcttgcaaaaagatctgtggatggaggcctgatggttaagggcccaagacataaacctggaattgttcaggagacaacttttgatttgggaggagatattcatagtgggacagcattaccgacaagcaagagcaccactaggctggacagcgacagagtgtcgtctgcctctagcacagccgagcggggaatggtgaagccgatgatcagagtagaacagcagccagattatcgcaggcaagaaagcagaacacaggatgcttctgggcctgagctgatactacctgcaagcattgaattcagggaaagttctgaagattcatttttgtctgccattataaattatactaatagctctacagtccactttaagttgtcccctacatatgtattatatatggcatgccggtatgtattgtccaaccagtacagacctgacatcagccctacagagcgcacacataaagtcattgcagtcgtcaacaagatggtgagcatgatggagggtgtcatccagaaacagaagaatattgcaggggcacttgccttctggatggcaaatgcatctgaacttctcaacttcattaagcaagaccgagaccttagtcggatcacactggatgctcaagatgttttagcacatttggttcaaatggcatttaaatacttggttcactgtcttcaatcagaacttaataattacatgccagcctttctagatgaccctgaagagaacagtctgcaacgaccaaaaatagatgatgtgctgcacacgctcacaggagccatgtccttgctacgacgctgcagagtcaatgccgccctgaccatccagctcttctctcagctcttccacttcatcaatatgtggctgttcaatagattggtgaccgacccagattcggggctgtgctcccattactggggtgcgattatccgtcagcagttgggccatattgaagcctgggctgagaagcaggggctggaactggctgcggactgtcatctgagcaggatcgtgcaggcaacgactttgcttaccatggataagtatgcacctgatgacattccaaatataaacagcacctgctttaagttaaattcattacaacttcaagccttattacagaactatcactgtgcacctgatgagccttttatcccaacggatcttatagaaaatgtagtgactgtggctgaaaacactgccgatgagctggcccgcagtgatggaagggaagtgcagttggaggaggatcctgatctgcagctgccgtttcttttgccagaagatggttattcttgtgatgttgtcagaaacattccaaatggtttacaagaatttttagaccctctgtgccagagaggattttgcaggttaattcctcacacacgttcaccaggtacttggacaatatattttgaaggtgcagattatgaaagtcaccttctgcgtgagaacacagagctggctcagcctctgaggaaagaacctgaaataatcactgtgaccctaaaaaagcagaatggaatgggccttagcattgttgcagcaaagggtgctggtcaagataaactaggaatctacgtgaagtcggttgtgaaaggaggtgctgcagatgtggatggacgtctagctgcaggtgatcagctcctcagtgtggatggacgaagtctggttggactctctcaggaaagggcggcagaactcatgacaagaacaagctctgtggtgacactggaagtagcaaagcagggtgccatctaccacggtctggccacccttctcaatcagccatcccccatgatgcagagaatttcagatcgtcgtggctcaggtaaaccccgaccaaagagtgaaggctttgagctctataataattcaactcaaaatgggtctcctgagagtcctcagctgccttgggcagaatatagtgaaccaaagaaattgcctggtgatgacagactgatgaaaaatagagctgatcaccgttccagccccaacgtagcaaatcagcctcctagtcctggagggaaaagtgcatatgcctctggaacaacagcgaagataacatctgtctctactggaaacctctgcactgaggagcagacgcctccgcctagacctgaagcctaccccatccccactcagacgtacaccagagagtattttaccttcccagcttccaaatcccaggatcggatggctcctcctcagaaccagtggccaaattatgaggaaaagccacatatgcacacagatagtaatcattccagtattgcaattcagcgtgttacacgttcccaagaagaacttcgagaagataaagcttaccaacttgagcggcatcgaatagaggcagctatggaccgaaagtctgatagtgatatgtggataaatcagagctcctcactggactccagtacctctagccaggagcatctgaaccattcctctaagtcggtcacccctgcttccacactgaccaaaagtggccctggccgttggaaaacaccagcagccataccggccacccctgtggccgtctcccagccaatccgaacagacctgcctccgccacccccgccacctccagtccactatgccggtgatttcgatggaatgtccatggatttgcctctcccaccacccccttccgccaaccagatagggctgccgtctgcgcaggtggctgctgctgaacggagaaagagagaagaacatcagcgttggtatgagaaggagaaggcccgcctggaggaggagcgggagaggaagcggagagagcaggagaggaagttgggccagatgcgcactcagtccttaaaccctgctccgttttctcccctgactgcacagcagatgaagcccgaaaagccttccacactccagcggccacaggaaacagtcattcgggagctgcagcctcagcagcagccccgcacgatcgagcgcagagacttgcagtacattacagtcagcaaagaggagctttcctcgggggacagtctgtcccccgacccgtggaagcgggacgccaaggagaagctggagaagcagcagcagatgcacatcgtggacatgctgagcaaggagatccaggagctccagagcaaaccggaccgcagcgccgaggagagcgaccggctgcgcaagctcatgctggagtggcagttccagaagagactccaggagtcgaagcagaaggacgaagatgacgaggaggaggaggacgatgatgtggacaccatgctgatcatgcagcgcctggaggctgaacgaagagcgaggttgcaggacgaggagcggaggcggcagcagcagttagaagagatgcgcaagcgggaagcggaagaccgagcgaggcaagaggaagagcgccggcggcaggaggaggagcgaacaaaacgagacgctgaagaaaagaggcgacaggaagaagggtattacagccgcctggaagccgagaggcgcagacagcacgacgaggcggcgcgcaggttgctggagcccgaggcgcccggtctgtgccgccctccgcttccccgggactacgagcccccgtccccgtcccccgcccggcgcccctcctcccccgcctcagcgaaacgcctcctacctcaaaacacaggtcctctcccccgactcgctgttcactgccaagtttgttgcatacaatgaggaggaggaggaggaggactgcagcctagcaggtcaggataagtactccagcacaagaaagtctcatggggaccttcttcctgcccctcttaaaccacggccacccccctgccagccacgcccggcctccgatggcgtctttctctccaactcattccagccaccctcagccaaagccaacagtactgctcacaaaaaaggccagcccctgccccctccaaaaaaatccagctcctaccatcccagccactgcaaaggaccaaactcttacccaggatctactggagcagctgttggagcccatgacgcctgtcgggatgcaaaagagaagcgctctaaaagccaagatgcagattcacctggaagttctggggcccctgaaaacttgacattcaaggaacgccagcgtcttttttcacaaggtcaagatgtatccaataaagtgaaagcttctcgtaaattaacagaactggagaatgaactgaacacaaagtgaaagaaaatgaggagaacactttgtatttaccccaaaatcttttcagttgtgggtttgtaggtgcgagtttgaagaggaaaagaggaagggggttatatttctaagtgatttacaatttctgtttctaaaattgttgggatttagaaatgtttcaattccaagaaattttattttactttaccatgagattgccatttatgtaatttaaacactgtctagtttcttaattatctaactcacacgagggtaagttttttgttggtttcttttttggagtcctgagttcaaaggggacagaactaagggcaggagaagagaatggatgtgtcttctctcccatcttcccctcatcatcgaccgaggagcacaaagaagttctgtttctgtttttttcagaaactttattttagctgtcaagcagagaatagcttgaactattcagactattgttggcactgtttagtagtgaccacacgctcttctacccgggaaggaacatatgacgacatgctcctcccatgtcccctgatggtgtctgttcccacaatatccttctagtctgcatcgtgaagtggcttaggccaaagcttcctgtgtgatgacgcacgtccgagactgttccatctcattcctcgcaaatttgagctcttctgatcaattctaaatatttgattaattttaattctgaaagaaaattttgaggatttaagcttaggggattttatttttataaataccagattattgttagacttaataaatcactgttaaatttaaagatgacagttaccttggaaagttcactaatacttcgctccaaggcgtctgtaaaagaagatatctttattggagcaatgttcatgtgactgggaatgacagaagaatgggagatgagtagggacccctcaagcacagctgtcactcagaaattttaaatttgaaaaagaaatcgattttcatctgtatgccgtcaaggaaggaattcagttacagggcatctgtaacttaaatattgtaagaataactcatatggaagttcaagctatttttatactataatagagttatttaattttaatttgttgaattattagttaccactgtcatttcttcagctatggatatgtggctgatgttggggagacggacctcagtgtgttttatattgtctggtgttaagatgataaattactttgtgattacaagcaaattttctatttgacaaagcccttggtggagtccaaatgatttttctgtaccatattgttctcttacacatacgtatgttaggaaaataggcacactttcaaagagaatgttctcttacacatacgtatgttaggaaaatagacacattttcaaagagaatgttctcttacatatgttaggaaaataggcacactttcaaagagaggtataggggctttttactgccttcgaaatcacttttaataaaagttgtatgataaatcattaaaaatgcgagtgtaaatatttttttttacctctatcagggtttttatttgaaagtgtgctcttaccatttccttgtttgagtaagagagtgaatggttctgagtgtttaggaaggatttgcttgcttgcagcagaagttctaggaaaagcaggcacctcccaaatatcttgaggacactggcagccttatggtgactaaatccacactttctttaaagagatgcagatgaattacttttctgttaatatatagaaaaatacacaggagaacatgcagatacatgtaaatatctacatacagggatatttgtatgtgtggttgtgaaacccatacacaagtggatttggccatctttgggcagtgaggtcaaatgtgaatatgtgtaaaagtgcttttcagaactgcattactatgagaaaacatcaaaactgctgtagttttccatttctactgtatttcagttgcaacctatttttaataaactttgtatgtatttaagtgtatttgctattgttttgaaagtgctgacaaagtttatatttgtaacatcagccttcctcgcccatctctttccatctgtctcttcttcattaaacacttactgagtatga

SEQ ID NO: 336301 - DNA, 4860 bp, Homo sapiens
gcggccgccagagcgaaggctcacgtcacatgacggctgctcagaacgatgacgctgggcgattaaaagttcagatatttttctacaaagtcagggaaacatatatatctttattgattttttttttaaagatactttaaaaatggttagatttgttgcttaaaatagtgaagtttcagttaatgagaaaataagctttgaaagtgtttatcttcccatcattactaattaagtaaaaatattttctttattctcagtatatttacttaaaagctgttttatgattctgtaggaagaattgacctttatcaccttatttcttatgctaagaacaattcttatggaattttaatgataatcagggtgttgaaaataaaatcttaagagatactgaatatgctttgattccagtttcagatcgtcgtggctcaggtaaaccccgaccaaagagtgaaggctttgagctctataataattcaactcaaaatgggtctcctgagagtcctcagctgccttgggcagaatatagtgaaccaaagaaattgcctggtgatgacagactgatgaaaaatagagctgatcaccgttccagccccaacgtagcaaatcagcctcctagtcctggagggaaaagtgcatatgcctctggaacaacagcgaagataacatctgtctctactggaaacctctgcactgaggagcagacgcctccgcctagacctgaagcctaccccatccccactcagacgtacaccagagagtattttaccttcccagcttccaaatcccaggatcggatggctcctcctcagaaccagtggccaaattatgaggaaaagccacatatgcacacagatagtaatcattccagtattgcaattcagcgtgttacacgttcccaagaagaacttcgagaagataaagcttaccaacttgagcggcatcgaatagaggcagctatggaccgaaagtctgatagtgatatgtggataaatcagagctcctcactggactccagtacctctagccaggagcatctgaaccattcctctaagtcggtcacccctgcttccacactgaccaaaagtggccctggccgttggaaaacaccagcagccataccggccacccctgtggccgtctcccagccaatccgaacagacctgcctccgccacccccgccacctccagtccactatgccggtgatttcgatggaatgtccatggatttgcctctcccaccacccccttccgccaaccagatagggctgccgtctgcgcaggtggctgctgctgaacggagaaagagagaagaacatcagcgttggtatgagaaggagaaggcccgcctggaggaggagcgggagaggaagcggagagagcaggagaggaagttgggccagatgcgcactcagtccttaaaccctgctccgttttctcccctgactgcacagcagatgaagcccgaaaagccttccacactccagcggccacaggaaacagtcattcgggagctgcagcctcagcagcagccccgcacgatcgagcgcagagacttgcagtacattacagtcagcaaagaggagctttcctcgggggacagtctgtcccccgacccgtggaagcgggacgccaaggagaagctggagaagcagcagcagatgcacatcgtggacatgctgagcaaggagatccaggagctccagagcaaaccggaccgcagcgccgaggagagcgaccggctgcgcaagctcatgctggagtggcagttccagaagagactccaggagtcgaagcagaaggacgaagatgacgaggaggaggaggacgatgatgtggacaccatgctgatcatgcagcgcctggaggctgaacgaagagcgaggttgcaggacgaggagcggaggcggcagcagcagttagaagagatgcgcaagcgggaagcggaagaccgagcgaggcaagaggaagagcgccggcggcaggaggaggagcgaacaaaacgagacgctgaagaaaagaggcgacaggaagaagggtattacagccgcctggaagccgagaggcgcagacagcacgacgaggcggcgcgcaggttgctggagcccgaggcgcccggtctgtgccgccctccgcttccccgggactacgagcccccgtccccgtcccccgcccggcgcccctcctcccccgcctcagcgaaacgcctcctacctcaaaacacaggtcctctcccccgactcgctgttcactgccaagtttgttgcatacaatgaggaggaggaggaggaggactgcagcctagcaggtcaggataagtactccagcacaagaaagtctcatggggaccttcttcctgcccctcttaaaccacggccacccccctgccagccacgcccggcctccgatggcgtctttctctccaactcattccagccaccctcagccaaagccaacagtactgctcacaaaaaaggccagcccctgccccctccaaaaaaatccagctcctaccatcccagccactgcaaaggaccaaactcttacccaggatctactggagcagctgttggagcccatgacgcctgtcgggatgcaaaagagaagcgctctaaaagccaagatgcagattcacctggaagttctggggcccctgaaaacttgacattcaaggaacgccagcgtcttttttcacaaggtcaagatgtatccaataaagtgaaagcttctcgtaaattaacagaactggagaatgaactgaacacaaagtgaaagaaaatgaggagaacactttgtatttaccccaaaatcttttcagttgtgggtttgtaggtgcgagtttgaagaggaaaagaggaagggggttatatttctaagtgatttacaatttctgtttctaaaattgttgggatttagaaatgtttcaattccaagaaattttattttactttaccatgagattgccatttatgtaatttaaacactgtctagtttcttaattatctaactcacacgagggtaagttttttgttggtttcttttttggagtcctgagttcaaaggggacagaactaagggcaggagaagagaatggatgtgtcttctctcccatcttcccctcatcatcgaccgaggagcacaaagaagttctgtttctgtttttttcagaaactttattttagctgtcaagcagagaatagcttgaactattcagactattgttggcactgtttagtagtgaccacacgctcttctacccgggaaggaacatatgacgacatgctcctcccatgtcccctgatggtgtctgttcccacaatatccttctagtctgcatcgtgaagtggcttaggccaaagcttcctgtgtgatgacgcacgtccgagactgttccatctcattcctcgcaaatttgagctcttctgatcaattctaaatatttgattaattttaattctgaaagaaaattttgaggatttaagcttaggggattttatttttataaataccagattattgttagacttaataaatcactgttaaatttaaagatgacagttaccttggaaagttcactaatacttcgctccaaggcgtctgtaaaagaagatatctttattggagcaatgttcatgtgactgggaatgacagaagaatgggagatgagtagggacccctcaagcacagctgtcactcagaaattttaaatttgaaaaagaaatcgattttcatctgtatgccgtcaaggaaggaattcagttacagggcatctgtaacttaaatattgtaagaataactcatatggaagttcaagctatttttatactataatagagttatttaattttaatttgttgaattattagttaccactgtcatttcttcagctatggatatgtggctgatgttggggagacggacctcagtgtgttttatattgtctggtgttaagatgataaattactttgtgattacaagcaaattttctatttgacaaagcccttggtggagtccaaatgatttttctgtaccatattgttctcttacacatacgtatgttaggaaaataggcacactttcaaagagaatgttctcttacacatacgtatgttaggaaaatagacacattttcaaagagaatgttctcttacatatgttaggaaaataggcacactttcaaagagaggtataggggctttttactgccttcgaaatcacttttaataaaagttgtatgataaatcattaaaaatgcgagtgtaaatatttttttttacctctatcagggtttttatttgaaagtgtgctcttaccatttccttgtttgagtaagagagtgaatggttctgagtgtttaggaaggatttgcttgcttgcagcagaagttctaggaaaagcaggcacctcccaaatatcttgaggacactggcagccttatggtgactaaatccacactttctttaaagagatgcagatgaattacttttctgttaatatatagaaaaatacacaggagaacatgcagatacatgtaaatatctacatacagggatatttgtatgtgtggttgtgaaacccatacacaagtggatttggccatctttgggcagtgaggtcaaatgtgaatatgtgtaaaagtgcttttcagaactgcattactatgagaaaacatcaaaactgctgtagttttccatttctactgtatttcagttgcaacctatttttaataaactttgtatgtatttaagtgtatttgctattgttttgaaagtgctgacaaagtttatatttgtaacatcagccttcctcgcccatctctttccatctgtctcttcttcattaaacacttactgagtatga

SEQ ID NO: 336302 - DNA, 8194 bp, Homo sapiens
gcggccgcggaggcggaggcagccgcggaggcggaggcggccggcggggggtggcgaggggcgccgggcccccgcggacctgtcgtcctcggcccgtcctccggccccggccccgcgcggctgaggaggcgcggccaggaccatgtcggcgggcggccgtgacgaggagcggcggaagctggccgacatcatccaccactggaacgccaaccggctggacctgttcgagatcagccagccgaccgaggatttggagttccatggagtgatgagattttattttcaagataaagctgctggaaactttgcaacaaaatgtattcgggtctctagtactgccaccactcaagatgtaatcgaaacgctcgcggagaaatttcgacctgatatgcgaatgctgtcctctcccaagtattcactctatgaagtgcatgtcagcggagaaagaagattggatatagatgagaaacctctagttgtacaactgaattggaacaaagatgatcgggaaggcagatttgttcttaagaatgagaatgacgccattcctcctaaggctcaaagtaatggacctgaaaagcaggaaaaagaaggggttatccagaacttcaagagaactctctcaaagaaagaaaagaaggaaaaaaagaagagagaaaaagaggcattgcgacaggcatctgataaagatgatagacctttccaaggggaggatgttgaaaattctcgactggctgctgaggtttacaaagacatgccggaaaccagctttactcgaaccatttctaatcctgaggtggttatgaaacgacggaggcagcaaaaattggaaaagagaatgcaggaatttcggagctcagatgggcggcctgattcaggtggaacattgagaatttatgcagatagtttaaaaccaaatattccctacaagacaatcctgctgtctactacagatcctgcagactttgctgtggctgaagctttagagaagtatggtctggaaaaagaaaaccctaaggattactgcatcgcccgggttatgcttcctcctggagcccagcattctgatgaaaagggtgctaaagaaattattcttgatgatgatgagtgtcctttacaaatcttcagggaatggccaagtgacaaagggattttagtctttcagttgaagaggaggccaccagaccacatcccaaagaaaaccaagaaacacttggaaggcaagacacccaagggaaaggagagagctgacgggtctggctatggctccacccttcctccggagaagctgccctatttagtagagttaagcccagatggttctgactctagagataagccaaagctttaccgccttcagttaagtgttactgaagttgggacagaaaagttggatgacaactctatccagttgtttggcccaggaattcagccccatcactgtgaccttaccaacatggatggagtggtcactgtgacgcccagaagtatggacgcagaaacctacgtggaaggccagcgcatctcagaaaccaccatgctgcagagtggcatgaaagtgcagtttggggcgtcccatgtatttaagtttgtggaccccagtcaggatcatgctcttgcaaaaagatctgtggatggaggcctgatggttaagggcccaagacataaacctggaattgttcaggagacaacttttgatttgggaggagatattcatagtgggacagcattaccgacaagcaagagcaccactaggctggacagcgacagagtgtcgtctgcctctagcacagccgagcggggaatggtgaagccgatgatcagagtagaacagcagccagattatcgcaggcaagaaagcagaacacaggatgcttctgggcctgagctgatactacctgcaagcattgaattcagggaaagttctgaagattcatttttgtctgccattataaattatactaatagctctacagtccactttaagttgtcccctacatatgtattatatatggcatgccggtatgtattgtccaaccagtacagacctgacatcagccctacagagcgcacacataaagtcattgcagtcgtcaacaagatggtgagcatgatggagggtgtcatccagaaacagaagaatattgcaggggcacttgccttctggatggcaaatgcatctgaacttctcaacttcattaagcaagaccgagaccttagtcggatcacactggatgctcaagatgttttagcacatttggttcaaatggcatttaaatacttggttcactgtcttcaatcagaacttaataattacatgccagcctttctagatgaccctgaagagaacagtctgcaacgaccaaaaatagatgatgtgctgcacacgctcacaggagccatgtccttgctacgacgctgcagagtcaatgccgccctgaccatccagctcttctctcagctcttccacttcatcaatatgtggctgttcaatagattggtgaccgacccagattcggggctgtgctcccattactggggtgcgattatccgtcagcagttgggccatattgaagcctgggctgagaagcaggggctggaactggctgcggactgtcatctgagcaggatcgtgcaggcaacgactttgcttaccatggataagtatgcacctgatgacattccaaatataaacagcacctgctttaagttaaattcattacaacttcaagccttattacagaactatcactgtgcacctgatgagccttttatcccaacggatcttatagaaaatgtagtgactgtggctgaaaacactgccgatgagctggcccgcagtgatggaagggaagtgcagttggaggaggatcctgatctgcagctgccgtttcttttgccagaagatggttattcttgtgatgttgtcagaaacattccaaatggtttacaagaatttttagaccctctgtgccagagaggattttgcaggttaattcctcacacacgttcaccaggtacttggacaatatattttgaaggtgcagattatgaaagtcaccttctgcgtgagaacacagagctggctcagcctctgaggaaagaacctgaaataatcactgtgaccctaaaaaagcagaatggaatgggccttagcattgttgcagcaaagggtgctggtcaagataaactaggaatctacgtgaagtcggttgtgaaaggaggtgctgcagatgtggatggacgtctagctgcaggtgatcagctcctcagtgtggatggacgaagtctggttggactctctcaggaaagggcggcagaactcatgacaagaacaagctctgtggtgacactggaagtagcaaagcagggtgccatctaccacggtctggccacccttctcaatcagccatcccccatgatgcagagaatttcagatcgtcgtggctcaggtaaaccccgaccaaagagtgaaggctttgagctctataataattcaactcaaaatgggtctcctgagagtcctcagctgccttgggcagaatatagtgaaccaaagaaattgcctggtgatgacagactgatgaaaaatagagctgatcaccgttccagccccaacgtagcaaatcagcctcctagtcctggagggaaaagtgcatatgcctctggaacaacagcgaagataacatctgtctctactggaaacctctgcactgaggagcagacgcctccgcctagacctgaagcctaccccatccccactcagacgtacaccagagagtattttaccttcccagcttccaaatcccaggatcggatggctcctcctcagaaccagtggccaaattatgaggaaaagccacatatgcacacagatagtaatcattccagtattgcaattcagcgtgttacacgttcccaagaagaacttcgagaagataaagcttaccaacttgagcggcatcgaatagaggcagctatggaccgaaagtctgatagtgatatgtggataaatcagagctcctcactggactccagtacctctagccaggagcatctgaaccattcctctaagtcggtcacccctgcttccacactgaccaaaagtggccctggccgttggaaaacaccagcagccataccggccacccctgtggccgtctcccagccaatccgaacagacctgcctccgccacccccgccacctccagtccactatgccggtgatttcgatggaatgtccatggatttgcctctcccaccacccccttccgccaaccagatagggctgccgtctgcgcaggtggctgctgctgaacggagaaagagagaagaacatcagcgttggtatgagaaggagaaggcccgcctggaggaggagcgggagaggaagcggagagagcaggagaggaagttgggccagatgcgcactcagtccttaaaccctgctccgttttctcccctgactgcacagcagatgaagcccgaaaagccttccacactccagcggccacaggaaacagtcattcgggagctgcagcctcagcagcagccccgcacgatcgagcgcagagacttgcagtacattacagtcagcaaagaggagctttcctcgggggacagtctgtcccccgacccgtggaagcgggacgccaaggagaagctggagaagcagcagcagatgcacatcgtggacatgctgagcaaggagatccaggagctccagagcaaaccggaccgcagcgccgaggagagcgaccggctgcgcaagctcatgctggagtggcagttccagaagagactccaggagtcgaagcagaaggacgaagatgacgaggaggaggaggacgatgatgtggacaccatgctgatcatgcagcgcctggaggctgaacgaagagcgaggttgcaggacgaggagcggaggcggcagcagcagttagaagagatgcgcaagcgggaagcggaagaccgagcgaggcaagaggaagagcgccggcggcaggaggaggagcgaacaaaacgagacgctgaagaaaagaggcgacaggaagaagggtattacagccgcctggaagccgagaggcgcagacagcacgacgaggcggcgcgcaggttgctggagcccgaggcgcccggtctgtgccgccctccgcttccccgggactacgagcccccgtccccgtcccccgcccggcgcccctcctcccccgcctcagcgaaacgcctcctacctcaaaacacaggtcctctcccccgactcgctgttcactgccaagtttgttgcatacaatgaggaggaggaggaggaggactgcagcctagcaggtcaggataagtactccagcacaagaaagtctcatggggaccttcttcctgcccctcttaaaccacggccacccccctgccagccacgcccggcctccgatggcgtctttctctccaactcattccagccaccctcagccaaagccaacagtactgctcacaaaaaaggccagcccctgccccctccaaaaaaatccagctcctaccatcccagccactgcaaaggaccaaactcttacccaggatctactggagcagctgttggagcccatgacgcctgtcgggatgcaaaagagaagcgctctaaaagccaagatgcagattcacctggaagttctggggcccctgaaaacttgacattcaaggaacgccagcgtcttttttcacaaggtcaagatgtatccaataaagtgaaagcttctcgtaaattaacagaactggagaatgaactgaacacaaagtgaaagaaaatgaggagaacactttgtatttaccccaaaatcttttcagttgtgggtttgtaggtgcgagtttgaagaggaaaagaggaagggggttatatttctaagtgatttacaatttctgtttctaaaattgttgggatttagaaatgtttcaattccaagaaattttattttactttaccatgagattgccatttatgtaatttaaacactgtctagtttcttaattatctaactcacacgagggtaagttttttgttggtttcttttttggagtcctgagttcaaaggggacagaactaagggcaggagaagagaatggatgtgtcttctctcccatcttcccctcatcatcgaccgaggagcacaaagaagttctgtttctgtttttttcagaaactttattttagctgtcaagcagagaatagcttgaactattcagactattgttggcactgtttagtagtgaccacacgctcttctacccgggaaggaacatatgacgacatgctcctcccatgtcccctgatggtgtctgttcccacaatatccttctagtctgcatcgtgaagtggcttaggccaaagcttcctgtgtgatgacgcacgtccgagactgttccatctcattcctcgcaaatttgagctcttctgatcaattctaaatatttgattaattttaattctgaaagaaaattttgaggatttaagcttaggggattttatttttataaataccagattattgttagacttaataaatcactgttaaatttaaagatgacagttaccttggaaagttcactaatacttcgctccaaggcgtctgtaaaagaagatatctttattggagcaatgttcatgtgactgggaatgacagaagaatgggagatgagtagggacccctcaagcacagctgtcactcagaaattttaaatttgaaaaagaaatcgattttcatctgtatgccgtcaaggaaggaattcagttacagggcatctgtaacttaaatattgtaagaataactcatatggaagttcaagctatttttatactataatagagttatttaattttaatttgttgaattattagttaccactgtcatttcttcagctatggatatgtggctgatgttggggagacggacctcagtgtgttttatattgtctggtgttaagatgataaattactttgtgattacaagcaaattttctatttgacaaagcccttggtggagtccaaatgatttttctgtaccatattgttctcttacacatacgtatgttaggaaaataggcacactttcaaagagaatgttctcttacacatacgtatgttaggaaaatagacacattttcaaagagaatgttctcttacatatgttaggaaaataggcacactttcaaagagaggtataggggctttttactgccttcgaaatcacttttaataaaagttgtatgataaatcattaaaaatgcgagtgtaaatatttttttttacctctatcagggtttttatttgaaagtgtgctcttaccatttccttgtttgagtaagagagtgaatggttctgagtgtttaggaaggatttgcttgcttgcagcagaagttctaggaaaagcaggcacctcccaaatatcttgaggacactggcagccttatggtgactaaatccacactttctttaaagagatgcagatgaattacttttctgttaatatatagaaaaatacacaggagaacatgcagatacatgtaaatatctacatacagggatatttgtatgtgtggttgtgaaacccatacacaagtggatttggccatctttgggcagtgaggtcaaatgtgaatatgtgtaaaagtgcttttcagaactgcattactatgagaaaacatcaaaactgctgtagttttccatttctactgtatttcagttgcaacctatttttaataaactttgtatgtatttaagtgtatttgctattgttttgaaagtgctgacaaagtttatatttgtaacatcagccttcctcgcccatctctttccatctgtctcttcttcattaaacacttactgagtatgaaaaaaaaacagccaccactaaacaccaaaaaacaacaaaaaaaaaagggaggggcgaaaaatatcccggggaggggcacagaattaagcgccacccacatctatgtgtaaaaggcgcccccaagagagagcgacatctaatagagcaacaggcggcgccttataaagcgctgccgaggcaacaagtcgcgtaggattgtgagagaaccgcttcgtcgtggggatagttggaaccaacagattgatgcgagagaaatacaatatggtggacgtgggtcaaccaacgttcgggattcgtgacaataagtagatcac

SEQ ID NO: 336303 - DNA, 3272 bp, Homo sapiens
gaattgtgcttgttgaatgtgtgaatgtagatgataaattccatcttatagccatgattaatggaggaataactgggatttgtggcaaccgtttttaggtaatttattttaaaattgtagagctaaaaaattgtaaaaagttttattttccaacagtgattttaacctggtattttatatttaactttctgtgtgtgtgtgtttgtgtatatgtgtgtctacttgtcttaatgtgtgcattttatgtcttgtgctggtggagtttgtggagggagattaatgtcagcctgttgttagtttgcaggacgaggagcggaggcggcagcagcagttagaagagatgcgcaagcgggaagcggaagaccgagcgaggcaagaggaagagcgccggcggcaggaggaggagcgaacaaaacgagacgctgaagaaaagaggcgacaggaagaagggtattacagccgcctggaagccgagaggcgcagacagcacgacgaggcggcgcgcaggttgctggagcccgaggcgcccggtctgtgccgccctccgcttccccgggactacgagcccccgtccccgtcccccgcccggcgcccctcctcccccgcctcagcgaaacgcctcctacctcaaaacacaggtcctctcccccgactcgctgttcactgccaagtttgttgcatacaatgaggaggaggaggaggaggactgcagcctagcaggtcaggataagtactccagcacaagaaagtctcatggggaccttcttcctgcccctcttaaaccacggccacccccctgccagccacgcccggcctccgatggcgtctttctctccaactcattccagccaccctcagccaaagccaacagtactgctcacaaaaaaggccagcccctgccccctccaaaaaaatccagctcctaccatcccagccactgcaaaggaccaaactcttacccaggatctactggagcagctgttggagcccatgacgcctgtcgggatgcaaaagagaagcgctctaaaagccaagatgcagattcacctggaagttctggggcccctgaaaacttgacattcaaggaacgccagcgtcttttttcacaaggtcaagatgtatccaataaagtgaaagcttctcgtaaattaacagaactggagaatgaactgaacacaaagtgaaagaaaatgaggagaacactttgtatttaccccaaaatcttttcagttgtgggtttgtaggtgcgagtttgaagaggaaaagaggaagggggttatatttctaagtgatttacaatttctgtttctaaaattgttgggatttagaaatgtttcaattccaagaaattttattttactttaccatgagattgccatttatgtaatttaaacactgtctagtttcttaattatctaactcacacgagggtaagttttttgttggtttcttttttggagtcctgagttcaaaggggacagaactaagggcaggagaagagaatggatgtgtcttctctcccatcttcccctcatcatcgaccgaggagcacaaagaagttctgtttctgtttttttcagaaactttattttagctgtcaagcagagaatagcttgaactattcagactattgttggcactgtttagtagtgaccacacgctcttctacccgggaaggaacatatgacgacatgctcctcccatgtcccctgatggtgtctgttcccacaatatccttctagtctgcatcgtgaagtggcttaggccaaagcttcctgtgtgatgacgcacgtccgagactgttccatctcattcctcgcaaatttgagctcttctgatcaattctaaatatttgattaattttaattctgaaagaaaattttgaggatttaagcttaggggattttatttttataaataccagattattgttagacttaataaatcactgttaaatttaaagatgacagttaccttggaaagttcactaatacttcgctccaaggcgtctgtaaaagaagatatctttattggagcaatgttcatgtgactgggaatgacagaagaatgggagatgagtagggacccctcaagcacagctgtcactcagaaattttaaatttgaaaaagaaatcgattttcatctgtatgccgtcaaggaaggaattcagttacagggcatctgtaacttaaatattgtaagaataactcatatggaagttcaagctatttttatactataatagagttatttaattttaatttgttgaattattagttaccactgtcatttcttcagctatggatatgtggctgatgttggggagacggacctcagtgtgttttatattgtctggtgttaagatgataaattactttgtgattacaagcaaattttctatttgacaaagcccttggtggagtccaaatgatttttctgtaccatattgttctcttacacatacgtatgttaggaaaataggcacactttcaaagagaatgttctcttacacatacgtatgttaggaaaatagacacattttcaaagagaatgttctcttacatatgttaggaaaataggcacactttcaaagagaggtataggggctttttactgccttcgaaatcacttttaataaaagttgtatgataaatcattaaaaatgcgagtgtaaatatttttttttacctctatcagggtttttatttgaaagtgtgctcttaccatttccttgtttgagtaagagagtgaatggttctgagtgtttaggaaggatttgcttgcttgcagcagaagttctaggaaaagcaggcacctcccaaatatcttgaggacactggcagccttatggtgactaaatccacactttctttaaagagatgcagatgaattacttttctgttaatatatagaaaaatacacaggagaacatgcagatacatgtaaatatctacatacagggatatttgtatgtgtggttgtgaaacccatacacaagtggatttggccatctttgggcagtgaggtcaaatgtgaatatgtgtaaaagtgcttttcagaactgcattactatgagaaaacatcaaaactgctgtagttttccatttctactgtatttcagttgcaacctatttttaataaactttgtatgtatttaagtgtatttgctattgttttgaaagtgctgacaaagtttatatttgtaacatcagccttcctcgcccatctctttccatctgtctcttcttcattaaacacttactgagtatga

SEQ ID NO: 336304 - DNA, 6424 bp, Homo sapiens
gcggccgcggaggcggaggcagccgcggaggcggaggcggccggcggggggtggcgaggggcgccgggcccccgcggacctgtcgtcctcggcccgtcctccggccccggccccgcgcggctgaggaggcgcggccaggaccatgtcggcgggcggccgtgacgaggagcggcggaagctggccgacatcatccaccactggaacgccaaccggctggacctgttcgagatcagccagccgaccgaggatttggagttccatggagtgatgagattttattttcaagataaagctgctggaaactttgcaacaaaatgtattcgggtctctagtactgccaccactcaagatgtaatcgaaacgctcgcggagaaatttcgacctgatatgcgaatgctgtcctctcccaagtattcactctatgaagtgcatgtcagcggagaaagaagattggatatagatgagaaacctctagttgtacaactgaattggaacaaagatgatcgggaaggcagatttgttcttaagaatgagaatgacgccattcctcctaaggctcaaagtaatggacctgaaaagcaggaaaaagaaggggttatccagaacttcaagagaactctctcaaagaaagaaaagaaggaaaaaaagaagagagaaaaagaggcattgcgacaggcatctgataaagatgatagacctttccaaggggaggatgttgaaaattctcgactggctgctgaggtttacaaagacatgccggaaaccagctttactcgaaccatttctaatcctgaggtggttatgaaacgacggaggcagcaaaaattggaaaagagaatgcaggaatttcggagctcagatgggcggcctgattcaggtggaacattgagaatttatgcagatagtttaaaaccaaatattccctacaagacaatcctgctgtctactacagatcctgcagactttgctgtggctgaagctttagagaagtatggtctggaaaaagaaaaccctaaggattactgcatcgcccgggttatgcttcctcctggagcccagcattctgatgaaaagggtgctaaagaaattattcttgatgatgatgagtgtcctttacaaatcttcagggaatggccaagtgacaaagggattttagtctttcagttgaagaggaggccaccagaccacatcccaaagaaaaccaagaaacacttggaaggcaagacacccaagggaaaggagagagctgacgggtctggctatggctccacccttcctccggagaagctgccctatttagtagagttaagcccagatggttctgactctagagataagccaaagctttaccgccttcagttaagtgttactgaagttgggacagaaaagttggatgacaactctatccagttgtttggcccaggaattcagccccatcactgtgaccttaccaacatggatggagtggtcactgtgacgcccagaagtatggacgcagaaacctacgtggaaggccagcgcatctcagaaaccaccatgctgcagagtggcatgaaagtgcagtttggggcgtcccatgtatttaagtttgtggaccccagtcaggatcatgctcttgcaaaaagatctgtggatggaggcctgatggttaagggcccaagacataaacctggaattgttcaggagacaacttttgatttgggaggagatattcatagtgggacagcattaccgacaagcaagagcaccactaggctggacagcgacagagtgtcgtctgcctctagcacagccgagcggggaatggtgaagccgatgatcagagtagaacagcagccagattatcgcaggcaagaaagcagaacacaggatgcttctgggcctgagctgatactacctgcaagcattgaattcagggaaagttctgaagattcatttttgtctgccattataaattatactaatagctctacagtccactttaagttgtcccctacatatgtattatatatggcatgccggtatgtattgtccaaccagtacagacctgacatcagccctacagagcgcacacataaagtcattgcagtcgtcaacaagatggtgagcatgatggagggtgtcatccagaaacagaagaatattgcaggggcacttgccttctggatggcaaatgcatctgaacttctcaacttcattaagcaagaccgagaccttagtcggatcacactggatgctcaagatgttttagcacatttggttcaaatggcatttaaatacttggttcactgtcttcaatcagaacttaataattacatgccagcctttctagatgaccctgaagagaacagtctgcaacgaccaaaaatagatgatgtgctgcacacgctcacaggagccatgtccttgctacgacgctgcagagtcaatgccgccctgaccatccagctcttctctcagctcttccacttcatcaatatgtggctgttcaatagattggtgaccgacccagattcggggctgtgctcccattactggggtgcgattatccgtcagcagttgggccatattgaagcctgggctgagaagcaggggctggaactggctgcggactgtcatctgagcaggatcgtgcaggcaacgactttgcttaccatggataagtatgcacctgatgacattccaaatataaacagcacctgctttaagttaaattcattacaacttcaagccttattacagaactatcactgtgcacctgatgagccttttatcccaacggatcttatagaaaatgtagtgactgtggctgaaaacactgccgatgagctggcccgcagtgatggaagggaagtgcagttggaggaggatcctgatctgcagctgccgtttcttttgccagaagatggttattcttgtgatgttgtcagaaacattccaaatggtttacaagaatttttagaccctctgtgccagagaggattttgcaggttaattcctcacacacgttcaccaggtacttggacaatatattttgaaggtgcagattatgaaagtcaccttctgcgtgagaacacagagctggctcagcctctgaggaaagaacctgaaataatcactgtgaccctaaaaaagcagaatggaatgggccttagcattgttgcagcaaagggtgctggtcaagataaactaggaatctacgtgaagtcggttgtgaaaggaggtgctgcagatgtggatggacgtctagctgcaggtgatcagctcctcagtgtggatggacgaagtctggttggactctctcaggaaagggcggcagaactcatgacaagaacaagctctgtggtgacactggaagtagcaaagcagggtgccatctaccacggtctggccacccttctcaatcagccatcccccatgatgcagagaatttcagatcgtcgtggctcaggtaaaccccgaccaaagagtgaaggctttgagctctataataattcaactcaaaatgggtctcctgagagtcctcagctgccttgggcagaatatagtgaaccaaagaaattgcctggtgatgacagactgatgaaaaatagagctgatcaccgttccagccccaacgtagcaaatcagcctcctagtcctggagggaaaagtgcatatgcctctggaacaacagcgaagataacatctgtctctactggaaacctctgcactgaggagcagacgcctccgcctagacctgaagcctaccccatccccactcagacgtacaccagagagtattttaccttcccagcttccaaatcccaggatcggatggctcctcctcagaaccagtggccaaattatgaggaaaagccacatatgcacacagatagtaatcattccagtattgcaattcagcgtgttacacgttcccaagaagaacttcgagaagataaagcttaccaacttgagcggcatcgaatagaggcagctatggaccgaaagtctgatagtgatatgtggataaatcagagctcctcactggactccagtacctctagccaggagcatctgaaccattcctctaagtcggtcacccctgcttccacactgaccaaaagtggccctggccgttggaaaacaccagcagccataccggccacccctgtggccgtctcccagccaatccgaacagacctgcctccgccacccccgccacctccagtccactatgccggtgatttcgatggaatgtccatggatttgcctctcccaccacccccttccgccaaccagatagggctgccgtctgcgcaggtggctgctgctgaacggagaaagagagaagaacatcagcgttggtatgagaaggagaaggcccgcctggaggaggagcgggagaggaagcggagagagcaggagaggaagttgggccagatgcgcactcagtccttaaaccctgctccgttttctcccctgactgcacagcagatgaagcccgaaaagccttccacactccagcggccacaggaaacagtcattcgggagctgcagcctcagcagcagccccgcacgatcgagcgcagagacttgcagtacattacagtcagcaaagaggagctttcctcgggggacagtctgtcccccgacccgtggaagcgggacgccaaggagaagctggagaagcagcagcagatgcacatcgtggacatgctgagcaaggagatccaggagctccagagcaaaccggaccgcagcgccgaggagagcgaccggctgcgcaagctcatgctggagtggcagttccagaagagactccaggagtcgaagcagaaggacgaagatgacgaggaggaggaggacgatgatgtggacaccatgctgatcatgcagcgcctggaggctgaacgaagagcgaggttgcaggacgaggagcggaggcggcagcagcagttagaagagatgcgcaagcgggaagcggaagaccgagcgaggcaagaggaagagcgccggcggcaggaggaggagcgaacaaaacgagacgctgaagaaaagaggcgacaggaagaagggtattacagccgcctggaagccgagaggcgcagacagcacgacgaggcggcgcgcaggttgctggagcccgaggcgcccggtctgtgccgccctccgcttccccgggactacgagcccccgtccccgtcccccgcccggcgcccctcctcccccgcctcagcgaaacgcctcctacctcaaaacacaggtcctctcccccgactcgctgttcactgccaagtttgttgcatacaatgaggaggaggaggaggaggactgcagcctagcaggtcaggataagtactccagcacaagaaagtctcatggggaccttcttcctgcccctcttaaaccacggccacccccctgccagccacgcccggcctccgatggcgtctttctctccaactcattccagccaccctcagccaaagccaacagtactgctcacaaaaaaggccagcccctgccccctccaaaaaaatccagctcctaccatcccagccactgcaaaggaccaaactcttacccaggatctactggagcagctgttggagcccatgacgcctgtcgggatgcaaaagagaagcgctctaaaagccaagatgcagattcacctggaagttctggggcccctgaaaacttgacattcaaggaacgccagcgtcttttttcacaaggtcaagatgtatccaataaagtgaaagcttctcgtaaattaacagaactggagaatgaactgaacacaaagtgaaagaaaatgaggagaacactttgtatttaccccaaaatcttttcagttgtgggtttgtaggtgcgagtttgaagaggaaaagaggaagggggttatatttctaagtgatttacaatttctgtttctaaaattgttgggatttagaaatgtttcaattccaagaaattttattttactttaccatgagattgccatttatgtaatttaaacactgtctagtttcttaattatctaactcacacgagggtaagttttttgttggtttcttttttggagtcctgagttcaaaggggacagaactaagggcaggagaagagaatggatgtgtcttctctcccatcttcccctcatcatcgaccgaggagcacaaagaagttctgtttctgtttttttcagaaactttattttagctgtcaagcagagaatagcttgaactattcagactattgttggcactgtttagtagtgaccacacgctcttctacccgggaaggaacatatgacgacatgctcctcccatgtcccctgatggtgtctgttcccacaatatccttctagtctcggacgtgcgtcatcacacaggaagctttggcctaagccacttcacgatgcagactagaaggtcgacgcgg

SEQ ID NO: 336305 - DNA, 5165 bp, Homo sapiens
gcggccgcggaggcggaggcagccgcggaggcggaggcggccggcggggggtggcgaggggcgccgggcccccgcggacctgtcgtcctcggcccgtcctccggccccggccccgcgcggctgaggaggcgcggccaggaccatgtcggcgggcggccgtgacgaggagcggcggaagctggccgacatcatccaccactggaacgccaaccggctggacctgttcgagatcagccagccgaccgaggatttggagttccatggagtgatgagattttattttcaagataaagctgctggaaactttgcaacaaaatgtattcgggtctctagtactgccaccactcaagatgtaatcgaaacgctcgcggagaaatttcgacctgatatgcgaatgctgtcctctcccaagtattcactctatgaagtgcatgtcagcggagaaagaagattggatatagatgagaaacctctagttgtacaactgaattggaacaaagatgatcgggaaggcagatttgttcttaagaatgagaatgacgccattcctcctaaggctcaaagtaatggacctgaaaagcaggaaaaagaaggggttatccagaacttcaagagaactctctcaaagaaagaaaagaaggaaaaaaagaagagagaaaaagaggcattgcgacaggcatctgataaagatgatagacctttccaaggggaggatgttgaaaattctcgactggctgctgaggtttacaaagacatgccggaaaccagctttactcgaaccatttctaatcctgaggtggttatgaaacgacggaggcagcaaaaattggaaaagagaatgcaggaatttcggagctcagatgggcggcctgattcaggtggaacattgagaatttatgcagatagtttaaaaccaaatattccctacaagacaatcctgctgtctactacagatcctgcagactttgctgtggctgaagctttagagaagtatggtctggaaaaagaaaaccctaaggattactgcatcgcccgggttatgcttcctcctggagcccagcattctgatgaaaagggtgctaaagaaattattcttgatgatgatgagtgtcctttacaaatcttcagggaatggccaagtgacaaagggattttagtctttcagttgaagaggaggccaccagaccacatcccaaagaaaaccaagaaacacttggaaggcaagacacccaagggaaaggagagagctgacgggtctggctatggctccacccttcctccggagaagctgccctatttagtagagttaagcccagatggttctgactctagagataagccaaagctttaccgccttcagttaagtgttactgaagttgggacagaaaagttggatgacaactctatccagttgtttggcccaggaattcagccccatcactgtgaccttaccaacatggatggagtggtcactgtgacgcccagaagtatggacgcagaaacctacgtggaaggccagcgcatctcagaaaccaccatgctgcagagtggcatgaaagtgcagtttggggcgtcccatgtatttaagtttgtggaccccagtcaggatcatgctcttgcaaaaagatctgtggatggaggcctgatggttaagggcccaagacataaacctggaattgttcaggagacaacttttgatttgggaggagatattcatagtgggacagcattaccgacaagcaagagcaccactaggctggacagcgacagagtgtcgtctgcctctagcacagccgagcggggaatggtgaagccgatgatcagagtagaacagcagccagattatcgcaggcaagaaagcagaacacaggatgcttctgggcctgagctgatactacctgcaagcattgaattcagggaaagttctgaagattcatttttgtctgccattataaattatactaatagctctacagtccactttaagttgtcccctacatatgtattatatatggcatgccggtatgtattgtccaaccagtacagacctgacatcagccctacagagcgcacacataaagtcattgcagtcgtcaacaagatggtgagcatgatggagggtgtcatccagaaacagaagaatattgcaggggcacttgccttctggatggcaaatgcatctgaacttctcaacttcattaagcaagaccgagaccttagtcggatcacactggatgctcaagatgttttagcacatttggttcaaatggcatttaaatacttggttcactgtcttcaatcagaacttaataattacatgccagcctttctagatgaccctgaagagaacagtctgcaacgaccaaaaatagatgatgtgctgcacacgctcacaggagccatgtccttgctacgacgctgcagagtcaatgccgccctgaccatccagctcttctctcagctcttccacttcatcaatatgtggctgttcaatagattggtgaccgacccagattcggggctgtgctcccattactggggtgcgattatccgtcagcagttgggccatattgaagcctgggctgagaagcaggggctggaactggctgcggactgtcatctgagcaggatcgtgcaggcaacgactttgcttaccatggataagtatgcacctgatgacattccaaatataaacagcacctgctttaagttaaattcattacaacttcaagccttattacagaactatcactgtgcacctgatgagccttttatcccaacggatcttatagaaaatgtagtgactgtggctgaaaacactgccgatgagctggcccgcagtgatggaagggaagtgcagttggaggaggatcctgatctgcagctgccgtttcttttgccagaagatggttattcttgtgatgttgtcagaaacattccaaatggtttacaagaatttttagaccctctgtgccagagaggattttgcaggttaattcctcacacacgttcaccaggtacttggacaatatattttgaaggtgcagattatgaaagtcaccttctgcgtgagaacacagagctggctcagcctctgaggaaagaacctgaaataatcactgtgaccctaaaaaagcagaatggaatgggccttagcattgttgcagcaaagggtgctggtcaagataaactaggaatctacgtgaagtcggttgtgaaaggaggtgctgcagatgtggatggacgtctagctgcaggtgatcagctcctcagtgtggatggacgaagtctggttggactctctcaggaaagggcggcagaactcatgacaagaacaagctctgtggtgacactggaagtagcaaagcagggtgccatctaccacggtctggccacccttctcaatcagccatcccccatgatgcagagaatttcagatcgtcgtggctcaggtaaaccccgaccaaagagtgaaggctttgagctctataataattcaactcaaaatgggtctcctgagagtcctcagctgccttgggcagaatatagtgaaccaaagaaattgcctggtgatgacagactgatgaaaaatagagctgatcaccgttccagccccaacgtagcaaatcagcctcctagtcctggagggaaaagtgcatatgcctctggaacaacagcgaagataacatctgtctctactggaaacctctgcactgaggagcagacgcctccgcctagacctgaagcctaccccatccccactcagacgtacaccagagagtattttaccttcccagcttccaaatcccaggatcggatggctcctcctcagaaccagtggccaaattatgaggaaaagccacatatgcacacagatagtaatcattccagtattgcaattcagcgtgttacacgttcccaagaagaacttcgagaagataaagcttaccaacttgagcggcatcgaatagaggcagctatggaccgaaagtctgatagtgatatgtggataaatcagagctcctcactggactccagtacctctagccaggagcatctgaaccattcctctaagtcggtcacccctgcttccacactgaccaaaagtggccctggccgttggaaaacaccagcagccataccggccacccctgtggccgtctcccagccaatccgaacagacctgcctccgccacccccgccacctccagtccactatgccggtgatttcgatggaatgtccatggatttgcctctcccaccacccccttccgccaaccagatagggctgccgtctgcgcaggtggctgctgctgaacggagaaagagagaagaacatcagcgttggtatgagaaggagaaggcccgcctggaggaggagcgggagaggaagcggagagagcaggagaggaagttgggccagatgcgcactcagtccttaaaccctgctccgttttctcccctgactgcacagcagatgaagcccgaaaagccttccacactccagcggccacaggaaacagtcattcgggagctgcagcctcagcagcagccccgcacgatcgagcgcagagacttgcagtacattacagtcagcaaagaggagctttcctcgggggacagtctgtcccccgacccgtggaagcgggacgccaaggagaagctggagaagcagcagcagatgcacatcgtggacatgctgagcaaggagatccaggagctccagagcaaaccggaccgcagcgccgaggagagcgaccggctgcgcaagctcatgctggagtggcagttccagaagagactccaggagtcgaagcagaaggacgaagatgacgaggaggaggaggacgatgatgtggacaccatgctgatcatgcagcgcctggaggctgaacgaagagcgaggttgcaggacgaggagcggaggcggcagcagcagttagaagagatgcgcaagcgggaagcggaagaccgagcgaggcaagaggaagagcgccggcggcaggaggaggagcgaacaaaacgagacgctgaagaaaaggttatggtcctttaagggcagctagaattttaccaagttagcctgaacgtaatcgattggctggggcagagcgggctggaagttctgtgtttcttaagaagcacgaggcagagcagggcctggc

SEQ ID NO: 336306 - DNA, 2804 bp, Homo sapiens
gcggccgcggaggcggaggcagccgcggaggcggaggcggccggcggggggtggcgaggggcgccgggcccccgcggacctgtcgtcctcggcccgtcctccggccccggccccgcgcggctgaggaggcgcggccaggaccatgtcggcgggcggccgtgacgaggagcggcggaagctggccgacatcatccaccactggaacgccaaccggctggacctgttcgagatcagccagccgaccgaggatttggagttccatggagtgatgagattttattttcaagataaagctgctggaaactttgcaacaaaatgtattcgggtctctagtactgccaccactcaagatgtaatcgaaacgctcgcggagaaatttcgacctgatatgcgaatgctgtcctctcccaagtattcactctatgaagtgcatgtcagcggagaaagaagattggatatagatgagaaacctctagttgtacaactgaattggaacaaagatgatcgggaaggcagatttgttcttaagaatgagaatgacgccattcctcctaaggctcaaagtaatggacctgaaaagcaggaaaaagaaggggttatccagaacttcaagagaactctctcaaagaaagaaaagaaggaaaaaaagaagagagaaaaagaggcattgcgacaggcatctgataaagatgatagacctttccaaggggaggatgttgaaaattctcgactggctgctgaggtttacaaagacatgccggaaaccagctttactcgaaccatttctaatcctgaggtggttatgaaacgacggaggcagcaaaaattggaaaagagaatgcaggaatttcggagctcagatgggcggcctgattcaggtggaacattgagaatttatgcagatagtttaaaaccaaatattccctacaagacaatcctgctgtctactacagatcctgcagactttgctgtggctgaagctttagagaagtatggtctggaaaaagaaaaccctaaggattactgcatcgcccgggttatgcttcctcctggagcccagcattctgatgaaaagggtgctaaagaaattattcttgatgatgatgagtgtcctttacaaatcttcagggaatggccaagtgacaaagggattttagtctttcagttgaagaggaggccaccagaccacatcccaaagaaaaccaagaaacacttggaaggcaagacacccaagggaaaggagagagctgacgggtctggctatggctccacccttcctccggagaagctgccctatttagtagagttaagcccagatggttctgactctagagataagccaaagctttaccgccttcagttaagtgttactgaagttgggacagaaaagttggatgacaactctatccagttgtttggcccaggaattcagccccatcactgtgaccttaccaacatggatggagtggtcactgtgacgcccagaagtatggacgcagaaacctacgtggaaggccagcgcatctcagaaaccaccatgctgcagagtggcatgaaagtgcagtttggggcgtcccatgtatttaagtttgtggaccccagtcaggatcatgctcttgcaaaaagatctgtggatggaggcctgatggttaagggcccaagacataaacctggaattgttcaggagacaacttttgatttgggaggagatattcatagtgggacagcattaccgacaagcaagagcaccactaggctggacagcgacagagtgtcgtctgcctctagcacagccgagcggggaatggtgaagccgatgatcagagtagaacagcagccagattatcgcaggcaagaaagcagaacacaggatgcttctgggcctgagctgatactacctgcaagcattgaattcagggaaagttctgaagattcatttttgtctgccattataaattatactaatagctctacagtccactttaagttgtcccctacatatgtattatatatggcatgccggtatgtattgtccaaccagtacagacctgacatcagccctacagagcgcacacataaagtcattgcagtcgtcaacaagatggtgagcatgatggagggtgtcatccaggtacgttccagccggccagccatgctcctccagtgattgtggttgtaattgctaagccagtgaattcagcttctttaaggcttctcatttggttacaagatttttttctaaaataaaagttatgtaaatattgtaggaaaatgtataactttaaagagttgaaaggaaatgcaagcttttttctattttgttttccctgtaaaacttcagcataagtgaagttaacttgtagtaatagttgtgagaaagtgctgagactgttgtgggcttttgtagaattttttctgtaaataatttgttgagatgaagttcatataatattaaccattttgaagtgaacaattcagtcgcatttggtgcattcacagtgttgtgcagccaccacccctgtcggttccaaaacgtctccatcacctcagagcgatacccctcaagtagttcctggggtttttcttttcccccgttccctggtaacgccttcttagactttttaaaaatggttctcaaaagtcacttgctcctgtgtaatgagcctagacgttggtagtaattgggctttttgatagcacatgtgtaggtgtaatggacattgtaacatacttctcacttaaaatgaaattctgtcataaacctgttttcaaaatttcagaagataaaggtattttgttggtag

SEQ ID NO: 336307 - DNA, 1784 bp, Homo sapiens
gcggccgcggaggcggaggcagccgcggaggcggaggcggccggcggggggtggcgaggggcgccgggcccccgcggacctgtcgtcctcggcccgtcctccggccccggccccgcgcggctgaggaggcgcggccaggaccatgtcggcgggcggccgtgacgaggagcggcggaagctggccgacatcatccaccactggaacgccaaccggctggacctgttcgagatcagccagccgaccgaggatttggagttccatggagtgatgagattttattttcaagataaagctgctggaaactttgcaacaaaatgtattcgggtctctagtactgccaccactcaagatgtaatcgaaacgctcgcggagaaatttcgacctgatatgcgaatgctgtcctctcccaagtattcactctatgaagtgcatgtcagcggagaaagaagattggatatagatgagaaacctctagttgtacaactgaattggaacaaagatgatcgggaaggcagatttgttcttaagaatgagaatgacgccattcctcctaaggctcaaagtaatggacctgaaaagcaggaaaaagaaggggttatccagaacttcaagagaactctctcaaagaaagaaaagaaggaaaaaaagaagagagaaaaagaggcattgcgacaggcatctgataaagatgatagacctttccaaggggaggatgttgaaaattctcgactggctgctgaggtttacaaagacatgccggaaaccagctttactcgaaccatttctaatcctgaggtggttatgaaacgacggaggcagcaaaaattggaaaagagaatgcaggaatttcggagctcagatgggcggcctgattcaggtggaacattgagaatttatgcagatagtttaaaaccaaatattccctacaagacaatcctgctgtctactacagatcctgcagactttgctgtggctgaagctttagagaagtatggtctggaaaaagaaaaccctaaggattactgcatcgcccgggttatgcttcctcctggagcccagcattctgatgaaaagggtgctaaagaaattattcttgatgatgatgagtgtcctttacaaatcttcagggaatggccaagtgacaaagggattttagtctttcagttgaagaggaggccaccagaccacatcccaaagaaaaccaagaaacacttggaaggcaagacacccaagggaaaggagagagctgacgggtctggctatggctccacccttcctccggagaagctgccctatttagtagagttaagcccagatggttctgactctagagataagccaaagctttaccgccttcagttaagtgttactgaagttgggacagaaaagttggatgacaactctatccagttgtttggcccaggaattcagccccatcactgtgaccttaccaacatggatggagtggtcactgtgacgcccagaagtatggacgcagaaacctacgtggaaggccagcgcatctcagaaaccaccatgctgcagagtggcatgaaagtgcagtttggggcgtcccatgtatttaagtttgtggaccccagtcaggatcatgctcttgcaaaaagatctgtggatggaggcctgatggttaagggcccaagacataaacctgggtaaatagattaaccctaagatttaaaatgttttgattatacttaaagtagttcagattattcatagatatcttggctttttatttttgtttcaatttttaaaaaaatat

SEQ ID NO: 336308 - DNA, 556 bp, Homo sapiens
ctgagctatgattttgtaagatacaaccaaaatggagactagaaggagattgtgcaaggatggttctgccctaaactgtctgagaaagggagagaaatgcttccaccagcaggcacagcacttgtgggaataaacgggaaggttcgtgcttgtgctgagtgcggtctggggagtaatagacattttcacgagaggctgcaggatggggagagacacttcaggccagagttgggcagagcttatcctggcttaactgggggcaggaggtgtccagaagcatagggaggtttttgtcaactaaggaacagtgctgatgcggcaagaacgggaacagggcagggcatggaacccagagggaagacgggggtgatccccgacttcaggtggagtgacagtgggcaggcagtcgcagtcctgtcaaggccaagggtatttggaggggcctgtggttctgtagtctcccactgtctacctaggaggtggctgtaacctagccctgggggtagagaaaggaactttaggggggcttctccatagaggtcaggagaggaagggg

SEQ ID NO: 336309 - DNA, 1230 bp, Homo sapiens
tgctggatttcagacttgcatgggtcctgtagcccctttgttttggccaatttctcccatttggaatggctatatttacccaatgcttataccaccattctatctaggaagtaaataacttgcttttgattttacaggctcataggcagaagggatttgccttgtctcagatgagactttggactgcggacttttgagttaatgctgaaatgagttaagacttcggaggactattgggaaggcatgattggttttgaaatgtgaggacatgagatttgggaggggccaggggtggaaggatacggttgggttctgtgtccccacccaagtcttatcttgtagctcccataacccatgtgtcttgggagggacctggtaattcaatcatgtgggctggatgcggttgctcatgcctgtaatcccagcactttgggaggccaagggggagatcacttgcgatcaggagtttgagaccagcctggccaacatggtgaaaccccatctatactaaaaatacaaaaattagccaggcacggtggtgggcacctgtaatcccagctacttgggaggctgaggcatgagaatcacttgaacctggagtgcagtggcgcgatctcggctcactgcaagctccgcctcccaggttcacgccattctcctgcctcagcctcccgtgtagcaggcattgtcacaggcgcctgccaccacacccacctaatttttttgtatttttagtagagacggggtttcaccgtgttagccagggtggtatcgatctcctgaccttgtgatccgcccaccttgggctcccaaagtgttgagattacaggcgtaagccactgcacccggcaataaacctctttcttttgtaaattgcccaggtatgtctttatcagcagcatgaaaatggactcatacaatgatccattacctagggtaaaattctcctgaatgtcaaacaaagagataaactacatttgggttttgggaagtcccctgtaatgatgaatcaagaatcctcaagtctgtcttgccacccatttaatacgtatttttgttaaggctgaagtttagagttagaatcaggacattttggcctattgagaggttctgaattccaacagaagatgccatgtaaatcagtgaatttgattcttttaaaagcaacttacaaaatttacaagatgtattcaataaagcagtttagctttggtatatcaaaccttataa

SEQ ID NO: 336310 - DNA, 425 bp, Homo sapiens
caccacatccatagctctagcccagattgctccacccagctgcctgctagaaacctctacttggctgcctctcaggcagctcaagggagatgtgcccttttcttttaacccacccttccattggcctccctacctcagataatacactgctagctacctagctgcccaaggcacaatcctagccatcacctttgtcccctcaccaagtcctgtcaattctactgcctaaatatttcccaaatctgtccttttctttccattccctgctgccaccaacctggttcaggctaaggtcatatctagactggacaactgtggcagcctcctgactggcctccctgcgtccactcccatcccccgctaactcattctccacgctgggaccagagtaatgtaatgcctgttgctcgggataatgtacacag

SEQ ID NO: 336311 - DNA, 309 bp, Homo sapiens
ctttgtattccagcctgggtgacagagtgagaccctgtctctaaggggttttgcatggttatccagagcagtctcttgaattttggttgtctttgacgcagctgcatctggagatcctctatgtgaggcatgtttagagaaagagaaacattgacccctggaattgatattcttccaagaaatcttttagtcttgttggtaaaggcagtcctcagatggtaccggtccctttgttagtggtgagcctacagagatggtgcctggtgtgcagagcgatgtggttggatggaggtgaacagagcagtctag

SEQ ID NO: 336312 - DNA, 1583 bp, Homo sapiens
ctcagatgagtgtggccgtatttgtgttactcaagctgctttgtcatctgcatttgaagaaacgtggtgagcctcctgtgtgtgcccatgtggcagtgggcacctctgccccctgcaaaggctgtctaagaacacagagcctgcagtacaggccctgcctcctgacatgccccaggccggctggaagaaagcgcgggactgtcctattgacgtggggaggggacggctggactctgtgatgctaactgtgttctctgctgggccatgtggctccccacagagaccctgggtgcccagtcattcgcgttctcctatgtgtgtgtatatatattatatatacatgtatttactaactttagaaagcccccaagggggccttgtttctgcttggacagtcagcgtccatagcgtgtcattcctaagctccattaaggagattcagaagcaagcagttacccctggagtctgcacgctgggcacaagggtcacaccttcgttgagagctcctgaccccaggagccgagggcaggacacggtagtgtttacaggacctggcaaaggggcactgccttgtgtgtgaggttttttcaccagtcagtcccttttaaaaacagcatatcttttgaagaacaagaagtttacgcaggcataagcaactcactttgcacgtggagctttcaggacgtttcatgtctgttacgttatagcctctatcctcatgggggctctgagttcagcagggcctgagctgttaatctgctttttcaaattattaataatgaaagtaacaccatgccaccacctggtatcatttcatgctttctatgtgcctggtgtttacacggcttatctcatttaatcttcccagcatgtaataaaaatattgcaacaggtactgctcctgtgtggactccttcccccgagctcacactgcttgaggccttcccagctctgggctttgtgtcctgtgtggacttcttccccgagctcacactgcttgaggcattctagctctgggctttgtgaatatcctgcttttatcctcatttataggtaagaaagctgactcagagaggttaagcagctggtctgaggtcaactgcttacgggtcggggagctgggcctgcacacaggggtctgatgcagagctggtcctatctgctttataagctgtggctcacagggcactccaggggctcgagaggacctggcgggctgagatgaagactggtgaggcctgggaggcaggtgcttgactgaggtgggaagtgggaccttggtgccaagcattcccagggccacggggcaggcctgtagggtctggtgggtatctggggtcccggagaagcccttggcacggggcttcatgagagcataggcgagtgccgcgccctgcagttgagcacgggggatgcagctgtcgcagtcgcttttgaagagtgaggggtgaggcctgcagttgctgcccgacgttgtttacaagtgagcaagttttacaaaaaacatggacagcatcagggctgacttgaattttttacttgaggcagcagctcaacctgttggtttcctcaattgtgaatta

SEQ ID NO: 336313 - DNA, 168 bp, Homo sapiens
tgtcactttgcctagaaattcattcttctataatctcgttttaaagtaggatatgtaaaataggacatggagctgtttatgaaagaggaggactgaaggtgaagaatctgaacctgacttctcactcatggctgtacattacaagttttctatcaacacagaactatc

SEQ ID NO: 336314 - DNA, 450 bp, Homo sapiens
tgggagaagggagagctggaaagctgttgtcttctcttcttcccattcagcagaccatagaatacttcagggtctctgccacatagagatgccaaaaagcttggatgatggctcaaccattcagtttttattaaggacacaactttgccaagagctctaagcttcatcaatttctttgacatctaggttcctaccatgttcttacctactccactacttgacctgctgattcatttatttgtgccaggcactttacataccttacttctaatcttcccacctcacctgtatttctccgcagcgtttagcacaaatatgatgaattgaccattgatgtgattatttgtttttatttgtgaactctgcgagttcaggagccatgtcagtcaccattgtacccctgtgcctggtggttaacaaatattgatcaacaaactggaggatataatt

SEQ ID NO: 336315 - DNA, 365 bp, Homo sapiens
tcaatttgttcctctcatcagaaatgctctttcccctctgagtcatcagtgcaaatcctacagtcctccaggctcaggtgaaatgccacctcccatgcccagttgccctgactctccattcttctaggaactcctccagcagcccggcatctgattctatcgaatcctgcactgcttacctcatttcatacgtacacttttgaggataaggctcatagcttacagatctttttcaaatccagtcagatttaggacagtgccttgggcagtcatttgctgattgattctaaagtcaactctctccaacagtaggtgtctatgccactatcaggcagtatttctcaaagcgtggccaataaccacct

SEQ ID NO: 336316 - DNA, 143 bp, Homo sapiens
cactaaagatctttacctgaagaaaaaaaggaaaaaagaatgaccacttaatatgatatacagcattttctaaaataacaagaacaccaaaaaccccatttaattcttcttcttcttcttttttttttttttttttttttttg

SEQ ID NO: 336317 - DNA, 157 bp, Homo sapiens
gtctccaaaatttatgcatctagatgtgaccttcctccaggctgcaagcaattgcaactgcatactggcctctcttcctgaatgaacatgctgtaagccactcaacctcaaaatctacaagggtgagttcacccgcttcaccacttcccctcctgtt

SEQ ID NO: 336318 - DNA, 583 bp, Homo sapiens
atgagacgctcatcttgatttattcatcctcaggcaaacttgatctggagcatacaataaatattgtgatacctacgtgaattaaaacaatcacttacttattagcgcttggcaccagaaatacagtcaggattaatgtcttgggattcctgcctctccttctaatcttatctattttacaagtaagctctttgccttctgagttcattgtaggaattgcagttttacatcaattacatttccattagcattgtagatatcccttttcatataacattatcaggctgcagatacacaaaatgtcaatattttccctcacttcattatgctaatcacactctgagctccagtgccgggtccgtccaggagtcagatgtttgcgctgatgcaacatttacaagcagctgatcttcccaggcagccgcctccctcatttgcagatgcagacgagggctaatgggccagagtaaagcatgtgtctgctgtggtgaccttctaaccatgccggcaccccgagatctgtcacgcagctgcaggggccacgccgctccccgcagtctccttcaccggctccttctccaca

SEQ ID NO: 336319 - DNA, 557 bp, Homo sapiens
acagagttttgctcttattgcccaggctggagtgcaatggcacgatctcagctcactgcaacgtctgcctcccaggttcaagcgattctcctgcctcagcctcccgagtagctgggattacagggcctactgcagtgcatgaaggtggtatggactcagaactctgaagtctgaggagacaaatacatgcccaccataacaacatcacacaatacctagagtcaaaacagttatccctattcctacccccaactgagttattcaataaagcctgccttgttgaatctgttttcccatgtatagtttatatagttacataacaattagttttttccatatacttaggataactacatgtaatttagtattctgctgttttcacttacatatcacatacattttcctgatacaggtacatagtctttatatttgtcatttttcacttgactgctatgtttctcaaattgatatactgtcatttcctaagccagttatatattgttgaacatttaaattactcccttttttggtttgtaaataaacattgttatgaaata

SEQ ID NO: 336320 - DNA, 552 bp, Homo sapiens
cccaacacttttgggaggcaaagcgcgtggatcacaaggtcaagagatcgagaccatcctggccaacatggtgaaaccctgtctctactaaaaatacaaaaattagctgggattacagggcctactgcagtgcatgaaggtggtatggactcagaactctgaagtctgaggagacaaatacatgcccaccataacaacatcacacaatacctagagtcaaaacagttatccctattcctacccccaactgagttattcaataaagcctgccttgttgaatctgttttcccatgtatagtttatatagttacataacaattagttttttccatatacttaggataactacatgtaatttagtattctgctgttttcacttacatatcacatacattttcctgatacaggtacatagtctttatatttgtcatttttcacttgactgctatgtttctcaaattgatatactgtcatttcctaagccagttatatattgttgaacatttaaattactcccttttttggtttgtaaataaacattgttatgaaata

SEQ ID NO: 336321 - DNA, 334 bp, Homo sapiens
aaatgaaagaaaaagcacattgcaaccaaagaggcaaacaatgaaaaatagaaaacatgaggaaagaattaatgatgagaaaaataaccataatggaaaactgttccctacttcctattgactttcttatgtgttggttttgaaatatcagtagccattctattttgcctgtataggtacatgtttgtttcgtgcaaccatacaactttcattttagtaatttctaatgtcctctctctcctttagcctttccatgatacagattgcacctacttagaaccatttcaatatatgtagctatacattaaatatctaaaacttttttccaaaacca

SEQ ID NO: 336322 - DNA, 417 bp, Homo sapiens
catgaaaacattgtgaggaagagaaataaatcttgccataaatgtgccttgtgtatcatttggaataatagatgcagtgacacctcacaaggggttttacaaccagtgattaatatctactccaatatatttctgctttataatacacttgggcattcttgtttgggaaaattgcctactcaccatgtaggaaaagaacattttcttcccgattgcaatgtaattgctaaaaatcaatctcagaatcaagagataaaacctccaaaattctttaactgctcctgctgtttctgggctatgtggcaggtacatatttctattcatatggtatgactgagtgaaggctgtaagtcctgaacatccaaaggtaaaatgtaaatatagaatcaagcaaaaaattttgcagtaagcagagaa

SEQ ID NO: 336323 - DNA, 301 bp, Homo sapiens
atggtgtttgtttctcgtttttggctactgtgagtaaagctgctttgaacattcttggacaggtctcttaatggatatatgcactgatttctcttggaaatatacctaggagtgggattgctgggtttgccaactatttctccaaactggccgtactggtttatagtctctccagcagtgtgggacagttagtccacgttctaaccaacacttggcattgtcctcttgattttaagcctcctggtgggtatcaattgatgttttactttgcatttctaagtaagaactttcctgactaaat

SEQ ID NO: 336324 - DNA, 6942 bp, Homo sapiens
actcactatagggctcgagcggccgcccgggcaggtcagaattttgatttggctgctgggctgctaccttgaaatccaagccctaaaaatgccagcttctttggacttagaagatgacctggataaatgataaaaattaagaaagagattttgaagttttcttattgtcctcttggcatatgcttctggaataatattcaccatggttttggatgaccttccaaacttagaagacatctatacttccttgtgttcatcaacaatggaagactcagagatggattttgactctggactagaagatgatgacacaaaaagtgatagtattttggaggattccacaatttttgtggccttcaaaggaaatatagatgataaagacttcaaatggaaattagatgcaatattgaaaaacgtgcccaatttgttacacatggagtccagcaagctaaaagtacagaaggtggagccctggaacagcgtgcgtgtgacattcaacatcccccgggaagcagcggagcggctacggatccttgctcagagcaacaaccagcagcttcgggatttagggattctctccgttcagattgaaggggaaggtgctattaacctggctttggctcagaaccgaagccaagatgtgagaatgaatggacccatgggagctggaaattcagttaggatggaggcgggatttcctatggcaagtggtccaggaataataaggatgaacaaccctgccactgttatgatacccccgggtggaaatgtgtcatcttccatgatggcaccaggccccaatccagagctgcagcccaggactcctcgccctgcttctcagtcagatgcaatggatccactcctctctgggctccatatacagcagcaaagtcatccctcaggatctttagctcccccacatcacccaatgcagcctgtctctgtgaacagacaaatgaacccagctaattttccccagctgcagcagcagcagcaacaacaacaacagcagcagcagcagcagcagcagcaacaacagcaacagcagcaacaacagttgcaggcaagacccccacagcaacatcagcagcaacagccacagggaattcgaccccagtttactgccccaactcaggtgcctgttcctccaggctggaaccagctgccttctggagcccttcaacctcctccagcccagggttctctgggcacaatgactgcaaaccaagggtggaagaaggctcccttgcccggcccaatgcaacagcaactccaggcaagaccatccttagccacggtacagacgccttcccaccctccccctccatatccctttggcagccagcaagcctcacaagcccacacaaactttcctcagatgagcaacccaggccagttcacagctcctcagatgaagagtttgcagggagggccctctagggtcccaactcccttgcagcagccccacctcaccaacaagtctcctgcctcctcaccctcctccttccagcagggatcccctgcatcctccccaacggttaaccaaactcagcagcagatgggaccaaggccacctcaaaataacccacttccccagggatttcagcagcctgtcagctctccgggtcggaatcctatggttcaacagggaaatgtgccacctaacttcatggtgatgcagcagcaaccaccaaaccaggggccacagagtttacatccaggcctaggaggaatgcctaaacgcctcccacctggcttctcagcaggacaggccaatccgaactttatgcaaggtcaggtgccttcgaccacagcaaccacccctgggaattcaggagcccctcagctgcaagcaaatcaaaatgtccagcatgcaggtggtcaaggagctggtcctcctcaaaaccagatgcaggtgtcccacgggccgccaaatatgatgcagcccagcctcatgggaattcatggcaacatgaacaatcagcaggctggtacttctggggttcctcaagtgaacctcagcaacatgcaaggccagccccagcagggcccaccatctcagctgatgggcatgcaccagcaaatcgtgccctcccagggccagatggtccagcaacaaggaaccttgaaccctcagaaccctatgatcctttcaagggcccagcttatgccacagggccagatgatggtgaaccccccgagccaaaatcttgggccctcgccccaaaggatgaccccacccaagcagatgctttcccagcagggcccacaaatgatggcgccacataaccagatgatggggcctcaggggcaggttttgctccaacagaacccaatgatagagcagattatgaccaatcaaatgcaggggaataagcagcagtttaacactcagaaccagtccaatgtcatgccgggaccagcccagataatgaggggaccaactccgaacatgcaaggaaatatggtgcagtttacgggacagatgtcaggacagatgctgccccagcaagggcctgtgaacaacagtccatctcaggttatgggcattcagggacaggtcctgcggccaccagggcccagcccacacatggcccagcagcatggtgatcctgctactacagcaaataacgatgtcagtttatctcagatgatgcctgatgttagcattcaacaaaccaacatggtcccccctcatgtgcaggccatgcagggaaacagtgcctcgggaaaccacttctcaggccatgggatgtctttcaatgcacctttcagtggagctcccaatggaaatcagatgtcctgtggtcaaaatccaggcttcccagtcaataaggatgtcacgctaacgagcccattgttggtcaacttattgcagagtgacatatctgcaggccattttggggtaaacaataagcaaaataataccaacgcaaataaaccgaagaagaagaaaccccctcggaagaagaaaaatagtcagcaagatctaaacaccccagatactcgcccagctggtctggaagaggctgatcagccaccgttgcctggagaacaaggaattaacttggataactcaggccctaaactgccagaattttcaaaccggccaccaggttatccttctcaaccagttgaacagaggccacttcagcagatgcctcctcaactcatgcagcatgtggcacccccaccacagccaccacagcagcagccacagccacaactgcctcagcagcagcagccaccacctcccagtcagccacagtctcagcagcagcagcagcagcagcaacaaatgatgatgatgctcatgatgcagcaggatcccaaatcagttaggcttccagtctctcaaaatgtccatcctccaaggggccccctgaaccccgactcccagagaatgcccatgcaacagagtggcagtgtgcctgtcatggtcagtctgcaaggacctgcctccgtgccaccatcacctgataaacaaagaatgccaatgcctgtgaatactcccttgggaagcaattcaaggaaaatggtctatcaggagagcccgcagaatccttccagctcgccactggcggagatggcctcactccctgaagcaagtggcagtgaagcaccatctgtcccaggaggcccaaacaacatgccttcacatgtagtacttccccagaatcagttaatgatgacagggccaaaacctggaccatcgcccctttcagcaactcaaggtgcaactccccagcaaccccctgtaaattccctgcccagctctcacggccaccacttcccaaatgtggctgcgccaacccagacatctaggcccaaaacaccaaacagagccagccccagaccctattatcctcagacacccaacaaccgccctcccagcacagaaccttcagaaatcagtctgtcaccagaaagactcaatgcctccatagcaggactcttccctccacagattaatattcctttacctcctaggccaaatttaaacaggggctttgatcaacaaggcctaaatccaacaactttgaaggccatcgggcaagcaccttcaaatcttaccatgaatccttccaattttgctaccccacaaactcacaaattagattctgtggtagtgaattctggaaagcagtctaattctggagcaacaaaacgggcaagtccaagcaacagtcgcaggtctagtcctgggtccagtaggaaaaccactccaagccctgggaggcaaaattcaaaagcccctaaacttactctggcctctcagacaaatgcagccctattgcagaatgtggagttgccgagaaatgtattggtcagtcccactcctctggccaatccccctgtacctgggagctttcctaacaacagtgggctgaatcctcagaattctactgtgtctgtggctgcagttgggggtgttgttgaggataacaaggagagcttgaatgtgcctcaggacagtgattgccagaattcccagagtaggaaggaacaggtaaacattgaactaaaagcagtccctgcccaagaagttaaaatggttgtccctgaagatcagtccaaaaaggatgggcagccttcggatcctaacaaacttcccagtgtcgaagagaacaaaaatttggtgtctcctgctatgagggaagcaccaacatcgttaagtcaacttcttgacaactctggagctcccaatgtgacaattaaaccccctgggcttacagatctggaagtaacacctccagtagtttctggggaggacctcaaaaaagcatctgtcattcccacactgcaggatctgtcttcttctaaagaaccttctaattccctaaacttacctcacagtaatgagctgtgttcatcccttgtgcatcccgaattgagtgaggtcagttctaacgttgcaccaagcatccctccagtaatgtcaagacctgttagctcttcctccatttccactcccttgcccccaaatcaaataactgtatttgtcacttccaatcccatcacaacttcagctaacacatcagcagctttgccaactcacttgcagtctgcattgatgtcaacagttgtcacaatgcccaatgcgggtagcaaggttatggtttctgagggacagtcagctgctcagtctaatgcccggcctcagttcattacacctgtctttatcaattcatcctcaataattcaggttatgaaaggatcacagccaagcacaattcctgcagccccactgacaaccaactctggcctgatgcctccctctgttgcagttgttggccctttacacatacctcagaacataaaattttcttctgctcctgtaccgcctaatgccctctccagtagtcctgctccaaacatccagacaggtcgacctttggtccttagctcacgagccacccctgttcagcttccttcccctccttgtacgtcttctccagttgtcccttctcatccccctgtgcagcaagtgaaagaattgaatccagatgaggctagccctcaggtgaacacctcagcagatcagaacactcttccctcttcacagtcaaccacaatggtttctccccttttgaccaatagtccagggtcctctggcaaccggcgaagcccagtctcgtctagtaagggcaaaggaaaagtggacaaaattggccaaattttgttgaccaaggcatgtaagaaagttacaggctctcttgagaaaggggaagaacaatatggtgcagatggagagactgaaggccaagggctagacaccacagctccggggctcatgggaacagagcagttatccacagagctggacagtaaaaccccaacgcccccagcacccactctgctaaaaatgacctctagccctgtgggcccgggcactgcctcagcaggacccagcttacctggcggtgctctccccaccagtgtacgctcgatagtaaccactctggtaccctccgagctcatctccgccgtaccgaccacaaaaagcaatcatggtggcatagcatctgagtcacttgcgggtggcctagtggaggagaaggtgggatcccatccagaacttctacccagcatagccccgtcgcagaatttagtctcaaaggaaacttcaaccacagcactgcaggcctctgttgccagaccagagctggaggtaaatgctgccatagtctctggacaaagcagtgagcccaaagagatagttgaaaagtccaaaatcccaggccgaagaaactcccgaactgaagagccaactgtggcctctgaaagtgtggaaaatggacatcgtaaacgatcttctcgacctgcttcagcctccagctctactaaagacataaccagtgcggtgcaatccaagcgaagaaaatccaagtaaacaagcaggactgcgacttgatacttggaaatgtgtgtgacttttacaaagagcaattttgagctgtgacttttttaaatcaatttctgtacagttagtaattttaataatgtggcccttttcctagtccctgcaacctgtttcataaagtgcaatggggaaagcaggactgttgagcccttttggtgttgcgagttgaagttcaaggtttctaaaatgttgtcttgtattgaaaggagctaatgccattataaatgttactagttttcacatttcctaagcagcctagagtacagggtgagcatttttagatctcctaatgatgtattgtgccgtggaagtactgtgtgtgaatagcagtagtgggggcaaaagcaatcttctcatttggaaatgttgtaaataattttattatatagtgttttggatgtatttgttgtagaaatggaccagtgaataaagagaatctaaggatttgtacaatgtgaaataacgtgttaaataaatgtcattgtcatagaacataaagttatgttattggtaaggga

SEQ ID NO: 336325 - DNA, 7026 bp, Homo sapiens
agaccaagtcttgctctgtcacccaggctggagtacagtggtgccgtattggctcactgcaacctctgcctctgagttcatgtgattctcctgcctcagtctcccgagcagctgggattacagaattttgatttggctgctgggctgctaccttgaaatccaagccctaaaaatgccagcttctttggacttagaagatgacctggataaatgataaaaattaagaaagagattttgaagttttcttattgtcctcttggcatatgcttctggaataatattcaccatggttttggatgaccttccaaacttagaagacatctatacttccttgtgttcatcaacaatggaagactcagagatggattttgactctggactagaagatgatgacacaaaaagtgatagtattttggaggattccacaatttttgtggccttcaaaggaaatatagatgataaagacttcaaatggaaattagatgcaatattgaaaaacgtgcccaatttgttacacatggagtccagcaagctaaaagtacagaaggtggagccctggaacagcgtgcgtgtgacattcaacatcccccgggaagcagcggagcggctacggatccttgctcagagcaacaaccagcagcttcgggatttagggattctctccgttcagattgaaggggaaggtgctattaacctggctttggctcagaaccgaagccaagatgtgagaatgaatggacccatgggagctggaaattcagttaggatggaggcgggatttcctatggcaagtggtccaggaataataaggatgaacaaccctgccactgttatgatacccccgggtggaaatgtgtcatcttccatgatggcaccaggccccaatccagagctgcagcccaggactcctcgccctgcttctcagtcagatgcaatggatccactcctctctgggctccatatacagcagcaaagtcatccctcaggatctttagctcccccacatcacccaatgcagcctgtctctgtgaacagacaaatgaacccagctaattttccccagctgcagcagcagcagcaacaacaacaacagcagcagcagcagcagcagcagcaacaacagcaacagcagcaacaacagttgcaggcaagacccccacagcaacatcagcagcaacagccacagggaattcgaccccagtttactgccccaactcaggtgcctgttcctccaggctggaaccagctgccttctggagcccttcaacctcctccagcccagggttctctgggcacaatgactgcaaaccaagggtggaagaaggctcccttgcccggcccaatgcaacagcaactccaggcaagaccatccttagccacggtacagacgccttcccaccctccccctccatatccctttggcagccagcaagcctcacaagcccacacaaactttcctcagatgagcaacccaggccagttcacagctcctcagatgaagagtttgcagggagggccctctagggtcccaactcccttgcagcagccccacctcaccaacaagtctcctgcctcctcaccctcctccttccagcagggatcccctgcatcctccccaacggttaaccaaactcagcagcagatgggaccaaggccacctcaaaataacccacttccccagggatttcagcagcctgtcagctctccgggtcggaatcctatggttcaacagggaaatgtgccacctaacttcatggtgatgcagcagcaaccaccaaaccaggggccacagagtttacatccaggcctaggaggaatgcctaaacgcctcccacctggcttctcagcaggacaggccaatccgaactttatgcaaggtcaggtgccttcgaccacagcaaccacccctgggaattcaggagcccctcagctgcaagcaaatcaaaatgtccagcatgcaggtggtcaaggagctggtcctcctcaaaaccagatgcaggtgtcccacgggccgccaaatatgatgcagcccagcctcatgggaattcatggcaacatgaacaatcagcaggctggtacttctggggttcctcaagtgaacctcagcaacatgcaaggccagccccagcagggcccaccatctcagctgatgggcatgcaccagcaaatcgtgccctcccagggccagatggtccagcaacaaggaaccttgaaccctcagaaccctatgatcctttcaagggcccagcttatgccacagggccagatgatggtgaaccccccgagccaaaatcttgggccctcgccccaaaggatgaccccacccaagcagatgctttcccagcagggcccacaaatgatggcgccacataaccagatgatggggcctcaggggcaggttttgctccaacagaacccaatgatagagcagattatgaccaatcaaatgcaggggaataagcagcagtttaacactcagaaccagtccaatgtcatgccgggaccagcccagataatgaggggaccaactccgaacatgcaaggaaatatggtgcagtttacgggacagatgtcaggacagatgctgccccagcaagggcctgtgaacaacagtccatctcaggttatgggcattcagggacaggtcctgcggccaccagggcccagcccacacatggcccagcagcatggtgatcctgctactacagcaaataacgatgtcagtttatctcagatgatgcctgatgttagcattcaacaaaccaacatggtcccccctcatgtgcaggccatgcagggaaacagtgcctcgggaaaccacttctcaggccatgggatgtctttcaatgcacctttcagtggagctcccaatggaaatcagatgtcctgtggtcaaaatccaggcttcccagtcaataaggatgtcacgctaacgagcccattgttggtcaacttattgcagagtgacatatctgcaggccattttggggtaaacaataagcaaaataataccaacgcaaataaaccgaagaagaagaaaccccctcggaagaagaaaaatagtcagcaagatctaaacaccccagatactcgcccagctggtctggaagaggctgatcagccaccgttgcctggagaacaaggaattaacttggataactcaggccctaaactgccagaattttcaaaccggccaccaggttatccttctcaaccagttgaacagaggccacttcagcagatgcctcctcaactcatgcagcatgtggcacccccaccacagccaccacagcagcagccacagccacaactgcctcagcagcagcagccaccacctcccagtcagccacagtctcagcagcagcagcagcagcagcaacaaatgatgatgatgctcatgatgcagcaggatcccaaatcagttaggcttccagtctctcaaaatgtccatcctccaaggggccccctgaaccccgactcccagagaatgcccatgcaacagagtggcagtgtgcctgtcatggtcagtctgcaaggacctgcctccgtgccaccatcacctgataaacaaagaatgccaatgcctgtgaatactcccttgggaagcaattcaaggaaaatggtctatcaggagagcccgcagaatccttccagctcgccactggcggagatggcctcactccctgaagcaagtggcagtgaagcaccatctgtcccaggaggcccaaacaacatgccttcacatgtagtacttccccagaatcagttaatgatgacagggccaaaacctggaccatcgcccctttcagcaactcaaggtgcaactccccagcaaccccctgtaaattccctgcccagctctcacggccaccacttcccaaatgtggctgcgccaacccagacatctaggcccaaaacaccaaacagagccagccccagaccctattatcctcagacacccaacaaccgccctcccagcacagaaccttcagaaatcagtctgtcaccagaaagactcaatgcctccatagcaggactcttccctccacagattaatattcctttacctcctaggccaaatttaaacaggggctttgatcaacaaggcctaaatccaacaactttgaaggccatcgggcaagcaccttcaaatcttaccatgaatccttccaattttgctaccccacaaactcacaaattagattctgtggtagtgaattctggaaagcagtctaattctggagcaacaaaacgggcaagtccaagcaacagtcgcaggtctagtcctgggtccagtaggaaaaccactccaagccctgggaggcaaaattcaaaagcccctaaacttactctggcctctcagacaaatgcagccctattgcagaatgtggagttgccgagaaatgtattggtcagtcccactcctctggccaatccccctgtacctgggagctttcctaacaacagtgggctgaatcctcagaattctactgtgtctgtggctgcagttgggggtgttgttgaggataacaaggagagcttgaatgtgcctcaggacagtgattgccagaattcccagagtaggaaggaacaggtaaacattgaactaaaagcagtccctgcccaagaagttaaaatggttgtccctgaagatcagtccaaaaaggatgggcagccttcggatcctaacaaacttcccagtgtcgaagagaacaaaaatttggtgtctcctgctatgagggaagcaccaacatcgttaagtcaacttcttgacaactctggagctcccaatgtgacaattaaaccccctgggcttacagatctggaagtaacacctccagtagtttctggggaggacctcaaaaaagcatctgtcattcccacactgcaggatctgtcttcttctaaagaaccttctaattccctaaacttacctcacagtaatgagctgtgttcatcccttgtgcatcccgaattgagtgaggtcagttctaacgttgcaccaagcatccctccagtaatgtcaagacctgttagctcttcctccatttccactcccttgcccccaaatcaaataactgtatttgtcacttccaatcccatcacaacttcagctaacacatcagcagctttgccaactcacttgcagtctgcattgatgtcaacagttgtcacaatgcccaatgcgggtagcaaggttatggtttctgagggacagtcagctgctcagtctaatgcccggcctcagttcattacacctgtctttatcaattcatcctcaataattcaggttatgaaaggatcacagccaagcacaattcctgcagccccactgacaaccaactctggcctgatgcctccctctgttgcagttgttggccctttacacatacctcagaacataaaattttcttctgctcctgtaccgcctaatgccctctccagtagtcctgctccaaacatccagacaggtcgacctttggtccttagctcacgagccacccctgttcagcttccttcccctccttgtacgtcttctccagttgtcccttctcatccccctgtgcagcaagtgaaagaattgaatccagatgaggctagccctcaggtgaacacctcagcagatcagaacactcttccctcttcacagtcaaccacaatggtttctccccttttgaccaatagtccagggtcctctggcaaccggcgaagcccagtctcgtctagtaagggcaaaggaaaagtggacaaaattggccaaattttgttgaccaaggcatgtaagaaagttacaggctctcttgagaaaggggaagaacaatatggtgcagatggagagactgaaggccaagggctagacaccacagctccggggctcatgggaacagagcagttatccacagagctggacagtaaaaccccaacgcccccagcacccactctgctaaaaatgacctctagccctgtgggcccgggcactgcctcagcaggacccagcttacctggcggtgctctccccaccagtgtacgctcgatagtaaccactctggtaccctccgagctcatctccgccgtaccgaccacaaaaagcaatcatggtggcatagcatctgagtcacttgcgggtggcctagtggaggagaaggtgggatcccatccagaacttctacccagcatagccccgtcgcagaatttagtctcaaaggaaacttcaaccacagcactgcaggcctctgttgccagaccagagctggaggtaaatgctgccatagtctctggacaaagcagtgagcccaaagagatagttgaaaagtccaaaatcccaggccgaagaaactcccgaactgaagagccaactgtggcctctgaaagtgtggaaaatggacatcgtaaacgatcttctcgacctgcttcagcctccagctctactaaagacataaccagtgcggtgcaatccaagcgaagaaaatccaagtaaacaagcaggactgcgacttgatacttggaaatgtgtgtgacttttacaaagagcaattttgagctgtgacttttttaaatcaatttctgtacagttagtaattttaataatgtggcccttttcctagtccctgcaacctgtttcataaagtgcaatggggaaagcaggactgttgagcccttttggtgttgcgagttgaagttcaaggtttctaaaatgttgtcttgtattgaaaggagctaatgccattataaatgttactagttttcacatttcctaagcagcctagagtacagggtgagcatttttagatctcctaatgatgtattgtgccgtggaagtactgtgtgtgaatagcagtagtgggggcaaaagcaatcttctcatttggaaatgttgtaaataattttattatatagtgttttggatgtatttgttgtagaaatggaccagtgaataaagagaatctaaggatttgtacaatgtgaaataacgtgttaaataaatgtcattgtcatagaacataaagttatgttattggtaaggga

SEQ ID NO: 336326 - DNA, 5900 bp, Homo sapiens
ctgagtttgtaccactatatgaacgttcttctactgttagggtgatgcaaccataggacgagatacaagcaagacaagacttgaagggtttggaagagacagtgctccgaaaaacatgaaaatacacaggattgggaaatattatgtgggttctctctaccatgattatactaaatataaagtctgagctccaaaaatatcgctgttcttaatccaatgcaacagcaactccaggcaagaccatccttagccacggtacagacgccttcccaccctccccctccatatccctttggcagccagcaagcctcacaagcccacacaaactttcctcagatgagcaacccaggccagttcacagctcctcagatgaagagtttgcagggagggccctctagggtcccaactcccttgcagcagccccacctcaccaacaagtctcctgcctcctcaccctcctccttccagcagggatcccctgcatcctccccaacggttaaccaaactcagcagcagatgggaccaaggccacctcaaaataacccacttccccagggatttcagcagcctgtcagctctccgggtcggaatcctatggttcaacagggaaatgtgccacctaacttcatggtgatgcagcagcaaccaccaaaccaggggccacagagtttacatccaggcctaggaggaatgcctaaacgcctcccacctggcttctcagcaggacaggccaatccgaactttatgcaaggtcaggtgccttcgaccacagcaaccacccctgggaattcaggagcccctcagctgcaagcaaatcaaaatgtccagcatgcaggtggtcaaggagctggtcctcctcaaaaccagatgcaggtgtcccacgggccgccaaatatgatgcagcccagcctcatgggaattcatggcaacatgaacaatcagcaggctggtacttctggggttcctcaagtgaacctcagcaacatgcaaggccagccccagcagggcccaccatctcagctgatgggcatgcaccagcaaatcgtgccctcccagggccagatggtccagcaacaaggaaccttgaaccctcagaaccctatgatcctttcaagggcccagcttatgccacagggccagatgatggtgaaccccccgagccaaaatcttgggccctcgccccaaaggatgaccccacccaagcagatgctttcccagcagggcccacaaatgatggcgccacataaccagatgatggggcctcaggggcaggttttgctccaacagaacccaatgatagagcagattatgaccaatcaaatgcaggggaataagcagcagtttaacactcagaaccagtccaatgtcatgccgggaccagcccagataatgaggggaccaactccgaacatgcaaggaaatatggtgcagtttacgggacagatgtcaggacagatgctgccccagcaagggcctgtgaacaacagtccatctcaggttatgggcattcagggacaggtcctgcggccaccagggcccagcccacacatggcccagcagcatggtgatcctgctactacagcaaataacgatgtcagtttatctcagatgatgcctgatgttagcattcaacaaaccaacatggtcccccctcatgtgcaggccatgcagggaaacagtgcctcgggaaaccacttctcaggccatgggatgtctttcaatgcacctttcagtggagctcccaatggaaatcagatgtcctgtggtcaaaatccaggcttcccagtcaataaggatgtcacgctaacgagcccattgttggtcaacttattgcagagtgacatatctgcaggccattttggggtaaacaataagcaaaataataccaacgcaaataaaccgaagaagaagaaaccccctcggaagaagaaaaatagtcagcaagatctaaacaccccagatactcgcccagctggtctggaagaggctgatcagccaccgttgcctggagaacaaggaattaacttggataactcaggccctaaactgccagaattttcaaaccggccaccaggttatccttctcaaccagttgaacagaggccacttcagcagatgcctcctcaactcatgcagcatgtggcacccccaccacagccaccacagcagcagccacagccacaactgcctcagcagcagcagccaccacctcccagtcagccacagtctcagcagcagcagcagcagcagcaacaaatgatgatgatgctcatgatgcagcaggatcccaaatcagttaggcttccagtctctcaaaatgtccatcctccaaggggccccctgaaccccgactcccagagaatgcccatgcaacagagtggcagtgtgcctgtcatggtcagtctgcaaggacctgcctccgtgccaccatcacctgataaacaaagaatgccaatgcctgtgaatactcccttgggaagcaattcaaggaaaatggtctatcaggagagcccgcagaatccttccagctcgccactggcggagatggcctcactccctgaagcaagtggcagtgaagcaccatctgtcccaggaggcccaaacaacatgccttcacatgtagtacttccccagaatcagttaatgatgacagggccaaaacctggaccatcgcccctttcagcaactcaaggtgcaactccccagcaaccccctgtaaattccctgcccagctctcacggccaccacttcccaaatgtggctgcgccaacccagacatctaggcccaaaacaccaaacagagccagccccagaccctattatcctcagacacccaacaaccgccctcccagcacagaaccttcagaaatcagtctgtcaccagaaagactcaatgcctccatagcaggactcttccctccacagattaatattcctttacctcctaggccaaatttaaacaggggctttgatcaacaaggcctaaatccaacaactttgaaggccatcgggcaagcaccttcaaatcttaccatgaatccttccaattttgctaccccacaaactcacaaattagattctgtggtagtgaattctggaaagcagtctaattctggagcaacaaaacgggcaagtccaagcaacagtcgcaggtctagtcctgggtccagtaggaaaaccactccaagccctgggaggcaaaattcaaaagcccctaaacttactctggcctctcagacaaatgcagccctattgcagaatgtggagttgccgagaaatgtattggtcagtcccactcctctggccaatccccctgtacctgggagctttcctaacaacagtgggctgaatcctcagaattctactgtgtctgtggctgcagttgggggtgttgttgaggataacaaggagagcttgaatgtgcctcaggacagtgattgccagaattcccagagtaggaaggaacaggtaaacattgaactaaaagcagtccctgcccaagaagttaaaatggttgtccctgaagatcagtccaaaaaggatgggcagccttcggatcctaacaaacttcccagtgtcgaagagaacaaaaatttggtgtctcctgctatgagggaagcaccaacatcgttaagtcaacttcttgacaactctggagctcccaatgtgacaattaaaccccctgggcttacagatctggaagtaacacctccagtagtttctggggaggacctcaaaaaagcatctgtcattcccacactgcaggatctgtcttcttctaaagaaccttctaattccctaaacttacctcacagtaatgagctgtgttcatcccttgtgcatcccgaattgagtgaggtcagttctaacgttgcaccaagcatccctccagtaatgtcaagacctgttagctcttcctccatttccactcccttgcccccaaatcaaataactgtatttgtcacttccaatcccatcacaacttcagctaacacatcagcagctttgccaactcacttgcagtctgcattgatgtcaacagttgtcacaatgcccaatgcgggtagcaaggttatggtttctgagggacagtcagctgctcagtctaatgcccggcctcagttcattacacctgtctttatcaattcatcctcaataattcaggttatgaaaggatcacagccaagcacaattcctgcagccccactgacaaccaactctggcctgatgcctccctctgttgcagttgttggccctttacacatacctcagaacataaaattttcttctgctcctgtaccgcctaatgccctctccagtagtcctgctccaaacatccagacaggtcgacctttggtccttagctcacgagccacccctgttcagcttccttcccctccttgtacgtcttctccagttgtcccttctcatccccctgtgcagcaagtgaaagaattgaatccagatgaggctagccctcaggtgaacacctcagcagatcagaacactcttccctcttcacagtcaaccacaatggtttctccccttttgaccaatagtccagggtcctctggcaaccggcgaagcccagtctcgtctagtaagggcaaaggaaaagtggacaaaattggccaaattttgttgaccaaggcatgtaagaaagttacaggctctcttgagaaaggggaagaacaatatggtgcagatggagagactgaaggccaagggctagacaccacagctccggggctcatgggaacagagcagttatccacagagctggacagtaaaaccccaacgcccccagcacccactctgctaaaaatgacctctagccctgtgggcccgggcactgcctcagcaggacccagcttacctggcggtgctctccccaccagtgtacgctcgatagtaaccactctggtaccctccgagctcatctccgccgtaccgaccacaaaaagcaatcatggtggcatagcatctgagtcacttgcgggtggcctagtggaggagaaggtgggatcccatccagaacttctacccagcatagccccgtcgcagaatttagtctcaaaggaaacttcaaccacagcactgcaggcctctgttgccagaccagagctggaggtaaatgctgccatagtctctggacaaagcagtgagcccaaagagatagttgaaaagtccaaaatcccaggccgaagaaactcccgaactgaagagccaactgtggcctctgaaagtgtggaaaatggacatcgtaaacgatcttctcgacctgcttcagcctccagctctactaaagacataaccagtgcggtgcaatccaagcgaagaaaatccaagtaaacaagcaggactgcgacttgatacttggaaatgtgtgtgacttttacaaagagcaattttgagctgtgacttttttaaatcaatttctgtacagttagtaattttaataatgtggcccttttcctagtccctgcaacctgtttcataaagtgcaatggggaaagcaggactgttgagcccttttggtgttgcgagttgaagttcaaggtttctaaaatgttgtcttgtattgaaaggagctaatgccattataaatgttactagttttcacatttcctaagcagcctagagtacagggtgagcatttttagatctcctaatgatgtattgtgccgtggaagtactgtgtgtgaatagcagtagtgggggcaaaagcaatcttctcatttggaaatgttgtaaataattttattatatagtgttttggatgtatttgttgtagaaatggaccagtgaataaagagaatctaaggatttgtacaatgtgaaataacgtgttaaataaatgtcattgtcatagaacataaagttatgttattggtaaggga

SEQ ID NO: 336327 - DNA, 2224 bp, Homo sapiens
  misc_feature (13)..(13): n is a, c, g, or t
aattcctgcagcnccactgacaaccaactctggcctgatgcctccctctgttgcagttgttggccctttacacatacctcagaacataagatctgtcttcttctaaagaaccttctaattccctaaacttacctcacagtaatgagctgtgttcatcccttgtgcatcccgaattgagtgaggtcagttctaacgttgcaccaagcatccctccagtaatgtcaagacctgttagctcttcctccatttccactcccttgcccccaaatcaaataactgtatttgtcacttccaatcccatcacaacttcagctaacacatcagcagctttgccaactcacttgcagtctgcattgatgtcaacagttgtcacaatgcccaatgcgggtagcaaggttatggtttctgagggacagtcagctgctcagtctaatgcccggcctcagttcattacacctgtctttatcaattcatcctcaataattcaggttatgaaaggatcacagccaagcacaattcctgcagccccactgacaaccaactctggcctgatgcctccctctgttgcagttgttggccctttacacatacctcagaacataaaattttcttctgctcctgtaccgcctaatgccctctccagtagtcctgctccaaacatccagacaggtcgacctttggtccttagctcacgagccacccctgttcagcttccttcccctccttgtacgtcttctccagttgtcccttctcatccccctgtgcagcaagtgaaagaattgaatccagatgaggctagccctcaggtgaacacctcagcagatcagaacactcttccctcttcacagtcaaccacaatggtttctccccttttgaccaatagtccagggtcctctggcaaccggcgaagcccagtctcgtctagtaagggcaaaggaaaagtggacaaaattggccaaattttgttgaccaaggcatgtaagaaagttacaggctctcttgagaaaggggaagaacaatatggtgcagatggagagactgaaggccaagggctagacaccacagctccggggctcatgggaacagagcagttatccacagagctggacagtaaaaccccaacgcccccagcacccactctgctaaaaatgacctctagccctgtgggcccgggcactgcctcagcaggacccagcttacctggcggtgctctccccaccagtgtacgctcgatagtaaccactctggtaccctccgagctcatctccgccgtaccgaccacaaaaagcaatcatggtggcatagcatctgagtcacttgcgggtggcctagtggaggagaaggtgggatcccatccagaacttctacccagcatagccccgtcgcagaatttagtctcaaaggaaacttcaaccacagcactgcaggcctctgttgccagaccagagctggaggtaaatgctgccatagtctctggacaaagcagtgagcccaaagagatagttgaaaagtccaaaatcccaggccgaagaaactcccgaactgaagagccaactgtggcctctgaaagtgtggaaaatggacatcgtaaacgatcttctcgacctgcttcagcctccagctctactaaagacataaccagtgcggtgcaatccaagcgaagaaaatccaagtaaacaagcaggactgcgacttgatacttggaaatgtgtgtgacttttacaaagagcaattttgagctgtgacttttttaaatcaatttctgtacagttagtaattttaataatgtggcccttttcctagtccctgcaacctgtttcataaagtgcaatggggaaagcaggactgttgagcccttttggtgttgcgagttgaagttcaaggtttctaaaatgttgtcttgtattgaaaggagctaatgccattataaatgttactagttttcacatttcctaagcagcctagagtacagggtgagcatttttagatctcctaatgatgtattgtgccgtggaagtactgtgtgtgaatagcagtagtgggggcaaaagcaatcttctcatttggaaatgttgtaaataattttattatatagtgttttggatgtatttgttgtagaaatggaccagtgaataaagagaatctaaggatttgtacaatgtgaaataacgtgttaaataaatgtcattgtcatagaacataaagttatgttattggtaaggga

SEQ ID NO: 336328 - DNA, 6287 bp, Homo sapiens
tggtgcctgaggatccacgtatatgtaaccaggctggagtacagtggtgccgtattggctcactgcaacctctgcctctgagttcatgtgattctcctgcctcagtctcccgagcagctgggattacagaattttgatttggctgctgggctgctaccttgaaatccaagccctaaaaatgccagcttctttggacttagaagatgacctggataaatgataaaaattaagaaagagattttgaagttttcttattgtcctcttggcatatgcttctggaataatattcaccatggttttggatgaccttccaaacttagaagacatctatacttccttgtgttcatcaacaatggaagactcagagatggattttgactctggactagaagatgatgacacaaaaagtgatagtattttggaggattccacaatttttgtggccttcaaaggaaatatagatgataaagacttcaaatggaaattagatgcaatattgaaaaacgtgcccaatttgttacacatggagtccagcaagctaaaagtacagaaggtggagccctggaacagcgtgcgtgtgacattcaacatcccccgggaagcagcggagcggctacggatccttgctcagagcaacaaccagcagcttcgggatttagggattctctccgttcagattgaaggggaaggtgctattaacctggctttggctcagaaccgaagccaagatgtgagaatgaatggacccatgggagctggaaattcagttaggatggaggcgggatttcctatggcaagtggtccaggaataataaggatgaacaaccctgccactgttatgatacccccgggtggaaatgtgtcatcttccatgatggcaccaggccccaatccagagctgcagcccaggactcctcgccctgcttctcagtcagatgcaatggatccactcctctctgggctccatatacagcagcaaagtcatccctcaggatctttagctcccccacatcacccaatgcagcctgtctctgtgaacagacaaatgaacccagctaattttccccagctgcagcagcagcagcaacaacaacaacagcagcagcagcagcagcagcagcaacaacagcaacagcagcaacaacagttgcaggcaagacccccacagcaacatcagcagcaacagccacagggaattcgaccccagtttactgccccaactcaggtgcctgttcctccaggctggaaccagctgccttctggagcccttcaacctcctccagcccagggttctctgggcacaatgactgcaaaccaagggtggaagaaggctcccttgcccggcccaatgcaacagcaactccaggcaagaccatccttagccacggtacagacgccttcccaccctccccctccatatccctttggcagccagcaagcctcacaagcccacacaaactttcctcagatgagcaacccaggccagttcacagctcctcagatgaagagtttgcagggagggccctctagggtcccaactcccttgcagcagccccacctcaccaacaagtctcctgcctcctcaccctcctccttccagcagggatcccctgcatcctccccaacggttaaccaaactcagcagcagatgggaccaaggccacctcaaaataacccacttccccagggatttcagcagcctgtcagctctccgggtcggaatcctatggttcaacagggaaatgtgccacctaacttcatggtgatgcagcagcaaccaccaaaccaggggccacagagtttacatccaggcctaggaggaatgcctaaacgcctcccacctggcttctcagcaggacaggccaatccgaactttatgcaaggtcaggtgccttcgaccacagcaaccacccctgggaattcaggagcccctcagctgcaagcaaatcaaaatgtccagcatgcaggtggtcaaggagctggtcctcctcaaaaccagatgcaggtgtcccacgggccgccaaatatgatgcagcccagcctcatgggaattcatggcaacatgaacaatcagcaggctggtacttctggggttcctcaagtgaacctcagcaacatgcaaggccagccccagcagggcccaccatctcagctgatgggcatgcaccagcaaatcgtgccctcccagggccagatggtccagcaacaaggaaccttgaaccctcagaaccctatgatcctttcaagggcccagcttatgccacagggccagatgatggtgaaccccccgagccaaaatcttgggccctcgccccaaaggatgaccccacccaagcagatgctttcccagcagggcccacaaatgatggcgccacataaccagatgatggggcctcaggggcaggttttgctccaacagaacccaatgatagagcagattatgaccaatcaaatgcaggggaataagcagcagtttaacactcagaaccagtccaatgtcatgccgggaccagcccagataatgaggggaccaactccgaacatgcaaggaaatatggtgcagtttacgggacagatgtcaggacagatgctgccccagcaagggcctgtgaacaacagtccatctcaggttatgggcattcagggacaggtcctgcggccaccagggcccagcccacacatggcccagcagcatggtgatcctgctactacagcaaataacgatgtcagtttatctcagatgatgcctgatgttagcattcaacaaaccaacatggtcccccctcatgtgcaggccatgcagggaaacagtgcctcgggaaaccacttctcaggccatgggatgtctttcaatgcacctttcagtggagctcccaatggaaatcagatgtcctgtggtcaaaatccaggcttcccagtcaataaggatgtcacgctaacgagcccattgttggtcaacttattgcagagtgacatatctgcaggccattttggggtaaacaataagcaaaataataccaacgcaaataaaccgaagaagaagaaaccccctcggaagaagaaaaatagtcagcaagatctaaacaccccagatactcgcccagctggtctggaagaggctgatcagccaccgttgcctggagaacaaggaattaacttggataactcaggccctaaactgccagaattttcaaaccggccaccaggttatccttctcaaccagttgaacagaggccacttcagcagatgcctcctcaactcatgcagcatgtggcacccccaccacagccaccacagcagcagccacagccacaactgcctcagcagcagcagccaccacctcccagtcagccacagtctcagcagcagcagcagcagcagcaacaaatgatgatgatgctcatgatgcagcaggatcccaaatcagttaggcttccagtctctcaaaatgtccatcctccaaggggccccctgaaccccgactcccagagaatgcccatgcaacagagtggcagtgtgcctgtcatggtcagtctgcaaggacctgcctccgtgccaccatcacctgataaacaaagaatgccaatgcctgtgaatactcccttgggaagcaattcaaggaaaatggtctatcaggagagcccgcagaatccttccagctcgccactggcggagatggcctcactccctgaagcaagtggcagtgaagcaccatctgtcccaggaggcccaaacaacatgccttcacatgtagtacttccccagaatcagttaatgatgacagggccaaaacctggaccatcgcccctttcagcaactcaaggtgcaactccccagcaaccccctgtaaattccctgcccagctctcacggccaccacttcccaaatgtggctgcgccaacccagacatctaggcccaaaacaccaaacagagccagccccagaccctattatcctcagacacccaacaaccgccctcccagcacagaaccttcagaaatcagtctgtcaccagaaagactcaatgcctccatagcaggactcttccctccacagattaatattcctttacctcctaggccaaatttaaacaggggctttgatcaacaaggcctaaatccaacaactttgaaggccatcgggcaagcaccttcaaatcttaccatgaatccttccaattttgctaccccacaaactcacaaattagattctgtggtagtgaattctggaaagcagtctaattctggagcaacaaaacgggcaagtccaagcaacagtcgcaggtctagtcctgggtccagtaggaaaaccactccaagccctgggaggcaaaattcaaaagcccctaaacttactctggcctctcagacaaatgcagccctattgcagaatgtggagttgccgagaaatgtattggtcagtcccactcctctggccaatccccctgtacctgggagctttcctaacaacagtgggctgaatcctcagaattctactgtgtctgtggctgcagttgggggtgttgttgaggataacaaggagagcttgaatgtgcctcaggacagtgattgccagaattcccagagtaggaaggaacaggtaaacattgaactaaaagcagtccctgcccaagaagttaaaatggttgtccctgaagatcagtccaaaaaggatgggcagccttcggatcctaacaaacttcccagtgtcgaagagaacaaaaatttggtgtctcctgctatgagggaagcaccaacatcgttaagtcaacttcttgacaactctggagctcccaatgtgacaattaaaccccctgggcttacagatctggaagtaacacctccagtagtttctggggaggacctcaaaaaagcatctgtcattcccacactgcaggatctgtcttcttctaaagaaccttctaattccctaaacttacctcacagtaatgagctgtgttcatcccttgtgcatcccgaattgagtgaggtcagttctaacgttgcaccaagcatccctccagtaatgtcaagacctgttagctcttcctccatttccactcccttgcccccaaatcaaataactgtatttgtcacttccaatcccatcacaacttcagctaacacatcagcagctttgccaactcacttgcagtctgcattgatgtcaacagttgtcacaatgcccaatgcgggtagcaaggttatggtttctgagggacagtcagctgctcagtctaatgcccggcctcagttcattacacctgtctttatcaattcatcctcaataattcaggttatgaaaggatcacagccaagcacaattcctgcagccccactgacaaccaactctggcctgatgcctccctctgttgcagttgttggccctttacacatacctcagaacataaaattttcttctgctcctgtaccgcctaatgccctctccagtagtcctgctccaaacatccagacaggtcgacctttggtccttagctcacgagccacccctgttcagcttccttcccctccttgtacgtcttctccagttgtcccttctcatccccctgtgcagcaagtgaaagaattgaatccagatgaggctagccctcaggtgaacacctcagcagatcagaacactcttccctcttcacagtcaaccacaatggtttctccccttttgaccaatagtccagggtcctctggcaaccggcgaagcccagtctcgtctagtaagggcaaaggaaaagtggacaaaattggccaaattttgttgaccaaggcatgtaagaaagttacaggctctcttgagaaaggggaagaacaatatggtgcagatggagagactgaaggccaagggctagacaccacagctccggggctcatgggaacagagcagttatccacagagctggacagtaaaaccccaacgcccccagcacccactctgctaaaaatgacctctagccctgtgggcccgggcactgcctcagcaggacccagcttacctggcggtgctctccccaccagtgtacgctcgatagtaaccactctggtaccctccgagctcatctccgccgtaccgaccacaaaaagcaatcatggtggcatagcatctgagtcacttgcgggtggcctagtggaggagaaggtgggatcccatccagaacttctacccagcatagtagccggtcgaaattagtctcaaggaaatccacacagactgagcttgtgcaacaagtgagtatgtgccatttgcacactgccagtctcatcaacaggcgccg

SEQ ID NO: 336329 - DNA, 928 bp, Homo sapiens
aggcagtggggggacagcctggaaccagaacgcgaaacccagcctcacggtaagaagtggagacctagtggacactagcagccccgtcgcagaatttagtctcaaaggaaacttcaaccacagcactgcaggcctctgttgccagaccagagctggaggtaaatgctgccatagtctctggacaaagcagtgagcccaaagagatagttgaaaagtccaaaatcccaggccgaagaaactcccgaactgaagagccaactgtggcctctgaaagtgtggaaaatggacatcgtaaacgatcttctcgacctgcttcagcctccagctctactaaagacataaccagtgcggtgcaatccaagcgaagaaaatccaagtaaacaagcaggactgcgacttgatacttggaaatgtgtgtgacttttacaaagagcaattttgagctgtgacttttttaaatcaatttctgtacagttagtaattttaataatgtggcccttttcctagtccctgcaacctgtttcataaagtgcaatggggaaagcaggactgttgagcccttttggtgttgcgagttgaagttcaaggtttctaaaatgttgtcttgtattgaaaggagctaatgccattataaatgttactagttttcacatttcctaagcagcctagagtacagggtgagcatttttagatctcctaatgatgtattgtgccgtggaagtactgtgtgtgaatagcagtagtgggggcaaaagcaatcttctcatttggaaatgttgtaaataattttattatatagtgttttggatgtatttgttgtagaaatggaccagtgaataaagagaatctaaggatttgtacaatgtgaaataacgtgttaaataaatgtcattgtcatagaacataaagttatgttattggtaaggga

SEQ ID NO: 336330 - DNA, 1151 bp, Homo sapiens
aaaagtggcaacaaggtggatggagatgttttaaaatgaaaacggtctcttccacatgagaggaagagacttattttgctaacctggttgtaactggatgaaatatgaacaaggaagggtgaacttagttctattaatccaaacagattatttcaccatgtggagtagaaataaaaatagaccaagtgtcttatgtcccaaacaaaccaagttgtatctgtgccagctttgtctccataccatgtagggtgagaatcctgctgggcacagggacactttagcctaaatagggcatagagaattcttgtagactcctagcttctctctgtggcagctcccacatttcatttctatcctttatatttttttgcagagctggaggtaaatgctgccatagtctctggacaaagcagtgagcccaaagagatagttgaaaagtccaaaatcccaggccgaagaaactcccgaactgaagagccaactgtggcctctgaaagtgtggaaaatggacatcgtaaacgatcttctcgacctgcttcagcctccagctctactaaagacataaccagtgcggtgcaatccaagcgaagaaaatccaagtaaacaagcaggactgcgacttgatacttggaaatgtgtgtgacttttacaaagagcaattttgagctgtgacttttttaaatcaatttctgtacagttagtaattttaataatgtggcccttttcctagtccctgcaacctgtttcataaagtgcaatggggaaagcaggactgttgagcccttttggtgttgcgagttgaagttcaaggtttctaaaatgttgtcttgtattgaaaggagctaatgccattataaatgttactagttttcacatttcctaagcagcctagagtacagggtgagcatttttagatctcctaatgatgtattgtgccgtggaagtactgtgtgtgaatagcagtagtgggggcaaaagcaatcttctcatttggaaatgttgtaaataattttattatatagtgttttggatgtatttgttgtagaaatggaccagtgaataaagagaatctaaggatttgtacaatgtgaaataacgtgttaaataaatgtcattgtcatagaacataaagttatgttattggtaaggga

SEQ ID NO: 336331 - DNA, 168 bp, Homo sapiens
ccagcagcttcgggatttagggattctctccgttcagattgaaggtcttttactttgccatgtgcccatctagaccagaatcattacaacagtagaatatagcatgattttctgtgctgctttgtctgttcctctgctcttgtgtttcagaatgccaagcaactcatg

SEQ ID NO: 336332 - DNA, 428 bp, Homo sapiens
agtcatggctcattcagatcctacacaccgaggagctccaggttttttgatgctttgctttttgcttccttaagcactgtgccccttttgcttatgtcaagtaatgaggggctgccccctgccccaggagtgggcatgcctgagctgtttgtgcatagtctgtgccacctagatgagtattgcttggctatactctaaaggtagcaacattttcttgctgaaaaatctaacttccctaatttggggggcttgttttaggttatccttctcaaccagttgaacagaggccacttcagcagatgcctcctcaactcatgcagcatgtggcacccccaccacagccaccacagcagcagccacagccacaactgcctcagcagcagcagccaccacctcccagtcagccacagtctcagcagcagcagcag

SEQ ID NO: 336333 - DNA, 9280 bp, Homo sapiens
ctccagcccaggcaacagagcgtgactccgtctcaaaaaaaaaaaaaaaagtgaaaggaaaatgaggggagaattctcattgataataagggtgaaaaggtttttttggcagagtaatagagttttggaaaccattgcaaagctgtcaagtgtggtgtagtttttggttaaggaaatcagaggtgtcagcagacataaaagacaggggaaaacatgggaagtgtcctacctatagtgtagaaaaagcacaactatctatgtcagaggtcgacagactgtggtccataggtcaaatctggcccacgatctgtttttgtaaataacgttttattggaacatagccacactcatttatttatatattgtccatatcttcttttgtggtaccaatagcagagttgagtagtcgtgacagagatgtgttgtgtcagctcacaaagctggaaatactctttacaaaaacatttgccaacccctgatctatgtgtttgagtgttggatgttcaacctctaatttgcctccaatgtctatatgatgatagagaatgaataaacgtcttggctctgccctttgggctggattacccatgctctgtgtacctgcagcataacacagacccctgaatatttatatcagtcagtgatggcaaggtctattgttctggagtgtactgtgtggtaactgtggtagtgccagctttacacggattagataatgctcgggcttgttttgccattttttttattgggttgtcttttacaaaagatttatttatatattctgattattaatcctttgttgttggtagatattacagatgtcatttcccagtttcttgcttattttaattttttttttttttttttgagatgaagtcttgctctgtcgcccaggctggagtgcagtcgtgccatctcggctcattgtaacctccgtctcccaggttcaagtgattctcttgcctcagcctcccaagtggctgggactgcaggcatgtgccaccacgcctggctgatttttgtgtttttagtggggatggggtttcatcatgttggccaggctggtctcaaactcctgacctcaagtgatccacccgtcttggcctcctagagtgctgggattacaggtgtgagccactgcgcctggcctgttgcttattttaaaacatctgttttaaggtgtcatttgttaaaaagttctgaattttagtatcaactttatcaatcttttcctttaagatttgcagttattctttgttttgaggcagggtctcgctctgtcaccgaggctggagtgcagtggcgcgatctcggctcactgcagcctcaacctcctgggctcaagcaaccctcccacctcccatgccagttgagaccacaggcatgcgccaccatgccctgctattttttgcattttttgtagaggcggggtttcgccatgttgcccaggctagtctggaactcctgagctcaagcagtccacaaagtgctgggattacaggtgtgagctactgtgcccagcctgcaattattctttatattctggaatacctactgttgttttcaatggttagatctttaatgtatctggaatggattcttatgtgtagtgtaaggtcgggtccagtttcattttttttccctatgtataaccagtgatcccagcatcatttattgaatggggcttgctttcaaattgtgagctctttttggtggagtctgtctgaggtccttatgaagcactgctgcttgctgattgtgtgaccttggacaaataaaacctcattgcgcctcagtctttaaggataatagtaatctcatagggttttgtgaggattaaatgagtcaatatacataacgtgtaaaacagtgcttggcacctagaacatgctcaataaatattagctgtactttagcactactgttcatttctgattcctcagcacctggtacagagcaggggctcattttgctcaattaaattgccaaattaatttggttttcaggtcaatcagaatggtgagagttgggctgagtgttgcaggagatgcttccaaggagctacttagttttaggggctgccttagattatctgctaggatagaactcttctcacgccatcacttttgcagagaacttctgtagcagaggttgcaaactggcaacctgtggttggatttgacctgtataagtattttgtttggtttacacaatatttttaatgtcttaaaaatgtacacagacctctgagtttctgacttaaccttgaaaaattggaagatctgtcaacagcaagcccatattcatttatagcggtaaccagctgaaacttttaggtcctgggaggaatggagaggggtcccactgactaacttttctgagagtggtcagagagttcttaagcagaattttgatttggctgctgggctgctaccttgaaatccaagccctaaaaatgccagcttctttggacttagaagatgacctggataaatgataaaaattaagaaagagattttgaagttttcttattgtcctcttggcatatgcttctggaataatattcaccatggttttggatgaccttccaaacttagaagacatctatacttccttgtgttcatcaacaatggaagactcagagatggattttgactctggactagaagatgatgacacaaaaagtgatagtattttggaggattccacaatttttgtggccttcaaaggaaatatagatgataaagacttcaaatggaaattagatgcaatattgaaaaacgtgcccaatttgttacacatggagtccagcaagctaaaagtacagaaggtggagccctggaacagcgtgcgtgtgacattcaacatcccccgggaagcagcggagcggctacggatccttgctcagagcaacaaccagcagcttcgggatttagggattctctccgttcagattgaaggggaaggtgctattaacctggctttggctcagaaccgaagccaagatgtgagaatgaatggacccatgggagctggaaattcagttaggatggaggcgggatttcctatggcaagtggtccaggaataataaggatgaacaaccctgccactgttatgatacccccgggtggaaatgtgtcatcttccatgatggcaccaggccccaatccagagctgcagcccaggactcctcgccctgcttctcagtcagatgcaatggatccactcctctctgggctccatatacagcagcaaagtcatccctcaggatctttagctcccccacatcacccaatgcagcctgtctctgtgaacagacaaatgaacccagctaattttccccagctgcagcagcagcagcaacaacaacaacagcagcagcagcagcagcagcagcaacaacagcaacagcagcaacaacagttgcaggcaagacccccacagcaacatcagcagcaacagccacagggaattcgaccccagtttactgccccaactcaggtgcctgttcctccaggctggaaccagctgccttctggagcccttcaacctcctccagcccagggttctctgggcacaatgactgcaaaccaagggtggaagaaggctcccttgcccggcccaatgcaacagcaactccaggcaagaccatccttagccacggtacagacgccttcccaccctccccctccatatccctttggcagccagcaagcctcacaagcccacacaaactttcctcagatgagcaacccaggccagttcacagctcctcagatgaagagtttgcagggagggccctctagggtcccaactcccttgcagcagccccacctcaccaacaagtctcctgcctcctcaccctcctccttccagcagggatcccctgcatcctccccaacggttaaccaaactcagcagcagatgggaccaaggccacctcaaaataacccacttccccagggatttcagcagcctgtcagctctccgggtcggaatcctatggttcaacagggaaatgtgccacctaacttcatggtgatgcagcagcaaccaccaaaccaggggccacagagtttacatccaggcctaggaggaatgcctaaacgcctcccacctggcttctcagcaggacaggccaatccgaactttatgcaaggtcaggtgccttcgaccacagcaaccacccctgggaattcaggagcccctcagctgcaagcaaatcaaaatgtccagcatgcaggtggtcaaggagctggtcctcctcaaaaccagatgcaggtgtcccacgggccgccaaatatgatgcagcccagcctcatgggaattcatggcaacatgaacaatcagcaggctggtacttctggggttcctcaagtgaacctcagcaacatgcaaggccagccccagcagggcccaccatctcagctgatgggcatgcaccagcaaatcgtgccctcccagggccagatggtccagcaacaaggaaccttgaaccctcagaaccctatgatcctttcaagggcccagcttatgccacagggccagatgatggtgaaccccccgagccaaaatcttgggccctcgccccaaaggatgaccccacccaagcagatgctttcccagcagggcccacaaatgatggcgccacataaccagatgatggggcctcaggggcaggttttgctccaacagaacccaatgatagagcagattatgaccaatcaaatgcaggggaataagcagcagtttaacactcagaaccagtccaatgtcatgccgggaccagcccagataatgaggggaccaactccgaacatgcaaggaaatatggtgcagtttacgggacagatgtcaggacagatgctgccccagcaagggcctgtgaacaacagtccatctcaggttatgggcattcagggacaggtcctgcggccaccagggcccagcccacacatggcccagcagcatggtgatcctgctactacagcaaataacgatgtcagtttatctcagatgatgcctgatgttagcattcaacaaaccaacatggtcccccctcatgtgcaggccatgcagggaaacagtgcctcgggaaaccacttctcaggccatgggatgtctttcaatgcacctttcagtggagctcccaatggaaatcagatgtcctgtggtcaaaatccaggcttcccagtcaataaggatgtcacgctaacgagcccattgttggtcaacttattgcagagtgacatatctgcaggccattttggggtaaacaataagcaaaataataccaacgcaaataaaccgaagaagaagaaaccccctcggaagaagaaaaatagtcagcaagatctaaacaccccagatactcgcccagctggtctggaagaggctgatcagccaccgttgcctggagaacaaggaattaacttggataactcaggccctaaactgccagaattttcaaaccggccaccaggttatccttctcaaccagttgaacagaggccacttcagcagatgcctcctcaactcatgcagcatgtggcacccccaccacagccaccacagcagcagccacagccacaactgcctcagcagcagcagccaccacctcccagtcagccacagtctcagcagcagcagcagcagcagcaacaaatgatgatgatgctcatgatgcagcaggatcccaaatcagttaggcttccagtctctcaaaatgtccatcctccaaggggccccctgaaccccgactcccagagaatgcccatgcaacagagtggcagtgtgcctgtcatggtcagtctgcaaggacctgcctccgtgccaccatcacctgataaacaaagaatgccaatgcctgtgaatactcccttgggaagcaattcaaggaaaatggtctatcaggagagcccgcagaatccttccagctcgccactggcggagatggcctcactccctgaagcaagtggcagtgaagcaccatctgtcccaggaggcccaaacaacatgccttcacatgtagtacttccccagaatcagttaatgatgacagggccaaaacctggaccatcgcccctttcagcaactcaaggtgcaactccccagcaaccccctgtaaattccctgcccagctctcacggccaccacttcccaaatgtggctgcgccaacccagacatctaggcccaaaacaccaaacagagccagccccagaccctattatcctcagacacccaacaaccgccctcccagcacagaaccttcagaaatcagtctgtcaccagaaagactcaatgcctccatagcaggactcttccctccacagattaatattcctttacctcctaggccaaatttaaacaggggctttgatcaacaaggcctaaatccaacaactttgaaggccatcgggcaagcaccttcaaatcttaccatgaatccttccaattttgctaccccacaaactcacaaattagattctgtggtagtgaattctggaaagcagtctaattctggagcaacaaaacgggcaagtccaagcaacagtcgcaggtctagtcctgggtccagtaggaaaaccactccaagccctgggaggcaaaattcaaaagcccctaaacttactctggcctctcagacaaatgcagccctattgcagaatgtggagttgccgagaaatgtattggtcagtcccactcctctggccaatccccctgtacctgggagctttcctaacaacagtgggctgaatcctcagaattctactgtgtctgtggctgcagttgggggtgttgttgaggataacaaggagagcttgaatgtgcctcaggacagtgattgccagaattcccagagtaggaaggaacaggtaaacattgaactaaaagcagtccctgcccaagaagttaaaatggttgtccctgaagatcagtccaaaaaggatgggcagccttcggatcctaacaaacttcccagtgtcgaagagaacaaaaatttggtgtctcctgctatgagggaagcaccaacatcgttaagtcaacttcttgacaactctggagctcccaatgtgacaattaaaccccctgggcttacagatctggaagtaacacctccagtagtttctggggaggacctcaaaaaagcatctgtcattcccacactgcaggatctgtcttcttctaaagaaccttctaattccctaaacttacctcacagtaatgagctgtgttcatcccttgtgcatcccgaattgagtgaggtcagttctaacgttgcaccaagcatccctccagtaatgtcaagacctgttagctcttcctccatttccactcccttgcccccaaatcaaataactgtatttgtcacttccaatcccatcacaacttcagctaacacatcagcagctttgccaactcacttgcagtctgcattgatgtcaacagttgtcacaatgcccaatgcgggtagcaaggttatggtttctgagggacagtcagctgctcagtctaatgcccggcctcagttcattacacctgtctttatcaattcatcctcaataattcaggttatgaaaggatcacagccaagcacaattcctgcagccccactgacaaccaactctggcctgatgcctccctctgttgcagttgttggccctttacacatacctcagaacataaaattttcttctgctcctgtaccgcctaatgccctctccagtagtcctgctccaaacatccagacaggtcgacctttggtccttagctcacgagccacccctgttcagcttccttcccctccttgtacgtcttctccagttgtcccttctcatccccctgtgcagcaagtgaaagaattgaatccagatgaggctagccctcaggtgaacacctcagcagatcagaacactcttccctcttcacagtcaaccacaatggtttctccccttttgaccaatagtccagggtcctctggcaaccggcgaagcccagtctcgtctagtaagggcaaaggaaaagtggacaaaattggccaaattttgttgaccaaggcatgtaagaaagttacaggctctcttgagaaaggggaagaacaatatggtgcagatggagagactgaaggccaagggctagacaccacagctccggggctcatgggaacagagcagttatccacagagctggacagtaaaaccccaacgcccccagcacccactctgctaaaaatgacctctagccctgtgggcccgggcactgcctcagcaggacccagcttacctggcggtgctctccccaccagtgtacgctcgatagtaaccactctggtaccctccgagctcatctccgccgtaccgaccacaaaaagcaatcatggtggcatagcatctgagtcacttgcgggtggcctagtggaggagaaggtgggatcccatccagaacttctacccagcatagccccgtcgcagaatttagtctcaaaggaaacttcaaccacagcactgcaggcctctgttgccagaccagagctggaggtaaatgctgccatagtctctggacaaagcagtgagcccaaagagatagttgaaaagtccaaaatcccaggccgaagaaactcccgaactgaagagccaactgtggcctctgaaagtgtggaaaatggacatcgtaaacgatcttctcgacctgcttcagcctccagctctactaaagacataaccagtgcggtgcaatccaagcgaagaaaatccaagtaaacaagcaggactgcgacttgatacttggaaatgtgtgtgacttttacaaagagcaattttgagctgtgacttttttaaatcaatttctgtacagttagtaattttaataatgtggcccttttcctagtccctgcaacctgtttcataaagtgcaatggggaaagcaggactgttgagcccttttggtgttgcgagttgaagttcaaggtttctaaaatgttgtcttgtattgaaaggagctaatgccattataaatgttactagttttcacatttcctaagcagcctagagtacagggtgagcatttttagatctcctaatgatgtattgtgccgtggaagtactgtgtgtgaatagcagtagtgggggcaaaagcaatcttctcatttggaaatgttgtaaataattttattatatagtgttttggatgtatttgttgtagaaatggaccagtgaataaagagaatctaaggatttgtacaatgtgaaataacgtgttaaataaatgtcattgtcata

SEQ ID NO: 336334 - DNA, 7032 bp, Homo sapiens
tggtgcctgaggatccacgtatatgtaaccaggctggagtacagtggtgccgtattggctcactgcaacctctgcctctgagttcatgtgattctcctgcctcagtctcccgagcagctgggattacagaattttgatttggctgctgggctgctaccttgaaatccaagccctaaaaatgccagcttctttggacttagaagatgacctggataaatgataaaaattaagaaagagattttgaagttttcttattgtcctcttggcatatgcttctggaataatattcaccatggttttggatgaccttccaaacttagaagacatctatacttccttgtgttcatcaacaatggaagactcagagatggattttgactctggactagaagatgatgacacaaaaagtgatagtattttggaggattccacaatttttgtggccttcaaaggaaatatagatgataaagacttcaaatggaaattagatgcaatattgaaaaacgtgcccaatttgttacacatggagtccagcaagctaaaagtacagaaggtggagccctggaacagcgtgcgtgtgacattcaacatcccccgggaagcagcggagcggctacggatccttgctcagagcaacaaccagcagcttcgggatttagggattctctccgttcagattgaaggggaaggtgctattaacctggctttggctcagaaccgaagccaagatgtgagaatgaatggacccatgggagctggaaattcagttaggatggaggcgggatttcctatggcaagtggtccaggaataataaggatgaacaaccctgccactgttatgatacccccgggtggaaatgtgtcatcttccatgatggcaccaggccccaatccagagctgcagcccaggactcctcgccctgcttctcagtcagatgcaatggatccactcctctctgggctccatatacagcagcaaagtcatccctcaggatctttagctcccccacatcacccaatgcagcctgtctctgtgaacagacaaatgaacccagctaattttccccagctgcagcagcagcagcaacaacaacaacagcagcagcagcagcagcagcagcaacaacagcaacagcagcaacaacagttgcaggcaagacccccacagcaacatcagcagcaacagccacagggaattcgaccccagtttactgccccaactcaggtgcctgttcctccaggctggaaccagctgccttctggagcccttcaacctcctccagcccagggttctctgggcacaatgactgcaaaccaagggtggaagaaggctcccttgcccggcccaatgcaacagcaactccaggcaagaccatccttagccacggtacagacgccttcccaccctccccctccatatccctttggcagccagcaagcctcacaagcccacacaaactttcctcagatgagcaacccaggccagttcacagctcctcagatgaagagtttgcagggagggccctctagggtcccaactcccttgcagcagccccacctcaccaacaagtctcctgcctcctcaccctcctccttccagcagggatcccctgcatcctccccaacggttaaccaaactcagcagcagatgggaccaaggccacctcaaaataacccacttccccagggatttcagcagcctgtcagctctccgggtcggaatcctatggttcaacagggaaatgtgccacctaacttcatggtgatgcagcagcaaccaccaaaccaggggccacagagtttacatccaggcctaggaggaatgcctaaacgcctcccacctggcttctcagcaggacaggccaatccgaactttatgcaaggtcaggtgccttcgaccacagcaaccacccctgggaattcaggagcccctcagctgcaagcaaatcaaaatgtccagcatgcaggtggtcaaggagctggtcctcctcaaaaccagatgcaggtgtcccacgggccgccaaatatgatgcagcccagcctcatgggaattcatggcaacatgaacaatcagcaggctggtacttctggggttcctcaagtgaacctcagcaacatgcaaggccagccccagcagggcccaccatctcagctgatgggcatgcaccagcaaatcgtgccctcccagggccagatggtccagcaacaaggaaccttgaaccctcagaaccctatgatcctttcaagggcccagcttatgccacagggccagatgatggtgaaccccccgagccaaaatcttgggccctcgccccaaaggatgaccccacccaagcagatgctttcccagcagggcccacaaatgatggcgccacataaccagatgatggggcctcaggggcaggttttgctccaacagaacccaatgatagagcagattatgaccaatcaaatgcaggggaataagcagcagtttaacactcagaaccagtccaatgtcatgccgggaccagcccagataatgaggggaccaactccgaacatgcaaggaaatatggtgcagtttacgggacagatgtcaggacagatgctgccccagcaagggcctgtgaacaacagtccatctcaggttatgggcattcagggacaggtcctgcggccaccagggcccagcccacacatggcccagcagcatggtgatcctgctactacagcaaataacgatgtcagtttatctcagatgatgcctgatgttagcattcaacaaaccaacatggtcccccctcatgtgcaggccatgcagggaaacagtgcctcgggaaaccacttctcaggccatgggatgtctttcaatgcacctttcagtggagctcccaatggaaatcagatgtcctgtggtcaaaatccaggcttcccagtcaataaggatgtcacgctaacgagcccattgttggtcaacttattgcagagtgacatatctgcaggccattttggggtaaacaataagcaaaataataccaacgcaaataaaccgaagaagaagaaaccccctcggaagaagaaaaatagtcagcaagatctaaacaccccagatactcgcccagctggtctggaagaggctgatcagccaccgttgcctggagaacaaggaattaacttggataactcaggccctaaactgccagaattttcaaaccggccaccaggttatccttctcaaccagttgaacagaggccacttcagcagatgcctcctcaactcatgcagcatgtggcacccccaccacagccaccacagcagcagccacagccacaactgcctcagcagcagcagccaccacctcccagtcagccacagtctcagcagcagcagcagcagcagcaacaaatgatgatgatgctcatgatgcagcaggatcccaaatcagttaggcttccagtctctcaaaatgtccatcctccaaggggccccctgaaccccgactcccagagaatgcccatgcaacagagtggcagtgtgcctgtcatggtcagtctgcaaggacctgcctccgtgccaccatcacctgataaacaaagaatgccaatgcctgtgaatactcccttgggaagcaattcaaggaaaatggtctatcaggagagcccgcagaatccttccagctcgccactggcggagatggcctcactccctgaagcaagtggcagtgaagcaccatctgtcccaggaggcccaaacaacatgccttcacatgtagtacttccccagaatcagttaatgatgacagggccaaaacctggaccatcgcccctttcagcaactcaaggtgcaactccccagcaaccccctgtaaattccctgcccagctctcacggccaccacttcccaaatgtggctgcgccaacccagacatctaggcccaaaacaccaaacagagccagccccagaccctattatcctcagacacccaacaaccgccctcccagcacagaaccttcagaaatcagtctgtcaccagaaagactcaatgcctccatagcaggactcttccctccacagattaatattcctttacctcctaggccaaatttaaacaggggctttgatcaacaaggcctaaatccaacaactttgaaggccatcgggcaagcaccttcaaatcttaccatgaatccttccaattttgctaccccacaaactcacaaattagattctgtggtagtgaattctggaaagcagtctaattctggagcaacaaaacgggcaagtccaagcaacagtcgcaggtctagtcctgggtccagtaggaaaaccactccaagccctgggaggcaaaattcaaaagcccctaaacttactctggcctctcagacaaatgcagccctattgcagaatgtggagttgccgagaaatgtattggtcagtcccactcctctggccaatccccctgtacctgggagctttcctaacaacagtgggctgaatcctcagaattctactgtgtctgtggctgcagttgggggtgttgttgaggataacaaggagagcttgaatgtgcctcaggacagtgattgccagaattcccagagtaggaaggaacaggtaaacattgaactaaaagcagtccctgcccaagaagttaaaatggttgtccctgaagatcagtccaaaaaggatgggcagccttcggatcctaacaaacttcccagtgtcgaagagaacaaaaatttggtgtctcctgctatgagggaagcaccaacatcgttaagtcaacttcttgacaactctggagctcccaatgtgacaattaaaccccctgggcttacagatctggaagtaacacctccagtagtttctggggaggacctcaaaaaagcatctgtcattcccacactgcaggatctgtcttcttctaaagaaccttctaattccctaaacttacctcacagtaatgagctgtgttcatcccttgtgcatcccgaattgagtgaggtcagttctaacgttgcaccaagcatccctccagtaatgtcaagacctgttagctcttcctccatttccactcccttgcccccaaatcaaataactgtatttgtcacttccaatcccatcacaacttcagctaacacatcagcagctttgccaactcacttgcagtctgcattgatgtcaacagttgtcacaatgcccaatgcgggtagcaaggttatggtttctgagggacagtcagctgctcagtctaatgcccggcctcagttcattacacctgtctttatcaattcatcctcaataattcaggttatgaaaggatcacagccaagcacaattcctgcagccccactgacaaccaactctggcctgatgcctccctctgttgcagttgttggccctttacacatacctcagaacataaaattttcttctgctcctgtaccgcctaatgccctctccagtagtcctgctccaaacatccagacaggtcgacctttggtccttagctcacgagccacccctgttcagcttccttcccctccttgtacgtcttctccagttgtcccttctcatccccctgtgcagcaagtgaaagaattgaatccagatgaggctagccctcaggtgaacacctcagcagatcagaacactcttccctcttcacagtcaaccacaatggtttctccccttttgaccaatagtccagggtcctctggcaaccggcgaagcccagtctcgtctagtaagggcaaaggaaaagtggacaaaattggccaaattttgttgaccaaggcatgtaagaaagttacaggctctcttgagaaaggggaagaacaatatggtgcagatggagagactgaaggccaagggctagacaccacagctccggggctcatgggaacagagcagttatccacagagctggacagtaaaaccccaacgcccccagcacccactctgctaaaaatgacctctagccctgtgggcccgggcactgcctcagcaggacccagcttacctggcggtgctctccccaccagtgtacgctcgatagtaaccactctggtaccctccgagctcatctccgccgtaccgaccacaaaaagcaatcatggtggcatagcatctgagtcacttgcgggtggcctagtggaggagaaggtgggatcccatccagaacttctacccagcatagccccgtcgcagaatttagtctcaaaggaaacttcaaccacagcactgcaggcctctgttgccagaccagagctggaggtaaatgctgccatagtctctggacaaagcagtgagcccaaagagatagttgaaaagtccaaaatcccaggccgaagaaactcccgaactgaagagccaactgtggcctctgaaagtgtggaaaatggacatcgtaaacgatcttctcgacctgcttcagcctccagctctactaaagacataaccagtgcggtgcaatccaagcgaagaaaatccaagtaaacaagcaggactgcgacttgatacttggaaatgtgtgtgacttttacaaagagcaattttgagctgtgacttttttaaatcaatttctgtacagttagtaattttaataatgtggcccttttcctagtccctgcaacctgtttcataaagtgcaatggggaaagcaggactgttgagcccttttggtgttgcgagttgaagttcaaggtttctaaaatgttgtcttgtattgaaaggagctaatgccattataaatgttactagttttcacatttcctaagcagcctagagtacagggtgagcatttttagatctcctaatgatgtattgtgccgtggaagtactgtgtgtgaatagcagtagtgggggcaaaagcaatcttctcatttggaaatgttgtaaataattttattatatagtgttttggatgtatttgttgtagaaatggaccagtgaataaagagaatctaaggatttgtacaatgtgaaataacgtgttaaataaatgtcattgtcatagaacataaagttatgttattggtaaggga

SEQ ID NO: 336335 - DNA, 7731 bp, Homo sapiens
tggtgcctgaggatccacgtatatgtaaccaggctggagtacagtggtgccgtattggctcactgcaacctctgcctctgagttcatgtgattctcctgcctcagtctcccgagcagctgggattacagaattttgatttggctgctgggctgctaccttgaaatccaagccctaaaaatgccagcttctttggacttagaagatgacctggataaatgataaaaattaagaaagagattttgaagttttcttattgtcctcttggcatatgcttctggaataatattcaccatggttttggatgaccttccaaacttagaagacatctatacttccttgtgttcatcaacaatggaagactcagagatggattttgactctggactagaagatgatgacacaaaaagtgatagtattttggaggattccacaatttttgtggccttcaaaggaaatatagatgataaagacttcaaatggaaattagatgcaatattgaaaaacgtgcccaatttgttacacatggagtccagcaagctaaaagtacagaaggtggagccctggaacagcgtgcgtgtgacattcaacatcccccgggaagcagcggagcggctacggatccttgctcagagcaacaaccagcagcttcgggatttagggattctctccgttcagattgaaggggaaggtgctattaacctggctttggctcagaaccgaagccaagatgtgagaatgaatggacccatgggagctggaaattcagttaggatggaggcgggatttcctatggcaagtggtccaggaataataaggatgaacaaccctgccactgttatgatacccccgggtggaaatgtgtcatcttccatgatggcaccaggccccaatccagagctgcagcccaggactcctcgccctgcttctcagtcaggtaatgacttccaatctttgaggatgaagagtctgaaactttctgcacagatcattataaaattcagttatctctgatgctgaatttctaatttccaaactcacaatgtcaaccttctttacaaaatctgacctgatttcttcaaactaaatgtcattattttcttttcagaatttctcattgttttcttatcaattataccccaacatttctaaaagtgtgcctggcctgcgtagtcctgcaagatgctcattacatagaattctgtagtcaagtaaatttggtaaatgcatcattctttaccctccctcctggagattcaaaagtaacatattggaggcactgaaagtcctacagtgaagaaacgcatctaagtttgttaggttcagtgtttcccaaacctaattgttttgttttcttataatgctaattaacatagttctccagaatatgatttggtaaatactggtctccatgttttacacttcgctcttaatgtccactactgaccaagctctttttaagacagaattcatcatcttggtatgttgcttcatacatagaaggtattcacaagcatttattttatcgaatagtaccagcagattttgctctgtatatccagaattacaaaggccacttctctaagatctagattgcagtaggttaattattgctttgttgactatctttaaacagatgcaatggatccactcctctctgggctccatatacagcagcaaagtcatccctcaggatctttagctcccccacatcacccaatgcagcctgtctctgtgaacagacaaatgaacccagctaattttccccagctgcagcagcagcagcaacaacaacaacagcagcagcagcagcagcagcagcaacaacagcaacagcagcaacaacagttgcaggcaagacccccacagcaacatcagcagcaacagccacagggaattcgaccccagtttactgccccaactcaggtgcctgttcctccaggctggaaccagctgccttctggagcccttcaacctcctccagcccagggttctctgggcacaatgactgcaaaccaagggtggaagaaggctcccttgcccggcccaatgcaacagcaactccaggcaagaccatccttagccacggtacagacgccttcccaccctccccctccatatccctttggcagccagcaagcctcacaagcccacacaaactttcctcagatgagcaacccaggccagttcacagctcctcagatgaagagtttgcagggagggccctctagggtcccaactcccttgcagcagccccacctcaccaacaagtctcctgcctcctcaccctcctccttccagcagggatcccctgcatcctccccaacggttaaccaaactcagcagcagatgggaccaaggccacctcaaaataacccacttccccagggatttcagcagcctgtcagctctccgggtcggaatcctatggttcaacagggaaatgtgccacctaacttcatggtgatgcagcagcaaccaccaaaccaggggccacagagtttacatccaggcctaggaggaatgcctaaacgcctcccacctggcttctcagcaggacaggccaatccgaactttatgcaaggtcaggtgccttcgaccacagcaaccacccctgggaattcaggagcccctcagctgcaagcaaatcaaaatgtccagcatgcaggtggtcaaggagctggtcctcctcaaaaccagatgcaggtgtcccacgggccgccaaatatgatgcagcccagcctcatgggaattcatggcaacatgaacaatcagcaggctggtacttctggggttcctcaagtgaacctcagcaacatgcaaggccagccccagcagggcccaccatctcagctgatgggcatgcaccagcaaatcgtgccctcccagggccagatggtccagcaacaaggaaccttgaaccctcagaaccctatgatcctttcaagggcccagcttatgccacagggccagatgatggtgaaccccccgagccaaaatcttgggccctcgccccaaaggatgaccccacccaagcagatgctttcccagcagggcccacaaatgatggcgccacataaccagatgatggggcctcaggggcaggttttgctccaacagaacccaatgatagagcagattatgaccaatcaaatgcaggggaataagcagcagtttaacactcagaaccagtccaatgtcatgccgggaccagcccagataatgaggggaccaactccgaacatgcaaggaaatatggtgcagtttacgggacagatgtcaggacagatgctgccccagcaagggcctgtgaacaacagtccatctcaggttatgggcattcagggacaggtcctgcggccaccagggcccagcccacacatggcccagcagcatggtgatcctgctactacagcaaataacgatgtcagtttatctcagatgatgcctgatgttagcattcaacaaaccaacatggtcccccctcatgtgcaggccatgcagggaaacagtgcctcgggaaaccacttctcaggccatgggatgtctttcaatgcacctttcagtggagctcccaatggaaatcagatgtcctgtggtcaaaatccaggcttcccagtcaataaggatgtcacgctaacgagcccattgttggtcaacttattgcagagtgacatatctgcaggccattttggggtaaacaataagcaaaataataccaacgcaaataaaccgaagaagaagaaaccccctcggaagaagaaaaatagtcagcaagatctaaacaccccagatactcgcccagctggtctggaagaggctgatcagccaccgttgcctggagaacaaggaattaacttggataactcaggccctaaactgccagaattttcaaaccggccaccaggttatccttctcaaccagttgaacagaggccacttcagcagatgcctcctcaactcatgcagcatgtggcacccccaccacagccaccacagcagcagccacagccacaactgcctcagcagcagcagccaccacctcccagtcagccacagtctcagcagcagcagcagcagcagcaacaaatgatgatgatgctcatgatgcagcaggatcccaaatcagttaggcttccagtctctcaaaatgtccatcctccaaggggccccctgaaccccgactcccagagaatgcccatgcaacagagtggcagtgtgcctgtcatggtcagtctgcaaggacctgcctccgtgccaccatcacctgataaacaaagaatgccaatgcctgtgaatactcccttgggaagcaattcaaggaaaatggtctatcaggagagcccgcagaatccttccagctcgccactggcggagatggcctcactccctgaagcaagtggcagtgaagcaccatctgtcccaggaggcccaaacaacatgccttcacatgtagtacttccccagaatcagttaatgatgacagggccaaaacctggaccatcgcccctttcagcaactcaaggtgcaactccccagcaaccccctgtaaattccctgcccagctctcacggccaccacttcccaaatgtggctgcgccaacccagacatctaggcccaaaacaccaaacagagccagccccagaccctattatcctcagacacccaacaaccgccctcccagcacagaaccttcagaaatcagtctgtcaccagaaagactcaatgcctccatagcaggactcttccctccacagattaatattcctttacctcctaggccaaatttaaacaggggctttgatcaacaaggcctaaatccaacaactttgaaggccatcgggcaagcaccttcaaatcttaccatgaatccttccaattttgctaccccacaaactcacaaattagattctgtggtagtgaattctggaaagcagtctaattctggagcaacaaaacgggcaagtccaagcaacagtcgcaggtctagtcctgggtccagtaggaaaaccactccaagccctgggaggcaaaattcaaaagcccctaaacttactctggcctctcagacaaatgcagccctattgcagaatgtggagttgccgagaaatgtattggtcagtcccactcctctggccaatccccctgtacctgggagctttcctaacaacagtgggctgaatcctcagaattctactgtgtctgtggctgcagttgggggtgttgttgaggataacaaggagagcttgaatgtgcctcaggacagtgattgccagaattcccagagtaggaaggaacaggtaaacattgaactaaaagcagtccctgcccaagaagttaaaatggttgtccctgaagatcagtccaaaaaggatgggcagccttcggatcctaacaaacttcccagtgtcgaagagaacaaaaatttggtgtctcctgctatgagggaagcaccaacatcgttaagtcaacttcttgacaactctggagctcccaatgtgacaattaaaccccctgggcttacagatctggaagtaacacctccagtagtttctggggaggacctcaaaaaagcatctgtcattcccacactgcaggatctgtcttcttctaaagaaccttctaattccctaaacttacctcacagtaatgagctgtgttcatcccttgtgcatcccgaattgagtgaggtcagttctaacgttgcaccaagcatccctccagtaatgtcaagacctgttagctcttcctccatttccactcccttgcccccaaatcaaataactgtatttgtcacttccaatcccatcacaacttcagctaacacatcagcagctttgccaactcacttgcagtctgcattgatgtcaacagttgtcacaatgcccaatgcgggtagcaaggttatggtttctgagggacagtcagctgctcagtctaatgcccggcctcagttcattacacctgtctttatcaattcatcctcaataattcaggttatgaaaggatcacagccaagcacaattcctgcagccccactgacaaccaactctggcctgatgcctccctctgttgcagttgttggccctttacacatacctcagaacataaaattttcttctgctcctgtaccgcctaatgccctctccagtagtcctgctccaaacatccagacaggtcgacctttggtccttagctcacgagccacccctgttcagcttccttcccctccttgtacgtcttctccagttgtcccttctcatccccctgtgcagcaagtgaaagaattgaatccagatgaggctagccctcaggtgaacacctcagcagatcagaacactcttccctcttcacagtcaaccacaatggtttctccccttttgaccaatagtccagggtcctctggcaaccggcgaagcccagtctcgtctagtaagggcaaaggaaaagtggacaaaattggccaaattttgttgaccaaggcatgtaagaaagttacaggctctcttgagaaaggggaagaacaatatggtgcagatggagagactgaaggccaagggctagacaccacagctccggggctcatgggaacagagcagttatccacagagctggacagtaaaaccccaacgcccccagcacccactctgctaaaaatgacctctagccctgtgggcccgggcactgcctcagcaggacccagcttacctggcggtgctctccccaccagtgtacgctcgatagtaaccactctggtaccctccgagctcatctccgccgtaccgaccacaaaaagcaatcatggtggcatagcatctgagtcacttgcgggtggcctagtggaggagaaggtgggatcccatccagaacttctacccagcatagccccgtcgcagaatttagtctcaaaggaaacttcaaccacagcactgcaggcctctgttgccagaccagagctggaggtaaatgctgccatagtctctggacaaagcagtgagcccaaagagatagttgaaaagtccaaaatcccaggccgaagaaactcccgaactgaagagccaactgtggcctctgaaagtgtggaaaatggacatcgtaaacgatcttctcgacctgcttcagcctccagctctactaaagacataaccagtgcggtgcaatccaagcgaagaaaatccaagtaaacaagcaggactgcgacttgatacttggaaatgtgtgtgacttttacaaagagcaattttgagctgtgacttttttaaatcaatttctgtacagttagtaattttaataatgtggcccttttcctagtccctgcaacctgtttcataaagtgcaatggggaaagcaggactgttgagcccttttggtgttgcgagttgaagttcaaggtttctaaaatgttgtcttgtattgaaaggagctaatgccattataaatgttactagttttcacatttcctaagcagcctagagtacagggtgagcatttttagatctcctaatgatgtattgtgccgtggaagtactgtgtgtgaatagcagtagtgggggcaaaagcaatcttctcatttggaaatgttgtaaataattttattatatagtgttttggatgtatttgttgtagaaatggaccagtgaataaagagaatctaaggatttgtacaatgtgaaataacgtgttaaataaatgtcattgtcatagaacataaagttatgttattggtaaggga

SEQ ID NO: 336336 - DNA, 4005 bp, Homo sapiens
ctctagagtatccccgtgtgctcctcggaagaagaaaaatagtcagcaagatctaaacaccccagatactcgcccagctggtctggaagaggctgatcagccaccgttgcctggagaacaaggaattaacttggataactcaggccctaaactgccagaattttcaaaccggccaccaggttatccttctcaaccagttgaacagaggccacttcagcagatgcctcctcaactcatgcagcatgtggcacccccaccacagccaccacagcagcagccacagccacaactgcctcagcagcagcagccaccacctcccagtcagccacagtctcagcagcagcagcagcagcagcaacaaatgatgatgatgctcatgatgcagcaggatcccaaatcagttaggcttccagtctctcaaaatgtccatcctccaaggggccccctgaaccccgactcccagagaatgcccatgcaacagagtggcagtgtgcctgtcatggtcagtctgcaaggacctgcctccgtgccaccatcacctgataaacaaagaatgccaatgcctgtgaatactcccttgggaagcaattcaaggaaaatggtctatcaggagagcccgcagaatccttccagctcgccactggcggagatggcctcactccctgaagcaagtggcagtgaagcaccatctgtcccaggaggcccaaacaacatgccttcacatgtagtacttccccagaatcagttaatgatgacagggccaaaacctggaccatcgcccctttcagcaactcaaggtgcaactccccagcaaccccctgtaaattccctgcccagctctcacggccaccacttcccaaatgtggctgcgccaacccagacatctaggcccaaaacaccaaacagagccagccccagaccctattatcctcagacacccaacaaccgccctcccagcacagaaccttcagaaatcagtctgtcaccagaaagactcaatgcctccatagcaggactcttccctccacagattaatattcctttacctcctaggccaaatttaaacaggggctttgatcaacaaggcctaaatccaacaactttgaaggccatcgggcaagcaccttcaaatcttaccatgaatccttccaattttgctaccccacaaactcacaaattagattctgtggtagtgaattctggaaagcagtctaattctggagcaacaaaacgggcaagtccaagcaacagtcgcaggtctagtcctgggtccagtaggaaaaccactccaagccctgggaggcaaaattcaaaagcccctaaacttactctggcctctcagacaaatgcagccctattgcagaatgtggagttgccgagaaatgtattggtcagtcccactcctctggccaatccccctgtacctgggagctttcctaacaacagtgggctgaatcctcagaattctactgtgtctgtggctgcagttgggggtgttgttgaggataacaaggagagcttgaatgtgcctcaggacagtgattgccagaattcccagagtaggaaggaacaggtaaacattgaactaaaagcagtccctgcccaagaagttaaaatggttgtccctgaagatcagtccaaaaaggatgggcagccttcggatcctaacaaacttcccagtgtcgaagagaacaaaaatttggtgtctcctgctatgagggaagcaccaacatcgttaagtcaacttcttgacaactctggagctcccaatgtgacaattaaaccccctgggcttacagatctggaagtaacacctccagtagtttctggggaggacctcaaaaaagcatctgtcattcccacactgcaggatctgtcttcttctaaagaaccttctaattccctaaacttacctcacagtaatgagctgtgttcatcccttgtgcatcccgaattgagtgaggtcagttctaacgttgcaccaagcatccctccagtaatgtcaagacctgttagctcttcctccatttccactcccttgcccccaaatcaaataactgtatttgtcacttccaatcccatcacaacttcagctaacacatcagcagctttgccaactcacttgcagtctgcattgatgtcaacagttgtcacaatgcccaatgcgggtagcaaggttatggtttctgagggacagtcagctgctcagtctaatgcccggcctcagttcattacacctgtctttatcaattcatcctcaataattcaggttatgaaaggatcacagccaagcacaattcctgcagccccactgacaaccaactctggcctgatgcctccctctgttgcagttgttggccctttacacatacctcagaacataaaattttcttctgctcctgtaccgcctaatgccctctccagtagtcctgctccaaacatccagacaggtcgacctttggtccttagctcacgagccacccctgttcagcttccttcccctccttgtacgtcttctccagttgtcccttctcatccccctgtgcagcaagtgaaagaattgaatccagatgaggctagccctcaggtgaacacctcagcagatcagaacactcttccctcttcacagtcaaccacaatggtttctccccttttgaccaatagtccagggtcctctggcaaccggcgaagcccagtctcgtctagtaagggcaaaggaaaagtggacaaaattggccaaattttgttgaccaaggcatgtaagaaagttacaggctctcttgagaaaggggaagaacaatatggtgcagatggagagactgaaggccaagggctagacaccacagctccggggctcatgggaacagagcagttatccacagagctggacagtaaaaccccaacgcccccagcacccactctgctaaaaatgacctctagccctgtgggcccgggcactgcctcagcaggacccagcttacctggcggtgctctccccaccagtgtacgctcgatagtaaccactctggtaccctccgagctcatctccgccgtaccgaccacaaaaagcaatcatggtggcatagcatctgagtcacttgcgggtggcctagtggaggagaaggtgggatcccatccagaacttctacccagcatagccccgtcgcagaatttagtctcaaaggaaacttcaaccacagcactgcaggcctctgttgccagaccagagctggaggtaaatgctgccatagtctctggacaaagcagtgagcccaaagagatagttgaaaagtccaaaatcccaggccgaagaaactcccgaactgaagagccaactgtggcctctgaaagtgtggaaaatggacatcgtaaacgatcttctcgacctgcttcagcctccagctctactaaagacataaccagtgcggtgcaatccaagcgaagaaaatccaagtaaacaagcaggactgcgacttgatacttggaaatgtgtgtgacttttacaaagagcaattttgagctgtgacttttttaaatcaatttctgtacagttagtaattttaataatgtggcccttttcctagtccctgcaacctgtttcataaagtgcaatggggaaagcaggactgttgagcccttttggtgttgcgagttgaagttcaaggtttctaaaatgttgtcttgtattgaaaggagctaatgccattataaatgttactagttttcacatttcctaagcagcctagagtacagggtgagcatttttagatctcctaatgatgtattgtgccgtggaagtactgtgtgtgaatagcagtagtgggggcaaaagcaatcttctcatttggaaatgttgtaaataattttattatatagtgttttggatgtatttgttgtagaaatggaccagtgaataaagagaatctaaggatttgtacaatgtgaaataacgtgttaaataaatgtcattgtcatagaacataaagttatgttattggtaaggga

SEQ ID NO: 336337 - DNA, 4053 bp, Homo sapiens
tggtgcctgaggatccacgtatatgtaaccaggctggagtacagtggtgccgtattggctcactgcaacctctgcctctgagttcatgtgattctcctgcctcagtctcccgagcagctgggattacagaattttgatttggctgctgggctgctaccttgaaatccaagccctaaaaatgccagcttctttggacttagaagatgacctggataaatgataaaaattaagaaagagattttgaagttttcttattgtcctcttggcatatgcttctggaataatattcaccatggttttggatgaccttccaaacttagaagacatctatacttccttgtgttcatcaacaatggaagactcagagatggattttgactctggactagaagatgatgacacaaaaagtgatagtattttggaggattccacaatttttgtggccttcaaaggaaatatagatgataaagacttcaaatggaaattagatgcaatattgaaaaacgtgcccaatttgttacacatggagtccagcaagctaaaagtacagaaggtggagccctggaacagcgtgcgtgtgacattcaacatcccccgggaagcagcggagcggctacggatccttgctcagagcaacaaccagcagcttcgggatttagggattctctccgttcagattgaaggggaaggtgctattaacctggctttggctcagaaccgaagccaagatgtgagaatgaatggacccatgggagctggaaattcagttaggatggaggcgggatttcctatggcaagtggtccaggaataataaggatgaacaaccctgccactgttatgatacccccgggtggaaatgtgtcatcttccatgatggcaccaggccccaatccagagctgcagcccaggactcctcgccctgcttctcagtcagatgcaatggatccactcctctctgggctccatatacagcagcaaagtcatccctcaggatctttagctcccccacatcacccaatgcagcctgtctctgtgaacagacaaatgaacccagctaattttccccagctgcagcagcagcagcaacaacaacaacagcagcagcagcagcagcagcagcaacaacagcaacagcagcaacaacagttgcaggcaagacccccacagcaacatcagcagcaacagccacagggaattcgaccccagtttactgccccaactcaggtgcctgttcctccaggctggaaccagctgccttctggagcccttcaacctcctccagcccagggttctctgggcacaatgactgcaaaccaagggtggaagaaggctcccttgcccggcccaatgcaacagcaactccaggcaagaccatccttagccacggtacagacgccttcccaccctccccctccatatccctttggcagccagcaagcctcacaagcccacacaaactttcctcagatgagcaacccaggccagttcacagctcctcagatgaagagtttgcagggagggccctctagggtcccaactcccttgcagcagccccacctcaccaacaagtctcctgcctcctcaccctcctccttccagcagggatcccctgcatcctccccaacggttaaccaaactcagcagcagatgggaccaaggccacctcaaaataacccacttccccagggatttcagcagcctgtcagctctccgggtcggaatcctatggttcaacagggaaatgtgccacctaacttcatggtgatgcagcagcaaccaccaaaccaggggccacagagtttacatccaggcctaggaggaatgcctaaacgcctcccacctggcttctcagcaggacaggccaatccgaactttatgcaaggtcaggtgccttcgaccacagcaaccacccctgggaattcaggagcccctcagctgcaagcaaatcaaaatgtccagcatgcaggtggtcaaggagctggtcctcctcaaaaccagatgcaggtgtcccacgggccgccaaatatgatgcagcccagcctcatgggaattcatggcaacatgaacaatcagcaggctggtacttctggggttcctcaagtgaacctcagcaacatgcaaggccagccccagcagggcccaccatctcagctgatgggcatgcaccagcaaatcgtgccctcccagggccagatggtccagcaacaaggaaccttgaaccctcagaaccctatgatcctttcaagggcccagcttatgccacagggccagatgatggtgaaccccccgagccaaaatcttgggccctcgccccaaaggatgaccccacccaagcagatgctttcccagcagggcccacaaatgatggcgccacataaccagatgatggggcctcaggggcaggttttgctccaacagaacccaatgatagagcagattatgaccaatcaaatgcaggggaataagcagcagtttaacactcagaaccagtccaatgtcatgccgggaccagcccagataatgaggggaccaactccgaacatgcaaggaaatatggtgcagtttacgggacagatgtcaggacagatgctgccccagcaagggcctgtgaacaacagtccatctcaggttatgggcattcagggacaggtcctgcggccaccagggcccagcccacacatggcccagcagcatggtgatcctgctactacagcaaataacgatgtcagtttatctcagatgatgcctgatgttagcattcaacaaaccaacatggtcccccctcatgtgcaggccatgcagggaaacagtgcctcgggaaaccacttctcaggccatgggatgtctttcaatgcacctttcagtggagctcccaatggaaatcagatgtcctgtggtcaaaatccaggcttcccagtcaataaggatgtcacgctaacgagcccattgttggtcaacttattgcagagtgacatatctgcaggccattttggggtaaacaataagcaaaataataccaacgcaaataaaccgaagaagaagaaaccccctcggaagaagaaaaatagtcagcaagatctaaacaccccagatactcgcccagctggtctggaagaggctgatcagccaccgttgcctggagaacaaggaattaacttggataactcaggccctaaactgccagaattttcaaaccggccaccagccccgtcgcagaatttagtctcaaaggaaacttcaaccacagcactgcaggcctctgttgccagaccagagctggaggtaaatgctgccatagtctctggacaaagcagtgagcccaaagagatagttgaaaagtccaaaatcccaggccgaagaaactcccgaactgaagagccaactgtggcctctgaaagtgtggaaaatggacatcgtaaacgatcttctcgacctgcttcagcctccagctctactaaagacataaccagtgcggtgcaatccaagcgaagaaaatccaagtaaacaagcaggactgcgacttgatacttggaaatgtgtgtgacttttacaaagagcaattttgagctgtgacttttttaaatcaatttctgtacagttagtaattttaataatgtggcccttttcctagtccctgcaacctgtttcataaagtgcaatggggaaagcaggactgttgagcccttttggtgttgcgagttgaagttcaaggtttctaaaatgttgtcttgtattgaaaggagctaatgccattataaatgttactagttttcacatttcctaagcagcctagagtacagggtgagcatttttagatctcctaatgatgtattgtgccgtggaagtactgtgtgtgaatagcagtagtgggggcaaaagcaatcttctcatttggaaatgttgtaaataattttattatatagtgttttggatgtatttgttgtagaaatggaccagtgaataaagagaatctaaggatttgtacaatgtgaaataacgtgttaaataaatgtcattgtcatagaacataaagttatgttattggtaaggga

SEQ ID NO: 336338 - DNA, 83 bp, Homo sapiens
atttctagaaatattttaaggtcccttagctgtaaattgtatttgattagtttttttttatactaaggtataaaatttacaaa

SEQ ID NO: 336339 - DNA, 170 bp, Homo sapiens
tcaccgctgtcctgtctggtttgcagatccttctggccgggcttcagttcatctgtattctgcctggaatgcagcattccttaggtggcctggccgctgcatactctctcccttcctcctggatggcgtccttctagcctcacagcctgagatagaatttctttactaca

SEQ ID NO: 336340 - DNA, 2221 bp, Homo sapiens
cgccggcagagaccagccggcgggtggcggcggcccccagcacggccggtgcaaggcctcgggttaagcggcggccgagcggggctcggcccggggtgctcggggagctcgccgcggcgggcagcaggaggaagcggcggcggcgcgtcccgagcggtgcgcgccatggcgggcgggccccccaaggccctgccgtccacggggccccactccctgcgcgacatgccgcacccgctggccggctccagcagcgaggaggccgtgggtggtgacagcacgcccagcccggacctgctgatggcccgcagcttcggtgacaaggatctcattttgcccaacggtggtactccagcaggtacttcaagtccagcttcttcatcttcccttctcaacagacttcagcttgatgatgatattgatggtgagactagagatctcttcgttatagttgatgatcccaagaagcatgtgtgtacaatggagacttacatcacctataggatcaccaccaaaagtactcgggtggagtttgacctgccagaatattctgttcgtcgaagataccaggattttgactggttgaggagcaaactggaagaatcccagcccactcatctcattccccctcttcccgagaagtttgtggtaaaaggtgttgtggatcgtttttcagaagagtttgtggagaccagaagaaaagctttggataaatttctaaaaagaattacggaccatcctgtgctgtctttcaatgaacactttaatattttccttactgctaaggacctgaacgcctacaagaagcaagggatagcattgctgaccagaatgggcgagtcagtcaagcacgtcactggcggctacaagctgaggactcggccgcttgagtttgctgccataggtgactacttagatacatttgcactcaaactgggaaccattgatcgaatagcccagcggatcatcaaagaagaaatagagtaccttgtggagctgagagaatacgggcctgtgtactccacatggagcgccttggagggtgagctggctgaacccctggagggtgtgtcagcttgcattgggaactgctctacagccttagaagagctgacagatgacatgacagaagacttcctacctgtgctcagggaatatattttatactctgactccatgaagagtgtattgaagaagagggaccaagttcaagcagagtatgaagccaaactggaagctgtggctctgcggaaggaagaccgccccaaggtaccggcggacgtcgagaaatgtcaggatcggatggagtgtttcaatgctgacctgaaagctgacatggagaggtggcagaacaacaagaggcaggacttccggcagctactcatggggatggctgacaagaacatccagtattatgagaagtgcctcatggcgtgggagtcgattattccactactgcaggagaaacaagaggccaagtaaagttctttcttgggacggagactcttctacctacacagggcctggcaccctataccggaatgtccctgcagtgccagagacgcagtgctgggaaaacaaccacagaaacatctctcctttgtgtatttttccctcccccacctttcaccccacagtggttttcaattagtatttattccatggtggagtctgtgaggctagaatatctctcagcaagagcagcatacctccatgttatgaaggcatctgttcagtgaagcactacgaaaatttgaaaccaagggacaagacaacctgcagctgacgctctgacatttcatgacagtttcctctttagggacagctgagttgccagttgtgggagagaacccggggcctgcttttcaaggatgaggaggaggcaggaacagaaggcagctgctgctttctgtggaaacctggcccctctggaattggcctctgtgggcattgacttgtcttggcctaggaggcattggtgcctccctggcaagtccttaacgtacagtacctgtagctgtgagtgtggcctgctgcctgcttgtgatgagtgataccgtcttactgtttctgtttcacatagggacatttaaatcaatgtcaatgtgcgtccatgcttgagtgagcaagccagcgtccttgtcctcctgcaatgcctttgggaagctcaggggaatgctccccaagcttgtttctgacactagaatgcaacagattggaaact

SEQ ID NO: 336341 - DNA, 387 bp, Homo sapiens
gcaggcatcattagacaaaggtaacccagcaggatcgacaacgaaagggtaggtcagagcagaattgaagctgacccgaaatcggaaactcaaagctgatactgtgtgtgtatgttgtcgttccagtgcctcatggcgtgggagtcgattattccactactgcaggagaaacaagaggccaagtaaagttctttcttgggacggagactcttctacctacacagggcctggcaccctataccggaatgtccctgcagtgccagagacgcagtgctgggaaaacaaccacagaaacatctctcctttgtgtatttttccctcccccacctttcaccccacagtggttttcaattagtatttattccatggtggagtctgtgaggctag

SEQ ID NO: 336342 - DNA, 1460 bp, Homo sapiens
cgccggcagagaccagccggcgggtggcggcggcccccagcacggccggtgcaaggcctcgggttaagcggcggccgagcggggctcggcccggggtgctcggggagctcgccgcggcgggcagcaggaggaagcggcggcggcgcgtcccgagcggtgcgcgccatggcgggcgggccccccaaggccctgccgtccacggggccccactccctgcgcgacatgccgcacccgctggccggctccagcagcgaggaggccgtgggtggtgacagcacgcccagcccggacctgctgatggcccgcagcttcggtgacaaggatctcattttgcccaacggtggtactccagcaggtacttcaagtccagcttcttcatcttcccttctcaacagacttcagcttgatgatgatattgatggtgagactagagatctcttcgttatagttgatgatcccaagaagcatgtgtgtacaatggagacttacatcacctataggatcaccaccaaaagtactcgggtggagtttgacctgccagaatattctgttcgtcgaagataccaggattttgactggttgaggagcaaactggaagaatcccagcccactcatctcattccccctcttcccgagaagtttgtggtaaaaggtgttgtggatcgtttttcagaagagtttgtggagaccagaagaaaagctttggataaatttctaaaaagaattacggaccatcctgtgctgtctttcaatgaacactttaatattttccttactgctaaggacctgaacgcctacaagaagcaagggatagcattgctgaccagaatgggcgagtcagtcaagcacgtcactggcggctacaagctgaggactcggccgcttgagtttgctgccataggtgactacttagatacatttgcactcaaactgggaaccattgatcgaatagcccagcggatcatcaaagaagaaatagagtaccttgtggagctgagagaatacgggcctgtgtactccacatggagcgccttggagggtgagctggctgaacccctggagggtgtgtcagcttgcattgggaactgctctacagccttagaagagctgacagatgacatgacagaagacttcctacctgtgctcagggaatatattttatactctgactccatgaagagtgtattgaagaagagggaccaagttcaagcagagtatgaagccaaactggaagctgtggctctgcggaaggaagaccgccccaaggtaccggcggacgtcgagaaatgtcaggatcggatggagtgtttcaatgctgacctgaaagctgacatggagaggtggcagaacaacaagaggcaggacttccggcagctactcatggggatggctgacaagaacatccagtattatgagaagtccattgcagatctgaagtgatggcctagggagagagcagg

SEQ ID NO: 336343 - DNA, 373 bp, Homo sapiens
gtctagccgcaactatcagagccagggtccccttccctgtgcccgcttctgtcattgtcctccccatcagtgctgtgatgctctgggaggacatcacccacgatgatgcacctttattctcacacgtgctgcaaggccagacagcacagaaatgttaatttaggcagtagatgcaaaagacctccctgcaaattaagggccttcagacctagacagactggaataggatcctcaaactggtttgatttggctgtgaccttggacaagccacctagcctctctgctttggagggtcacgaggattgacgagatgacatgtataacaaacatcctcctctttcccacttgctggattgtaagtgttcccaaagac

SEQ ID NO: 336344 - DNA, 404 bp, Homo sapiens
aatcagtgataaagtacatttaccaaaaagagaaataaaataatcagctgcttaaatggcattttccagacaatcaaagcctgcaaagctgaaatgacacaagtcactaggcttctgaggatgtgaggaaggagtgaatggttctctgtacaccgacataaaaccagcattcatcaagagaaaatagacaggtggaatatcacctgtagcaatactctagttgtcagaaataacatccctacttgaagagctagaagcccttccacttgcaggaagagtcttagccatatggtattccccaaagccacggagagaatgaaaaataaatgatgtggcaaactgtatttaaacactgctatttccagacaagttttaaaacaagcaaaactcaaaatgtgaacctt

SEQ ID NO: 336345 - DNA, 866 bp, Homo sapiens
gggggaatataaattgttaccaacactggaaaaaccattcagcattgtgtataatagttgaccttttataaagctcaaaagcaacccaaatgagataatatataggcatgaatacctagctagtagaactgtaataaaatataaacacaaaattcaaattagtaaattacctttgatctgggaaggtaagggaatgggattcagatagatatcaattactatcactgttctagtttttgaagtgaggtgaagttttttttgttttttgagatggagtctctttctgtcacccaggctagaatgcactggtgccatcttggctcactgcaacctctgcctcccaggttcaagtgattctcctgcctcagcctcccgagtagctgggactataggcacgtgccaccacgcccgggtaattttttttttgtatttttagtagagaggtggttttgtcacgttggtcaagctggtctcgaacgcctgacctcaggtgatccacccgcctcagcctcccaaagtgctggaattacaggcgtgagagaggtgaagtttttgaagtgaagtgacacactcattaaatacaatttttaaagggatatgacaagctacaaaatggaagaaaatatttgcatatgatatatctgaagaggttctagcatccaagatatataactcttacaactcaataacaacaaaaaccctaatttaaaaaatgggtgactgggcacggtagctcatgcctgtaatcctagcactttgggaggccaaggcaggcaggtcacctgaggtcaagagttagagaccagactggccaacatagtgaaaccccatctctactaaaaatgcaaacattagccaggcgtggt

SEQ ID NO: 336346 - DNA, 487 bp, Homo sapiens
agcggccgcctactactactaaattcgcggccggtcgacttttttttgtatttttagtagagaggtggttttgtcacgttggtcaagctggtctcgaacgcctgacctcaggtgatccacccgcctcagcctcccaaagtgctggaattacaggcgtgagagaggtgaagtttttgaagtgaagtgacacactcattaaatacaatttttaaagggatatgacaagctacaaaatggaagaaaatatttgcatatgatatatctgaagaggttctagcatccaagatatataactcttacaactcaataacaacaaaaaccctaatttaaaaaatgggtgactgggcacggtagctcatgcctgtaatcctagcactttgggaggccaaggcaggcaggtcacctgaggtcaagagttagagaccagactggccaacatagtgaaaccccatctctactaaaaatgcaaacattagccaggcgtggt

SEQ ID NO: 336347 - DNA, 275 bp, Homo sapiens
ggggcacaagagactatttaggggtttctttcaaagagaggaaaagatagaaaagggtctcctggaacacagcccattaaactgcagcgtgaaatctctcttaagcaaaattaaaattcctcctaaatactaaacagcagaagcggccttttcttttcccccgatttgaacctgtctgccactgcgttattgtttattctcttccatttatttggagagaaaaaaatcataaacgttcaaagactgttaccgtttcatgactacttaaatagaaa

SEQ ID NO: 336348 - DNA, 563 bp, Homo sapiens
gtaacctagagttgagagatggaggaagagatacagaatctggatggctatgctctgatcctgtaatccgactatgcctgaatgtggatctaccttccaaaggacttctccagctccatttacagtctggctcctgggcctttggatcccagcagtgtccgagcaggagctcaaaggacagccccaccatgggggatcagccctagaagctgtcactacatctccaacggacgcaactattttccaggaacaccgggggagagagccaacaacagcacagtggccccggaccgtgacccttggactgaaggaacctacagatgtggttttttttggtgacattttacatgcaactccagatttcaaactcttttggagaagcaggcaatctggcaacagtcgttttggattctcagaaggcaataaagaacagctgccaccttccgaggggcacggtggatgccctgttctgccagaattgccaacacgtttatcgtcttagacttgcccaaggtgtcgcagttagagactgcctcccttattcacgctcctgcctggtgccc

SEQ ID NO: 336349 - DNA, 780 bp, Homo sapiens
gtaacctagagttgagagatggaggaagagatacagaatctggatggctatgctctgatcctgtaatccgactatgcctgaatgtggatctaccttccaaaggtagggtgcttttcgtttgtttgagccatctggtgtcagatgttctgtcacttactaccttgttataattaatagaggagctcaaagagctataaatatctaaggaggaagagttcaggttgcaaagccttcctagacaaggttgcttcaaaggaaggtctgaaaggaagaatgggaggcaggcaggctgcaaagggagagaaaattcagggaaggagaagaccaggaacagaggcctgagatatgagagcctggtactatggactggatgcttgtggctccccccttccccctaatcgacttgttgaagcccagtccccattgtgatggcattaggtggtgtggcctctggaaagtaattaggccatgagggtgaatccctcatgaatgggattagtgtcttcatgaaaagacaggagagagcttgctttctatcctctctgccatgtgaggacacaacgagagaatggtcatctgcaaacgaggaagaggtcccttaccagagccgaccatgctggcgccctgatctgacttcccggcctctagaacagtgagaaataaatctctgttgtctaagccacccagtatatagtcatttataacagcacagagtgactgagacacctggggtgggggtgtttggggaatcatatttaattaagcctatttggttagagt

SEQ ID NO: 336350 - DNA, 394 bp, Homo sapiens
ctcggcctggagtgctgggattacaggcgtgagccaccgcgcccggcttatcttgtgtttaatcttttcctcctctctcctgctaggcgatccacacaggcctccttgctgtttctcagaggtagagctctgatctcagctttatagctactatttcttaaatgctcttcctccagttaactgtatataatggtgcctcactcattcaaatctttgctcacatatacttcagcaatgaagcttgccctgaccatcgtttttagagttaagcttctctatcccagcataaatctatcccagaataaatctcctcaaatattttacagggtttgactgtttttgtcgacataagtctaaggtttttgacctgaatgtgtggtgactcttgcttgta

SEQ ID NO: 336351 - DNA, 286 bp, Homo sapiens
cctgctggtgtcatcctcctgcatggaggccccctccccacagtgcctggagttacagcattgccctgccaagccagcagctactacccgccatcactatcaacaccttgaaaagttggtggtccagagaaaatcctcacacagcaccgcagacctttcctgaagtctccctgcctccttccctggcctcctgctgcctccttcccaggccatcacctacctgtttgctgaagagccccagtttctagcccaacagatctctccctgccatttctcccagatgcct

SEQ ID NO: 336352 - DNA, 269 bp, Homo sapiens
tcccctcattgctgaaaggaagctttctagttatagagatgcatttacagtgactttttcccaagtgaaccatctcctactttttatctgataaaatctagtacaatatttaatactcagttgtgaaaattaggtgtcttgagaagattgagaatgtgggtttgatataatgattctgaattgcttaaaaatgatttttccttttagaggttagtgggacctaattcatctaaatgacagttaataaaagttagatgaactttaattgt

SEQ ID NO: 336353 - DNA, 425 bp, Homo sapiens
agttactgtggatattgaacgagccttgcatcccaggggtaaagcccacctgaccatgatgtatcacattttaaagtgcttctggattcaatttgatggtattttgttgaggactttcaggtctatgttcatcaggactattgatctcatttttttttgtcattatgtctctcctgattttgtgtgccaagagcacacagtagagaaaggacagtcttttcaataatggtgtaaaactggcattcatatgcaaaagaaataaaattaggccttctctaactccatataaaaaaatcaactaataggccgcgcgcggtggctcacgcctgtaatcccagcactttgggaggccgaggcgggcggatcacgaggtcaggagatggagaccacagtgaaaccccgtctctactaaaaatacaaaaaaa

SEQ ID NO: 336354 - DNA, 295 bp, Homo sapiens
ccaccaacactggcccctctcttttaaagctaacaccctcaaaaatcaaacaccagatcatttaattatattgtttttaagcttgctctcccttcctccccattatattgaaaaattgtgtagcggtatcaaaacttgtttgaaagagacattcccttgcctgggcatggtggctcatgtctgtaatcctggcactttgcagggctgaggctggcagatcgcctgagcccaggagttccaagaccagcctgggcaacatggtgaaaccttgtctgtactaaaatacaaaaaaatc

SEQ ID NO: 336355 - DNA, 183 bp, Homo sapiens
caaaatatatccttgggcagcgacagagtggttgctcgctgagatgctggagacccccatcaggagcgggggttaccaagcccaaaactgctcagaacatgcccaaaagaaccagggccaggttcagaaaaatatggaccccaggacccggtgagatgacttttgaatcaaagttgaagttgg

SEQ ID NO: 336356 - DNA, 199 bp, Homo sapiens
cgactctttggatccccctgctcccggggagtacaaagaacctgcatgtcctaataggaatttgctgaaagtggcctcagacctggaggagggtatgtagaagaaaaagagcaaagcagactaggctggaggatgcggcatcctcagccagctgggcactgccagcctccagccctgccttgtctggcacttgcttttt

SEQ ID NO: 336357 - DNA, 411 bp, Homo sapiens
ctgaagacgttccctaagcatgtggccaagagactgccaccatatacacactgaagacgttccctaagcttgtggctaagggaccgccgccatgtacacacttaagacgttccctaagaatgcggccaagggaccgccaccatgtacacactgaagacgttccctaaaaatgcagggaagggacagcactaaagatgttccctaggcatgtggccaagggaatgcactgaagatgttccctaagcatgcagccaaagaactgccaccatgtatacactgaagacattccctaggaatgtgggtgagggactgctaccatgtgcacactgaagatgttccctaagaatgcaaccaagggaccactgctgtgtgcagtgaagacactccctaagtatgtggcttaagggacct

SEQ ID NO: 336358 - DNA, 139 bp, Homo sapiens
ctcagatactcctcatagtgggacattctcagattagcaaacaaaaattaaaagaagaatgattaaatctaattatattcagcatgtttttcagagtactgagtggaagagtgacttttaacttgacatctagattttt

SEQ ID NO: 336359 - DNA, 182 bp, Homo sapiens
caggagattataatctagcagcactctccttgttttcaggggtgcagtccagttagcccatgttagcactgatataaatttgggggaagacagcaattatgctcttctcactcattctgtattctaggtacccaactccagaggatctaactggccaaaagcaatggtacagctctgggcct

SEQ ID NO: 336360 - DNA, 231 bp, Homo sapiens
cattccattcaagtttccttcctgacccgtttcacctcctgcactgtgaagctggagatccccactcccaccgcccaattctgttcttggttctcttctcagtttttggtgtcctccacttccccttccgcctctagactaaacaatctggcccaaactgatgtcccagaacactcttgtgtactaaacagcttcaggtgcagctaactactgggcactttcatctctaac

SEQ ID NO: 336361 - DNA, 242 bp, Homo sapiens
gaataagatggtagaatacctgacagactgggttatgggaacatcaaaccaagcagcagatgatgatgtaaaatgtcttacaaggcatcaggtacctgaaaaagaagagatcaaggctttgaaaacgttaagtattttctaccaagctggggcttccaaagctgggaatcctattttttattatgctgcacggggcccaacagaataaaaagaccatgagaaaggatatttgcaaaacatct

SEQ ID NO: 336362 - DNA, 333 bp, Homo sapiens
gtctatcgatataacccagcaatactagacattaaaatcagatgttcatgagacccaaagccttttttaaaaactccaatgaattaattctacagacccaacttctatctttttttaatcccttttttcactttctgtattatccaaggcctgtgggacatctcaccaacagaggttattctctcattagaatacaagatctcagatgtataacgcccaccagtctcctggcttgagtttggctaattatttctgtgggattttcatttgtttggctgttaagctaggaatgttctgcttgtctgctggcatttttttttttttttttttttt

SEQ ID NO: 336363 - DNA, 391 bp, Homo sapiens
ccacggggggcgtatctttcccattggaaaagtgtggttattggaagtttcctctttttagaaagaacaggattggaggtgctctctggggtgtcctcctaccaagctgactgttgaagcccttgtggtgctcagggaggatgggtgacactcgctgttgcttcagcttcatcttgagcccacacagcatctccactacccaggtctcctcaggctcaggggcgagctccttctccggctcctccgcagattcatctgaccactccctcttccttttccagccaagggacctacatggggggctgggatctaccccaggggctgagtaaagaaaccaggccaccgtgtaatgcttctgcatctgatcaccttagaccccgacccaaaaccc

SEQ ID NO: 336364 - DNA, 111 bp, Homo sapiens
ttacagagcttgaatgaataaatatgtagctgttaatattctaaaatttcaaagtctaatgctatagtcaatgaaagcattcatgaaacattaaattgtgggcggctggct

SEQ ID NO: 336365 - DNA, 3043 bp, Homo sapiens
cgaagtgtggcggcccggcgcggcgctcccggcctgccccgcgtgcacgctgacgccgcgcagtctcgtcccctgccgccgccgtcgccgctgctgtcgccgccgccgccgccattggagtcgacgcctcctcagtgcgtccgcgtcccgggctcaccgccgctgccgcctcgccaggggcccgcgcgcccagcagccgccgccgccgcccggccggcgcccggggaattggcggcggggcccggggccgcgcgagctagggtgacaggcccggcctctaggggaggcccgagccggcgggcgccccggccccgcgtctagttgttcatgaagcatgtcggccaccagcgtggacacccagagaacaaaaggacaagataataaagtacaaaatggttcgttacatcagaaggatacagttcatgacaatgactttgagccctaccttactggacagtcaaatcagagtaacagttacccctcaatgagcgacccctacctgtccagctattacccgccgtccattggatttccttactccctcaatgaggctccgtggtctactgcaggggaccctccgattccatacctcaccacctacggacagctcagtaacggagaccatcattttatgcacgatgctgtttttgggcagcctgggggcctggggaacaacatctatcagcacaggttcaattttttccctgaaaaccctgcgttctcagcatgggggacaagtgggtctcaaggtcagcagacccagagctccgcgtatgggagcagctacacctaccccccgagctccctgggtggcacggtggttgatgggcagccaggctttcacagcgacaccctcagcaaggccccctccacccataaagcataacatggacattggcacctgggataacaaggggcctgtgccgaaggccccagtcccccagcaggcaccctctccacaggctgccccacagccccagcaggtggctcagcctctcccagcacagcccccagctttggctcaaccgcagtatcagagccctcagcagccaccccagacccgctgggttgccccacgcaacagaaacgcggcgtttgggcagagcggaggggctggcagcgatagcaactctcctggaaacgtccagcctaattctgcccccagcgtcgaatcccaccccgtccttgaaaaactgaaggctgctcacagctacaacccgaaagagtttgagtggaatctgaaaagcgggcgtgtgttcatcatcaagagctactctgaggacgacatccaccgctccattaagtactccatctggtgtagcacagagcacggcaacaagcgcctggacagcgccttccgctgcatgagcagcaaggggcccgtctacctgctcttcagcgtcaatgggagtgggcatttttgtggggtggccgagatgaagtcccccgtggactacggcaccagtgccggggtctggtctcaggacaagtggaaggggaagtttgatgtccagtggatttttgttaaggatgtacccaataaccagctccggcacatcaggctggagaataacgacaacaaaccggtcacaaactcccgggacacccaggaggtgcccttagaaaaagccaagcaagtgctgaaaattatcagttcctacaagcacacaacctccatcttcgacgactttgctcactacgagaagcgccaggaggaggaggaggtggtgcgcaaggaacggcagagtcgaaacaaacaatgagggcgaaccagtttcttacatgttctaacgtttgactttgaaaacagtttaaaacacgtgtgcttggtcagctccagtgtgtcgtcccgtgcgggggttgagtgttgcatctttgcctttcttgtcgttgatttttgcccagatggatctgcatttatttgtactttttctatgtattataatcctgtagaagtcactaataaaggagtattttttttgtcagcttatcaatcagactgatctaatgtgaaatgtaagtatccttaaaaacaaagcatctattttggcagaaattgtgttcttaaattcagtcatttgatattctgtgagacttcatatttctcatccctttattgctttttagcaaacataagaaaccatgagtcattttgtcatttagagtattctgataaaatctcttgaaaatactgaaatcaaaaggttaatgattttttgttcattctgatttgtcattttattatctgttatcggtctaaagtgctaatttacccatttgatttttctgctagacagataacttttaatttttcaaatttggcagacacttttttttttttttttgaaaatctttccttccagatctgttgcccactgaacagccacccgtccctcactgtcctggtgtccgattgggctggatggtgttggggcatgatgtgtggaggaactggaaggtgctttaggtctggttcagggtcgggcattctttgttgtttgcacatctttttaaattttacaccttttcttaagaattctaatgccgtcttaagtttttataccaataatgctgagctttaagtgtaggatctggtagtacagacagtgtgatggatgatgctgctggttgtaaatttcatcgtgtgtgtctaattttttttcctgttgaatgggtaaaaacaaaacaaaactttttttagaagatgaatttgctgtcatgttttgtggaatgagggaccgttgagctcactaccacctggagtttgagttgaagcatgaaaatggtgcccatgcctgacgctccagcgcctggatctgcacgtgcccttgtagaggatccttaccgtcctagagagcagacgctttctgaaaactacttgctccaaaagaccctctgagttaacgtttcagctgtatcattagacttgtatttagagcgtgtcacttcctctgaactgttactgcctgaatggagtcctggacgacattgggtttttcctctaggagaatacaagccttaataaacaatactatttagcaaa

SEQ ID NO: 336366 - DNA, 3239 bp, Homo sapiens
cgaagtgtggcggcccggcgcggcgctcccggcctgccccgcgtgcacgctgacgccgcgcagtctcgtcccctgccgccgccgtcgccgctgctgtcgccgccgccgccgccattggagtcgacgcctcctcagtgcgtccgcgtcccgggctcaccgccgctgccgcctcgccaggggcccgcgcgcccagcagccgccgccgccgcccggccggcgcccggggaattggcggcggggcccggggccgcgcgagctagggtgacaggcccggcctctaggggaggcccgagccggcgggcgccccggccccgcgtctagttgttcatgaagcatgtcggccaccagcgtggacacccagagaacaaaaggacaagataataaagtacaaaatggttcgttacatcagaaggatacagttcatgacaatgactttgagccctaccttactggacagtcaaatcagagtaacagttacccctcaatgagcgacccctacctgtccagctattacccgccgtccattggatttccttactccctcaatgaggctccgtggtctactgcaggggaccctccgattccatacctcaccacctacggacagctcagtaacggagaccatcattttatgcacgatgctgtttttgggcagcctgggggcctggggaacaacatctatcagcacaggttcaattttttccctgaaaaccctgcgttctcagcatgggggacaagtgggtctcaaggtcagcagacccagagctccgcgtatgggagcagctacacctaccccccgagctccctgggtggcacggtggttgatgggcagccaggctttcacagcgacaccctcagcaaggcccccgggatgaacagcctggagcagggcatggttggcctgaagattggggacgtcagctcctccgctgtcaagacggtgggctctgtcgtcagcagcgtggcactgactggtgtcctttctggcaacggtgggacaaatgtgaacatgccagtttcaaagccgacctcgtgggctgccattgccagcaagcctgcaaaaccacagcctaaaatgaaaacaaagagcgggcctgtcatggggggtgggctgccccctccacccataaagcataacatggacattggcacctgggataacaaggggcctgtgccgaaggccccagtcccccagcaggcaccctctccacaggctgccccacagccccagcaggtggctcagcctctcccagcacagcccccagctttggctcaaccgcagtatcagagccctcagcagccaccccagacccgctgggttgccccacgcaacagaaacgcggcgtttgggcagagcggaggggctggcagcgatagcaactctcctggaaacgtccagcctaattctgcccccagcgtcgaatcccaccccgtccttgaaaaactgaaggctgctcacagctacaacccgaaagagtttgagtggaatctgaaaagcgggcgtgtgttcatcatcaagagctactctgaggacgacatccaccgctccattaagtactccatctggtgtagcacagagcacggcaacaagcgcctggacagcgccttccgctgcatgagcagcaaggggcccgtctacctgctcttcagcgtcaatgggagtgggcatttttgtggggtggccgagatgaagtcccccgtggactacggcaccagtgccggggtctggtctcaggacaagtggaaggggaagtttgatgtccagtggatttttgttaaggatgtacccaataaccagctccggcacatcaggctggagaataacgacaacaaaccggtcacaaactcccgggacacccaggaggtgcccttagaaaaagccaagcaagtgctgaaaattatcagttcctacaagcacacaacctccatcttcgacgactttgctcactacgagaagcgccaggaggaggaggaggtggtgcgcaaggaacggcagagtcgaaacaaacaatgagggcgaaccagtttcttacatgttctaacgtttgactttgaaaacagtttaaaacacgtgtgcttggtcagctccagtgtgtcgtcccgtgcgggggttgagtgttgcatctttgcctttcttgtcgttgatttttgcccagatggatctgcatttatttgtactttttctatgtattataatcctgtagaagtcactaataaaggagtattttttttgtcagcttatcaatcagactgatctaatgtgaaatgtaagtatccttaaaaacaaagcatctattttggcagaaattgtgttcttaaattcagtcatttgatattctgtgagacttcatatttctcatccctttattgctttttagcaaacataagaaaccatgagtcattttgtcatttagagtattctgataaaatctcttgaaaatactgaaatcaaaaggttaatgattttttgttcattctgatttgtcattttattatctgttatcggtctaaagtgctaatttacccatttgatttttctgctagacagataacttttaatttttcaaatttggcagacactttttttttttttttgtcctggtgtccgattgggctggatggtgttggggcatgatgtgtggaggaactggaaggtgctttaggtctggttcagggtcgggcattctttgttgtttgcacatctttttaaattttacaccttttcttaagaattctaatgccgtcttaagtttttataccaataatgctgagctttaagtgtaggatctggtagtacagacagtgtgatggatgatgctgctggttgtaaatttcatcgtgtgtgtctaattttttttcctgttgaatgggtaaaaacaaaacaaaactttttttagaagatgaatttgctgtcatgttttgtggaatgagggaccgttgagctcactaccacctggagtttgagttgaagcatgaaaatggtgcccatgcctgacgctccagcgcctggatctgcacgtgcccttgtagaggatccttaccgtcctagagagcagacgctttctgaaaactacttgctccaaaagaccctctgagttaacgtttcagctgtatcattagacttgtatttagagcgtgtcacttcctctgaactgttactgcctgaatggagtcctggacgacattgggtttttcctctaggagaatacaagccttaataaacaatactatttagcaaa

SEQ ID NO: 336367 - DNA, 1718 bp, Homo sapiens
cgaagtgtggcggcccggcgcggcgctcccggcctgccccgcgtgcacgctgacgccgcgcagtctcgtcccctgccgccgccgtcgccgctgctgtcgccgccgccgccgccattggagtcgacgcctcctcagtgcgtccgcgtcccgggctcaccgccgctgccgcctcgccaggggcccgcgcgcccagcagccgccgccgccgcccggccggcgcccggggaattggcggcggggcccggggccgcgcgagctagggtgacaggcccggcctctaggggaggcccgagccggcgggcgccccggccccgcgtctagttgttcatgaagcatgtcggccaccagcgtggacacccagagaacaaaaggacaagataataaagtacaaaatggttcgttacatcagaaggatacagttcatgacaatgactttgagccctaccttactggacagtcaaatcaggaacggcagagtcgaaacaaacaatgagggcgaaccagtttcttacatgttctaacgtttgactttgaaaacagtttaaaacacgtgtgcttggtcagctccagtgtgtcgtcccgtgcgggggttgagtgttgcatctttgcctttcttgtcgttgatttttgcccagatggatctgcatttatttgtactttttctatgtattataatcctgtagaagtcactaataaaggagtattttttttgtcagcttatcaatcagactgatctaatgtgaaatgtaagtatccttaaaaacaaagcatctattttggcagaaattgtgttcttaaattcagtcatttgatattctgtgagacttcatatttctcatccctttattgctttttagcaaacataagaaaccatgagtcattttgtcatttagagtattctgataaaatctcttgaaaatactgaaatcaaaaggttaatgattttttgttcattctgatttgtcattttattatctgttatcggtctaaagtgctaatttacccatttgatttttctgctagacagataacttttaatttttcaaatttggcagacactttttttttttttttgtcctggtgtccgattgggctggatggtgttggggcatgatgtgtggaggaactggaaggtgctttaggtctggttcagggtcgggcattctttgttgtttgcacatctttttaaattttacaccttttcttaagaattctaatgccgtcttaagtttttataccaataatgctgagctttaagtgtaggatctggtagtacagacagtgtgatggatgatgctgctggttgtaaatttcatcgtgtgtgtctaattttttttcctgttgaatgggtaaaaacaaaacaaaactttttttagaagatgaatttgctgtcatgttttgtggaatgagggaccgttgagctcactaccacctggagtttgagttgaagcatgaaaatggtgcccatgcctgacgctccagcgcctggatctgcacgtgcccttgtagaggatccttaccgtcctagagagcagacgctttctgaaaactacttgctccaaaagaccctctgagttaacgtttcagctgtatcattagacttgtatttagagcgtgtcacttcctctgaactgttactgcctgaatggagtcctggacgacattgggtttttcctctaggagaatacaagccttaataaacaatactatttagcaaa

SEQ ID NO: 336368 - DNA, 3240 bp, Homo sapiens
cgaagtgtggcggcccggcgcggcgctcccggcctgccccgcgtgcacgctgacgccgcgcagtctcgtcccctgccgccgccgtcgccgctgctgtcgccgccgccgccgccattggagtcgacgcctcctcagtgcgtccgcgtcccgggctcaccgccgctgccgcctcgccaggggcccgcgcgcccagcagccgccgccgccgcccggccggcgcccggggaattggcggcggggcccggggccgcgcgagctagggtgacaggcccggcctctaggggaggcccgagccggcgggcgccccggccccgcgtctagttgttcatgaagcatgtcggccaccagcgtggacacccagagaacaaaaggacaagataataaagtacaaaatggttcgttacatcagaaggatacagttcatgacaatgactttgagccctaccttactggacagtcaaatcagagtaacagttacccctcaatgagcgacccctacctgtccagctattacccgccgtccattggatttccttactccctcaatgaggctccgtggtctactgcaggggaccctccgattccatacctcaccacctacggacagctcagtaacggagaccatcattttatgcacgatgctgtttttgggcagcctgggggcctggggaacaacatctatcagcacaggttcaattttttccctgaaaaccctgcgttctcagcatgggggacaagtgggtctcaaggtcagcagacccagagctccgcgtatgggagcagctacacctaccccccgagctccctgggtggcacggtggttgatgggcagccaggctttcacagcgacaccctcagcaaggcccccgggatgaacagcctggagcagggcatggttggcctgaagattggggacgtcagctcctccgctgtcaagacggtgggctctgtcgtcagcagcgtggcactgactggtgtcctttctggcaacggtgggacaaatgtgaacatgccagtttcaaagccgacctcgtgggctgccattgccagcaagcctgcaaaaccacagcctaaaatgaaaacaaagagcgggcctgtcatggggggtgggctgccccctccacccataaagcataacatggacattggcacctgggataacaaggggcctgtgccgaaggccccagtcccccagcaggcaccctctccacaggctgccccacagccccagcaggtggctcagcctctcccagcacagcccccagctttggctcaaccgcagtatcagagccctcagcagccaccccagacccgctgggttgccccacgcaacagaaacgcggcgtttgggcagagcggaggggctggcagcgatagcaactctcctggaaacgtccagcctaattctgcccccagcgtcgaatcccaccccgtccttgaaaaactgaaggctgctcacagctacaacccgaaagagtttgagtggaatctgaaaagcgggcgtgtgttcatcatcaagagctactctgaggacgacatccaccgctccattaagtactccatctggtgtagcacagagcacggcaacaagcgcctggacagcgccttccgctgcatgagcagcaaggggcccgtctacctgctcttcagcgtcaatgggagtgggcatttttgtggggtggccgagatgaagtcccccgtggactacggcaccagtgccggggtctggtctcaggacaagtggaaggggaagtttgatgtccagtggatttttgttaaggatgtacccaataaccagctccggcacatcaggctggagaataacgacaacaaaccggtcacaaactcccgggacacccaggaggtgcccttagaaaaagccaagcaagtgctgaaaattatcagttcctacaagcacacaacctccatcttcgacgactttgctcactacgagaagcgccaggaggaggaggaggtggtgcgcaaggaacggcagagtcgaaacaaacaatgagggcgaaccagtttcttacatgttctaacgtttgactttgaaaacagtttaaaacacgtgtgcttggtcagctccagtgtgtcgtcccgtgcgggggttgagtgttgcatctttgcctttcttgtcgttgatttttgcccagatggatctgcatttatttgtactttttctatgtattataatcctgtagaagtcactaataaaggagtattttttttgtcagcttatcaatcagactgatctaatgtgaaatgtaagtatccttaaaaacaaagcatctattttggcagaaattgtgttcttaaattcagtcatttgatattctgtgagacttcatatttctcatccctttattgctttttagcaaacataagaaaccatgagtcattttgtcatttagagtattctgataaaatctcttgaaaatactgaaatcaaaaggttaatgattttttgttcattctgatttgtcattttattatctgttatcggtctaaagtgctaatttacccatttgatttttctgctagacagataacttttaatttttcaaatttggcagacacttttttttttttttttgaaaatctttccttccagatctgttgcccactgaacagccacccgtccctcactgtcctggtgtccgattgggctggatggtgttggggcatgatgtgtggaggaactggaaggtgctttaggtctggttcagggtcgggcattctttgttgtttgcacatctttttaaattttacaccttttcttaagaattctaatgccgtcttaagtttttataccaataatgctgagctttaagtgtaggatctggtagtacagacagtgtgatggatgatgctgctggttgtaaatttcatcgtgtgtgtctaattttttttcctgttgaatgggtaaaaacaaaacaaaactttttttagaagatgaatttgctgtcatgttttgtggaatgagggaccgttgagctcactaccacctggagtttgagttgaagcatgaaggatccttaccgtcctagagagcagacgctttctgaaaactacttgctccaaaagaccctctgagttaacgtttcagctgtatcattagacttgtatttagagcgtgtcacttcctctgaactgttactgcctgaatggagtcctggacgacattgggtttttcctctaggagaatacaagccttaataaacaatactatttagcaaa

SEQ ID NO: 336369 - DNA, 2609 bp, Homo sapiens
cgaagtgtggcggcccggcgcggcgctcccggcctgccccgcgtgcacgctgacgccgcgcagtctcgtcccctgccgccgccgtcgccgctgctgtcgccgccgccgccgccattggagtcgacgcctcctcagtgcgtccgcgtcccgggctcaccgccgctgccgcctcgccaggggcccgcgcgcccagcagccgccgccgccgcccggccggcgcccggggaattggcggcggggcccggggccgcgcgagctagggtgacaggcccggcctctaggggaggcccgagccggcgggcgccccggccccgcgtctagttgttcatgaagcatgtcggccaccagcgtggacacccagagaacaaaaggacaagataataaagtacaaaatggttcgttacatcagaaggatacagttcatgacaatgactttgagccctaccttactggacagtcaaatcagagtaacagttacccctcaatgagcgacccctacctgtccagctattacccgccgtccattggatttccttactccctcaatgaggctccgtggtctactgcaggggaccctccgattccatacctcaccacctacggacagctcagtaacggagaccatcattttatgcacgatgctgtttttgggcagcctgggggcctggggaacaacatctatcagcacaggttcaattttttccctgaaaaccctgcgttctcagcatgggggacaagtgggtctcaaggtcagcagacccagagctccgcgtatgggagcagctacacctaccccccgagctccctgggtggcacggtggttgatgggcagccaggctttcacagcgacaccctcagcaaggcccccgggatgaacagcctggagcagggcatggttggcctgaagattggggacgtcagctcctccgctgtcaagacggtgggctctgtcgtcagcagcgtggcactgactggtgtcctttctggcaacggtgggacaaatgtgaacatgccagtttcaaagccgacctcgtgggctgccattgccagcaagcctgcaaaaccacagcctaaaatgaaaacaaagagcgggcctgtcatggggggtgggctgccccctccacccataaagcataacatggacattggcacctgggataacaaggggcctgtgccgaaggccccagtcccccagcaggcaccctctccacaggctgccccacagccccagcaggtggctcagcctctcccagcacagcccccagctttggctcaaccgcagtatcagagccctcagcagccaccccagacccgctgggttgccccacgcaacagaaacgcggcgtttgggcagagcggaggggctggcagcgatagcaactctcctggaaacgtccagcctaattctgcccccagcgtcgaatcccaccccgtccttgaaaaactgaaggctgctcacagctacaacccgaaagagtttgagtggaatctgaaaagcgggcgtgtgttcatcatcaagagctactctgaggacgacatccaccgctccattaagtactccatctggtgtagcacagagcacggcaacaagcgcctggacagcgccttccgctgcatgagcagcaaggggcccgtctacctgctcttcagcgtcaatgggagtgggcatttttgtggggtggccgagatgaagtcccccgtggactacggcaccagtgccggggtctggtctcaggacaagtggaaggggaagtttgatgtccagtggatttttgttaaggatgtacccaataaccagctccggcacatcaggctggagaataacgacaacaaaccggtcacaaactcccgggacacccaggaggtgcccttagaaaaagccaagcaagtgctgaaaattatcagttcctacaagcacacaacctccatcttcgacgactttgctcactacgagaagcgccaggaggaggaggaggtggtgcgcaaggaacggcagagtcgaaacaaacaatgagggcgaaccagtttcttacatgttctaacgtttgactttgaaaacagtttaaaacacgtgtgcttggtcagctccagtgtgtcgtcccgtgcgggggttgagtgttgcatctttgcctttcttgtcgttgatttttgcccagatggatctgcatttatttgtactttttctatgtattataatcctgtagaagtcactaataaaggagtattttttttgtcagcttatcaatcagactgatctaatgtgaaataagatgaatttgctgtcatgttttgtggaatgagggaccgttgagctcactaccacctggagtttgagttgaagcatgaaaatggtgcccatgcctgacgctccagcgcctggatctgcacgtgcccttgtagaggatccttaccgtcctagagagcagacgctttctgaaaactacttgctccaaaagaccctctgagttaacgtttcagctgtatcattagacttgtatttagagcgtgtcacttcctctgaactgttactgcctgaatggagtcctggacgacattgggtttttcctctaggagaatacaagccttaataaacaatactatttagcaaa

SEQ ID NO: 336370 - DNA, 1335 bp, Homo sapiens
cgaagtgtggcggcccggcgcggcgctcccggcctgccccgcgtgcacgctgacgccgcgcagtctcgtcccctgccgccgccgtcgccgctgctgtcgccgccgccgccgccattggagtcgacgcctcctcagtgcgtccgcgtcccgggctcaccgccgctgccgcctcgccaggggcccgcgcgcccagcagccgccgccgccgcccggccggcgcccggggaattggcggcggggcccggggccgcgcgagctagggtgacaggcccggcctctaggggaggcccgagccggcgggcgccccggccccgcgtctagttgttcatgaagcatgtcggccaccagcgtggacacccagagaacaaaaggacaagataataaagtacaaaatggttcgttacatcagaaggatacagttcatgacaatgactttgagccctaccttactggacagtcaaatcagagtaacagttacccctcaatgagcgacccctacctgtccagctattacccgccgtccattggatttccttactccctcaatgaggctccgtggtctactgcaggggaccctccgattccatacctcaccacctacggacagctcagtaacggagaccatcattttatgcacgatgctgtttttgggcagcctgggggcctggggaacaacatctatcagcacaggttcaattttttccctgaaaaccctgcgttctcagcatgggggacaagtgggtctcaaggtcagcagacccagagctccgcgtatgggagcagctacacctaccccccgagctccctgggtggcacggtggttgatgggcagccaggctttcacagcgacaccctcagcaaggcccccgggatgaacagcgctggagaataacgacaacaaaccggtcacaaactcccgggacacccaggaggtgcccttagaaaaagccaagcaagtgctgaaaattatcagttcctacaagcacacaacctccatcttcgacgactttgctcactacgagaagcgccaggaggaggaggaggtggtgcgcaaggaacggcagagtcgaaacaaacaatgagggcgaaccagtttcttacatgttctaacgtttgactttgaaaacagtttaaaacacgtgtgcttggtcagctccagtgtgtcgtcccgtgcgggggttgagtgttgcatctttgcctttcttgtcgttgatttttgcccagatggatctgcatttatttgtactttttctatgtattataatcctgtagaagtcactaataaaggagtattttttttgtcagcttatcaatcagactgatctaatgtgaaat

SEQ ID NO: 336371 - DNA, 3294 bp, Homo sapiens
cgaagtgtggcggcccggcgcggcgctcccggcctgccccgcgtgcacgctgacgccgcgcagtctcgtcccctgccgccgccgtcgccgctgctgtcgccgccgccgccgccattggagtcgacgcctcctcagtgcgtccgcgtcccgggctcaccgccgctgccgcctcgccaggggcccgcgcgcccagcagccgccgccgccgcccggccggcgcccggggaattggcggcggggcccggggccgcgcgagctagggtgacaggcccggcctctaggggaggcccgagccggcgggcgccccggccccgcgtctagttgttcatgaagcatgtcggccaccagcgtggacacccagagaacaaaaggacaagataataaagtacaaaatggttcgttacatcagaaggatacagttcatgacaatgactttgagccctaccttactggacagtcaaatcagagtaacagttacccctcaatgagcgacccctacctgtccagctattacccgccgtccattggatttccttactccctcaatgaggctccgtggtctactgcaggggaccctccgattccatacctcaccacctacggacagctcagtaacggagaccatcattttatgcacgatgctgtttttgggcagcctgggggcctggggaacaacatctatcagcacaggttcaattttttccctgaaaaccctgcgttctcagcatgggggacaagtgggtctcaaggtcagcagacccagagctccgcgtatgggagcagctacacctaccccccgagctccctgggtggcacggtggttgatgggcagccaggctttcacagcgacaccctcagcaaggcccccgggatgaacagcctggagcagggcatggttggcctgaagattggggacgtcagctcctccgctgtcaagacggtgggctctgtcgtcagcagcgtggcactgactggtgtcctttctggcaacggtgggacaaatgtgaacatgccagtttcaaagccgacctcgtgggctgccattgccagcaagcctgcaaaaccacagcctaaaatgaaaacaaagagcgggcctgtcatggggggtgggctgccccctccacccataaagcataacatggacattggcacctgggataacaaggggcctgtgccgaaggccccagtcccccagcaggcaccctctccacaggctgccccacagccccagcaggtggctcagcctctcccagcacagcccccagctttggctcaaccgcagtatcagagccctcagcagccaccccagacccgctgggttgccccacgcaacagaaacgcggcgtttgggcagagcggaggggctggcagcgatagcaactctcctggaaacgtccagcctaattctgcccccagcgtcgaatcccaccccgtccttgaaaaactgaaggctgctcacagctacaacccgaaagagtttgagtggaatctgaaaagcgggcgtgtgttcatcatcaagagctactctgaggacgacatccaccgctccattaagtactccatctggtgtagcacagagcacggcaacaagcgcctggacagcgccttccgctgcatgagcagcaaggggcccgtctacctgctcttcagcgtcaatgggagtgggcatttttgtggggtggccgagatgaagtcccccgtggactacggcaccagtgccggggtctggtctcaggacaagtggaaggggaagtttgatgtccagtggatttttgttaaggatgtacccaataaccagctccggcacatcaggctggagaataacgacaacaaaccggtcacaaactcccgggacacccaggaggtgcccttagaaaaagccaagcaagtgctgaaaattatcagttcctacaagcacacaacctccatcttcgacgactttgctcactacgagaagcgccaggaggaggaggaggtggtgcgcaaggaacggcagagtcgaaacaaacaatgagggcgaaccagtttcttacatgttctaacgtttgactttgaaaacagtttaaaacacgtgtgcttggtcagctccagtgtgtcgtcccgtgcgggggttgagtgttgcatctttgcctttcttgtcgttgatttttgcccagatggatctgcatttatttgtactttttctatgtattataatcctgtagaagtcactaataaaggagtattttttttgtcagcttatcaatcagactgatctaatgtgaaatgtaagtatccttaaaaacaaagcatctattttggcagaaattgtgttcttaaattcagtcatttgatattctgtgagacttcatatttctcatccctttattgctttttagcaaacataagaaaccatgagtcattttgtcatttagagtattctgataaaatctcttgaaaatactgaaatcaaaaggttaatgattttttgttcattctgatttgtcattttattatctgttatcggtctaaagtgctaatttacccatttgatttttctgctagacagataacttttaatttttcaaatttggcagacacttttttttttttttttgaaaatctttccttccagatctgttgcccactgaacagccacccgtccctcactgtcctggtgtccgattgggctggatggtgttggggcatgatgtgtggaggaactggaaggtgctttaggtctggttcagggtcgggcattctttgttgtttgcacatctttttaaattttacaccttttcttaagaattctaatgccgtcttaagtttttataccaataatgctgagctttaagtgtaggatctggtagtacagacagtgtgatggatgatgctgctggttgtaaatttcatcgtgtgtgtctaattttttttcctgttgaatgggtaaaaacaaaacaaaactttttttagaagatgaatttgctgtcatgttttgtggaatgagggaccgttgagctcactaccacctggagtttgagttgaagcatgaaaatggtgcccatgcctgacgctccagcgcctggatctgcacgtgcccttgtagaggatccttaccgtcctagagagcagacgctttctgaaaactacttgctccaaaagaccctctgagttaacgtttcagctgtatcattagacttgtatttagagcgtgtcacttcctctgaactgttactgcctgaatggagtcctggacgacattgggtttttcctctaggagaatacaagccttaataaacaatactatttagcaaa

SEQ ID NO: 336372 - DNA, 2706 bp, Homo sapiens
tgaaaacaaagagcgggcctgtcatggggggtgggctgccccctccacccataaagcataacatggacattggcacctggggaacaacatctatcagcacaggttcaattttttccctgaaaaccctgcgttctcagcatgggggacaagtgggtctcaaggtcagcagacccagagctccgcgtatgggagcagctacacctaccccccgagctccctgggtggcacggtggttgatgggcagccaggctttcacagcgacaccctcagcaaggcccccgggatgaacagcctggagcagggcatggttggcctgaagattggggacgtcagctcctccgctgtcaagacggtgggctctgtcgtcagcagcgtggcactgactggtgtcctttctggcaacggtgggacaaatgtgaacatgccagtttcaaagccgacctcgtgggctgccattgccagcaagcctgcaaaaccacagcctaaaatgaaaacaaagagcgggcctgtcatggggggtgggctgccccctccacccataaagcataacatggacattggcacctgggataacaaggggcctgtgccgaaggccccagtcccccagcaggcaccctctccacaggctgccccacagccccagcaggtggctcagcctctcccagcacagcccccagctttggctcaaccgcagtatcagagccctcagcagccaccccagacccgctgggttgccccacgcaacagaaacgcggcgtttgggcagagcggaggggctggcagcgatagcaactctcctggaaacgtccagcctaattctgcccccagcgtcgaatcccaccccgtccttgaaaaactgaaggctgctcacagctacaacccgaaagagtttgagtggaatctgaaaagcgggcgtgtgttcatcatcaagagctactctgaggacgacatccaccgctccattaagtactccatctggtgtagcacagagcacggcaacaagcgcctggacagcgccttccgctgcatgagcagcaaggggcccgtctacctgctcttcagcgtcaatgggagtgggcatttttgtggggtggccgagatgaagtcccccgtggactacggcaccagtgccggggtctggtctcaggacaagtggaaggggaagtttgatgtccagtggatttttgttaaggatgtacccaataaccagctccggcacatcaggctggagaataacgacaacaaaccggtcacaaactcccgggacacccaggaggtgcccttagaaaaagccaagcaagtgctgaaaattatcagttcctacaagcacacaacctccatcttcgacgactttgctcactacgagaagcgccaggaggaggaggaggtggtgcgcaaggaacggcagagtcgaaacaaacaatgagggcgaaccagtttcttacatgttctaacgtttgactttgaaaacagtttaaaacacgtgtgcttggtcagctccagtgtgtcgtcccgtgcgggggttgagtgttgcatctttgcctttcttgtcgttgatttttgcccagatggatctgcatttatttgtactttttctatgtattataatcctgtagaagtcactaataaaggagtattttttttgtcagcttatcaatcagactgatctaatgtgaaatgtaagtatccttaaaaacaaagcatctattttggcagaaattgtgttcttaaattcagtcatttgatattctgtgagacttcatatttctcatccctttattgctttttagcaaacataagaaaccatgagtcattttgtcatttagagtattctgataaaatctcttgaaaatactgaaatcaaaaggttaatgattttttgttcattctgatttgtcattttattatctgttatcggtctaaagtgctaatttacccatttgatttttctgctagacagataacttttaatttttcaaatttggcagacacttttttttttttttttgaaaatctttccttccagatctgttgcccactgaacagccacccgtccctcactgtcctggtgtccgattgggctggatggtgttggggcatgatgtgtggaggaactggaaggtgctttaggtctggttcagggtcgggcattctttgttgtttgcacatctttttaaattttacaccttttcttaagaattctaatgccgtcttaagtttttataccaataatgctgagctttaagtgtaggatctggtagtacagacagtgtgatggatgatgctgctggttgtaaatttcatcgtgtgtgtctaattttttttcctgttgaatgggtaaaaacaaaacaaaactttttttagaagatgaatttgctgtcatgttttgtggaatgagggaccgttgagctcactaccacctggagtttgagttgaagcatgaaaatggtgcccatgcctgacgctccagcgcctggatctgcacgtgcccttgtagaggatccttaccgtcctagagagcagacgctttctgaaaactacttgctccaaaagaccctctgagttaacgtttcagctgtatcattagacttgtatttagagcgtgtcacttcctctgaactgttactgcctgaatggagtcctggacgacattgggtttttcctctaggagaatacaagccttaataaacaatactatttagcaaa

SEQ ID NO: 336373 - DNA, 1773 bp, Homo sapiens
cgaagtgtggcggcccggcgcggcgctcccggcctgccccgcgtgcacgctgacgccgcgcagtctcgtcccctgccgccgccgtcgccgctgctgtcgccgccgccgccgccattggagtcgacgcctcctcagtgcgtccgcgtcccgggctcaccgccgctgccgcctcgccaggggcccgcgcgcccagcagccgccgccgccgcccggccggcgcccggggaattggcggcggggcccggggccgcgcgagctagggtgacaggcccggcctctaggggaggcccgagccggcgggcgccccggccccgcgtctagttgttcatgaagcatgtcggccaccagcgtggacacccagagaacaaaaggacaagataataaagtacaaaatggttcgttacatcagaaggatacagttcatgacaatgactttgagccctaccttactggacagtcaaatcaggaacggcagagtcgaaacaaacaatgagggcgaaccagtttcttacatgttctaacgtttgactttgaaaacagtttaaaacacgtgtgcttggtcagctccagtgtgtcgtcccgtgcgggggttgagtgttgcatctttgcctttcttgtcgttgatttttgcccagatggatctgcatttatttgtactttttctatgtattataatcctgtagaagtcactaataaaggagtattttttttgtcagcttatcaatcagactgatctaatgtgaaatgtaagtatccttaaaaacaaagcatctattttggcagaaattgtgttcttaaattcagtcatttgatattctgtgagacttcatatttctcatccctttattgctttttagcaaacataagaaaccatgagtcattttgtcatttagagtattctgataaaatctcttgaaaatactgaaatcaaaaggttaatgattttttgttcattctgatttgtcattttattatctgttatcggtctaaagtgctaatttacccatttgatttttctgctagacagataacttttaatttttcaaatttggcagacacttttttttttttttttgaaaatctttccttccagatctgttgcccactgaacagccacccgtccctcactgtcctggtgtccgattgggctggatggtgttggggcatgatgtgtggaggaactggaaggtgctttaggtctggttcagggtcgggcattctttgttgtttgcacatctttttaaattttacaccttttcttaagaattctaatgccgtcttaagtttttataccaataatgctgagctttaagtgtaggatctggtagtacagacagtgtgatggatgatgctgctggttgtaaatttcatcgtgtgtgtctaattttttttcctgttgaatgggtaaaaacaaaacaaaactttttttagaagatgaatttgctgtcatgttttgtggaatgagggaccgttgagctcactaccacctggagtttgagttgaagcatgaaaatggtgcccatgcctgacgctccagcgcctggatctgcacgtgcccttgtagaggatccttaccgtcctagagagcagacgctttctgaaaactacttgctccaaaagaccctctgagttaacgtttcagctgtatcattagacttgtatttagagcgtgtcacttcctctgaactgttactgcctgaatggagtcctggacgacattgggtttttcctctaggagaatacaagccttaataaacaatactatttagcaaa

SEQ ID NO: 336374 - DNA, 3104 bp, Homo sapiens
  misc_feature (3104)..(3104): n is a, c, g, or t
cgaagtgtggcggcccggcgcggcgctcccggcctgccccgcgtgcacgctgacgccgcgcagtctcgtcccctgccgccgccgtcgccgctgctgtcgccgccgccgccgccattggagtcgacgcctcctcagtgcgtccgcgtcccgggctcaccgccgctgccgcctcgccaggggcccgcgcgcccagcagccgccgccgccgcccggccggcgcccggggaattggcggcggggcccggggccgcgcgagctagggtgacaggcccggcctctaggggaggcccgagccggcgggcgccccggccccgcgtctagttgttcatgaagcatgtcggccaccagcgtggacacccagagaacaaaaggacaagataataaagtacaaaatggttcgttacatcagaaggatacagttcatgacaatgactttgagccctaccttactggacagtcaaatcagagtaacagttacccctcaatgagcgacccctacctgtccagctattacccgccgtccattggatttccttactccctcaatgaggctccgtggtctactgcaggggaccctccgattccatacctcaccacctacggacagctcagtaacggagaccatcattttatgcacgatgctgtttttgggcagcctgggggcctggggaacaacatctatcagcacaggttcaattttttccctgaaaaccctgcgttctcagcatgggggacaagtgggtctcaaggtcagcagacccagagctccgcgtatgggagcagctacacctaccccccgagctccctgggtggcacggtggttgatgggcagccaggctttcacagcgacaccctcagcaaggcccccgggatgaacagcctggagcagggcatggttggcctgaagattggggacgtcagctcctccgctgtcaagacggtgggctctgtcgtcagcagcgtggcactgactggtgtcctttctggcaacggtgggacaaatgtgaacatgccagtttcaaagccgacctcgtgggctgccattgccagcaagcctgcaaaaccacagcctaaaatgaaaacaaagagcgggcctgtcatggggggtgggctgccccctccacccataaagcataacatggacattggcacctgggataacaaggggcctgtgccgaaggccccagtcccccagcaggcaccctctccacaggctgccccacagccccagcaggtggctcagcctctcccagcacagcccccagctttggctcaaccgcagtatcagagccctcagcagccaccccagacccgctgggttgccccacgcaacagaaacgcggcgtttgggcagagcggaggggctggcagcgatagcaactctcctggaaacgtccagcctaattctgcccccagcgtcgaatcccaccccgtccttgaaaaactgaaggctgctcacagctacaacccgaaagagtttgagtggaatctgaaaagcgggcgtgtgttcatcatcaagagctactctgaggacgacatccaccgctccattaagtactccatctggtgtagcacagagcacggcaacaagcgcctggacagcgccttccgctgcatgagcagcaaggggcccgtctacctgctcttcagcgtcaatgggagtgggcatttttgtggggtggccgagatgaagtcccccgtggactacggcaccagtgccggggtctggtctcaggacaagtggaaggggaagtttgatgtccagtggatttttgttaaggatgtacccaataaccagctccggcacatcaggctggagaataacgacaacaaaccggtcacaaactcccgggacacccaggaggtgcccttagaaaaagccaagcaagtgctgaaaattatcagttcctacaagcacacaacctccatcttcgacgactttgctcactacgagaagcgccaggaggaggaggaggtggtgcgcaaggaacggcagagtcgaaacaaacaatgagggcgaaccagtttcttacatgttctaacgtttgactttgaaaacagtttaaaacacgtgtgcttggtcagctccagtgtgtcgtcccgtgcgggggttgagtgttgcatctttgcctttcttgtcgttgatttttgcccagatggatctgcatttatttgtactttttctatgtattataatcctgtagaagtcactaataaaggagtattttttttgtcagcttatcaatcagactgatctaatgtgaaatgtaagtatccttaaaaacaaagcatctattttggcagaaattgtgttcttaaattcagtcatttgatattctgtgagacttcatatttctcatccctttattgctttttagcaaacataagaaaccatgagtcattttgtcatttagagtattctgataaaatctcttgaaaatactgaaatcaaaaggttaatgattttttgttcattctgatttgtcattttattatctgttatcggtctaaagtgctaatttacccatttgatttttctgctagacagataacttttaatttttcaaatttggcagacacttttttttttttttttgaaaatctttccttccagatctgttgcccactgaacagccacccgtccctcactgtcctggtgtccgattgggctggatggtgttggggcatgatgtgtggaggaactggaaggtgctttaggtctggttcagggtcgggcattctttgttgtttgcacatctttttaaattttacaccttttcttaagaattctaatgccgtcttaagtttttataccaataatgctgagctttaagtgtaggatctggtagtacagacagtgtgatggatgatgctgctggttgtaaatttcatcgtgtgtgtctaattttttttcctgttgaatgggtgaaggacccgtgagctactaccacctgaagttgagtgaagcataaatggtgccatgcctgacttcaaggcttgacttacgtgccttgaaagatctatacgctataaggaaccttctgaaactactgtcaaagactcttggtaacgttactggtcattaacttgattaaaggggcccn

SEQ ID NO: 336375 - DNA, 2267 bp, Homo sapiens
cgaagtgtggcggcccggcgcggcgctcccggcctgccccgcgtgcacgctgacgccgcgcagtctcgtcccctgccgccgccgtcgccgctgctgtcgccgccgccgccgccattggagtcgacgcctcctcagtgcgtccgcgtcccgggctcaccgccgctgccgcctcgccaggggcccgcgcgcccagcagccgccgccgccgcccggccggcgcccggggaattggcggcggggcccggggccgcgcgagctagggtgacaggcccggcctctaggggaggcccgagccggcgggcgccccggccccgcgtctagttgttcatgaagcatgtcggccaccagcgtggacacccagagaacaaaaggacaagataataaagtacaaaatggttcgttacatcagaaggatacagttcatgacaatgactttgagccctaccttactggacagtcaaatcagagtaacagttacccctcaatgagcgacccctacctgtccagctattacccgccgtccattggatttccttactccctcaatgaggctccgtggtctactgcaggggaccctccgattccatacctcaccacctacggacagctcagtaacggagaccatcattttatgcacgatgctgtttttgggcagcctgggggcctggggaacaacatctatcagcacaggttcaattttttccctgaaaaccctgcgttctcagcatgggggacaagtgggtctcaaggtcagcagacccagagctccgcgtatgggagcagctacacctaccccccgagctccctgggtggcacggtggttgatgggcagccaggctttcacagcgacaccctcagcaaggcccccgggatgaacagcctggagcagggcatggttggcctgaagattggggacgtcagctcctccgctgtcaagacggtgggctctgtcgtcagcagcgtggcactgactggtgtcctttctggcaacggtgggacaaatgtgaacatgccagtttcaaagccgacctcgtgggctgccattgccagcaagcctgcaaaaccacagcctaaaatgaaaacaaagagcgggcctgtcatggggggtgggctgccccctccacccataaagcataacatggacattggcacctgggataacaaggggcctgtgccgaaggccccagtcccccagcaggcaccctctccacaggctgccccacagccccagcaggtggctcagcctctcccagcacagcccccagctttggctcaaccgcagtatcagagccctcagcagccaccccagacccgctgggttgccccacgcaacagaaacgcggcgtttgggcagagcggaggggctggcagcgatagcaactctcctggaaacgtccagcctaattctgcccccagcgtcgaatcccaccccgtccttgaaaaactgaaggctgctcacagctacaacccgaaagagtttgagtggaatctgaaaagcgggcgtgtgttcatcatcaagagctactctgaggacgacatccaccgctccattaagtactccatctggtgtagcacagagcacggcaacaagcgcctggacagcgccttccgctgcatgagcagcaaggggcccgtctacctgctcttcagcgtcaatgggagtgggcatttttgtggggtggccgagatgaagtcccccgtggactacggcaccagtgccggggtctggtctcaggacaagtggaaggggaagtttgatgtccagtggatttttgttaaggatgtacccaataaccagctccggcacatcaggctggagaataacgacaacaaaccggtcacaaactcccgggacacccaggaggtgcccttagaaaaagccaagcaagtgctgaaaattatcagttcctacaagcacacaacctccatcttcgacgactttgctcactacgagaagcgccaggaggaggaggaggtggtgcgcaaggaacggcagagtcgaaacaaacaatgagggcgaaccagtttcttacatgttctaacgtttgactttgaaaacagtttaaaacacgtgtgcttggtcagctccagtgtgtcgtcccgtgcgggggttgagtgttgcatctttgcctttcttgtcgttgatttttgcccagatggatctgcatttatttgtactttttctatgtattataatcctgtagaagtcactaataaaggagtattttttttgtcagcttatcaatcagactgatctaatgtgaaat

SEQ ID NO: 336376 - DNA, 307 bp, Homo sapiens
gctgggaagggaaggagccacacaaggaaggacgcagtatccagcaaaacccaaagggaaactggcaccatcccacgggggagcagtgcagacacgcaaacacatctccacaccgtccccatcagtggcagggctgctgtgccatttacacctgtcagtcacgggttaagtaagcggggaaatgctgaatacccggcatgtacatcacatagtgggctatactgaaaatctctcagggaacagatccaggaataaggacatcatttgactgtcaaaagggtctttgaaaactatgaatggaaagtag

SEQ ID NO: 336377 - DNA, 433 bp, Homo sapiens
catccatcttctgggctggcccaggacacgtgcccccatcccagcctccaagaatctgggaatgtccttagcagactgggctggcatgtggcctctgcccggggagcagaggtggctccccaaaggcttcctgagaagtggtggaggagactcagcttccccgtccagtcttttgggaggcccaggctggaggatcacttgagcccaggagttcaagaccagcctgggcaacatggtgagaccctgtccctaaaaaaatttaaattagccaggagtggtggtgtgcacctgtagtcccagctactcaggaggctgaggcgggaggatcacttgggcatggagattgaggctgcagtgagctgtgatccagcctggacaacagagcaagaccctgcctctaaaaaaccaagttaatggtgggtcagaacataag

SEQ ID NO: 336378 - DNA, 259 bp, Homo sapiens
ccacaattcttacacaaaaataactaaaggactcactcaagccaggttctaaatattttatactagaactgccttttttttcttgtcctttgtaggaacatggatgaagctggaaaccatcattctgagcaaactattgcaaggacagaaaaccaaacaccgcatgttctcactcataggtgggaactgaacaatgagaacacctggacacaaggtgggcaacatcacacaccggggcctgttgtgggatggggggaga

SEQ ID NO: 336379 - DNA, 364 bp, Homo sapiens
cctactaccacagctccccgtacgccaaggctgctttgctgccaatctcaactaatgaactcagggttgtgtttcctgacacattccacaggcacagcaaggattccagagccccactttgtttctgaggaaggaaaggaagcatgcaggccagattcacatttgtttctccattactttagcaatcattaaacaagtgtacactacaatcccacaggaaacaggaagatatgtttggggaaggttggtaaaagttgtgtcccacatcaaaggaaagttgtcttcgttcatactgctcacatctggagcacccccacgcactgggtgaaacaggaccatcatggtggaacatgctctctccttt

SEQ ID NO: 336380 - DNA, 834 bp, Homo sapiens
aaatgaaatcctcctccagcagcacatttgcaaattccagaggggacatgatatactatggaagttgacatagaactccgcacttaggtgggcgattgttagcagtacagcatggtggttaagaacatggactttggagccagatggccaaatcatggccctacccttgtgaaactgaggtaaagaagaaggaagaaagaatttggaatgggtgtttactgagcaaatttattgtacctgccacagagagctgaggtgacagcacaaaatcaagtacaaaacaaagtggttgattttagatgatgactgtatcagtgggactatgtaagttcagtacttggcatagggcctggtttctccttgtggaaggcagtggttctccatcacaacaccattcttgccagcaacccttggctccctaggtaatccaaagagcctggatttccattcatttacctatgcaactctgcatgaacctgaagaacaatcatcaagcggatggattcaaactgcatctccatgtatctaacattcagcattgctatttgttttatgtaagcactgaactcaaaaacctagttatttatcctaagtatccctaaatttctgctaataatcatttgtgtatatggatgagtgaatcataatttggctcagccctatttctttttcaaatccatatcaccagtcatcaataataaataaccaagttagcagtttctaatgaatcaaaaatcctattacattccatagttaagccaaattaagattccttatggaaacaagaactctactggttatcttaaaatctctccttcctccttagataaccct

SEQ ID NO: 336381 - DNA, 269 bp, Homo sapiens
aaaaaaggattgaaatagagcagttctacttttctaccctgagggagtatgggaatttgtatttgacgcaagtggtcattgttcaataagtggataacatttaagcatcttggcaggagtgcatagctggagttagcactgttcatggcttgaatagatctccagaccctcaaagtatgtgggtatagttgtgtttgcattgaattaataagttcagacagttttatttatttatttttgagacagagtcttgctttgtcgcccaggct

SEQ ID NO: 336382 - DNA, 287 bp, Homo sapiens
ccaggcttgttttttaaacaaagactttcttacctgtgattattagacctaaaaccaatatacctttatcttttccaagttccctctttcccctccatgttacattttaagcatctatttttagtgatagctttcaacattggccttttgagccatcgcccagtatgcattacaatttccacaaacacttttgccatttgatgtcgtaaattctttcaaaatggtttttaggtaatgattatgtacatcatttaagtttttccgaataaatgctgattataattgtt

SEQ ID NO: 336383 - DNA, 394 bp, Homo sapiens
agtggtttgcaaaaaacttcttttctgagcacttcaacaaaggttgccgtgaacagtgactgtctgacagcaagggatcctggtcgcctaaggagaagacacaggagtaatgagaagacacaggaggtagagcagcacttgctgactcagaagcattaacatgaaacgctggagtgcagggcacaataatggttgactgcagcctcaacctccagggctcaagggatccttccacctcagcctccccagtagttgggattacacagatatttcaagattcagcatcatttcagaccctgaaaaatccctgaaaattgaattctcaatagataatgcaactccacataatatctggattttgtaaatgcttgctaataaattattttacaacgtg

SEQ ID NO: 336384 - DNA, 379 bp, Homo sapiens
cagtttcagtgtcttcctgtggtctgtgaagaagagaaacttaacaacaagaagagggaaagggaaggtcgcctaaggagaagacacaggagtaatgagaagacacaggaggtagagcagcacttgctgactcagaagcattaacatgaaacgctggagtgcagggcacaataatggttgactgcagcctcaacctccagggctcaagggatccttccacctcagcctccccagtagttgggattacacagatatttcaagattcagcatcatttcagaccctgaaaaatccctgaaaattgaattctcaatagataatgcaactccacataatatctggattttgtaaatgcttgctaataaattattttacaacgtg

SEQ ID NO: 336385 - DNA, 255 bp, Homo sapiens
acacacacacacacacacacacacatacatttatctcttttcttcaaaaatttttgcatatcccctgcattcttattgtatagattaatatctaaataaatgttaatgaagtcaatgtgtagttttcacttttgaccaagtataatggtaatatttggaggaaggctcctgaacatcttattagtgatattaggggctctctttttcagggaatcaatcttagcaaccaagaagtaccaatggagacccatgact

SEQ ID NO: 336386 - DNA, 313 bp, Homo sapiens
catgtggcactgtgggaggagctttggaagcagaccccacacccttcccaggctctgggcctctgcacaggcaggactctctcaaggctgcccgacccacttccccacctggcacactcattgggatcttccaggacgcaacgcagagtcccctcttccaagaagccttctccaacccctagggacaagtgactcttcctcatccatatccttccatgctcccctaccccatatctccgtagatacgattccctgccattgggccagggggatgagaaaacttctgagtgcaagatggtcaccccaggccatg

SEQ ID NO: 336387 - DNA, 6042 bp, Homo sapiens
  misc_feature (845)..(845): n is a, c, g, or t
  misc_feature (2144)..(2144): n is a, c, g, or t
  misc_feature (2211)..(2211): n is a, c, g, or t
  misc_feature (2591)..(2591): n is a, c, g, or t
  misc_feature (2612)..(2612): n is a, c, g, or t
  misc_feature (2912)..(2912): n is a, c, g, or t
  misc_feature (2943)..(2943): n is a, c, g, or t
  misc_feature (3462)..(3462): n is a, c, g, or t
  misc_feature (3482)..(3482): n is a, c, g, or t
  misc_feature (3604)..(3604): n is a, c, g, or t
  misc_feature (3674)..(3674): n is a, c, g, or t
  misc_feature (3981)..(3981): n is a, c, g, or t
  misc_feature (4059)..(4059): n is a, c, g, or t
  misc_feature (4073)..(4073): n is a, c, g, or t
  misc_feature (4656)..(4656): n is a, c, g, or t
  misc_feature (5001)..(5001): n is a, c, g, or t
cagtcagttactcaatatttatggaacacttcctgtgccaggccctggatttctcagctgtaacacagataaccaatatgtgccttatccctcaaatagctgacccaacggggcccaaaccccattttcatggtcctacctgtcctaccaacttttttttttttttttgccaatttctggtttttcttcctctagatcctgcctgcagacatttatatttgaacctgtgttcttggttccagacaatgtgggttcccaccaaaacccacttgcaccgaactctcatgggcttattagtaactctgtgaaagagttggctgcagtgggtggggtgaggggtttctggacccccttcacacaccacttagccctctctgactggcccttctgttaccactcctccgctttgctctgaacaagtgaccctttccctggcccagcaaaccaagagggcgtgaacaagccagtcccgctacctggcgcttctcccagggagcattctcctccccttctctggccccttctgtatttttatggtgttttccccaggctgctaattaattagccttctttacaaaggcggtgctctcacctcttcttcagggttggctgtgttcatttgtttagaacattgttccgtctcataaattggttggttattagactttttgttggtttatgactactgcatggaaatttcaggatagtcaagcacatttagagaaatttggtgactggttgaaataattgttagggaaggatgcagatgttctgtgttctaagcaggcttgttaaccagattggaaattactgtttatatctcatttttgctgcataggagctcnttgagttagaatagtttccttttctacttctgctactgtcaaagcctcaagatgcaaaacacattcagtttagttgagcagctcctgcagtctgttcccagcaccagctatctgcaaagcgccatgttagaggtaagctgctaacttccatacagcctacaaaacccagatggccttccctatctcctggaagccttctctgactgctaccaccactttccccttccctagagttaatcttttcctttctgcaagtggcctgcgcatcctatttgggcatttgtttcatactgttcggtaattttttagcatcggcctctcttactagactgcgcactgaacctctgagtccagggactgtgtctccttcatgtttatatttccagcacccagtgggagactttaatagtcattagtaaagtactgaatgaatgaggaaaccttcaaagccagcttacatgagtgtttcatggggatttgttgaacagagatgccctgtctcagggtctcagtcccgtatctctctcctgtgctgttgcggcagcttcctgtctctctgctgctgctttgctcctgcagtctgttcccagcatgcagatcccgtcacccctcttcccggaaatctccagtgtcttccatcttacttcatggaaaagctagagcattcaattagaccccaaagatctgactcccagggccctcctgaaccccatcacttctgacccataatatacacactctaccaagctacccagaagcgcctgctccccctggaatgtactcccttgtcaaatcttctgatctagatgttcctctgcctagaatgttcttcccagatgcttgcatggctcacttctttacttcctcgtgtcttttcccagctgccaccatttcagtgatgccttatcaggacatcatctctgccaacagtctcacttcattcttttctagaatacttaccaccttttaatgtactatatatattgacttatccattgtttttttgtctccctcgctgaatgcaagccctatgaaggcagggatttgtggttcctctggttcatcatcctttccctcacactccagggactagattgcatgtcgtcatggtgacagccaacatgcagatggtgtttttgtgtcaggcgcttttctgagcatgttatacattatgattaataaacggaggaggtaagagtccaccaggcagtctgagctctgagcccttatgcttttctgcctagtagcaagtatttgttcaaagaatgaaggaatgagtacttatgataaggagataangcaagttggcactgccttattagcctgtgttgcagttgaatgaaacagaggattcccagccttctcngagcacccaatgggactggcacttatgggagagaagaagctatgacaggggcttccatttcagttgtgccctaaaagcagctgggccaaaaggtggatcttgtggatgtaggtgaattatcatatgtaatcagccaactcaacttttacctccagactcttgcagcaaagaatggtcaaccttggaacattatctttaacatctcaaagttctttcttatcagtcacctcattttcttctcacaggaattagataaggagggaaggacagatggcatcatcctcattttatgtgtgagagcaggcagagctgaagagacatctatgaagtcccacagctgggagccagaatcctaacccagatccccagctttctcctgncaccttcaggcctccctctgntcagtgtgatcatctttagactctccaggtggcagcaagctttgagaagttcctgctgctatttttactattcctgattctgttgacccccaaaacagactgctgagaggatgctagaccatgctcctggggagcaccagaaagggttcctggagctccagtgttcagctgcaggattgaactaagcacacctgttgagggggaccttgagaggggaggctgctgtagtttacaaagaaatgaacaaatagggcatatcagccctgcagtgcagctttaaggacatctcccatggtttgngccttgcggtgccatcctgccctgctggacntgaggtgcaaggtgtccattcatctagggctgccccagattctgcagatgtctccaatgcagtaccttggaagctctacggggcacaggcagctcttccaagaagggctaacaggtggaaaaggagcatttatggagcacctgccatttgccagcattctgctcagctccatgtcttactatctgttagcctcactctttgcagacaagcaggagatgagaccagactgggtaacacacccaaagcaccacagtggtggggcaaggctcccagtctgctccttctgacttgaagcacattccatcgccatatcactcatcacttcctccttgtcaaacaaagcaagactctgcactagcttcaggcttttgttttgttttttgacacagagtctcgctctgtcgcccaggctggagagcagtggcgccatctcggctcacggcaacctctgcctcccgggttcaagcaattctcctgtcttagcctcctgggtagctgggattacaggcgcgcgccacnatgcctagcaatttttttgnatttttagtagagatgggattttaccacattggtcaggctggtctcaaactcctccactcaggtgatccaaccaccttggcctcccaaagtgctgggattacaggcatgagccaccctgccnggcctctagcttcagtgttaacctttgtgctgcttcctgtaccccatgaggctgaacatgaataagaagncaagtttctaaagagtcttcaaactcagtaggtacagagatactgccctcagctgtttgtagatgtcatgtaagtagagatgttccacagttttcttgccagccatgaaagcctaaacaggagctttcagccttcgtgggtcttcattttcccagcctaatccaggactgggtcaagccaaatccaaggtgcagagagaaacattcccacttggcttcttctgatgtaaatgatgtgatctggtctagatttcccggttgacttatcttttctgttcagtcacatgatttggtgtatgtggattttnaaatctctttattataaaatttaaaggctgcagaagttatccagttgctcctaaagaattacaggttgagcgggctgncatggtggcttacncctgtaatcccacactttgggaggctgaggcaagcgaatcccctgaggctaggagttcgaggtcagcctggcaaacatggcgaaaccccgtctttactaaaaatacaaaaattagctgcgtgtgatggcatgtacctgtaaccccaggtactcaggagactgaggcaggagaatcacatgaacctggcagagggaggttgcagtgaaccaagatcatgccactgcactcctgcctgggtgacacagcgagactccgtctcaaaaaaaaaaaaaaaagatttacaggttgagtatccctaatctgaaaatccaaatgctccaaaatctgaaacttgctgagcaccaacatgacactaccatggaaaatttcacacataaaagtactttaactttgtgtaatgctcaaatgtatttaaaatatttttaaaaattacctttagcctccatgtttaagatatatatgaaacataaatgaattttatgttgagatttgggtctcatctcaaagatagcttattatatatgtaaatattccaaaatctgaaaaaatccaaacacttctcatcctaagcatttcagatangggatattcaacctatataaacaaagttgcttgcattagccaaccagaaaaacaaccaaaaaacactttaccttttccaatgcccatgcccccactcagctctgatcatcagtaactccattgatcactgtgtgctttcattcttcctgtctgatgacagctgtcccaatgggatgggcagagtgtcaaaggccagccagcaggtttcctgtcacctaagaaagcaacggccaccagtgatcactgtgcccccattcagggtctcacaggtctgtacagtcatgctgtctgccttagtagcagcattcagactcaagttacgttgcgacccatggcttaacaggngcctggattgtgatgaaaatcaccatgaatataaggagtcatttgagggtcttctgtctagttgtctgtctctggtggtgcccagggctgtatgggtcctggggcactctgcttacccactcacccactgtgcatcattttcagaagagtaagctgcatcctaatatccctcaataatccaatatgtttcttttcatctctgaattattagaccttcctggaattctatttgcagctgataggaatccaagttctaggtttcctgccaactcttcagtgaagcattttgctcattaaccaccaaaactcattcgggctggagtagtcaaatcccctcatcataggaacacatgagtggagggcaacagtgggtttgcctgccttgttggaatcaggatccttgatttaaggagactctaagagaagctagcaccaagtaacctagtagtaacctatagttgcctttctcagcaggcaatgcctttctcagcatttcctccttcaaggagatgggaagaagcaataaccctaagaaatcatcagtatcatcatcttcctttttctgatgaggaaactaaggcttcagactgttaggtattttgcccaaaggctcacatagctggtaaaagcaagaggcaggatgtgctctcagggccagctgcccacagagccttcggtgggttttgctttgctccttcttactgtcttttggctcattaaaagtaacacaaggccgggcgcggtggctcacacctgtaatcccggcactttgggaggttgaggtgggcagatcacctgaggtcaggagttcaagaccagcctggccaacatggcaaaacctcgtctctactaaaaatacaaaaattagctgggtgtgggggtgcacacctgtagttccagctactgaggaagctgaggcaggagaattgcgtgaatccaggaggcggaggtatcagggaaccgagatcgcaccgctgtactccagcctgggcgacagaacaagacttcgtctcaaaaatatatctatacaagcacaaggtt

SEQ ID NO: 336388 - DNA, 493 bp, Homo sapiens
  misc_feature (13)..(13): n is a, c, g, or t
tgtcacccaggcnggagtgcagtggcgcagtctcagctcaccgcaacatccaccccccagccccatgcaattctcctgcttcagcctcccaaagtgttgggattacaggcataaaccaccatggctggccagacttgctttttcttcttgcatgtctaatgagttcttgagttcagtacctgaactcagccctgttttcgtgttaattggctcctcccagaactctaggtctcatctctaaaaggttattttaggcttcccagtacatagatagagcatgctaagacctatagattcagcagttttgggccaacttctcagaacatgtggaaaaggcttttgttttagctcttggcctttggtggacttaccacccagaatcttaggggggtcctcgctgatgactttttgttgatgttgatgctattcctttctgtgtgttagttttccttctaacagtcaggtccctcaggtgcaggtctgttggagtttg

SEQ ID NO: 336389 - DNA, 491 bp, Homo sapiens
cctgggaggtagataataccaaccatattttatatataaggaaaatgaggctgaaatgttcagaagcattcaaaggtctcacaactaaatgttacaaggaatttgaacccaagtctctatggtaggtgctttttcttaagcagctttcctttcccatggccactggaaatacaattgacaatttagtgtgtggactccaaaaaccggcagagagaatgagaggtgttttttatgcatgtcctttaggtaaaggtataaaaaaaaattcttgtcaacaaatggcttgtttcttaattctgtttagttagccctgggttcaaacaggtaatggcctaatgtgggattaagaagttgcagaacctgttgaaaaaaaaataccaattctgactgaatgtgcaattaggccacaactatggaaaacatccatgtactcagagctaaaaaataactgtcaggtttgacaggaacctgagaattaagcttcccaaaga

SEQ ID NO: 336390 - DNA, 693 bp, Homo sapiens
atccagaaaataagtgcagaagcttggaaaaaatgatagtaagagaagacataagacaactgtttaaagattttattagcaaccaaagcaaaaaagctccagttttatttccagcaagatgcattgatatctgcagtcttccatcatatcccaaagcacttcatctgctcctcggatcaccctaatgggtccttatctcaccttccagtcagagaagcttctggtgcacagcacctctcgtgttgtgatggcttgctgtggtctctgaaaggcctgtgcctcagctggggaaaatggggcttatgtgaaagaggcataacagctccaatgtctcattttatttgaaccctccagttgccttgttttatgctgttacaccatctaatctaaagcaaagaatttatagtaaaattttaggctgggtgcggtggctcacgcctgtaatcccagcactttgggaggccgaggtgggtggatcatccaaggtcaggagttcaagaccagcctggccaacatggcaagaccctgtctctactaaaaatacaaaaattagctgggcgtggtggcaggcgcctgtaatcccagctactagggaggctgaggcagaagaattacttgaactcaggaggcggaggttgcggtgagccgagatcatgccattgcactccagcctgggcaacaagagcgaaactc

SEQ ID NO: 336391 - DNA, 795 bp, Homo sapiens
cttaactctgtgagaaataagatgtggcattgggaaaaataaactatgacacttggccaagagtagcattgaagggtcccctgtttgagttaaattagcttggattccagaattccatcataacatcatgtaccctcttagcccctcttcttgcagcacacatgctggatattgtttttttttccctccgattctaacaactaacccccctcctgacacgcctgctgcagtcacttgacaagcagggcctgaccttcctctacagcctttcagagctccctgcggcctgagaactaacagcccagttgcactgcttgcctcagggcagggtgagatttctggagttcctggagcaggattcctgagctcactctggcagctcacccggggaggctctgtcttctccttggacctggaggaaggcaggacttggggcagctccaaactctgagcctggggtggccttcccctggtctttggcttatttacagagctggtgggcatgcgggccttgacacccaccacatctcatgatctgcccactcacctctcagggctcctcttgggtgcaactgcgtgtgctgaggagaatcacaggagccggagcaagaacacatgggcttggcaggagcctgctttgggaccgagagacgcggttttctgtatcttagaacttaggctctgagatccccggaaatctggaaaaagtccccgatgttgctggtcttttctggcagagctattcattgcctttagcctcctcttttgtccttatattaaaagacagcagactta

SEQ ID NO: 336392 - DNA, 445 bp, Homo sapiens
  misc_feature (420)..(420): n is a, c, g, or t
cacttgggaaccagctttatttctgattttttttttttgtcagagtataaaaaagtgagtgcagcaaaacaaggccagaaaggcgaccacctcgtgaacgaagattcgaaaagccacttgaagaaaagggtgaaggaggcgaattttcagttgatagaccgattattgaccgacctattcgaggtcgtggtggtcttggaagaggtcgagggggccgtggacgtggaatgggccgaggagatggatttgattctcgtggcaaacgtgaatttgataggcatagtggaagtgatagatctggcctgaagcacgaggacaaacgtggaggtagcggatctcacaactggggaactgtcaaagacgaattaactgacttggatcaatcaaatgtgactgaagtacaggtcgtgcagaaaaccntcgtgccgattttttggcctcgagg

SEQ ID NO: 336393 - DNA, 3939 bp, Homo sapiens
agttagccctgagcccgagggggcgtgagtgaaaccaaagagcactttcgcgagtcagttacgccgtcacggttttttggtttcaaggtagctgaagacctagagagtttaagggtggccagagcaggtggcaggactccgcccaccaccacgcttcccttccttcagcccgcacgcttcactcccctcatggggtctcgcctctcaggcgcgcgcgaagagttgtcgcgcggtgcgtcctgggaattgtagtcccgacgcggagagtcgcctcaggagaaatgactctggcctacataccccacagtgccttgcggcgcaggccgctcccggatgtgtgcctggcgccggaagagaagacggcccccctctctcggcccggccatcttgtgggaagagctgaagcaggcgctcttggctcggcgcggcccgctgcaatccgtggaggaacgcgccgccgagccaccatcatgcctgggcacttacaggaaggcttcggctgcgtggtcaccaaccgattcgaccagttatttgacgacgaatcggaccccttcgaggtgctgaaggcagcagagaacaagaaaaaagaagccggcgggggcggcgttgggggccctggggccaagagcgcagctcaggccgcggcccagaccaactccaacgcggcaggcaaacagctgcgcaaggagtcccagaaagaccgcaagaacccgctgccccccagcgttggcgtggttgacaagaaagaggagacgcagccgcccgtggcgcttaagaaagaaggaataagacgagttggaagaagacctgatcaacaacttcagggtgaagggaaaataattgatagaagaccagaaaggcgaccacctcgtgaacgaagattcgaaaagccacttgaagaaaagggtgaaggaggcgaattttcagttgatagaccgattattgaccgacctattcgaggtcgtggtggtcttggaagaggtcgagggggccgtggacgtggaatgggccgaggagatggatttgattctcgtggcaaacgtgaatttgataggcatagtggaagtgatagatctggcctgaagcacgaggacaaacgtggaggtagcggatctcacaactggggaactgtcaaagacgaattaactgacttggatcaatcaaatgtgactgaggaaacacctgaaggtgaagaacatcatccagtggcagacactgaaaataaggagaatgaagttgaagaggtaaaagaggagggtccaaaagagatgactttggatgagtggaaggctattcaaaataaggaccgggcaaaagtagaatttaatatccgaaaaccaaatgaaggtgctgatgggcagtggaagaagggatttgttcttcataaatcaaagagtgaagaggctcatgctgaagattcggttatggaccatcatttccggaagccagcaaatgatataacgtctcagctggagatcaattttggagaccttggccgcccaggacgtggcggcaggggaggacgaggtggacgtgggcgtggtgggcgcccaaaccgtggcagcaggaccgacaagtcaagtgcttctgctcctgatgtggatgacccagaggcattcccagctctggcttaactggatgccataagacaaccctggttcctttgtgaacccttctgttcaaagcttttgcatgcttaaggattccaaacgactaagaaattaaaaaaaaaaagactgtcattcataccattcacacctaaagactgaattttatctgttttaaaaatgaacttctcccgctacacagaagtaacaaatatggtagtcagttttgtatttagaaatgtattggtagcagggatgttttcataattttcagagattatgcattcttcatgaatacttttgtattgctgcttgcaaatatgcatttccaaacttgaaatataggtgtgaacagtgtgtaccagtttaaagctttcacttcatttgtgttttttaattaaggatttagaagttcccccaattacaaactggttttaaatattggacatactggttttaatacctgctttgcatattcacacatggtcaactgggacatgttaaactttgatttgtcaaattttatgctgtgtggaatactaactatatgtattttaacttagttttaatattttcatttttggggaaaaatcttttttcacttctcatgatagctgttatatatatatgctaaatctttatatacagaaatatcagtacttgaacaaattcaaagcacatttggtttattaacccttgctccttgcatggctcattaggttcaaattataactgatttacattttcagctatatttactttttaaatgcttgagtttcccattttaaaatctaaactagacatcttaattggtgaaagttgtttaaactacttattgttggtaggcacatcgtgtcaagtgaagtagttttataggtatgggttttttctcccccttcaccagggtgggtggaataagttgatttggccaatgtgtaatatttaaactgttctgtaaaataagtgtctggccatttggtatgatttctgtgtgtgaaaggtcccaaaatcaaaatggtacatccataatcagccaccatttaacccttccttgttctaaaacaaaaaccaaagggcgctggttggtagggtgaggtgggggagtattttaatttttggaatttgggaagcagacagctttactttgtaaggttggaacagcagcactatacatgaaatataaaccaaaaacctttactgtttctaaatttcctagattgctattatttggttgtaagttgagtattccacagaaagtggtaattatctcttctctcttcctccattagaaaattaggtaaataatggattcctataatgggagcatcaccacttattaaaacacacatagaatgatgaattaaaaaagttttctaggattgtcttttattctgccacatttattgataaacagtgaaggaatttttaaaaaatttttaagaattgtttgtcacgtcatttttagaaatgttctacctgtatatggtaatgtccagttttaaaaatattggacatcttcaatcttaaacatttctatttagctgattggttctcacatatacttctaaaagaaacttttatgttataagagttactttttggataagatttattaatctcagttacctactattctgacattttaggaaggaggtaattgtttttaatgatggataaacttgtgctggtgttttggatcttatgatgctgagcatgttctgcactggtgctaatgtctaatataattttatatttacacacatacgtgctacccagagattaatttagtccatatgaactattgacccattgttcattgagacagcaacatacgcactcctaaatcagtgtgtttagacttttcaagtatctaactcatttccaaacatgtaccatgttttataaacctcttgatttccagcaacatactatagaaaacacctgctactcaaaacacaacttctcagtgtcatccattgctgtcgtgagagacaacatagcaatatctggtatgttgcaagctttcaagatagcctgaacttaaaaagttggtgcattagttgtatctgatggatataaatttgcctcctagttcactttgtgtcaagagctaaaactgtgaacctaactttctcttattggtgggtaataactgaaaataaagatttattttcatgctcacttcttaaaagtcataaaaacaatcaaataggatcatgtttattgtcatgtgtttcctggtttctgacctgtgtgcacacccctgtgtgtttataatttttaaattgaattttatatggggtttttatttgctaaaaaccaggctgttgaa

SEQ ID NO: 336394 - DNA, 3470 bp, Homo sapiens
  misc_feature (5)..(6): n is a, c, g, or t
  misc_feature (25)..(25): n is a, c, g, or t
aaagnncgcgggcgaacgaaactanggctaggtacgaggctgggtgttgaagctctcggcccggccatcttgtgggaagagctgaagcaggcgctcttggctcggcgcggcccgctgcaatccgtggaggaacgcgccgccgagccaccatcatgcctgggcacttacaggaaggcttcggctgcgtggtcaccaaccgattcgaccagttatttgacgacgaatcggaccccttcgaggtgctgaaggcagcagagaacaagaaaaaagaagccggcgggggcggcgttgggggccctggggccaagagcgcagctcaggccgcggcccagaccaactccaacgcggcaggcaaacagctgcgcaaggagtcccagaaagaccgcaagaacccgctgccccccagcgttggcgtggttgacaagaaagaggagacgcagccgcccgtggcgcttaagaaagaaggaataagacgagttggaagaagacctgatcaacaacttcagggtgaagggaaaataattgatagaagaccagaaaggcgaccacctcgtgaacgaagattcgaaaagccacttgaagaaaagggtgaaggaggcgaattttcagttgatagaccgattattgaccgacctattcgaggtcgtggtggtcttggaagaggtcgagggggccgtggacgtggaatgggccgaggagatggatttgattctcgtggcaaacgtgaatttgataggcatagtggaagtgatagatctggcctgaagcacgaggacaaacgtggaggtagcggatctcacaactggggaactgtcaaagacgaattaactgacttggatcaatcaaatgtgactgaggaaacacctgaaggtgaagaacatcatccagtggcagacactgaaaataaggagaatgaagttgaagaggtaaaagaggagggtccaaaagagatgactttggatgagtggaaggctattcaaaataaggaccgggcaaaagtagaatttaatatccgaaaaccaaatgaaggtgctgatgggcagtggaagaagggatttgttcttcataaatcaaagagtgaagaggctcatgctgaagattcggttatggaccatcatttccggaagccagcaaatgatataacgtctcagctggagatcaattttggagaccttggccgcccaggacgtggcggcaggggaggacgaggtggacgtgggcgtggtgggcgcccaaaccgtggcagcaggaccgacaagtcaagtgcttctgctcctgatgtggatgacccagaggcattcccagctctggcttaactggatgccataagacaaccctggttcctttgtgaacccttctgttcaaagcttttgcatgcttaaggattccaaacgactaagaaattaaaaaaaaaaagactgtcattcataccattcacacctaaagactgaattttatctgttttaaaaatgaacttctcccgctacacagaagtaacaaatatggtagtcagttttgtatttagaaatgtattggtagcagggatgttttcataattttcagagattatgcattcttcatgaatacttttgtattgctgcttgcaaatatgcatttccaaacttgaaatataggtgtgaacagtgtgtaccagtttaaagctttcacttcatttgtgttttttaattaaggatttagaagttcccccaattacaaactggttttaaatattggacatactggttttaatacctgctttgcatattcacacatggtcaactgggacatgttaaactttgatttgtcaaattttatgctgtgtggaatactaactatatgtattttaacttagttttaatattttcatttttggggaaaaatcttttttcacttctcatgatagctgttatatatatatgctaaatctttatatacagaaatatcagtacttgaacaaattcaaagcacatttggtttattaacccttgctccttgcatggctcattaggttcaaattataactgatttacattttcagctatatttactttttaaatgcttgagtttcccattttaaaatctaaactagacatcttaattggtgaaagttgtttaaactacttattgttggtaggcacatcgtgtcaagtgaagtagttttataggtatgggttttttctcccccttcaccagggtgggtggaataagttgatttggccaatgtgtaatatttaaactgttctgtaaaataagtgtctggccatttggtatgatttctgtgtgtgaaaggtcccaaaatcaaaatggtacatccataatcagccaccatttaacccttccttgttctaaaacaaaaaccaaagggcgctggttggtagggtgaggtgggggagtattttaatttttggaatttgggaagcagacagctttactttgtaaggttggaacagcagcactatacatgaaatataaaccaaaaacctttactgtttctaaatttcctagattgctattatttggttgtaagttgagtattccacagaaagtggtaattatctcttctctcttcctccattagaaaattaggtaaataatggattcctataatgggagcatcaccacttattaaaacacacatagaatgatgaattaaaaaagttttctaggattgtcttttattctgccacatttattgataaacagtgaaggaatttttaaaaaatttttaagaattgtttgtcacgtcatttttagaaatgttctacctgtatatggtaatgtccagttttaaaaatattggacatcttcaatcttaaacatttctatttagctgattggttctcacatatacttctaaaagaaacttttatgttataagagttactttttggataagatttattaatctcagttacctactattctgacattttaggaaggaggtaattgtttttaatgatggataaacttgtgctggtgttttggatcttatgatgctgagcatgttctgcactggtgctaatgtctaatataattttatatttacacacatacgtgctacccagagattaatttagtccatatgaactattgacccattgttcattgagacagcaacatacgcactcctaaatcagtgtgtttagacttttcaagtatctaactcatttccaaacatgtaccatgttttataaacctcttgatttccagcaacatactatagaaaacacctgctactcaaaacacaacttctcagtgtcatccattgctgtcgtgagagacaacatagcaatatctggtatgttgcaagctttcaagatagcctgaacttaaaaagttggtgcattagttgtatctgatggatataaatttgcctcctagttcactttgtgtcaagagctaaaactgtgaacctaactttctcttattggtgggtaataactgaaaataaagatttattttcatgctca

SEQ ID NO: 336395 - DNA, 4264 bp, Homo sapiens
agttagccctgagcccgagggggcgtgagtgaaaccaaagagcactttcgcgagtcagttacgccgtcacggttttttggtttcaaggtagctgaagacctagagagtttaagggtggccagagcaggtggcaggactccgcccaccaccacgcttcccttccttcagcccgcacgcttcactcccctcatggggtctcgcctctcaggcgcgcgcgaagagttgtcgcgcggtgcgtcctgggaattgtagtcccgacgcggagagtcgcctcaggagaaatgactctggcctacataccccacagtgccttgcggcgcaggccgctcccggatgtgtgcctggcgccggaagagaagacggcccccctctctcggcccggccatcttgtgggaagagctgaagcaggcgctcttggctcggcgcggcccgctgcaatccgtggaggaacgcgccgccgagccaccatcatgcctgggcacttacaggaaggcttcggctgcgtggtcaccaaccgattcgaccagttatttgacgacgaatcggaccccttcgaggtgctgaaggcagcagagaacaagaaaaaagaagccggcgggggcggcgttgggggccctggggccaagagcgcagctcaggccgcggcccagaccaactccaacgcggcaggcaaacagctgcgcaaggagtcccagaaagaccgcaagaacccgctgccccccagcgttggcgtggttgacaagaaagaggagacgcagccgcccgtggcgcttaagaaagaaggaataagacgagttggaagaagacctgatcaacaacttcagggtgaagggaaaataattgatagaagaccagaaaggcgaccacctcgtgaacgaagattcgaaaagccacttgaagaaaagggtgaaggaggcgaattttcagttgatagaccgattattgaccgacctattcgaggtcgtggtggtcttggaagaggtcgagggggccgtggacgtggaatgggccgaggagatggatttgattctcgtggcaaacgtgaatttgataggcatagtggaagtgatagatctggcctgaagcacgaggacaaacgtggaggtagcggatctcacaactggggaactgtcaaagacgaattaactgacttggatcaatcaaatgtgactgaggaaacacctgaaggtgaagaacatcatccagtggcagacactgaaaataaggagaatgaagttgaagaggtaaaagaggagggtccaaaagagatgactttggatgagtggaaggctattcaaaataaggaccgggcaaaagtagaatttaatatccgaaaaccaaatgaaggtgctgatgggcagtggaagaagggatttgttcttcataaatcaaagagtgaagaggctcatgctgaagattcggttatggaccatcatttccggaagccagcaaatgatataacgtctcagctggagatcaattttggagaccttggccgcccaggacgtggcggcaggggaggacgaggtggacgtgggcgtggtgggcgcccaaaccgtggcagcaggaccgacaagtcaagtgcttctgctcctgatgtggatgacccagaggcattcccagctctggcttaactggatgccataagacaaccctggttcctttgtgaacccttctgttcaaagcttttgcatgcttaaggattccaaacgactaagaaattaaaaaaaaaaagactgtcattcataccattcacacctaaagactgaattttatctgttttaaaaatgaacttctcccgctacacagaagtaacaaatatggtagtcagttttgtatttagaaatgtattggtagcagggatgttttcataattttcagagattatgcattcttcatgaatacttttgtattgctgcttgcaaatatgcatttccaaacttgaaatataggtgtgaacagtgtgtaccagtttaaagctttcacttcatttgtgttttttaattaaggatttagaagttcccccaattacaaactggttttaaatattggacatactggttttaatacctgctttgcatattcacacatggtcaactgggacatgttaaactttgatttgtcaaattttatgctgtgtggaatactaactatatgtattttaacttagttttaatattttcatttttggggaaaaatcttttttcacttctcatgatagctgttatatatatatgctaaatctttatatacagaaatatcagtacttgaacaaattcaaagcacatttggtttattaacccttgctccttgcatggctcattaggttcaaattataactgatttacattttcagctatatttactttttaaatgcttgagtttcccattttaaaatctaaactagacatcttaattggtgaaagttgtttaaactacttattgttggtaggcacatcgtgtcaagtgaagtagttttataggtatgggttttttctcccccttcaccagggtgggtggaataagttgatttggccaatgtgtaatatttaaactgttctgtaaaataagtgtctggccatttggtatgatttctgtgtgtgaaaggtcccaaaatcaaaatggtacatccataatcagccaccatttaacccttccttgttctaaaacaaaaaccaaagggcgctggttggtagggtgaggtgggggagtattttaatttttggaatttgggaagcagacagctttactttgtaaggttggaacagcagcactatacatgaaatataaaccaaaaacctttactgtttctaaatttcctagattgctattatttggttgtaagttgagtattccacagaaagtggtaattatctcttctctcttcctccattagaaaattaggtaaataatggattcctataatgggagcatcaccacttattaaaacacacatagaatgatgaattaaaaaagttttctaggattgtcttttattctgccacatttattgataaacagtgaaggaatttttaaaaaatttttaagaattgtttgtcacgtcatttttagaaatgttctacctgtatatggtaatgtccagttttaaaaatattggacatcttcaatcttaaacatttctatttagctgattggttctcacatatacttctaaaagaaacttttatgttataagagttactttttggataagatttattaatctcagttacctactattctgacattttaggaaggaggtaattgtttttaatgatggataaacttgtgctggtgttttggatcttatgatgctgagcatgttctgcactggtgctaatgtctaatataattttatatttacacacatacgtgctacccagagattaatttagtccatatgaactattgacccattgttcattgagacagcaacatacgcactcctaaatcagtgtgtttagacttttcaagtatctaactcatttccaaacatgtaccatgttttataaacctcttgatttccagcaacatactatagaaaacacctgctactcaaaacacaacttctcagtgtcatccattgctgtcgtgagagacaacatagcaatatctggtatgttgcaagctttcaagatagcctgaacttaaaaagttggtgcattagttgtatctgatggatataaatttgcctcctagttcactttgtgtcaagagctaaaactgtgaacctaactttctcttattggtgggtaataactgaaaataaagatttattttcatgctcacttcttaaaagtcataaaaacaatcaaatcaaaaacacagcaaacacaacaaaaaaaaaaaaagagcaaaaaaagagagaagaaagaaaaaaacaaaaagaaagaaaacgagaagaaaaaaaaaaaagaaaaaagaaggaggcacgacacaaacaaaaccacacggaggaacagcaaaataagagaaagataataggagagaagcaaagaggagagagaaaaaaaagacgagcaggacaagcaaaaggaacgaggaaaacaaagagagattgagaggaacgccacagtgaggaggacataaagacaacaacaaaagagagaaggcagtgaaaaaaacagagctactacacaagcaaagtcgaaacagacaagaagtgaacaaccagagactgaaagggagacagagaacgcaggggggcgaagggcaagaggtaagaaggagagaggaagcacaagaagagaaggaaaaaaaagat

SEQ ID NO: 336396 - DNA, 3885 bp, Homo sapiens
agttagccctgagcccgagggggcgtgagtgaaaccaaagagcactttcgcgagtcagttacgccgtcacggttttttggtttcaaggtagctgaagacctagagagtttaagggtggccagagcaggtggcaggactccgcccaccaccacgcttcccttccttcagcccgcacgcttcactcccctcatggggtctcgcctctcaggcgcgcgcgaagagttgtcgcgcggtgcgtcctgggaattgtagtcccgacgcggagagtcgcctcaggagaaatgactctggcctacataccccacagtgccttgcggcgcaggccgctcccggatgtgtgcctggcgccggaagagaagacggcccccctctctcggcccggccatcttgtgggaagagctgaagcaggcgctcttggctcggcgcggcccgctgcaatccgtggaggaacgcgccgccgagccaccatcatgcctgggcacttacaggaaggcttcggctgcgtggtcaccaaccgattcgaccagttatttgacgacgaatcggaccccttcgaggtgctgaaggcagcagagaacaagaaaaaagaagccggcgggggcggcgttgggggccctggggccaagagcgcagctcaggccgcggcccagaccaactccaacgcggcaggcaaacagctgcgcaaggagtcccagaaagaccgcaagaacccgctgccccccagcgttggcgtggttgacaagaaagaggagacgcagccgcccgtggcgcttaagaaagaaggaataagacgagttggaagaagacctgatcaacaacttcagggtgaagggaaaataattgatagaagaccagaaaggcgaccacctcgtgaacgaagattcgaaaagccacttgaagaaaagggtgaaggaggcgaattttcagttgatagaccgattattgaccgacctattcgaggtcgtggtggtcttggaagaggtcgagggggccgtggacgtggaatgggccgaggagatggatttgattctcgtggcaaacgtgaatttgataggcatagtggaagtgatagatctggcctgaagcacgaggacaaacgtggaggtagcggatctcacaactggggaactgtcaaagacgaattaactgacttggatcaatcaaatgtgactgaggaaacacctgaaggtgaagaacatcatccagtggcagacactgaaaataaggagaatgaagttgaagaggtaaaagaggagggtccaaaagagatgactttggatgagtggaaggctattcaaaataaggaccgggcaaaagtagaatttaatatccgaaaaccaaatgaaggtgctgatgggcagtggaagaagggatttgttcttcataaatcaaagagtgaagaggctcatgctgaagattcggttatggaccatcatttccggaagccagcaaatgatataacgtctcagctggagatcaattttggagaccttggccgcccaggacgtggcggcaggggaggacgaggtggacgtgggcgtggtgggcgcccaaaccgtggcagcaggaccgacaagtcaagtgcttctgctcctgatgtggatgacccagaggcattcccagctctggcttaactggatgccataagacaaccctggttcctttgtgaacccttctgttcaaagcttttgcatgcttaaggattccaaacgactaagaaattaaaaaaaaaaagactgtcattcataccattcacacctaaagactgaattttatctgttttaaaaatgaacttctcccgctacacagaagtaacaaatatggtagtcagttttgtatttagaaatgtattggtagcagggatgttttcataattttcagagattatgcattcttcatgaatacttttgtattgctgcttgcaaatatgcatttccaaacttgaaatataggtgtgaacagtgtgtaccagtttaaagctttcacttcatttgtgttttttaattaaggatttagaagttcccccaattacaaactggttttaaatattggacatactggttttaatacctgctttgcatattcacacatggtcaactgggacatgttaaactttgatttgtcaaattttatgctgtgtggaatactaactatatgtattttaacttagttttaatattttcatttttggggaaaaatcttttttcacttctcatgatagctgttatatatatatgctaaatctttatatacagaaatatcagtacttgaacaaattcaaagcacatttggtttattaacccttgctccttgcatggctcattaggttcaaattataactgatttacattttcagctatatttactttttaaatgcttgagtttcccattttaaaatctaaactagacatcttaattggtgaaagttgtttaaactacttattgttggtaggcacatcgtgtcaagtgaagtagttttataggtatgggttttttctcccccttcaccagggtgggtggaataagttgatttggccaatgtgtaatatttaaactgttctgtaaaataagtgtctggccatttggtatgatttctgtgtgtgaaaggtcccaaaatcaaaatggtacatccataatcagccaccatttaacccttccttgttctaaaacaaaaaccaaagggcgctggttggtagggtgaggtgggggagtattttaatttttggaatttgggaagcagacagctttactttgtaaggttggaacagcagcactatacatgaaatataaaccaaaaacctttactgtttctaaatttcctagattgctattatttggttgtaagttgagtattccacagaaagtggtaattatctcttctctcttcctccattagaaaattaggtaaataatggattcctataatgggagcatcaccacttattaaaacacacatagaatgatgaattaaaaaagttttctaggattgtcttttattctgccacatttattgataaacagtgaaggaatttttaaaaaatttttaagaattgtttgtcacgtcatttttagaaatgttctacctgtatatggtaatgtccagttttaaaaatattggacatcttcaatcttaaacatttctatttagctgattggttctcacatatacttctagttacctactattctgacattttaggaaggaggtaattgtttttaatgatggataaacttgtgctggtgttttggatcttatgatgctgagcatgttctgcactggtgctaatgtctaatataattttatatttacacacatacgtgctacccagagattaatttagtccatatgaactattgacccattgttcattgagacagcaacatacgcactcctaaatcagtgtgtttagacttttcaagtatctaactcatttccaaacatgtaccatgttttataaacctcttgatttccagcaacatactatagaaaacacctgctactcaaaacacaacttctcagtgtcatccattgctgtcgtgagagacaacatagcaatatctggtatgttgcaagctttcaagatagcctgaacttaaaaagttggtgcattagttgtatctgatggatataaatttgcctcctagttcactttgtgtcaagagctaaaactgtgaacctaactttctcttattggtgggtaataactgaaaataaagatttattttcatgctcacttcttaaaagtcataaaaacaatcaaataggatcatgtttattgtcatgtgtttcctggtttctgacctgtgtgcacacccctgtgtgtttataatttttaaattgaattttatatggggtttttatttgctaaaaaccaggctgttgaa

SEQ ID NO: 336397 - DNA, 4177 bp, Homo sapiens
agttagccctgagcccgagggggcgtgagtgaaaccaaagagcactttcgcgagtcagttacgccgtcacggttttttggtttcaaggtagctgaagacctagagagtttaagggtggccagagcaggtggcaggactccgcccaccaccacgcttcccttccttcagcccgcacgcttcactcccctcatggggtctcgcctctcaggcgcgcgcgaagagttgtcgcgcggtgcgtcctgggaattgtagtcccgacgcggagagtcgcctcaggagaaatgactctggcctacataccccacagtgccttgcggcgcaggccgctcccggatgtgtgcctggcgccggaagagaagacggcccccctctctcggcccggccatcttgtgggaagagctgaagcaggcgctcttggctcggcgcggcccgctgcaatccgtggaggaacgcgccgccgagccaccatcatgcctgggcacttacaggaaggcttcggctgcgtggtcaccaaccgattcgaccagttatttgacgacgaatcggaccccttcgaggtgctgaaggcagcagagaacaagaaaaaagaagccggcgggggcggcgttgggggccctggggccaagagcgcagctcaggccgcggcccagaccaactccaacgcggcaggcaaacagctgcgcaaggagtcccagaaagaccgcaagaacccgctgccccccagcgttggcgtggttgacaagaaagaggagacgcagccgcccgtggcgcttaagaaagaaggaataagacgagttggaagaagacctgatcaacaacttcagggtgaagggaaaataattgatagaagaccagaaaggcgaccacctcgtgaacgaagattcgaaaagccacttgaagaaaagggtgaaggaggcgaattttcagttgatagaccgattattgaccgacctattcgaggtcgtggtggtcttggaagaggtcgagggggccgtggacgtggaatgggccgaggagatggatttgattctcgtggcaaacgtgaatttgataggcatagtggaagtgatagatctggcctgaagcacgaggacaaacgtggaggtagcggatctcacaactggggaactgtcaaagacgaattaactgacttggatcaatcaaatgtgactgaggaaacacctgaaggtgaagaacatcatccagtggcagacactgaaaataaggagaatgaagttgaagaggtaaaagaggagggtccaaaagagatgactttggatgagtggaaggctattcaaaataaggaccgggcaaaagtagaatttaatatccgaaaaccaaatgaaggtgctgatgggcagtggaagaagggatttgttcttcataaatcaaagagtgaagaggctcatgctgaagattcggttatggaccatcatttccggaagccagcaaatgatataacgtctcagctggagatcaattttggagaccttggccgcccaggacgtggcggcaggggaggacgaggtggacgtgggcgtggtgggcgcccaaaccgtggcagcaggaccgacaagtcaagtgcttctgctcctgatgtggatgacccagaggcattcccagctctggcttaactggatgccataagacaaccctggttcctttgtgaacccttctgttcaaagcttttgcatgcttaaggattccaaacgactaagaaattaaaaaaaaaaagactgtcattcataccattcacacctaaagactgaattttatctgttttaaaaatgaacttctcccgctacacagaagtaacaaatatggtagtcagttttgtatttagaaatgtattggtagcagggatgttttcataattttcagagattatgcattcttcatgaatacttttgtattgctgcttgcaaatatgcatttccaaacttgaaatataggtgtgaacagtgtgtaccagtttaaagctttcacttcatttgtgttttttaattaaggatttagaagttcccccaattacaaactggttttaaatattggacatactggttttaatacctgctttgcatattcacacatggtcaactgggacatgttaaactttgatttgtcaaattttatgctgtgtggaatactaactatatgtattttaacttagttttaatattttcatttttggggaaaaatcttttttcacttctcatgatagctgttatatatatatgctaaatctttatatacagaaatatcagtacttgaacaaattcaaagcacatttggtttattaacccttgctccttgcatggctcattaggttcaaattataactgatttacattttcagctatatttactttttaaatgcttgagtttcccattttaaaatctaaactagacatcttaattggtgaaagttgtttaaactacttattgttggtaggcacatcgtgtcaagtgaagtagttttataggtatgggttttttctcccccttcaccagggtgggtggaataagttgatttggccaatgtgtaatatttaaactgttctgtaaaataagtgtctggccatttggtatgatttctgtgtgtgaaaggtcccaaaatcaaaatggtacatccataatcagccaccatttaacccttccttgttctaaaacaaaaaccaaagggcgctggttggtagggtgaggtgggggagtattttaatttttggaatttgggaagcagacagctttactttgtaaggttggaacagcagcactatacatgaaatataaaccaaaaacctttactgtttctaaatttcctagattgctattatttggttgtaagttgagtattccacagaaagtggtaattatctcttctctcttcctccattagaaaattaggtaaataatggattcctataatgggagcatcaccacttctatgtgtgttttaataagtggtgatgctcccattataggaatccattatttacctaattttctaatggaggaagagagaagagataattaccactttctgtggaatactcaacttacaaccaaataatagcaatctaggaaatttagaaacagtaaaggtttttggtttatatttcatgtatagtgctgctgttccaaccttacaaagtaaagctgtctgcttcccaaattccaaaaattaaaacacacatagaatgatgaattaaaaaagttttctaggattgtcttttattctgccacatttattgataaacagtgaaggaatttttaaaaaatttttaagaattgtttgtcacgtcatttttagaaatgttctacctgtatatggtaatgtccagttttaaaaatattggacatcttcaatcttaaacatttctatttagctgattggttctcacatatacttctaaaagaaacttttatgttataagagttactttttggataagatttattaatctcagttacctactattctgacattttaggaaggaggtaattgtttttaatgatggataaacttgtgctggtgttttggatcttatgatgctgagcatgttctgcactggtgctaatgtctaatataattttatatttacacacatacgtgctacccagagattaatttagtccatatgaactattgacccattgttcattgagacagcaacatacgcactcctaaatcagtgtgtttagacttttcaagtatctaactcatttccaaacatgtaccatgttttataaacctcttgatttccagcaacatactatagaaaacacctgctactcaaaacacaacttctcagtgtcatccattgctgtcgtgagagacaacatagcaatatctggtatgttgcaagctttcaagatagcctgaacttaaaaagttggtgcattagttgtatctgatggatataaatttgcctcctagttcactttgtgtcaagagctaaaactgtgaacctaactttctcttattggtgggtaataactgaaaataaagatttattttcatgctcacttcttaaaagtcataaaaacaatcaaataggatcatgtttattgtcatgtgtttcctggtttctgacctgtgtgcacacccctgtgtgtttataatttttaaattgaattttatatggggtttttatttgctaaaaaccaggctgttgaa

SEQ ID NO: 336398 - DNA, 3851 bp, Homo sapiens
agttagccctgagcccgagggggcgtgagtgaaaccaaagagcactttcgcgagtcagttacgccgtcacggttttttggtttcaaggtagctgaagacctagagagtttaagggtggccagagcaggtggcaggactccgcccaccaccacgcttcccttccttcagcccgcacgcttcactcccctcatggggtctcgcctctcaggcgcgcgcgaagagttgtcgcgcggtgcgtcctgggaattgtagtcccgacgcggagagtcgcctcaggagaaatgactctggcctacataccccacagtgccttgcggcgcaggccgctcccggatgtgtgcctggcgccggaagagaagacggcccccctctctcggcccggccatcttgtgggaagagctgaagcaggcgctcttggctcggcgcggcccgctgcaatccgtggaggaacgcgccgccgagccaccatcatgcctgggcacttacaggaaggcttcggctgcgtggtcaccaaccgattcgaccagttatttgacgacgaatcggaccccttcgaggtgctgaaggcagcagagaacaagaaaaaagaagccggcgggggcggcgttgggggccctggggccaagagcgcagctcaggccgcggcccagaccaactccaacgcggcaggcaaacagctgcgcaaggagtcccagaaagaccgcaagaacccgctgccccccagcgttggcgtggttgacaagaaagaggagacgcagccgcccgtggcgcttaagaaagaaggaataagacgagttggaagaagacctgatcaacaacttcagggtgaagggaaaataattgatagaagaccagaaaggcgaccacctcgtgaacgaagattcgaaaagccacttgaagaaaagggtgaaggaggcgaattttcagttgatagaccgattattgaccgacctattcgaggtcgtggtggtcttggaagaggtcgagggggccgtggacgtggaatgggccgaggagatggatttgattctcgtggcaaacgtgaatttgataggcatagtggaagtgatagatcttctttttcacattacagtggcctgaagcacgaggacaaacgtggaggtagcggatctcacaactggggaactgtcaaagacgaattaacagagtcccccaaatacattcagaaacaaatatcttataattacagtgacttggatcaatcaaatgtgactgaggaaacacctgaaggtgaagaacatcatccagtggcagacactgaaaataaggagaatgaagttgaagaggtaaaagaggagggtccaaaagagatgactttggatgagtggaaggctattcaaaataaggaccgggcaaaagtagaatttaatatccgaaaaccaaatgaaggtgctgatgggcagtggaagaagggatttgttcttcataaatcaaagagtgaagaggctcatgctgaagattcggttatggaccatcatttccggaagccagcaaatgatataacgtctcagctggagatcaattttggagaccttggccgcccaggacgtggcggcaggggaggacgaggtggacgtgggcgtggtgggcgcccaaaccgtggcagcaggaccgacaagtcaagtgcttctgctcctgatgtggatgacccagaggcattcccagctctggcttaactggatgccataagacaaccctggttcctttgtgaacccttctgttcaaagcttttgcatgcttaaggattccaaacgactaagaaattaaaaaaaaaaagactgtcattcataccattcacacctaaagactgaattttatctgttttaaaaatgaacttctcccgctacacagaagtaacaaatatggtagtcagttttgtatttagaaatgtattggtagcagggatgttttcataattttcagagattatgcattcttcatgaatacttttgtattgctgcttgcaaatatgcatttccaaacttgaaatataggtgtgaacagtgtgtaccagtttaaagctttcacttcatttgtgttttttaattaaggatttagaagttcccccaattacaaactggttttaaatattggacatactggttttaatacctgctttgcatattcacacatggtcaactgggacatgttaaactttgatttgtcaaattttatgctgtgtggaatactaactatatgtattttaacttagttttaatattttcatttttggggaaaaatcttttttcacttctcatgatagctgttatatatatatgctaaatctttatatacagaaatatcagtacttgaacaaattcaaagcacatttggtttattaacccttgctccttgcatggctcattaggttcaaattataactgatttacattttcagctatatttactttttaaatgcttgagtttcccattttaaaatctaaactagacatcttaattggtgaaagttgtttaaactacttattgttggtaggcacatcgtgtcaagtgaagtagttttataggtatgggttttttctcccccttcaccagggtgggtggaataagttgatttggccaatgtgtaatatttaaactgttctgtaaaataagtgtctggccatttggtatgatttctgtgtgtgaaaggtcccaaaatcaaaatggtacatccataatcagccaccatttaacccttccttgttctaaaacaaaaaccaaagggcgctggttggtagggtgaggtgggggagtattttaatttttggaatttgggaagcagacagctttactttgtaaggttggaacagcagcactatacatgaaatataaaccaaaaacctttactgtttctaaatttcctagattgctattatttggttgtaagttgagtattccacagaaagtggtaattatctcttctctcttcctccattagaaaattaggtaaataatggattcctataatgggagcatcaccacttattaaaacacacatagaatgatgaattaaaaaagttttctaggattgtcttttattctgccacatttattgataaacagtgaaggaatttttaaaaaatttttaagaattgtttgtcacgtcatttttagaaatgttctacctgtatatggtaatgtccagttttaaaaatattggacatcttcaatcttaaacatttctatttagctgattggttctcacatatacttctaaaagaaacttttatgttataagagttactttttggataagatttattaatctcagttacctactattctgacattttaggaaggaggtaattgtttttaatgatggataaacttgtgctggtgttttggatcttatgatgctgagcatgttctgcactggtgctaatgtctaatataattttatatttacacacatacgtgctacccagagattaatttagtccatatgaactattgacccattgttcattgagacagcaacatacgcactcctaaatcagtgtgtttagacttttcaagtatctaactcatttccaaacatgtaccatgttttataaacctcttgatttccagcaacatactatagaaaacacctgctactcaaaacacaacttctcagtgtcatccattgctgtcgtgagagacaacatagcaatatctggtatgttgcaagctttcaagatagcctgaacttaaaaagttggtgcattagttgtatctgatggatataaatttgcctcctagttcactttgtgtcaagagctaaaactgtgaacctaactttctcttattggtgggtaataactgaaaataaagatttattttcatgctca

SEQ ID NO: 336399 - DNA, 3833 bp, Homo sapiens
agttagccctgagcccgagggggcgtgagtgaaaccaaagagcactttcgcgagtcagttacgccgtcacggttttttggtttcaaggtagctgaagacctagagagtttaagggtggccagagcaggtggcaggactccgcccaccaccacgcttcccttccttcagcccgcacgcttcactcccctcatggggtctcgcctctcaggcgcgcgcgaagagttgtcgcgcggtgcgtcctgggaattgtagtcccgacgcggagagtcgcctcaggagaaatgactctggcctacataccccacagtgccttgcggcgcaggccgctcccggatgtgtgcctggcgccggaagagaagacggcccccctctctcggcccggccatcttgtgggaagagctgaagcaggcgctcttggctcggcgcggcccgctgcaatccgtggaggaacgcgccgccgagccaccatcatgcctgggcacttacaggaaggcttcggctgcgtggtcaccaaccgattcgaccagttatttgacgacgaatcggaccccttcgaggtgctgaaggcagcagagaacaagaaaaaagaagccggcgggggcggcgttgggggccctggggccaagagcgcagctcaggccgcggcccagaccaactccaacgcggcaggcaaacagctgcgcaaggagtcccagaaagaccgcaagaacccgctgccccccagcgttggcgtggttgacaagaaagaggagacgcagccgcccgtggcgcttaagaaagaaggaataagacgagttggaagaagacctgatcaacaacttcagggtgaagggaaaataattgatagaagaccagaaaggcgaccacctcgtgaacgaagattcgaaaagccacttgaagaaaagggtgaaggaggcgaattttcagttgatagaccgattattgaccgacctattcgaggtcgtggtggtcttggaagaggtcgagggggccgtggacgtggaatgggccgaggagatggatttgattctcgtggcaaacgtgaatttgataggcatagtggaagtgatagatctggcctgaagcacgaggacaaacgtggaggtagcggatctcacaactggggaactgtcaaagacgaattaacagagtcccccaaatacattcagaaacaaatatcttataattacagtgacttggatcaatcaaatgtgactgaggaaacacctgaaggtgaagaacatcatccagtggcagacactgaaaataaggagaatgaagttgaagaggtaaaagaggagggtccaaaagagatgactttggatgagtggaaggctattcaaaataaggaccgggcaaaagtagaatttaatatccgaaaaccaaatgaaggtgctgatgggcagtggaagaagggatttgttcttcataaatcaaagagtgaagaggctcatgctgaagattcggttatggaccatcatttccggaagccagcaaatgatataacgtctcagctggagatcaattttggagaccttggccgcccaggacgtggcggcaggggaggacgaggtggacgtgggcgtggtgggcgcccaaaccgtggcagcaggaccgacaagtcaagtgcttctgctcctgatgtggatgacccagaggcattcccagctctggcttaactggatgccataagacaaccctggttcctttgtgaacccttctgttcaaagcttttgcatgcttaaggattccaaacgactaagaaattaaaaaaaaaaagactgtcattcataccattcacacctaaagactgaattttatctgttttaaaaatgaacttctcccgctacacagaagtaacaaatatggtagtcagttttgtatttagaaatgtattggtagcagggatgttttcataattttcagagattatgcattcttcatgaatacttttgtattgctgcttgcaaatatgcatttccaaacttgaaatataggtgtgaacagtgtgtaccagtttaaagctttcacttcatttgtgttttttaattaaggatttagaagttcccccaattacaaactggttttaaatattggacatactggttttaatacctgctttgcatattcacacatggtcaactgggacatgttaaactttgatttgtcaaattttatgctgtgtggaatactaactatatgtattttaacttagttttaatattttcatttttggggaaaaatcttttttcacttctcatgatagctgttatatatatatgctaaatctttatatacagaaatatcagtacttgaacaaattcaaagcacatttggtttattaacccttgctccttgcatggctcattaggttcaaattataactgatttacattttcagctatatttactttttaaatgcttgagtttcccattttaaaatctaaactagacatcttaattggtgaaagttgtttaaactacttattgttggtaggcacatcgtgtcaagtgaagtagttttataggtatgggttttttctcccccttcaccagggtgggtggaataagttgatttggccaatgtgtaatatttaaactgttctgtaaaataagtgtctggccatttggtatgatttctgtgtgtgaaaggtcccaaaatcaaaatggtacatccataatcagccaccatttaacccttccttgttctaaaacaaaaaccaaagggcgctggttggtagggtgaggtgggggagtattttaatttttggaatttgggaagcagacagctttactttgtaaggttggaacagcagcactatacatgaaatataaaccaaaaacctttactgtttctaaatttcctagattgctattatttggttgtaagttgagtattccacagaaagtggtaattatctcttctctcttcctccattagaaaattaggtaaataatggattcctataatgggagcatcaccacttattaaaacacacatagaatgatgaattaaaaaagttttctaggattgtcttttattctgccacatttattgataaacagtgaaggaatttttaaaaaatttttaagaattgtttgtcacgtcatttttagaaatgttctacctgtatatggtaatgtccagttttaaaaatattggacatcttcaatcttaaacatttctatttagctgattggttctcacatatacttctaaaagaaacttttatgttataagagttactttttggataagatttattaatctcagttacctactattctgacattttaggaaggaggtaattgtttttaatgatggataaacttgtgctggtgttttggatcttatgatgctgagcatgttctgcactggtgctaatgtctaatataattttatatttacacacatacgtgctacccagagattaatttagtccatatgaactattgacccattgttcattgagacagcaacatacgcactcctaaatcagtgtgtttagacttttcaagtatctaactcatttccaaacatgtaccatgttttataaacctcttgatttccagcaacatactatagaaaacacctgctactcaaaacacaacttctcagtgtcatccattgctgtcgtgagagacaacatagcaatatctggtatgttgcaagctttcaagatagcctgaacttaaaaagttggtgcattagttgtatctgatggatataaatttgcctcctagttcactttgtgtcaagagctaaaactgtgaacctaactttctcttattggtgggtaataactgaaaataaagatttattttcatgctca

SEQ ID NO: 336400 - DNA, 3456 bp, Homo sapiens
  misc_feature (5)..(6): n is a, c, g, or t
  misc_feature (25)..(25): n is a, c, g, or t
aaagnncgcgggcgaacgaaactanggctaggtacgaggctgggtgttgaagaagcaggcgctcttggctcggcgcggcccgctgcaatccgtggaggaacgcgccgccgagccaccatcatgcctgggcacttacaggaaggcttcggctgcgtggtcaccaaccgattcgaccagttatttgacgacgaatcggaccccttcgaggtgctgaaggcagcagagaacaagaaaaaagaagccggcgggggcggcgttgggggccctggggccaagagcgcagctcaggccgcggcccagaccaactccaacgcggcaggcaaacagctgcgcaaggagtcccagaaagaccgcaagaacccgctgccccccagcgttggcgtggttgacaagaaagaggagacgcagccgcccgtggcgcttaagaaagaaggaataagacgagttggaagaagacctgatcaacaacttcagggtgaagggaaaataattgatagaagaccagaaaggcgaccacctcgtgaacgaagattcgaaaagccacttgaagaaaagggtgaaggaggcgaattttcagttgatagaccgattattgaccgacctattcgaggtcgtggtggtcttggaagaggtcgagggggccgtggacgtggaatgggccgaggagatggatttgattctcgtggcaaacgtgaatttgataggcatagtggaagtgatagatcttctttttcacattacagtggcctgaagcacgaggacaaacgtggaggtagcggatctcacaactggggaactgtcaaagacgaattaactgacttggatcaatcaaatgtgactgaggaaacacctgaaggtgaagaacatcatccagtggcagacactgaaaataaggagaatgaagttgaagaggtaaaagaggagggtccaaaagagatgactttggatgagtggaaggctattcaaaataaggaccgggcaaaagtagaatttaatatccgaaaaccaaatgaaggtgctgatgggcagtggaagaagggatttgttcttcataaatcaaagagtgaagaggctcatgctgaagattcggttatggaccatcatttccggaagccagcaaatgatataacgtctcagctggagatcaattttggagaccttggccgcccaggacgtggcggcaggggaggacgaggtggacgtgggcgtggtgggcgcccaaaccgtggcagcaggaccgacaagtcaagtgcttctgctcctgatgtggatgacccagaggcattcccagctctggcttaactggatgccataagacaaccctggttcctttgtgaacccttctgttcaaagcttttgcatgcttaaggattccaaacgactaagaaattaaaaaaaaaaagactgtcattcataccattcacacctaaagactgaattttatctgttttaaaaatgaacttctcccgctacacagaagtaacaaatatggtagtcagttttgtatttagaaatgtattggtagcagggatgttttcataattttcagagattatgcattcttcatgaatacttttgtattgctgcttgcaaatatgcatttccaaacttgaaatataggtgtgaacagtgtgtaccagtttaaagctttcacttcatttgtgttttttaattaaggatttagaagttcccccaattacaaactggttttaaatattggacatactggttttaatacctgctttgcatattcacacatggtcaactgggacatgttaaactttgatttgtcaaattttatgctgtgtggaatactaactatatgtattttaacttagttttaatattttcatttttggggaaaaatcttttttcacttctcatgatagctgttatatatatatgctaaatctttatatacagaaatatcagtacttgaacaaattcaaagcacatttggtttattaacccttgctccttgcatggctcattaggttcaaattataactgatttacattttcagctatatttactttttaaatgcttgagtttcccattttaaaatctaaactagacatcttaattggtgaaagttgtttaaactacttattgttggtaggcacatcgtgtcaagtgaagtagttttataggtatgggttttttctcccccttcaccagggtgggtggaataagttgatttggccaatgtgtaatatttaaactgttctgtaaaataagtgtctggccatttggtatgatttctgtgtgtgaaaggtcccaaaatcaaaatggtacatccataatcagccaccatttaacccttccttgttctaaaacaaaaaccaaagggcgctggttggtagggtgaggtgggggagtattttaatttttggaatttgggaagcagacagctttactttgtaaggttggaacagcagcactatacatgaaatataaaccaaaaacctttactgtttctaaatttcctagattgctattatttggttgtaagttgagtattccacagaaagtggtaattatctcttctctcttcctccattagaaaattaggtaaataatggattcctataatgggagcatcaccacttattaaaacacacatagaatgatgaattaaaaaagttttctaggattgtcttttattctgccacatttattgataaacagtgaaggaatttttaaaaaatttttaagaattgtttgtcacgtcatttttagaaatgttctacctgtatatggtaatgtccagttttaaaaatattggacatcttcaatcttaaacatttctatttagctgattggttctcacatatacttctaaaagaaacttttatgttataagagttactttttggataagatttattaatctcagttacctactattctgacattttaggaaggaggtaattgtttttaatgatggataaacttgtgctggtgttttggatcttatgatgctgagcatgttctgcactggtgctaatgtctaatataattttatatttacacacatacgtgctacccagagattaatttagtccatatgaactattgacccattgttcattgagacagcaacatacgcactcctaaatcagtgtgtttagacttttcaagtatctaactcatttccaaacatgtaccatgttttataaacctcttgatttccagcaacatactatagaaaacacctgctactcaaaacacaacttctcagtgtcatccattgctgtcgtgagagacaacatagcaatatctggtatgttgcaagctttcaagatagcctgaacttaaaaagttggtgcattagttgtatctgatggatataaatttgcctcctagttcactttgtgtcaagagctaaaactgtgaacctaactttctcttattggtgggtaataactgaaaataaagatttattttcatgctca

SEQ ID NO: 336401 - DNA, 3445 bp, Homo sapiens
taactaggctagtacgaggcctccgggttaatcggacgaggaagcaggcgctcttggctcggcgcggcccgctgcaatccgtggaggaacgcgccgccgagccaccatcatgcctgggcacttacaggaaggcttcggctgcgtggtcaccaaccgattcgaccagttatttgacgacgaatcggaccccttcgaggtgctgaaggcagcagagaacaagaaaaaagaagccggcgggggcggcgttgggggccctggggccaagagcgcagctcaggccgcggcccagaccaactccaacgcggcaggcaaacagctgcgcaaggagtcccagaaagaccgcaagaacccgctgccccccagcgttggcgtggttgacaagaaagaggagacgcagccgcccgtggcgcttaagaaagaaggaataagacgagttggaagaagacctgatcaacaacttcagggtgaagggaaaataattgatagaagaccagaaaggcgaccacctcgtgaacgaagattcgaaaagccacttgaagaaaagggtgaaggaggcgaattttcagttgatagaccgattattgaccgacctattcgaggtcgtggtggtcttggaagaggtcgagggggccgtggacgtggaatgggccgaggagatggatttgattctcgtggcaaacgtgaatttgataggcatagtggaagtgatagatcttctttttcacattacagtggcctgaagcacgaggacaaacgtggaggtagcggatctcacaactggggaactgtcaaagacgaattaactgacttggatcaatcaaatgtgactgaggaaacacctgaaggtgaagaacatcatccagtggcagacactgaaaataaggagaatgaagttgaagaggtaaaagaggagggtccaaaagagatgactttggatgagtggaaggctattcaaaataaggaccgggcaaaagtagaatttaatatccgaaaaccaaatgaaggtgctgatgggcagtggaagaagggatttgttcttcataaatcaaagagtgaagaggctcatgctgaagattcggttatggaccatcatttccggaagccagcaaatgatataacgtctcagctggagatcaattttggagaccttggccgcccaggacgtggcggcaggggaggacgaggtggacgtgggcgtggtgggcgcccaaaccgtggcagcaggaccgacaagtcaagtgcttctgctcctgatgtggatgacccagaggcattcccagctctggcttaactggatgccataagacaaccctggttcctttgtgaacccttctgttcaaagcttttgcatgcttaaggattccaaacgactaagaaattaaaaaaaaaaagactgtcattcataccattcacacctaaagactgaattttatctgttttaaaaatgaacttctcccgctacacagaagtaacaaatatggtagtcagttttgtatttagaaatgtattggtagcagggatgttttcataattttcagagattatgcattcttcatgaatacttttgtattgctgcttgcaaatatgcatttccaaacttgaaatataggtgtgaacagtgtgtaccagtttaaagctttcacttcatttgtgttttttaattaaggatttagaagttcccccaattacaaactggttttaaatattggacatactggttttaatacctgctttgcatattcacacatggtcaactgggacatgttaaactttgatttgtcaaattttatgctgtgtggaatactaactatatgtattttaacttagttttaatattttcatttttggggaaaaatcttttttcacttctcatgatagctgttatatatatatgctaaatctttatatacagaaatatcagtacttgaacaaattcaaagcacatttggtttattaacccttgctccttgcatggctcattaggttcaaattataactgatttacattttcagctatatttactttttaaatgcttgagtttcccattttaaaatctaaactagacatcttaattggtgaaagttgtttaaactacttattgttggtaggcacatcgtgtcaagtgaagtagttttataggtatgggttttttctcccccttcaccagggtgggtggaataagttgatttggccaatgtgtaatatttaaactgttctgtaaaataagtgtctggccatttggtatgatttctgtgtgtgaaaggtcccaaaatcaaaatggtacatccataatcagccaccatttaacccttccttgttctaaaacaaaaaccaaagggcgctggttggtagggtgaggtgggggagtattttaatttttggaatttgggaagcagacagctttactttgtaaggttggaacagcagcactatacatgaaatataaaccaaaaacctttactgtttctaaatttcctagattgctattatttggttgtaagttgagtattccacagaaagtggtaattatctcttctctcttcctccattagaaaattaggtaaataatggattcctataatgggagcatcaccacttattaaaacacacatagaatgatgaattaaaaaagttttctaggattgtcttttattctgccacatttattgataaacagtgaaggaatttttaaaaaatttttaagaattgtttgtcacgtcatttttagaaatgttctacctgtatatggtaatgtccagttttaaaaatattggacatcttcaatcttaaacatttctatttagctgattggttctcacatatacttctaaaagaaacttttatgttataagagttactttttggataagatttattaatctcagttacctactattctgacattttaggaaggaggtaattgtttttaatgatggataaacttgtgctggtgttttggatcttatgatgctgagcatgttctgcactggtgctaatgtctaatataattttatatttacacacatacgtgctacccagagattaatttagtccatatgaactattgacccattgttcattgagacagcaacatacgcactcctaaatcagtgtgtttagacttttcaagtatctaactcatttccaaacatgtaccatgttttataaacctcttgatttccagcaacatactatagaaaacacctgctactcaaaacacaacttctcagtgtcatccattgctgtcgtgagagacaacatagcaatatctggtatgttgcaagctttcaagatagcctgaacttaaaaagttggtgcattagttgtatctgatggatataaatttgcctcctagttcactttgtgtcaagagctaaaactgtgaacctaactttctcttattggtgggtaataactgaaaataaagatttattttcatgctca

SEQ ID NO: 336402 - DNA, 1991 bp, Homo sapiens
agttagccctgagcccgagggggcgtgagtgaaaccaaagagcactttcgcgagtcagttacgccgtcacggttttttggtttcaaggtagctgaagacctagagagtttaagggtggccagagcaggtggcaggactccgcccaccaccacgcttcccttccttcagcccgcacgcttcactcccctcatggggtctcgcctctcaggcgcgcgcgaagagttgtcgcgcggtgcgtcctgggaattgtagtcccgacgcggagagtcgcctcaggagaaatgactctggcctacataccccacagtgccttgcggcgcaggccgctcccggatgtgtgcctggcgccggaagagaagacggcccccctctctcggcccggccatcttgtgggaagagctgaagcaggcgctcttggctcggcgcggcccgctgcaatccgtggaggaacgcgccgccgagccaccatcatgcctgggcacttacaggaaggcttcggctgcgtggtcaccaaccgattcgaccagttatttgacgacgaatcggaccccttcgaggtgctgaaggcagcagagaacaagaaaaaagaagccggcgggggcggcgttgggggccctggggccaagagcgcagctcaggccgcggcccagaccaactccaacgcggcaggcaaacagctgcgcaaggagtcccagaaagaccgcaagaacccgctgccccccagcgttggcgtggttgacaagaaagaggagacgcagccgcccgtggcgcttaagaaagaaggaataagacgagttggaagaagacctgatcaacaacttcagggtgaagggaaaataattgatagaagaccagaaaggcgaccacctcgtgaacgaagattcgaaaagccacttgaagaaaagggtgaaggaggcgaattttcagttgatagaccgattattgaccgacctattcgaggtcgtggtggtcttggaagaggtcgagggggccgtggacgtggaatgggccgaggagatggatttgattctcgtggcaaacgtgaatttgataggcatagtggaagtgatagatcttctttttcacattacagtggcctgaagcacgaggacaaacgtggaggtagcggatctcacaactggggaactgtcaaagacgaattaactgacttggatcaatcaaatgtgactgaggaaacacctgaaggtgaagaacatcatccagtggcagacactgaaaataaggagaatgaagttgaagaggtaaaagaggagggtccaaaagagatgactttggatgagtggaaggctattcaaaataaggaccgggcaaaagtagaatttaatatccgaaaaccaaatgaaggtgctgatgggcagtggaagaagggatttgttcttcataaatcaaagagtgaagaggctcatgctgaagattcggttatggaccatcatttccggaagccagcaaatgatataacgtctcagctggagatcaattttggagaccttggccgcccaggacgtggcggcaggggaggacgaggtggacgtgggcgtggtgggcgcccaaaccgtggcagcaggaccgacaagtcaagtgcttctgctcctgatgtggatgacccagaggcattcccagctctggcttaactggatgccataagacaaccctggttcctttgtgaacccttctgttcaaagcttttgcatgcttaaggattccaaacgactaagaaattaaaaaaaaaaagactgtcattcataccattcacacctaaagactgaattttatctgttttaaaaatgaacttctcccgctacacagaagtaacaaatatggtagtcagttttgtatttagaaatgtattggtagcagggatgttttcataattttcagagattatgcattcttcatgaatacttttgtattgctgcttgcaaatatgcatttccaaacttgaaatataggtgtgaacagtgtgtaccagt

SEQ ID NO: 336403 - DNA, 3292 bp, Homo sapiens
  misc_feature (26)..(26): n is a, c, g, or t
  misc_feature (31)..(31): n is a, c, g, or t
tgtgatagtgttctagaggatcccanactcngcacccttcgaggtgctgaaggcagcagagaacaagaaaaaagaagccggcgggggcggcgttgggggccctggggccaagagcgcagctcaggccgcggcccagaccaactccaacgcggcaggcaaacagctgcgcaaggagtcccagaaagaccgcaagaacccgctgccccccagcgttggcgtggttgacaagaaagaggagacgcagccgcccgtggcgcttaagaaagaaggaataagacgagttggaagaagacctgatcaacaacttcagggtgaagggaaaataattgatagaagaccagaaaggcgaccacctcgtgaacgaagattcgaaaagccacttgaagaaaagggtgaaggaggcgaattttcagttgatagaccgattattgaccgacctattcgaggtcgtggtggtcttggaagaggtcgagggggccgtggacgtggaatgggccgaggagatggatttgattctcgtggcaaacgtgaatttgataggcatagtggaagtgatagatcttctttttcacattacagtggcctgaagcacgaggacaaacgtggaggtagcggatctcacaactggggaactgtcaaagacgaattaactgacttggatcaatcaaatgtgactgaggaaacacctgaaggtgaagaacatcatccagtggcagacactgaaaataaggagaatgaagttgaagaggtaaaagaggagggtccaaaagagatgactttggatgagtggaaggctattcaaaataaggaccgggcaaaagtagaatttaatatccgaaaaccaaatgaaggtgctgatgggcagtggaagaagggatttgttcttcataaatcaaagagtgaagaggctcatgctgaagattcggttatggaccatcatttccggaagccagcaaatgatataacgtctcagctggagatcaattttggagaccttggccgcccaggacgtggcggcaggggaggacgaggtggacgtgggcgtggtgggcgcccaaaccgtggcagcaggaccgacaagtcaagtgcttctgctcctgatgtggatgacccagaggcattcccagctctggcttaactggatgccataagacaaccctggttcctttgtgaacccttctgttcaaagcttttgcatgcttaaggattccaaacgactaagaaattaaaaaaaaaaagactgtcattcataccattcacacctaaagactgaattttatctgttttaaaaatgaacttctcccgctacacagaagtaacaaatatggtagtcagttttgtatttagaaatgtattggtagcagggatgttttcataattttcagagattatgcattcttcatgaatacttttgtattgctgcttgcaaatatgcatttccaaacttgaaatataggtgtgaacagtgtgtaccagtttaaagctttcacttcatttgtgttttttaattaaggatttagaagttcccccaattacaaactggttttaaatattggacatactggttttaatacctgctttgcatattcacacatggtcaactgggacatgttaaactttgatttgtcaaattttatgctgtgtggaatactaactatatgtattttaacttagttttaatattttcatttttggggaaaaatcttttttcacttctcatgatagctgttatatatatatgctaaatctttatatacagaaatatcagtacttgaacaaattcaaagcacatttggtttattaacccttgctccttgcatggctcattaggttcaaattataactgatttacattttcagctatatttactttttaaatgcttgagtttcccattttaaaatctaaactagacatcttaattggtgaaagttgtttaaactacttattgttggtaggcacatcgtgtcaagtgaagtagttttataggtatgggttttttctcccccttcaccagggtgggtggaataagttgatttggccaatgtgtaatatttaaactgttctgtaaaataagtgtctggccatttggtatgatttctgtgtgtgaaaggtcccaaaatcaaaatggtacatccataatcagccaccatttaacccttccttgttctaaaacaaaaaccaaagggcgctggttggtagggtgaggtgggggagtattttaatttttggaatttgggaagcagacagctttactttgtaaggttggaacagcagcactatacatgaaatataaaccaaaaacctttactgtttctaaatttcctagattgctattatttggttgtaagttgagtattccacagaaagtggtaattatctcttctctcttcctccattagaaaattaggtaaataatggattcctataatgggagcatcaccacttattaaaacacacatagaatgatgaattaaaaaagttttctaggattgtcttttattctgccacatttattgataaacagtgaaggaatttttaaaaaatttttaagaattgtttgtcacgtcatttttagaaatgttctacctgtatatggtaatgtccagttttaaaaatattggacatcttcaatcttaaacatttctatttagctgattggttctcacatatacttctaaaagaaacttttatgttataagagttactttttggataagatttattaatctcagttacctactattctgacattttaggaaggaggtaattgtttttaatgatggataaacttgtgctggtgttttggatcttatgatgctgagcatgttctgcactggtgctaatgtctaatataattttatatttacacacatacgtgctacccagagattaatttagtccatatgaactattgacccattgttcattgagacagcaacatacgcactcctaaatcagtgtgtttagacttttcaagtatctaactcatttccaaacatgtaccatgttttataaacctcttgatttccagcaacatactatagaaaacacctgctactcaaaacacaacttctcagtgtcatccattgctgtcgtgagagacaacatagcaatatctggtatgttgcaagctttcaagatagcctgaacttaaaaagttggtgcattagttgtatctgatggatataaatttgcctcctagttcactttgtgtcaagagctaaaactgtgaacctaactttctcttattggtgggtaataactgaaaataaagatttattttcatgctca

SEQ ID NO: 336404 - DNA, 3815 bp, Homo sapiens
agttagccctgagcccgagggggcgtgagtgaaaccaaagagcactttcgcgagtcagttacgccgtcacggttttttggtttcaaggtagctgaagacctagagagtttaagggtggccagagcaggtggcaggactccgcccaccaccacgcttcccttccttcagcccgcacgcttcactcccctcatggggtctcgcctctcaggcgcgcgcgaagagttgtcgcgcggtgcgtcctgggaattgtagtcccgacgcggagagtcgcctcaggagaaatgactctggcctacataccccacagtgccttgcggcgcaggccgctcccggatgtgtgcctggcgccggaagagaagacggcccccctctctcggcccggccatcttgtgggaagagctgaagcaggcgctcttggctcggcgcggcccgctgcaatccgtggaggaacgcgccgccgagccaccatcatgcctgggcacttacaggaaggcttcggctgcgtggtcaccaaccgattcgaccagttatttgacgacgaatcggaccccttcgaggtgctgaaggcagcagagaacaagaaaaaagaagccggcgggggcggcgttgggggccctggggccaagagcgcagctcaggccgcggcccagaccaactccaacgcggcaggcaaacagctgcgcaaggagtcccagaaagaccgcaagaacccgctgccccccagcgttggcgtggttgacaagaaagaggagacgcagccccgccccggtttgggggggggtcccccgggggcccccttcaagaaagaaggaataagacgagttggaagaagacctgatcaacaacttcagggtgaagggaaaataattgatagaagaccagaaaggcgaccacctcgtgaacgaagattcgaaaagccacttgaagaaaagggtgaaggaggcgaattttcagttgatagaccgattattgaccgacctattcgaggtcgtggtggtcttggaagaggtcgagggggccgtggacgtggaatgggccgaggagatggatttgattctcgtggcaaacgtgaatttgataggcatagtggaagtgatagatctggcctgaagcacgaggacaaacgtggaggtagcggatctcacaactggggaactgtcaaagacgaattaactgacttggatcaatcaaatgtgactgaggaaacacctgaaggtgaagaacatcatccagtggcagacactgaaaataaggagaatgaagttgaagaggtaaaagaggagggtccaaaagagatgactttggatgagtggaaggctattcaaaataaggaccgggcaaaagtagaatttaatatccgaaaaccaaatgaaggtgctgatgggcagtggaagaagggatttgttcttcataaatcaaagagtgaagaggctcatgctgaagattcggttatggaccatcatttccggaagccagcaaatgatataacgtctcagctggagatcaattttggagaccttggccgcccaggacgtggcggcaggggaggacgaggtggacgtgggcgtggtgggcgcccaaaccgtggcagcaggaccgacaagtcaagtgcttctgctcctgatgtggatgacccagaggcattcccagctctggcttaactggatgccataagacaaccctggttcctttgtgaacccttctgttcaaagcttttgcatgcttaaggattccaaacgactaagaaattaaaaaaaaaaagactgtcattcataccattcacacctaaagactgaattttatctgttttaaaaatgaacttctcccgctacacagaagtaacaaatatggtagtcagttttgtatttagaaatgtattggtagcagggatgttttcataattttcagagattatgcattcttcatgaatacttttgtattgctgcttgcaaatatgcatttccaaacttgaaatataggtgtgaacagtgtgtaccagtttaaagctttcacttcatttgtgttttttaattaaggatttagaagttcccccaattacaaactggttttaaatattggacatactggttttaatacctgctttgcatattcacacatggtcaactgggacatgttaaactttgatttgtcaaattttatgctgtgtggaatactaactatatgtattttaacttagttttaatattttcatttttggggaaaaatcttttttcacttctcatgatagctgttatatatatatgctaaatctttatatacagaaatatcagtacttgaacaaattcaaagcacatttggtttattaacccttgctccttgcatggctcattaggttcaaattataactgatttacattttcagctatatttactttttaaatgcttgagtttcccattttaaaatctaaactagacatcttaattggtgaaagttgtttaaactacttattgttggtaggcacatcgtgtcaagtgaagtagttttataggtatgggttttttctcccccttcaccagggtgggtggaataagttgatttggccaatgtgtaatatttaaactgttctgtaaaataagtgtctggccatttggtatgatttctgtgtgtgaaaggtcccaaaatcaaaatggtacatccataatcagccaccatttaacccttccttgttctaaaacaaaaaccaaagggcgctggttggtagggtgaggtgggggagtattttaatttttggaatttgggaagcagacagctttactttgtaaggttggaacagcagcactatacatgaaatataaaccaaaaacctttactgtttctaaatttcctagattgctattatttggttgtaagttgagtattccacagaaagtggtaattatctcttctctcttcctccattagaaaattaggtaaataatggattcctataatgggagcatcaccacttattaaaacacacatagaatgatgaattaaaaaagttttctaggattgtcttttattctgccacatttattgataaacagtgaaggaatttttaaaaaatttttaagaattgtttgtcacgtcatttttagaaatgttctacctgtatatggtaatgtccagttttaaaaatattggacatcttcaatcttaaacatttctatttagctgattggttctcacatatacttctaaaagaaacttttatgttataagagttactttttggataagatttattaatctcagttacctactattctgacattttaggaaggaggtaattgtttttaatgatggataaacttgtgctggtgttttggatcttatgatgctgagcatgttctgcactggtgctaatgtctaatataattttatatttacacacatacgtgctacccagagattaatttagtccatatgaactattgacccattgttcattgagacagcaacatacgcactcctaaatcagtgtgtttagacttttcaagtatctaactcatttccaaacatgtaccatgttttataaacctcttgatttccagcaacatactatagaaaacacctgctactcaaaacacaacttctcagtgtcatccattgctgtcgtgagagacaacatagcaatatctggtatgttgcaagctttcaagatagcctgaacttaaaaagttggtgcattagttgtatctgatggatataaatttgcctcctagttcactttgtgtcaagagctaaaactgtgaacctaactttctcttattggtgggtaataactgaaaataaagatttattttcatgctca

SEQ ID NO: 336405 - DNA, 1665 bp, Homo sapiens
agttagccctgagcccgagggggcgtgagtgaaaccaaagagcactttcgcgagtcagttacgccgtcacggttttttggtttcaaggtagctgaagacctagagagtttaagggtggccagagcaggtggcaggactccgcccaccaccacgcttcccttccttcagcccgcacgcttcactcccctcatggggtctcgcctctcaggcgcgcgcgaagagttgtcgcgcggtgcgtcctgggaattgtagtcccgacgcggagagtcgcctcaggagaaatgactctggcctacataccccacagtgccttgcggcgcaggccgctcccggatgtgtgcctggcgccggaagagaagacggcccccctctctcggcccggccatcttgtgggaagagctgaagcaggcgctcttggctcggcgcggcccgctgcaatccgtggaggaacgcgccgccgagccaccatcatgcctgggcacttacaggaaggcttcggctgcgtggtcaccaaccgattcgaccagttatttgacgacgaatcggaccccttcgaggtgctgaaggcagcagagaacaagaaaaaagaagccggcgggggcggcgttgggggccctggggccaagagcgcagctcaggccgcggcccagaccaactccaacgcggcaggcaaacagctgcgcaaggagtcccagaaagaccgcaagaacccgctgccccccagcgttggcgtggttgacaagaaagaggagacgcagccgcccgtggcgcttaagaaagaaggaataagacgagttggaagaagacctgatcaacaacttcagggtgaagggaaaataattgatagaagaccagaaaggcgaccacctcgtgaacgaagattcgaaaagccacttgaagaaaagggtgaaggaggcgaattttcagttgatagaccgattattgaccgacctattcgaggtcgtggtggtcttggaagaggtcgagggggccgtggacgtggaatgggccgaggagatggatttgattctcgtggcaaacgtgaatttgataggcatagtggaagtgatagatcttctttttcacattacagtggcctgaagcacgaggacaaacgtggaggtagcggatctcacaactggggaactgtcaaagacgaattaactgacttggatcaatcaaatgtgactgaggaaacacctgaaggtgaagaacatcatccagtggcagacactgaaaataaggagaatgaagttgaagaggtaaaagaggagggtccaaaagagatgactttggatgagtggaaggctattcaaaataaggaccgggcaaaagtagaatttaatatccgaaaaccaaatgaaggtgctgatgggcagtggaagaagggatttgttcttcataaatcaaagagtgaagaggtaaaattaagttttgtcgtgtttgaaaatgttcagatgtgacttgaattgtatttataatttttgttttaaaatttcacatgggttatttgtctgttaaagctttacataggatcatttggggcagataatttgctttataaggaaaataaactgtattatcacatattctaagaaatttagtcctttgatcaatttgtaattatgttttatgtggtagagttactttttcctaaaaagctgt

SEQ ID NO: 336406 - DNA, 3054 bp, Homo sapiens
caatcgagctcggtcccggattgacgccacgtggcgcttaagacagaaggaataagacgagttggaagaagacctgatcaacaacttcagggtgaagggaaaataattgatagaagaccagaaaggcgaccacctcgtgaacgaagattcgaaaagccacttgaagaaaagggtgaaggaggcgaattttcagttgatagaccgattattgaccgacctattcgaggtcgtggtggtcttggaagaggtcgagggggccgtggacgtggaatgggccgaggagatggatttgattctcgtggcaaacgtgaatttgataggcatagtggaagtgatagatctggcctgaagcacgaggacaaacgtggaggtagcggatctcacaactggggaactgtcaaagacgaattaactgacttggatcaatcaaatgtgactgaggaaacacctgaaggtgaagaacatcatccagtggcagacactgaaaataaggagaatgaagttgaagaggtaaaagaggagggtccaaaagagatgactttggatgagtggaaggctattcaaaataaggaccgggcaaaagtagaatttaatatccgaaaaccaaatgaaggtgctgatgggcagtggaagaagggatttgttcttcataaatcaaagagtgaagaggctcatgctgaagattcggttatggaccatcatttccggaagccagcaaatgatataacgtctcagctggagatcaattttggagaccttggccgcccaggacgtggcggcaggggaggacgaggtggacgtgggcgtggtgggcgcccaaaccgtggcagcaggaccgacaagtcaagtgcttctgctcctgatgtggatgacccagaggcattcccagctctggcttaactggatgccataagacaaccctggttcctttgtgaacccttctgttcaaagcttttgcatgcttaaggattccaaacgactaagaaattaaaaaaaaaaagactgtcattcataccattcacacctaaagactgaattttatctgttttaaaaatgaacttctcccgctacacagaagtaacaaatatggtagtcagttttgtatttagaaatgtattggtagcagggatgttttcataattttcagagattatgcattcttcatgaatacttttgtattgctgcttgcaaatatgcatttccaaacttgaaatataggtgtgaacagtgtgtaccagtttaaagctttcacttcatttgtgttttttaattaaggatttagaagttcccccaattacaaactggttttaaatattggacatactggttttaatacctgctttgcatattcacacatggtcaactgggacatgttaaactttgatttgtcaaattttatgctgtgtggaatactaactatatgtattttaacttagttttaatattttcatttttggggaaaaatcttttttcacttctcatgatagctgttatatatatatgctaaatctttatatacagaaatatcagtacttgaacaaattcaaagcacatttggtttattaacccttgctccttgcatggctcattaggttcaaattataactgatttacattttcagctatatttactttttaaatgcttgagtttcccattttaaaatctaaactagacatcttaattggtgaaagttgtttaaactacttattgttggtaggcacatcgtgtcaagtgaagtagttttataggtatgggttttttctcccccttcaccagggtgggtggaataagttgatttggccaatgtgtaatatttaaactgttctgtaaaataagtgtctggccatttggtatgatttctgtgtgtgaaaggtcccaaaatcaaaatggtacatccataatcagccaccatttaacccttccttgttctaaaacaaaaaccaaagggcgctggttggtagggtgaggtgggggagtattttaatttttggaatttgggaagcagacagctttactttgtaaggttggaacagcagcactatacatgaaatataaaccaaaaacctttactgtttctaaatttcctagattgctattatttggttgtaagttgagtattccacagaaagtggtaattatctcttctctcttcctccattagaaaattaggtaaataatggattcctataatgggagcatcaccacttattaaaacacacatagaatgatgaattaaaaaagttttctaggattgtcttttattctgccacatttattgataaacagtgaaggaatttttaaaaaatttttaagaattgtttgtcacgtcatttttagaaatgttctacctgtatatggtaatgtccagttttaaaaatattggacatcttcaatcttaaacatttctatttagctgattggttctcacatatacttctaaaagaaacttttatgttataagagttactttttggataagatttattaatctcagttacctactattctgacattttaggaaggaggtaattgtttttaatgatggataaacttgtgctggtgttttggatcttatgatgctgagcatgttctgcactggtgctaatgtctaatataattttatatttacacacatacgtgctacccagagattaatttagtccatatgaactattgacccattgttcattgagacagcaacatacgcactcctaaatcagtgtgtttagacttttcaagtatctaactcatttccaaacatgtaccatgttttataaacctcttgatttccagcaacatactatagaaaacacctgctactcaaaacacaacttctcagtgtcatccattgctgtcgtgagagacaacatagcaatatctggtatgttgcaagctttcaagatagcctgaacttaaaaagttggtgcattagttgtatctgatggatataaatttgcctcctagttcactttgtgtcaagagctaaaactgtgaacctaactttctcttattggtgggtaataactgaaaataaagatttattttcatgctca

SEQ ID NO: 336407 - DNA, 3011 bp, Homo sapiens
cacttgggaaccagctttatttctgattttttttttttgtcagagtataaaaaagtgagtgcagcaaaacaaggccagaaaggcgaccacctcgtgaacgaagattcgaaaagccacttgaagaaaagggtgaaggaggcgaattttcagttgatagaccgattattgaccgacctattcgaggtcgtggtggtcttggaagaggtcgagggggccgtggacgtggaatgggccgaggagatggatttgattctcgtggcaaacgtgaatttgataggcatagtggaagtgatagatctggcctgaagcacgaggacaaacgtggaggtagcggatctcacaactggggaactgtcaaagacgaattaactgacttggatcaatcaaatgtgactgaggaaacacctgaaggtgaagaacatcatccagtggcagacactgaaaataaggagaatgaagttgaagaggtaaaagaggagggtccaaaagagatgactttggatgagtggaaggctattcaaaataaggaccgggcaaaagtagaatttaatatccgaaaaccaaatgaaggtgctgatgggcagtggaagaagggatttgttcttcataaatcaaagagtgaagaggctcatgctgaagattcggttatggaccatcatttccggaagccagcaaatgatataacgtctcagctggagatcaattttggagaccttggccgcccaggacgtggcggcaggggaggacgaggtggacgtgggcgtggtgggcgcccaaaccgtggcagcaggaccgacaagtcaagtgcttctgctcctgatgtggatgacccagaggcattcccagctctggcttaactggatgccataagacaaccctggttcctttgtgaacccttctgttcaaagcttttgcatgcttaaggattccaaacgactaagaaattaaaaaaaaaaagactgtcattcataccattcacacctaaagactgaattttatctgttttaaaaatgaacttctcccgctacacagaagtaacaaatatggtagtcagttttgtatttagaaatgtattggtagcagggatgttttcataattttcagagattatgcattcttcatgaatacttttgtattgctgcttgcaaatatgcatttccaaacttgaaatataggtgtgaacagtgtgtaccagtttaaagctttcacttcatttgtgttttttaattaaggatttagaagttcccccaattacaaactggttttaaatattggacatactggttttaatacctgctttgcatattcacacatggtcaactgggacatgttaaactttgatttgtcaaattttatgctgtgtggaatactaactatatgtattttaacttagttttaatattttcatttttggggaaaaatcttttttcacttctcatgatagctgttatatatatatgctaaatctttatatacagaaatatcagtacttgaacaaattcaaagcacatttggtttattaacccttgctccttgcatggctcattaggttcaaattataactgatttacattttcagctatatttactttttaaatgcttgagtttcccattttaaaatctaaactagacatcttaattggtgaaagttgtttaaactacttattgttggtaggcacatcgtgtcaagtgaagtagttttataggtatgggttttttctcccccttcaccagggtgggtggaataagttgatttggccaatgtgtaatatttaaactgttctgtaaaataagtgtctggccatttggtatgatttctgtgtgtgaaaggtcccaaaatcaaaatggtacatccataatcagccaccatttaacccttccttgttctaaaacaaaaaccaaagggcgctggttggtagggtgaggtgggggagtattttaatttttggaatttgggaagcagacagctttactttgtaaggttggaacagcagcactatacatgaaatataaaccaaaaacctttactgtttctaaatttcctagattgctattatttggttgtaagttgagtattccacagaaagtggtaattatctcttctctcttcctccattagaaaattaggtaaataatggattcctataatgggagcatcaccacttattaaaacacacatagaatgatgaattaaaaaagttttctaggattgtcttttattctgccacatttattgataaacagtgaaggaatttttaaaaaatttttaagaattgtttgtcacgtcatttttagaaatgttctacctgtatatggtaatgtccagttttaaaaatattggacatcttcaatcttaaacatttctatttagctgattggttctcacatatacttctaaaagaaacttttatgttataagagttactttttggataagatttattaatctcagttacctactattctgacattttaggaaggaggtaattgtttttaatgatggataaacttgtgctggtgttttggatcttatgatgctgagcatgttctgcactggtgctaatgtctaatataattttatatttacacacatacgtgctacccagagattaatttagtccatatgaactattgacccattgttcattgagacagcaacatacgcactcctaaatcagtgtgtttagacttttcaagtatctaactcatttccaaacatgtaccatgttttataaacctcttgatttccagcaacatactatagaaaacacctgctactcaaaacacaacttctcagtgtcatccattgctgtcgtgagagacaacatagcaatatctggtatgttgcaagctttcaagatagcctgaacttaaaaagttggtgcattagttgtatctgatggatataaatttgcctcctagttcactttgtgtcaagagctaaaactgtgaacctaactttctcttattggtgggtaataactgaaaataaagatttattttcatgctca

SEQ ID NO: 336408 - DNA, 2897 bp, Homo sapiens
aaactataggtcggtacgaggctggtgctgatttagttgatagaccgattattgaccgacctattcgaggtcgtggtggtcttggaagaggtcgagggggccgtggacgtggaatgggccgaggagatggatttgattctcgtggcaaacgtgaatttgataggcatagtggaagtgatagatctggcctgaagcacgaggacaaacgtggaggtagcggatctcacaactggggaactgtcaaagacgaattaactgacttggatcaatcaaatgtgactgaggaaacacctgaaggtgaagaacatcatccagtggcagacactgaaaataaggagaatgaagttgaagaggtaaaagaggagggtccaaaagagatgactttggatgagtggaaggctattcaaaataaggaccgggcaaaagtagaatttaatatccgaaaaccaaatgaaggtgctgatgggcagtggaagaagggatttgttcttcataaatcaaagagtgaagaggctcatgctgaagattcggttatggaccatcatttccggaagccagcaaatgatataacgtctcagctggagatcaattttggagaccttggccgcccaggacgtggcggcaggggaggacgaggtggacgtgggcgtggtgggcgcccaaaccgtggcagcaggaccgacaagtcaagtgcttctgctcctgatgtggatgacccagaggcattcccagctctggcttaactggatgccataagacaaccctggttcctttgtgaacccttctgttcaaagcttttgcatgcttaaggattccaaacgactaagaaattaaaaaaaaaaagactgtcattcataccattcacacctaaagactgaattttatctgttttaaaaatgaacttctcccgctacacagaagtaacaaatatggtagtcagttttgtatttagaaatgtattggtagcagggatgttttcataattttcagagattatgcattcttcatgaatacttttgtattgctgcttgcaaatatgcatttccaaacttgaaatataggtgtgaacagtgtgtaccagtttaaagctttcacttcatttgtgttttttaattaaggatttagaagttcccccaattacaaactggttttaaatattggacatactggttttaatacctgctttgcatattcacacatggtcaactgggacatgttaaactttgatttgtcaaattttatgctgtgtggaatactaactatatgtattttaacttagttttaatattttcatttttggggaaaaatcttttttcacttctcatgatagctgttatatatatatgctaaatctttatatacagaaatatcagtacttgaacaaattcaaagcacatttggtttattaacccttgctccttgcatggctcattaggttcaaattataactgatttacattttcagctatatttactttttaaatgcttgagtttcccattttaaaatctaaactagacatcttaattggtgaaagttgtttaaactacttattgttggtaggcacatcgtgtcaagtgaagtagttttataggtatgggttttttctcccccttcaccagggtgggtggaataagttgatttggccaatgtgtaatatttaaactgttctgtaaaataagtgtctggccatttggtatgatttctgtgtgtgaaaggtcccaaaatcaaaatggtacatccataatcagccaccatttaacccttccttgttctaaaacaaaaaccaaagggcgctggttggtagggtgaggtgggggagtattttaatttttggaatttgggaagcagacagctttactttgtaaggttggaacagcagcactatacatgaaatataaaccaaaaacctttactgtttctaaatttcctagattgctattatttggttgtaagttgagtattccacagaaagtggtaattatctcttctctcttcctccattagaaaattaggtaaataatggattcctataatgggagcatcaccacttattaaaacacacatagaatgatgaattaaaaaagttttctaggattgtcttttattctgccacatttattgataaacagtgaaggaatttttaaaaaatttttaagaattgtttgtcacgtcatttttagaaatgttctacctgtatatggtaatgtccagttttaaaaatattggacatcttcaatcttaaacatttctatttagctgattggttctcacatatacttctaaaagaaacttttatgttataagagttactttttggataagatttattaatctcagttacctactattctgacattttaggaaggaggtaattgtttttaatgatggataaacttgtgctggtgttttggatcttatgatgctgagcatgttctgcactggtgctaatgtctaatataattttatatttacacacatacgtgctacccagagattaatttagtccatatgaactattgacccattgttcattgagacagcaacatacgcactcctaaatcagtgtgtttagacttttcaagtatctaactcatttccaaacatgtaccatgttttataaacctcttgatttccagcaacatactatagaaaacacctgctactcaaaacacaacttctcagtgtcatccattgctgtcgtgagagacaacatagcaatatctggtatgttgcaagctttcaagatagcctgaacttaaaaagttggtgcattagttgtatctgatggatataaatttgcctcctagttcactttgtgtcaagagctaaaactgtgaacctaactttctcttattggtgggtaataactgaaaataaagatttattttcatgctca

SEQ ID NO: 336409 - DNA, 2862 bp, Homo sapiens
ctggttgtcaatgaggatatttattggggtttcatgagtgcagagagccgtggacgtggaatgggccgaggagatggatttgattctcgtggcaaacgtgaatttgataggcatagtggaagtgatagatcttctttttcacattacagtggcctgaagcacgaggacaaacgtggaggtagcggatctcacaactggggaactgtcaaagacgaattaactgacttggatcaatcaaatgtgactgaggaaacacctgaaggtgaagaacatcatccagtggcagacactgaaaataaggagaatgaagttgaagaggtaaaagaggagggtccaaaagagatgactttggatgagtggaaggctattcaaaataaggaccgggcaaaagtagaatttaatatccgaaaaccaaatgaaggtgctgatgggcagtggaagaagggatttgttcttcataaatcaaagagtgaagaggctcatgctgaagattcggttatggaccatcatttccggaagccagcaaatgatataacgtctcagctggagatcaattttggagaccttggccgcccaggacgtggcggcaggggaggacgaggtggacgtgggcgtggtgggcgcccaaaccgtggcagcaggaccgacaagtcaagtgcttctgctcctgatgtggatgacccagaggcattcccagctctggcttaactggatgccataagacaaccctggttcctttgtgaacccttctgttcaaagcttttgcatgcttaaggattccaaacgactaagaaattaaaaaaaaaaagactgtcattcataccattcacacctaaagactgaattttatctgttttaaaaatgaacttctcccgctacacagaagtaacaaatatggtagtcagttttgtatttagaaatgtattggtagcagggatgttttcataattttcagagattatgcattcttcatgaatacttttgtattgctgcttgcaaatatgcatttccaaacttgaaatataggtgtgaacagtgtgtaccagtttaaagctttcacttcatttgtgttttttaattaaggatttagaagttcccccaattacaaactggttttaaatattggacatactggttttaatacctgctttgcatattcacacatggtcaactgggacatgttaaactttgatttgtcaaattttatgctgtgtggaatactaactatatgtattttaacttagttttaatattttcatttttggggaaaaatcttttttcacttctcatgatagctgttatatatatatgctaaatctttatatacagaaatatcagtacttgaacaaattcaaagcacatttggtttattaacccttgctccttgcatggctcattaggttcaaattataactgatttacattttcagctatatttactttttaaatgcttgagtttcccattttaaaatctaaactagacatcttaattggtgaaagttgtttaaactacttattgttggtaggcacatcgtgtcaagtgaagtagttttataggtatgggttttttctcccccttcaccagggtgggtggaataagttgatttggccaatgtgtaatatttaaactgttctgtaaaataagtgtctggccatttggtatgatttctgtgtgtgaaaggtcccaaaatcaaaatggtacatccataatcagccaccatttaacccttccttgttctaaaacaaaaaccaaagggcgctggttggtagggtgaggtgggggagtattttaatttttggaatttgggaagcagacagctttactttgtaaggttggaacagcagcactatacatgaaatataaaccaaaaacctttactgtttctaaatttcctagattgctattatttggttgtaagttgagtattccacagaaagtggtaattatctcttctctcttcctccattagaaaattaggtaaataatggattcctataatgggagcatcaccacttattaaaacacacatagaatgatgaattaaaaaagttttctaggattgtcttttattctgccacatttattgataaacagtgaaggaatttttaaaaaatttttaagaattgtttgtcacgtcatttttagaaatgttctacctgtatatggtaatgtccagttttaaaaatattggacatcttcaatcttaaacatttctatttagctgattggttctcacatatacttctaaaagaaacttttatgttataagagttactttttggataagatttattaatctcagttacctactattctgacattttaggaaggaggtaattgtttttaatgatggataaacttgtgctggtgttttggatcttatgatgctgagcatgttctgcactggtgctaatgtctaatataattttatatttacacacatacgtgctacccagagattaatttagtccatatgaactattgacccattgttcattgagacagcaacatacgcactcctaaatcagtgtgtttagacttttcaagtatctaactcatttccaaacatgtaccatgttttataaacctcttgatttccagcaacatactatagaaaacacctgctactcaaaacacaacttctcagtgtcatccattgctgtcgtgagagacaacatagcaatatctggtatgttgcaagctttcaagatagcctgaacttaaaaagttggtgcattagttgtatctgatggatataaatttgcctcctagttcactttgtgtcaagagctaaaactgtgaacctaactttctcttattggtgggtaataactgaaaataaagatttattttcatgctca

SEQ ID NO: 336410 - DNA, 1335 bp, Homo sapiens
agttagccctgagcccgagggggcgtgagtgaaaccaaagagcactttcgcgagtcagttacgccgtcacggttttttggtttcaaggtagctgaagacctagagagtttaagggtggccagagcaggtggcaggactccgcccaccaccacgcttcccttccttcagcccgcacgcttcactcccctcatggggtctcgcctctcaggcgcgcgcgaagagttgtcgcgcggtgcgtcctgggaattgtagtcccgacgcggagagtcgcctcaggagaaatgactctggcctacataccccacagtgccttgcggcgcaggccgctcccggatgtgtgcctggcgccggaagagaagacggcccccctctctcggcccggccatcttgtgggaagagctgaagcaggcgctcttggctcggcgcggcccgctgcaatccgtggaggaacgcgccgccgagccaccatcatgcctgggcacttacaggaaggcttcggctgcgtggtcaccaaccgattcgaccagttatttgacgacgaatcggaccccttcgaggtgctgaaggcagcagagaacaagaaaaaagaagccggcgggggcggcgttgggggccctggggccaagagcgcagctcaggccgcggcccagaccaactccaacgcggcaggcaaacagctgcgcaaggagtcccagaaagaccgcaagaacccgctgccccccagcgttggcgtggttgacaagaaagaggagacgcagccgcccgtggcgcttaagaaagaaggaataagacgagttggaagaagacctgatcaacaacttcagggtgaagggaaaataattgatagaagaccagaaaggcgaccacctcgtgaacgaagattcgaaaagccacttgaagaaaagggtgaaggaggcgaattttcagttgatagaccgattattgaccgacctattcgaggtcgtggtggtcttggaagaggtcgagggggccgtggacgtggaatgggccgaggagatggatttgattctcgtggcaaacgtgaatttgataggcatagtggaagtgatagatctggcctgaagcacgaggacaaacgtggaggtagcggatctcacaactggggaactgtcaaagacgaattaactgacttggatcaatcaaatgtgactgaggaaacacctgaaggtgaagaacatcatccagttccgctgaagaggacacttcaaaacaaaagaaacgaaaatatcagaacaaagaaaagaaaaaagaaacgcagagtaaatccaaacaaggggagcataacaaaaaggaaaaaaaaagaaatgaaagatt

SEQ ID NO: 336411 - DNA, 2866 bp, Homo sapiens
tatcgtgcagatcgtgcagaacatcagctctccgccttctggaaggagaacacgtaaaactacagaatatcagttaagcaccctggagagagagagatataaagaaaatcaggaagattcaaacagtcgtgctacaagtagcggatctcacaactggggaactgtcaaagacgaattaacagagtcccccaaatacattcagaaacaaatatcttataattacagtgacttggatcaatcaaatgtgactgaggaaacacctgaaggtgaagaacatcatccagtggcagacactgaaaataaggagaatgaagttgaagaggtaaaagaggagggtccaaaagagatgactttggatgagtggaaggctattcaaaataaggaccgggcaaaagtagaatttaatatccgaaaaccaaatgaaggtgctgatgggcagtggaagaagggatttgttcttcataaatcaaagagtgaagaggctcatgctgaagattcggttatggaccatcatttccggaagccagcaaatgatataacgtctcagctggagatcaattttggagaccttggccgcccaggacgtggcggcaggggaggacgaggtggacgtgggcgtggtgggcgcccaaaccgtggcagcaggaccgacaagtcaagtgcttctgctcctgatgtggatgacccagaggcattcccagctctggcttaactggatgccataagacaaccctggttcctttgtgaacccttctgttcaaagcttttgcatgcttaaggattccaaacgactaagaaattaaaaaaaaaaagactgtcattcataccattcacacctaaagactgaattttatctgttttaaaaatgaacttctcccgctacacagaagtaacaaatatggtagtcagttttgtatttagaaatgtattggtagcagggatgttttcataattttcagagattatgcattcttcatgaatacttttgtattgctgcttgcaaatatgcatttccaaacttgaaatataggtgtgaacagtgtgtaccagtttaaagctttcacttcatttgtgttttttaattaaggatttagaagttcccccaattacaaactggttttaaatattggacatactggttttaatacctgctttgcatattcacacatggtcaactgggacatgttaaactttgatttgtcaaattttatgctgtgtggaatactaactatatgtattttaacttagttttaatattttcatttttggggaaaaatcttttttcacttctcatgatagctgttatatatatatgctaaatctttatatacagaaatatcagtacttgaacaaattcaaagcacatttggtttattaacccttgctccttgcatggctcattaggttcaaattataactgatttacattttcagctatatttactttttaaatgcttgagtttcccattttaaaatctaaactagacatcttaattggtgaaagttgtttaaactacttattgttggtaggcacatcgtgtcaagtgaagtagttttataggtatgggttttttctcccccttcaccagggtgggtggaataagttgatttggccaatgtgtaatatttaaactgttctgtaaaataagtgtctggccatttggtatgatttctgtgtgtgaaaggtcccaaaatcaaaatggtacatccataatcagccaccatttaacccttccttgttctaaaacaaaaaccaaagggcgctggttggtagggtgaggtgggggagtattttaatttttggaatttgggaagcagacagctttactttgtaaggttggaacagcagcactatacatgaaatataaaccaaaaacctttactgtttctaaatttcctagattgctattatttggttgtaagttgagtattccacagaaagtggtaattatctcttctctcttcctccattagaaaattaggtaaataatggattcctataatgggagcatcaccacttattaaaacacacatagaatgatgaattaaaaaagttttctaggattgtcttttattctgccacatttattgataaacagtgaaggaatttttaaaaaatttttaagaattgtttgtcacgtcatttttagaaatgttctacctgtatatggtaatgtccagttttaaaaatattggacatcttcaatcttaaacatttctatttagctgattggttctcacatatacttctaaaagaaacttttatgttataagagttactttttggataagatttattaatctcagttacctactattctgacattttaggaaggaggtaattgtttttaatgatggataaacttgtgctggtgttttggatcttatgatgctgagcatgttctgcactggtgctaatgtctaatataattttatatttacacacatacgtgctacccagagattaatttagtccatatgaactattgacccattgttcattgagacagcaacatacgcactcctaaatcagtgtgtttagacttttcaagtatctaactcatttccaaacatgtaccatgttttataaacctcttgatttccagcaacatactatagaaaacacctgctactcaaaacacaacttctcagtgtcatccattgctgtcgtgagagacaacatagcaatatctggtatgttgcaagctttcaagatagcctgaacttaaaaagttggtgcattagttgtatctgatggatataaatttgcctcctagttcactttgtgtcaagagctaaaactgtgaacctaactttctcttattggtgggtaataactgaaaataaagatttattttcatgctca

SEQ ID NO: 336412 - DNA, 2671 bp, Homo sapiens
gtgggttgaccgtggcttgtgggttgaccgtgacttggatcaatcaaatgtgactgaggaaacacctgaaggtgaagaacatcatccagtggcagacactgaaaataaggagaatgaagttgaagaggtaaaagaggagggtccaaaagagatgactttggatgagtggaaggctattcaaaataaggaccgggcaaaagtagaatttaatatccgaaaaccaaatgaaggtgctgatgggcagtggaagaagggatttgttcttcataaatcaaagagtgaagaggctcatgctgaagattcggttatggaccatcatttccggaagccagcaaatgatataacgtctcagctggagatcaattttggagaccttggccgcccaggacgtggcggcaggggaggacgaggtggacgtgggcgtggtgggcgcccaaaccgtggcagcaggaccgacaagtcaagtgcttctgctcctgatgtggatgacccagaggcattcccagctctggcttaactggatgccataagacaaccctggttcctttgtgaacccttctgttcaaagcttttgcatgcttaaggattccaaacgactaagaaattaaaaaaaaaaagactgtcattcataccattcacacctaaagactgaattttatctgttttaaaaatgaacttctcccgctacacagaagtaacaaatatggtagtcagttttgtatttagaaatgtattggtagcagggatgttttcataattttcagagattatgcattcttcatgaatacttttgtattgctgcttgcaaatatgcatttccaaacttgaaatataggtgtgaacagtgtgtaccagtttaaagctttcacttcatttgtgttttttaattaaggatttagaagttcccccaattacaaactggttttaaatattggacatactggttttaatacctgctttgcatattcacacatggtcaactgggacatgttaaactttgatttgtcaaattttatgctgtgtggaatactaactatatgtattttaacttagttttaatattttcatttttggggaaaaatcttttttcacttctcatgatagctgttatatatatatgctaaatctttatatacagaaatatcagtacttgaacaaattcaaagcacatttggtttattaacccttgctccttgcatggctcattaggttcaaattataactgatttacattttcagctatatttactttttaaatgcttgagtttcccattttaaaatctaaactagacatcttaattggtgaaagttgtttaaactacttattgttggtaggcacatcgtgtcaagtgaagtagttttataggtatgggttttttctcccccttcaccagggtgggtggaataagttgatttggccaatgtgtaatatttaaactgttctgtaaaataagtgtctggccatttggtatgatttctgtgtgtgaaaggtcccaaaatcaaaatggtacatccataatcagccaccatttaacccttccttgttctaaaacaaaaaccaaagggcgctggttggtagggtgaggtgggggagtattttaatttttggaatttgggaagcagacagctttactttgtaaggttggaacagcagcactatacatgaaatataaaccaaaaacctttactgtttctaaatttcctagattgctattatttggttgtaagttgagtattccacagaaagtggtaattatctcttctctcttcctccattagaaaattaggtaaataatggattcctataatgggagcatcaccacttattaaaacacacatagaatgatgaattaaaaaagttttctaggattgtcttttattctgccacatttattgataaacagtgaaggaatttttaaaaaatttttaagaattgtttgtcacgtcatttttagaaatgttctacctgtatatggtaatgtccagttttaaaaatattggacatcttcaatcttaaacatttctatttagctgattggttctcacatatacttctaaaagaaacttttatgttataagagttactttttggataagatttattaatctcagttacctactattctgacattttaggaaggaggtaattgtttttaatgatggataaacttgtgctggtgttttggatcttatgatgctgagcatgttctgcactggtgctaatgtctaatataattttatatttacacacatacgtgctacccagagattaatttagtccatatgaactattgacccattgttcattgagacagcaacatacgcactcctaaatcagtgtgtttagacttttcaagtatctaactcatttccaaacatgtaccatgttttataaacctcttgatttccagcaacatactatagaaaacacctgctactcaaaacacaacttctcagtgtcatccattgctgtcgtgagagacaacatagcaatatctggtatgttgcaagctttcaagatagcctgaacttaaaaagttggtgcattagttgtatctgatggatataaatttgcctcctagttcactttgtgtcaagagctaaaactgtgaacctaactttctcttattggtgggtaataactgaaaataaagatttattttcatgctca

SEQ ID NO: 336413 - DNA, 1511 bp, Homo sapiens
agttagccctgagcccgagggggcgtgagtgaaaccaaagagcactttcgcgagtcagttacgccgtcacggttttttggtttcaaggtagctgaagacctagagagtttaagggtggccagagcaggtggcaggactccgcccaccaccacgcttcccttccttcagcccgcacgcttcactcccctcatggggtctcgcctctcaggcgcgcgcgaagagttgtcgcgcggtgcgtcctgggaattgtagtcccgacgcggagagtcgcctcaggagaaatgactctggcctacataccccacagtgccttgcggcgcaggccgctcccggatgtgtgcctggcgccggaagagaagacggcccccctctctcggcccggccatcttgtgggaagagctgaagcaggcgctcttggctcggcgcggcccgctgcaatccgtggaggaacgcgccgccgagccaccatcatgcctgggcacttacaggaaggcttcggctgcgtggtcaccaaccgattcgaccagttatttgacgacgaatcggaccccttcgaggtgctgaaggcagcagagaacaagaaaaaagaagccggcgggggcggcgttgggggccctggggccaagagcgcagctcaggccgcggcccagaccaactccaacgcggcaggcaaacagctgcgcaaggagtcccagaaagaccgcaagaacccgctgccccccagcgttggcgtggttgacaagaaagaggagacgcagccgcccgtggcgcttaagaaagaaggaataagacgagttggaagaagacctgatcaacaacttcagggtgaagggaaaataattgatagaagaccagaaaggcgaccacctcgtgaacgaagattcgaaaagccacttgaagaaaagggtgaaggaggcgaattttcagttgatagaccgattattgaccgacctattcgaggtcgtggtggtcttggaagaggtcgagggggccgtggacgtggaatgggccgaggagatggatttgattctcgtggcaaacgtgaatttgataggcatagtggaagtgatagatctggcctgaagcacgaggacaaacgtggaggtagcggatctcacaactggggaactgtcaaagacgaattaacgttggtattctgattttcttaaaaattctatacctaactagaggttaatccatacctctgtcaaattttacttgtctctgagataagaatgaatgctctcttctgagagttactatattacaagataatgtcttatgggatgggtttgggttatagtatattgaatgaccggttttttaatatttcgatatatttgttactcattttttcccccccatatgtatttgtagcttttcctgaaaccccacaataaggttatttgggtattctgattatcttagtgtccttaatagttcctattctagcttttgactttgttgtcattacaaaatttgataagctagtaaagcttcattttataatt

SEQ ID NO: 336414 - DNA, 2985 bp, Homo sapiens
tgtgtagtgtttcacttgaatttgtagctctccaatttgtgtagaaaaacgtagtggttgtgtattaacagaaaatgcttctgagaagtttatatctagtaaggtctttaccctagttgtagttggaagagtgtagaacagagtttttctttctgagtgttctttttaacttcagtgttagtgctagtagtaaccttatatgtcatctctccagaggtcttcatcaaggattcacatggcagtcctgatctgaagggcatatttaaaatgtacttgtccagatttcactgctaaagattatgattcagtaggtctaggatgggcttcagccgtttgggttgattgtgatagcatacatgtctttagttgaggactgctggtattacctgcaattttgagatagagaaaagtgcaggaaaatcttcctccaggatcactaaagctgagccctagcttgttacctgtggaggcattgagacatttgttcacagaaagtacagtttggatttttggttttttttagaagaaagctcattatttagaaattttgcaatgttacttttctactaataacacaatcatcttcacttatatttttaggctcatgctgaagattcggttatggaccatcatttccggaagccagcaaatgatataacgtctcagctggagatcaattttggagaccttggccgcccaggacgtggcggcaggggaggacgaggtggacgtgggcgtggtgggcgcccaaaccgtggcagcaggaccgacaagtcaagtgcttctgctcctgatgtggatgacccagaggcattcccagctctggcttaactggatgccataagacaaccctggttcctttgtgaacccttctgttcaaagcttttgcatgcttaaggattccaaacgactaagaaattaaaaaaaaaaagactgtcattcataccattcacacctaaagactgaattttatctgttttaaaaatgaacttctcccgctacacagaagtaacaaatatggtagtcagttttgtatttagaaatgtattggtagcagggatgttttcataattttcagagattatgcattcttcatgaatacttttgtattgctgcttgcaaatatgcatttccaaacttgaaatataggtgtgaacagtgtgtaccagtttaaagctttcacttcatttgtgttttttaattaaggatttagaagttcccccaattacaaactggttttaaatattggacatactggttttaatacctgctttgcatattcacacatggtcaactgggacatgttaaactttgatttgtcaaattttatgctgtgtggaatactaactatatgtattttaacttagttttaatattttcatttttggggaaaaatcttttttcacttctcatgatagctgttatatatatatgctaaatctttatatacagaaatatcagtacttgaacaaattcaaagcacatttggtttattaacccttgctccttgcatggctcattaggttcaaattataactgatttacattttcagctatatttactttttaaatgcttgagtttcccattttaaaatctaaactagacatcttaattggtgaaagttgtttaaactacttattgttggtaggcacatcgtgtcaagtgaagtagttttataggtatgggttttttctcccccttcaccagggtgggtggaataagttgatttggccaatgtgtaatatttaaactgttctgtaaaataagtgtctggccatttggtatgatttctgtgtgtgaaaggtcccaaaatcaaaatggtacatccataatcagccaccatttaacccttccttgttctaaaacaaaaaccaaagggcgctggttggtagggtgaggtgggggagtattttaatttttggaatttgggaagcagacagctttactttgtaaggttggaacagcagcactatacatgaaatataaaccaaaaacctttactgtttctaaatttcctagattgctattatttggttgtaagttgagtattccacagaaagtggtaattatctcttctctcttcctccattagaaaattaggtaaataatggattcctataatgggagcatcaccacttattaaaacacacatagaatgatgaattaaaaaagttttctaggattgtcttttattctgccacatttattgataaacagtgaaggaatttttaaaaaatttttaagaattgtttgtcacgtcatttttagaaatgttctacctgtatatggtaatgtccagttttaaaaatattggacatcttcaatcttaaacatttctatttagctgattggttctcacatatacttctaaaagaaacttttatgttataagagttactttttggataagatttattaatctcagttacctactattctgacattttaggaaggaggtaattgtttttaatgatggataaacttgtgctggtgttttggatcttatgatgctgagcatgttctgcactggtgctaatgtctaatataattttatatttacacacatacgtgctacccagagattaatttagtccatatgaactattgacccattgttcattgagacagcaacatacgcactcctaaatcagtgtgtttagacttttcaagtatctaactcatttccaaacatgtaccatgttttataaacctcttgatttccagcaacatactatagaaaacacctgctactcaaaacacaacttctcagtgtcatccattgctgtcgtgagagacaacatagcaatatctggtatgttgcaagctttcaagatagcctgaacttaaaaagttggtgcattagttgtatctgatggatataaatttgcctcctagttcactttgtgtcaagagctaaaactgtgaacctaactttctcttattggtgggtaataactgaaaataaagatttattttcatgctca

SEQ ID NO: 336415 - DNA, 1710 bp, Homo sapiens
gcgggccctactactactaaatttcccggccgtcggcaatatttccatttttggggaaaatattaaaactaagttaaaatacatatagttagttttaatattttcatttttggggaaaaatcttttttcacttctcatgatagctgttatatatatatgctaaatctttatatacagaaatatcagtacttgaacaaattcaaagcacatttggtttattaacccttgctccttgcatggctcattaggttcaaattataactgatttacattttcagctatatttactttttaaatgcttgagtttcccattttaaaatctaaactagacatcttaattggtgaaagttgtttaaactacttattgttggtaggcacatcgtgtcaagtgaagtagttttataggtatgggttttttctcccccttcaccagggtgggtggaataagttgatttggccaatgtgtaatatttaaactgttctgtaaaataagtgtctggccatttggtatgatttctgtgtgtgaaaggtcccaaaatcaaaatggtacatccataatcagccaccatttaacccttccttgttctaaaacaaaaaccaaagggcgctggttggtagggtgaggtgggggagtattttaatttttggaatttgggaagcagacagctttactttgtaaggttggaacagcagcactatacatgaaatataaaccaaaaacctttactgtttctaaatttcctagattgctattatttggttgtaagttgagtattccacagaaagtggtaattatctcttctctcttcctccattagaaaattaggtaaataatggattcctataatgggagcatcaccacttattaaaacacacatagaatgatgaattaaaaaagttttctaggattgtcttttattctgccacatttattgataaacagtgaaggaatttttaaaaaatttttaagaattgtttgtcacgtcatttttagaaatgttctacctgtatatggtaatgtccagttttaaaaatattggacatcttcaatcttaaacatttctatttagctgattggttctcacatatacttctaaaagaaacttttatgttataagagttactttttggataagatttattaatctcagttacctactattctgacattttaggaaggaggtaattgtttttaatgatggataaacttgtgctggtgttttggatcttatgatgctgagcatgttctgcactggtgctaatgtctaatataattttatatttacacacatacgtgctacccagagattaatttagtccatatgaactattgacccattgttcattgagacagcaacatacgcactcctaaatcagtgtgtttagacttttcaagtatctaactcatttccaaacatgtaccatgttttataaacctcttgatttccagcaacatactatagaaaacacctgctactcaaaacacaacttctcagtgtcatccattgctgtcgtgagagacaacatagcaatatctggtatgttgcaagctttcaagatagcctgaacttaaaaagttggtgcattagttgtatctgatggatataaatttgcctcctagttcactttgtgtcaagagctaaaactgtgaacctaactttctcttattggtgggtaataactgaaaataaagatttattttcatgctca

SEQ ID NO: 336416 - DNA, 1049 bp, Homo sapiens
agttagccctgagcccgagggggcgtgagtgaaaccaaagagcactttcgcgagtcagttacgccgtcacggttttttggtttcaaggtagctgaagacctagagagtttaagggtggccagagcaggtggcaggactccgcccaccaccacgcttcccttccttcagcccgcacgcttcactcccctcatggggtctcgcctctcaggcgcgcgcgaagagttgtcgcgcggtgcgtcctgggaattgtagtcccgacgcggagagtcgcctcaggagaaatgactctggcctacataccccacagtgccttgcggcgcaggccgctcccggatgtgtgcctggcgccggaagagaagacggcccccctctctcggcccggccatcttgtgggaagagctgaagcaggcgctcttggctcggcgcggcccgctgcaatccgtggaggaacgcgccgccgagccaccatcatgcctgggcacttacaggaaggcttcggctgcgtggtcaccaaccgattcgaccagttatttgacgacgaatcggaccccttcgaggtgctgaaggcagcagagaacaagaaaaaagaagccggcgggggcggcgttgggggccctggggccaagagcgcagctcaggccgcggcccagaccaactccaacgcggcaggcaaacagctgcgcaaggagtcccagaaagaccgcaagaacccgctgccccccagcgttggcgtggttgacaagaaagaggagacgcagccgcccgtggcgcttaagaaagaaggaataagacgagttggaagaagacctgatcaacaacttcagggtgaagggaaaataattgatagaagaccagaaaggcgaccacctcgtgaacgaagattcgaaaagccacttgaagaaaagggtgaaggaggcgaattttcagttgatagaccgattattgaccgacctattcgaggtcgtggtggtcttggaagaggtcgagggggacgcagacgcgcctataaccgattccacacactgcgccgtactatgatcgagctcgta

SEQ ID NO: 336417 - DNA, 744 bp, Homo sapiens
ggctgcaggaattcggcacgagtattaatctcagttacctactattctgacattttaggaaggaggtaattgtttttaatgatggataaacttgtgctggtgttttggatcttatgatgctgagcatgttctgcactggtgctaatgtctaatataattttatatttacacacatacgtgctacccagagattaatttagtccatatgaactattgacccattgttcattgagacagcaacatacgcactcctaaatcagtgtgtttagacttttcaagtatctaactcatttccaaacatgtaccatgttttataaacctcttgatttccagcaacatactatagaaaacacctgctactcaaaacacaacttctcagtgtcatccattgctgtcgtgagagacaacatagcaatatctggtatgttgcaagctttcaagatagcctgaacttaaaaagttggtgcattagttgtatctgatggatataaatttgcctcctagttcactttgtgtcaagagctaaaactgtgaacctaactttctcttattggtgggtaataactgaaaataaagatttattttcatgctcacttcttaaaagtcataaaaacaatcaaataggatcatgtttattgtcatgtgtttcctggtttctgacctgtgtgcacacccctgtgtgtttataatttttaaattgaattttatatggggtttttatttgctaaaaaccaggctgttgaa

SEQ ID NO: 336418 - DNA, 587 bp, Homo sapiens
aatttctagaactaaagagtattatgttaactcagttttgttagttctttttcacattacagtggcctgaagcacgaggacaaacgtggaggtagcggatctcacaactggggaactgtcaaagacgaattaacgttggtattctgattttcttaaaaattctatacctaactagaggttaatccatacctctgtcaaattttacttgtctctgagataagaatgaatgctctcttctgagagttactatattacaagataatgtcttatgggatgggtttgggttatagtatattgaatgaccggttttttaatatttcgatatatttgttactcattttttcccccccatatgtatttgtagcttttcctgaaaccccacaataaggttatttgggtattctgattatcttagtgtccttaatagttcctattctagcttttgactttgttgtcattacaaaatttgataagctagtaaagcttcattttataattaactgccttgttctgttactttttaagtatgaagtatatgaactaactagtttatattgtttacttttctgacgtcgactggtttagta

SEQ ID NO: 336419 - DNA, 450 bp, Homo sapiens
ccaggttcaagcgattctcctgcctcagcctcttgagtagtgggatcacaggtgcctgccaccacacccagctaattgtttatatttttagtacagacaggatttcaccatgttggccaggctggtctcaaactcctgacctcaggtgatccacccaccttggcctcccaaagcgctgggattacaggtgtgagccactgtgcctggccaacagtaagatttttttagagttctgtcttaatgtagacactagctaacaatgtaattttgaagaactgagaactgtggttaattttggtttttctttttcagtcaagtgcttctgctcctgatgtggatgacccagaggcattcccagctctggcttaactggatgccataagacaaccctggttcctttgtgaacccttctgttcaaagcttttgcatgcttaaggattccaaacgact

SEQ ID NO: 336420 - DNA, 3788 bp, Homo sapiens
agttagccctgagcccgagggggcgtgagtgaaaccaaagagcactttcgcgagtcagttacgccgtcacggttttttggtttcaaggtagctgaagacctagagagtttaagggtggccagagcaggtggcaggactccgcccaccaccacgcttcccttccttcagcccgcacgcttcactcccctcatggggtctcgcctctcaggcgcgcgcgaagagttgtcgcgcggtgcgtcctgggaattgtagtcccgacgcggagagtcgcctcaggagaaatgactctggcctacataccccacagtgccttgcggcgcaggccgctcccggatgtgtgcctggcgccggaagagaagacggcccccctctctcggcccggccatcttgtgggaagagctgaagcaggcgctcttggctcggcgcggcccgctgcaatccgtggaggaacgcgccgccgagccaccatcatgcctgggcacttacaggaaggcttcggctgcgtggtcaccaaccgattcgaccagttatttgacgacgaatcggaccccttcgaggtgctgaaggcagcagagaacaagaaaaaagaagccggcgggggcggcgttgggggccctggggccaagagcgcagctcaggccgcggcccagaccaactccaacgcggcaggcaaacagctgcgcaaggagtcccagaaagaccgcaagaacccgctgccccccagcgttggcgtggttgacaagaaagaggagacgcagccgcccgtggcgcttaagaaagaaggaataagacgagttggaagaagacctgatcaacaacttcagggtgaagggaaaataattgatagaagaccagaaaggcgaccacctcgtgaacgaagattcgaaaagccacttgaagaaaagggtgaaggaggcgaattttcagttgatagaccgattattgaccgacctattcgaggtcgtggtggtcttggaagaggtcgagggggccgtggacgtggaatgggccgaggagatggatttgattctcgtggcaaacgtgaatttgataggcatagtggaagtgatagatctggcctgaagcacgaggacaaacgtggaggtagcggatctcacaactggggaactgtcaaagacgaattaactgacttggatcaatcaaatgtgactgaggaaacacctgaaggtgaagaacatcatccagtggcagacactgaaaataaggagaatgaagttgaagaggtaaaagaggagggtccaaaagagatgactttggatgagtggaaggctattcaaaataaggaccgggcaaaagtagaatttaatatccgaaaaccaaatgaaggtgctgatgggcagtggaagaagggatttgttcttcataaatcaaagagtgaagaggctcatgctgaagattcggttatggaccatcatttccggaagccagcaaatgatataacgtctcagctggagatcaattttggagaccttggccgcccaggacgtggcggcaggggaggacgaggtggacgtgggcgtggtgggcgcccaaaccgtggcagcaggaccgacaagtcaagtgcttctgctcctgatgtggatgacccagaggcattcccagctctggcttaactggatgccataagacaaccctggttcctttgtgaacccttctgttcaaagcttttgcatgcttaaggattccaaacgactaagaaattaaaaaaaaaaagactgtcattcataccattcacacctaaagactgaattttatctgttttaaaaatgaacttctcccgctacacagaagtaacaaatatggtagtcagttttgtatttagaaatgtattggtagcagggatgttttcataattttcagagattatgcattcttcatgaatacttttgtattgctgcttgcaaatatgcatttccaaacttgaaatataggtgtgaacagtgtgtaccagtttaaagctttcacttcatttgtgttttttaattaaggatttagaagttcccccaattacaaactggttttaaatattggacatactggttttaatacctgctttgcatattcacacatggtcaactgggacatgttaaactttgatttgtcaaattttatgctgtgtggaatactaactatatgtattttaacttagttttaatattttcatttttggggaaaaatcttttttcacttctcatgatagctgttatatatatatgctaaatctttatatacagaaatatcagtacttgaacaaattcaaagcacatttggtttattaacccttgctccttgcatggctcattaggttcaaattataactgatttacattttcagctatatttactttttaaatgcttgagtttcccattttaaaatctaaactagacatcttaattggtgaaagttgtttaaactacttattgttggtaggcacatcgtgtcaagtgaagtagttttataggtatgggttttttctcccccttcaccagggtgggtggaataagttgatttggccaatgtgtaatatttaaactgttctgtaaaataagtgtctggccatttggtatgatttctgtgtgtgaaaggtcccaaaatcaaaatggtacatccataatcagccaccatttaacccttccttgttctaaaacaaaaaccaaagggcgctggttggtagggtgaggtgggggagtattttaatttttggaatttgggaagcagacagctttactttgtaaggttggaacagcagcactatacatgaaatataaaccaaaaacctttactgtttctaaatttcctagattgctattatttggttgtaagttgagtattccacagaaagtggtaattatctcttctctcttcctccattagaaaattaggtaaataatggattcctataatgggagcatcaccacttattaaaacacacatagaatgatgaattaaaaaagttttctaggattgtcttttattctgccacatttattgataaacagtgaaggaatttttaaaaaatttttaagaattgtttgtcacgtcatttttagaaatgttctacctgtatatggtaatgtccagttttaaaaatattggacatcttcaatcttaaacatttctatttagctgattggttctcacatatacttctaaaagaaacttttatgttataagagttactttttggataagatttattaatctcagttacctactattctgacattttaggaaggaggtaattgtttttaatgatggataaacttgtgctggtgttttggatcttatgatgctgagcatgttctgcactggtgctaatgtctaatataattttatatttacacacatacgtgctacccagagattaatttagtccatatgaactattgacccattgttcattgagacagcaacatacgcactcctaaatcagtgtgtttagacttttcaagtatctaactcatttccaaacatgtaccatgttttataaacctcttgatttccagcaacatactatagaaaacacctgctactcaaaacacaacttctcagtgtcatccattgctgtcgtgagagacaacatagcaatatctggtatgttgcaagctttcaagatagcctgaacttaaaaagttggtgcattagttgtatctgatggatataaatttgcctcctagttcactttgtgtcaagagctaaaactgtgaacctaactttctcttattggtgggtaataactgaaaataaagatttattttcatgctca

SEQ ID NO: 336421 - DNA, 3806 bp, Homo sapiens
agttagccctgagcccgagggggcgtgagtgaaaccaaagagcactttcgcgagtcagttacgccgtcacggttttttggtttcaaggtagctgaagacctagagagtttaagggtggccagagcaggtggcaggactccgcccaccaccacgcttcccttccttcagcccgcacgcttcactcccctcatggggtctcgcctctcaggcgcgcgcgaagagttgtcgcgcggtgcgtcctgggaattgtagtcccgacgcggagagtcgcctcaggagaaatgactctggcctacataccccacagtgccttgcggcgcaggccgctcccggatgtgtgcctggcgccggaagagaagacggcccccctctctcggcccggccatcttgtgggaagagctgaagcaggcgctcttggctcggcgcggcccgctgcaatccgtggaggaacgcgccgccgagccaccatcatgcctgggcacttacaggaaggcttcggctgcgtggtcaccaaccgattcgaccagttatttgacgacgaatcggaccccttcgaggtgctgaaggcagcagagaacaagaaaaaagaagccggcgggggcggcgttgggggccctggggccaagagcgcagctcaggccgcggcccagaccaactccaacgcggcaggcaaacagctgcgcaaggagtcccagaaagaccgcaagaacccgctgccccccagcgttggcgtggttgacaagaaagaggagacgcagccgcccgtggcgcttaagaaagaaggaataagacgagttggaagaagacctgatcaacaacttcagggtgaagggaaaataattgatagaagaccagaaaggcgaccacctcgtgaacgaagattcgaaaagccacttgaagaaaagggtgaaggaggcgaattttcagttgatagaccgattattgaccgacctattcgaggtcgtggtggtcttggaagaggtcgagggggccgtggacgtggaatgggccgaggagatggatttgattctcgtggcaaacgtgaatttgataggcatagtggaagtgatagatcttctttttcacattacagtggcctgaagcacgaggacaaacgtggaggtagcggatctcacaactggggaactgtcaaagacgaattaactgacttggatcaatcaaatgtgactgaggaaacacctgaaggtgaagaacatcatccagtggcagacactgaaaataaggagaatgaagttgaagaggtaaaagaggagggtccaaaagagatgactttggatgagtggaaggctattcaaaataaggaccgggcaaaagtagaatttaatatccgaaaaccaaatgaaggtgctgatgggcagtggaagaagggatttgttcttcataaatcaaagagtgaagaggctcatgctgaagattcggttatggaccatcatttccggaagccagcaaatgatataacgtctcagctggagatcaattttggagaccttggccgcccaggacgtggcggcaggggaggacgaggtggacgtgggcgtggtgggcgcccaaaccgtggcagcaggaccgacaagtcaagtgcttctgctcctgatgtggatgacccagaggcattcccagctctggcttaactggatgccataagacaaccctggttcctttgtgaacccttctgttcaaagcttttgcatgcttaaggattccaaacgactaagaaattaaaaaaaaaaagactgtcattcataccattcacacctaaagactgaattttatctgttttaaaaatgaacttctcccgctacacagaagtaacaaatatggtagtcagttttgtatttagaaatgtattggtagcagggatgttttcataattttcagagattatgcattcttcatgaatacttttgtattgctgcttgcaaatatgcatttccaaacttgaaatataggtgtgaacagtgtgtaccagtttaaagctttcacttcatttgtgttttttaattaaggatttagaagttcccccaattacaaactggttttaaatattggacatactggttttaatacctgctttgcatattcacacatggtcaactgggacatgttaaactttgatttgtcaaattttatgctgtgtggaatactaactatatgtattttaacttagttttaatattttcatttttggggaaaaatcttttttcacttctcatgatagctgttatatatatatgctaaatctttatatacagaaatatcagtacttgaacaaattcaaagcacatttggtttattaacccttgctccttgcatggctcattaggttcaaattataactgatttacattttcagctatatttactttttaaatgcttgagtttcccattttaaaatctaaactagacatcttaattggtgaaagttgtttaaactacttattgttggtaggcacatcgtgtcaagtgaagtagttttataggtatgggttttttctcccccttcaccagggtgggtggaataagttgatttggccaatgtgtaatatttaaactgttctgtaaaataagtgtctggccatttggtatgatttctgtgtgtgaaaggtcccaaaatcaaaatggtacatccataatcagccaccatttaacccttccttgttctaaaacaaaaaccaaagggcgctggttggtagggtgaggtgggggagtattttaatttttggaatttgggaagcagacagctttactttgtaaggttggaacagcagcactatacatgaaatataaaccaaaaacctttactgtttctaaatttcctagattgctattatttggttgtaagttgagtattccacagaaagtggtaattatctcttctctcttcctccattagaaaattaggtaaataatggattcctataatgggagcatcaccacttattaaaacacacatagaatgatgaattaaaaaagttttctaggattgtcttttattctgccacatttattgataaacagtgaaggaatttttaaaaaatttttaagaattgtttgtcacgtcatttttagaaatgttctacctgtatatggtaatgtccagttttaaaaatattggacatcttcaatcttaaacatttctatttagctgattggttctcacatatacttctaaaagaaacttttatgttataagagttactttttggataagatttattaatctcagttacctactattctgacattttaggaaggaggtaattgtttttaatgatggataaacttgtgctggtgttttggatcttatgatgctgagcatgttctgcactggtgctaatgtctaatataattttatatttacacacatacgtgctacccagagattaatttagtccatatgaactattgacccattgttcattgagacagcaacatacgcactcctaaatcagtgtgtttagacttttcaagtatctaactcatttccaaacatgtaccatgttttataaacctcttgatttccagcaacatactatagaaaacacctgctactcaaaacacaacttctcagtgtcatccattgctgtcgtgagagacaacatagcaatatctggtatgttgcaagctttcaagatagcctgaacttaaaaagttggtgcattagttgtatctgatggatataaatttgcctcctagttcactttgtgtcaagagctaaaactgtgaacctaactttctcttattggtgggtaataactgaaaataaagatttattttcatgctca

SEQ ID NO: 336422 - DNA, 3851 bp, Homo sapiens
agttagccctgagcccgagggggcgtgagtgaaaccaaagagcactttcgcgagtcagttacgccgtcacggttttttggtttcaaggtagctgaagacctagagagtttaagggtggccagagcaggtggcaggactccgcccaccaccacgcttcccttccttcagcccgcacgcttcactcccctcatggggtctcgcctctcaggcgcgcgcgaagagttgtcgcgcggtgcgtcctgggaattgtagtcccgacgcggagagtcgcctcaggagaaatgactctggcctacataccccacagtgccttgcggcgcaggccgctcccggatgtgtgcctggcgccggaagagaagacggcccccctctctcggcccggccatcttgtgggaagagctgaagcaggcgctcttggctcggcgcggcccgctgcaatccgtggaggaacgcgccgccgagccaccatcatgcctgggcacttacaggaaggcttcggctgcgtggtcaccaaccgattcgaccagttatttgacgacgaatcggaccccttcgaggtgctgaaggcagcagagaacaagaaaaaagaagccggcgggggcggcgttgggggccctggggccaagagcgcagctcaggccgcggcccagaccaactccaacgcggcaggcaaacagctgcgcaaggagtcccagaaagaccgcaagaacccgctgccccccagcgttggcgtggttgacaagaaagaggagacgcagccgcccgtggcgcttaagaaagaaggaataagacgagttggaagaagacctgatcaacaacttcagggtgaagggaaaataattgatagaagaccagaaaggcgaccacctcgtgaacgaagattcgaaaagccacttgaagaaaagggtgaaggaggcgaattttcagttgatagaccgattattgaccgacctattcgaggtcgtggtggtcttggaagaggtcgagggggccgtggacgtggaatgggccgaggagatggatttgattctcgtggcaaacgtgaatttgataggcatagtggaagtgatagatctggcctgaagcacgaggacaaacgtggaggtagcggatctcacaactggggaactgtcaaagacgaattaactgacttggatcaatcaaatgtgactgaggaaacacctgaaggtgaagaacatcatccagtggcagacactgaaaataaggagaatgaagttgaagaggtaaaagaggagggtccaaaagagatgactttggatgagtggaaggctattcaaaataaggaccgggcaaaagtagaatttaatatccgaaaaccaaatgaaggtgctgatgggcagtggaagaagggatttgttcttcataaatcaaagagtgaagaggctcatgctgaagattcggttatggaccatcatttccggaagccagcaaatgatataacgtctcagctggagatcaattttggagaccttggccgcccaggacgtggcggcaggggaggacgaggtggacgtgggcgtggtgggcgcccaaaccgtggcagcaggaccgacaagtcaagtgcttctgctcctgatgtggatgacccagaggcattcccagctctggcttaactggatgccataagacaaccctggttcctttgtgaacccttctgttcaaagcttttgcatgcttaaggattccaaacgactaagaaattaaaaaaaaaaagactgtcattcataccattcacacctaaagactgaattttatctgttttaaaaatgaacttctcccgctacacagaagtaacaaatatggtagtcagttttgtatttagaaatgtattggtagcagggatgttttcataattttcagagattatgcattcttcatgaatacttttgtattgctgcttgcaaatatgcatttccaaacttgaaatataggtgtgaacagtgtgtaccagtttaaagctttcacttcatttgtgttttttaattaaggatttagaagttcccccaattacaaactggttttaaatattggacatactggttttaatacctgctttgcatattcacacatggtcaactgggacatgttaaactttgatttgtcaaattttatgctgtgtggaatactaactatatgtattttaacttagttttaatattttcatttttggggaaaaatcttttttcacttctcatgatagctgttatatatatatgctaaatctttatatacagaaatatcagtacttgaacaaattcaaagcacatttggtttattaacccttgctccttgcatggctcattaggttcaaattataactgatttacattttcagctatatttactttttaaatgcttgagtttcccattttaaaatctaaactagacatcttaattggtgaaagttgtttaaactacttattgttggtaggcacatcgtgtcaagtgaagtagttttataggtatgggttttttctcccccttcaccagggtgggtggaataagttgatttggccaatgtgtaatatttaaactgttctgtaaaataagtgtctggccatttggtatgatttctgtgtgtgaaaggtcccaaaatcaaaatggtacatccataatcagccaccatttaacccttccttgttctaaaacaaaaaccaaagggcgctggttggtagggtgaggtgggggagtattttaatttttggaatttgggaagcagacagctttactttgtaaggttggaacagcagcactatacatgaaatataaaccaaaaacctttactgtttctaaatttcctagattgctattatttggttgtaagttgagtattccacagaaagtggtaattatctcttctctcttcctccattagaaaattaggtaaataatggattcctataatgggagcatcaccacttattaaaacacacatagaatgatgaattaaaaaagttttctaggattgtcttttattctgccacatttattgataaacagtgaaggaatttttaaaaaatttttaagaattgtttgtcacgtcatttttagaaatgttctacctgtatatggtaatgtccagttttaaaaatattggacatcttcaatcttaaacatttctatttagctgattggttctcacatatacttctaaaagaaacttttatgttataagagttactttttggataagatttattaatctcagttacctactattctgacattttaggaaggaggtaattgtttttaatgatggataaacttgtgctggtgttttggatcttatgatgctgagcatgttctgcactggtgctaatgtctaatataattttatatttacacacatacgtgctacccagagattaatttagtccatatgaactattgacccattgttcattgagacagcaacatacgcactcctaaatcagtgtgtttagacttttcaagtatctaactcatttccaaacatgtaccatgttttataaacctcttgatttccagcaacatactatagaaaacacctgctactcaaaacacaacttctcagtgtcatccattgctgtcgtgagagacaacatagcaatatctggtatgttgcaagctttcaagatagcctgaacttaaaaagttggtgcattagttgtatctgatggatataaatttgcctcctagttcactttgtgtcaagagctaaaactgtgaacctaactttctcttattggtgggtaataactgaaaataaagatttattttcatgctcaaaaaaaaaagtcgacgcggcccgggaatttaagagaagtggtagtcgacccggggaatttccg

SEQ ID NO: 336423 - DNA, 3753 bp, Homo sapiens
agttagccctgagcccgagggggcgtgagtgaaaccaaagagcactttcgcgagtcagttacgccgtcacggttttttggtttcaaggtagctgaagacctagagagtttaagggtggccagagcaggtggcaggactccgcccaccaccacgcttcccttccttcagcccgcacgcttcactcccctcatggggtctcgcctctcaggcgcgcgcgaagagttgtcgcgcggtgcgtcctgggaattgtagtcccgacgcggagagtcgcctcaggagaaatgactctggcctacataccccacagtgccttgcggcgcaggccgctcccggatgtgtgcctggcgccggaagagaagacggcccccctctctcggcccggccatcttgtgggaagagctgaagcaggcgctcttggctcggcgcggcccgctgcaatccgtggaggaacgcgccgccgagccaccatcatgcctgggcacttacaggaaggcttcggctgcgtggtcaccaaccgattcgaccagttatttgacgacgaatcggaccccttcgaggtgctgaaggcagcagagaacaagaaaaaagaagccggcgggggcggcgttgggggccctggggccaagagcgcagctcaggccgcggcccagaccaactccaacgcggcaggcaaacagctgcgcaaggagtcccagaaagaccgcaagaacccgctgccccccagcgttggcgtggttgacaagaaagaggagacgcagccgcccgtggcgcttaagaaagaaggaataagacgagttggaagaagacctgatcaacaacttcagggtgaagggaaaataattgatagaagaccagaaaggcgaccacctcgtgaacgaagattcgaaaagccacttgaagaaaagggtgaaggaggcgaattttcagttgatagaccgattattgaccgacctattcgaggtcgtggtggtcttggaagaggtcgagggggccgtggacgtggaatgggccgaggagatggatttgattctcgtggcaaacgtgaatttgataggcatagtggaagtgatagatcttctttttcacattacagtggcctgaagcacgaggacaaacgtggaggtagcggatctcacaactggggaactgtcaaagacgaattaactgacttggatcaatcaaatgtgactgaggaaacacctgaaggtgaagaacatcatccagtggcagacactgaaaataaggagaatgaagttgaagaggtaaaagaggagggtccaaaagagatgactttggatgagtggaaggctattcaaaataaggaccgggcaaaagtagaatttaatatccgaaaaccaaatgaaggtgctgatgggcagtggaagaagggatttgttcttcataaatcaaagagtgaagaggctcatgctgaagattcggttatggaccatcatttccggaagccagcaaatgatataacgtctcagctggagatcaattttggagaccttggccgcccaggacgtggcggcaggggaggacgaggtggacgtgggcgtggtgggcgcccaaaccgtggcagcaggaccgacaagtcaagtgcttctgctcctgatgtggatgacccagaggcattcccagctctggcttaactggatgccataagacaaccctggttcctttgtgaacccttctgttcaaagcttttgcatgcttaaggattccaaacgactaagaaattaaaaaaaaaaagactgtcattcataccattcacacctaaagactgaattttatctttttgtatttagaaatgtattggtagcagggatgttttcataattttcagagattatgcattcttcatgaatacttttgtattgctgcttgcaaatatgcatttccaaacttgaaatataggtgtgaacagtgtgtaccagtttaaagctttcacttcatttgtgttttttaattaaggatttagaagttcccccaattacaaactggttttaaatattggacatactggttttaatacctgctttgcatattcacacatggtcaactgggacatgttaaactttgatttgtcaaattttatgctgtgtggaatactaactatatgtattttaacttagttttaatattttcatttttggggaaaaatcttttttcacttctcatgatagctgttatatatatatgctaaatctttatatacagaaatatcagtacttgaacaaattcaaagcacatttggtttattaacccttgctccttgcatggctcattaggttcaaattataactgatttacattttcagctatatttactttttaaatgcttgagtttcccattttaaaatctaaactagacatcttaattggtgaaagttgtttaaactacttattgttggtaggcacatcgtgtcaagtgaagtagttttataggtatgggttttttctcccccttcaccagggtgggtggaataagttgatttggccaatgtgtaatatttaaactgttctgtaaaataagtgtctggccatttggtatgatttctgtgtgtgaaaggtcccaaaatcaaaatggtacatccataatcagccaccatttaacccttccttgttctaaaacaaaaaccaaagggcgctggttggtagggtgaggtgggggagtattttaatttttggaatttgggaagcagacagctttactttgtaaggttggaacagcagcactatacatgaaatataaaccaaaaacctttactgtttctaaatttcctagattgctattatttggttgtaagttgagtattccacagaaagtggtaattatctcttctctcttcctccattagaaaattaggtaaataatggattcctataatgggagcatcaccacttattaaaacacacatagaatgatgaattaaaaaagttttctaggattgtcttttattctgccacatttattgataaacagtgaaggaatttttaaaaaatttttaagaattgtttgtcacgtcatttttagaaatgttctacctgtatatggtaatgtccagttttaaaaatattggacatcttcaatcttaaacatttctatttagctgattggttctcacatatacttctaaaagaaacttttatgttataagagttactttttggataagatttattaatctcagttacctactattctgacattttaggaaggaggtaattgtttttaatgatggataaacttgtgctggtgttttggatcttatgatgctgagcatgttctgcactggtgctaatgtctaatataattttatatttacacacatacgtgctacccagagattaatttagtccatatgaactattgacccattgttcattgagacagcaacatacgcactcctaaatcagtgtgtttagacttttcaagtatctaactcatttccaaacatgtaccatgttttataaacctcttgatttccagcaacatactatagaaaacacctgctactcaaaacacaacttctcagtgtcatccattgctgtcgtgagagacaacatagcaatatctggtatgttgcaagctttcaagatagcctgaacttaaaaagttggtgcattagttgtatctgatggatataaatttgcctcctagttcactttgtgtcaagagctaaaactgtgaacctaactttctcttattggtgggtaataactgaaaataaagatttattttcatgctca

SEQ ID NO: 336424 - DNA, 3885 bp, Homo sapiens
agttagccctgagcccgagggggcgtgagtgaaaccaaagagcactttcgcgagtcagttacgccgtcacggttttttggtttcaaggtagctgaagacctagagagtttaagggtggccagagcaggtggcaggactccgcccaccaccacgcttcccttccttcagcccgcacgcttcactcccctcatggggtctcgcctctcaggcgcgcgcgaagagttgtcgcgcggtgcgtcctgggaattgtagtcccgacgcggagagtcgcctcaggagaaatgactctggcctacataccccacagtgccttgcggcgcaggccgctcccggatgtgtgcctggcgccggaagagaagacggcccccctctctcggcccggccatcttgtgggaagagctgaagcaggcgctcttggctcggcgcggcccgctgcaatccgtggaggaacgcgccgccgagccaccatcatgcctgggcacttacaggaaggcttcggctgcgtggtcaccaaccgattcgaccagttatttgacgacgaatcggaccccttcgaggtgctgaaggcagcagagaacaagaaaaaagaagccggcgggggcggcgttgggggccctggggccaagagcgcagctcaggccgcggcccagaccaactccaacgcggcaggcaaacagctgcgcaaggagtcccagaaagaccgcaagaacccgctgccccccagcgttggcgtggttgacaagaaagaggagacgcagccgcccgtggcgcttaagaaagaaggaataagacgagttggaagaagacctgatcaacaacttcagggtgaagggaaaataattgatagaagaccagaaaggcgaccacctcgtgaacgaagattcgaaaagccacttgaagaaaagggtgaaggaggcgaattttcagttgatagaccgattattgaccgacctattcgaggtcgtggtggtcttggaagaggtcgagggggccgtggacgtggaatgggccgaggagatggatttgattctcgtggcaaacgtgaatttgataggcatagtggaagtgatagatctggcctgaagcacgaggacaaacgtggaggtagcggatctcacaactggggaactgtcaaagacgaattaactgacttggatcaatcaaatgtgactgaggaaacacctgaaggtgaagaacatcatccagtggcagacactgaaaataaggagaatgaagttgaagaggtaaaagaggagggtccaaaagagatgactttggatgagtggaaggctattcaaaataaggaccgggcaaaagtagaatttaatatccgaaaaccaaatgaaggtgctgatgggcagtggaagaagggatttgttcttcataaatcaaagagtgaagaggctcatgctgaagattcggttatggaccatcatttccggaagccagcaaatgatataacgtctcagctggagatcaattttggagaccttggccgcccaggacgtggcggcaggggaggacgaggtggacgtgggcgtggtgggcgcccaaaccgtggcagcaggaccgacaagtcaagtgcttctgctcctgatgtggatgacccagaggcattcccagctctggcttaactggatgccataagacaaccctggttcctttgtgaacccttctgttcaaagcttttgcatgcttaaggattccaaacgactaagaaattaaaaaaaaaaagactgtcattcataccattcacacctaaagactgaattttatctgttttaaaaatgaacttctcccgctacacagaagtaacaaatatggtagtcagttttgtatttagaaatgtattggtagcagggatgttttcataattttcagagattatgcattcttcatgaatacttttgtattgctgcttgcaaatatgcatttccaaacttgaaatataggtgtgaacagtgtgtaccagtttaaagctttcacttcatttgtgttttttaattaaggatttagaagttcccccaattacaaactggttttaaatattggacatactggttttaatacctgctttgcatattcacacatggtcaactgggacatgttaaactttgatttgtcaaattttatgctgtgtggaatactaactatatgtattttaacttagttttaatattttcatttttggggaaaaatcttttttcacttctcatgatagctgttatatatatatgctaaatctttatatacagaaatatcagtacttgaacaaattcaaagcacatttggtttattaacccttgctccttgcatggctcattaggttcaaattataactgatttacattttcagctatatttactttttaaatgcttgagtttcccattttaaaatctaaactagacatcttaattggtgaaagttgtttaaactacttattgttggtaggcacatcgtgtcaagtgaagtagttttataggtatgggttttttctcccccttcaccagggtgggtggaataagttgatttggccaatgtgtaatatttaaactgttctgtaaaataagtgtctggccatttggtatgatttctgtgtgtgaaaggtcccaaaatcaaaatggtacatccataatcagccaccatttaacccttccttgttctaaaacagaatttgggaagcagacagctttactttgtaaggttggaacagcagcactatacatgaaatataaaccaaaaacctttactgtttctaaatttcctagattgctattatttggttgtaagttgagtattccacagaaagtggtaattatctcttctctcttcctccattagaaaattaggtaaataatggattcctataatgggagcatcaccacttattaaaacacacatagaatgatgaattaaaaaagttttctaggattgtcttttattctgccacatttattgataaacagtgaaggaatttttaaaaaatttttaagaattgtttgtcacgtcatttttagaaatgttctacctgtatatggtaatgtccagttttaaaaatattggacatcttcaatcttaaacatttctatttagctgattggttctcacatatacttctaaaagaaacttttatgttataagagttactttttggataagatttattaatctcagttacctactattctgacattttaggaaggaggtaattgtttttaatgatggataaacttgtgctggtgttttggatcttatgatgctgagcatgttctgcactggtgctaatgtctaatataattttatatttacacacatacgtgctacccagagattaatttagtccatatgaactattgacccattgttcattgagacagcaacatacgcactcctaaatcagtgtgtttagacttttcaagtatctaactcatttccaaacatgtaccatgttttataaacctcttgatttccagcaacatactatagaaaacacctgctactcaaaacacaacttctcagtgtcatccattgctgtcgtgagagacaacatagcaatatctggtatgttgcaagctttcaagatagcctgaacttaaaaagttggtgcattagttgtatctgatggatataaatttgcctcctagttcactttgtgtcaagagctaaaactgtgaacctaactttctcttattggtgggtaataactgaaaataaagatttattttcatgctcacttcttaaaagtcataaaaacaatcaaataggatcatgtttattgtcatgtgtttcctggtttctgacctgtgtgcacacccctgtgtgtttataatttttaaattgaattttatatggggtttttatttgctaaaaaccaggctgttgaa

SEQ ID NO: 336425 - DNA, 3401 bp, Homo sapiens
agttagccctgagcccgagggggcgtgagtgaaaccaaagagcactttcgcgagtcagttacgccgtcacggttttttggtttcaaggtagctgaagacctagagagtttaagggtggccagagcaggtggcaggactccgcccaccaccacgcttcccttccttcagcccgcacgcttcactcccctcatggggtctcgcctctcaggcgcgcgcgaagagttgtcgcgcggtgcgtcctgggaattgtagtcccgacgcggagagtcgcctcaggagaaatgactctggcctacataccccacagtgccttgcggcgcaggccgctcccggatgtgtgcctggcgccggaagagaagacggcccccctctctcggcccggccatcttgtgggaagagctgaagcaggcgctcttggctcggcgcggcccgctgcaatccgtggaggaacgcgccgccgagccaccatcatgcctgggcacttacaggaaggcttcggctgcgtggtcaccaaccgattcgaccagttatttgacgacgaatcggaccccttcgaggtgctgaaggcagcagagaacaagaaaaaagaagccggcgggggcggcgttgggggccctggggccaagagcgcagctcaggccgcggcccagaccaactccaacgcggcaggcaaacagctgcgcaaggagtcccagaaagaccgcaagaacccgctgccccccagcgttggcgtggttgacaagaaagaggagacgcagccgcccgtggcgcttaagaaagaaggaataagacgagttggaagaagacctgatcaacaacttcagggtgaagggaaaataattgatagaagaccagaaaggcgaccacctcgtgaacgaagattcgaaaagccacttgaagaaaagggtgaaggaggcgaattttcagttgatagaccgattattgaccgacctattcgaggtcgtggtggtcttggaagaggtcgagggggccgtggacgtggaatgggccgaggagatggatttgattctcgtggcaaacgtgaatttgataggcatagtggaagtgatagatctggcctgaagcacgaggacaaacgtggaggtagcggatctcacaactggggaactgtcaaagacgaattaactgacttggatcaatcaaatgtgactgaggaaacacctgaaggtgaagaacatcatccagtggcagacactgaaaataaggagaatgaagttgaagaggtaaaagaggagggtccaaaagagatgactttggatgagtggaaggctattcaaaataaggaccgggcaaaagtagaatttaatatccgaaaaccaaatgaaggtgctgatgggcagtggaagaagggatttgttcttcataaatcaaagagtgaagaggctcatgctgaagattcggttatggaccatcatttccggaagccagcaaatgatataacgtctcagctggagatcaattttggagaccttggccgcccaggacgtggcggcaggggaggacgaggtggacgtgggcgtggtgggcgcccaaaccgtggcagcaggaccgacaagtcaagtgcttctgctcctgatgtggatgacccagaggcattcccagctctggcttaactggatgccataagacaaccctggttcctttgtgaacccttctgttcaaagcttttgcatgcttaaggattccaaacgactaagaaattaaaaaaaaaaagactgtcattcataccattcacacctaaagactgaattttatctgttttaaaaatgaacttctcccgctacacagaagtaacaaatatggtagtcagttttgtatttagaaatgtattggtagcagggatgttttcataattttcagagattatgcattcttcatgaatacttttgtattgctgcttgcaaatatgcatttccaaacttgaaatataggtgtgaacagtgtgtaccagtttaaagctttcacttcatttgtgttttttaattaaggatttagaagttcccccaattacaaactggttttaaatattggacatactggttttaatacctgctttgcatattcacacatggtcaactgggacatgttaaactttgatttgtcaaattttatgctgtgtggaatactaactatatgtattttaacttagttttaatattttcatttttggggaaaaatcttttttcacttctcatgatagctgttatatatatatgctaaatctttatatacagaaatatcagtacttgaacaaattcaaagcacatttggtttattaacccttgctccttgcatggctcattaggttcaaattataactgatttacattttcagctatatttactttttaaatgcttgagtttcccattttaaaatctaaactagacatcttaattggtgaaagttgtttaaactacttattgttggtaggcacatcgtgtcaagtgaagtagttttataggtatgggttttttctcccccttcaccagggtgggtggaataagttgatttggccaatgtgtaatatttaaactgttctgtaaaataagtgtctggccatttggtatgatttctgtgtgtgaaaggtcccaaaatcaaaatggtacatccataatcagccaccatttaacccttccttgttctaaaacaaaaaccaaagggcgctggttggtagggtgaggtgggggagtattttaatttttggaatttgggaagcagacagctttactttgtaaggttggaacagcagcactatacatgaaatataaaccaaaaacctttactgtttctaaatttcctagattgctattatttggttgtaagttgagtattccacagaaagtggtaattatctcttctctcttcctccattagaaaattaggtaaataatggattcctataatgggagcatcaccacttattaaaacacacatagaatgatgaattaaaaaagttttctaggattgtcttttattctgccacatttattgataaacagtgaaggaatttttaaaaaatttttaagaattgtttgtcacgtcatttttagaaatgttctacctgtatatggtaatgtccagttttaaaaatattggacatcttcaatcttaaacatttctatttagctgattggttctcacatatacttctaaaagaaacttttatgttataagagttactttttggataagatttattaatctcagttacctactattctgacattttaggaaggaggtaattgtttttaatgatggataaacttgtgctggtgttttggaacgctgcacttagatataacatccttcacttaaaaaattaaaaacatcagtactaccaccaccaccaacaacatcaacacagatcttcacatctgcc

SEQ ID NO: 336426 - DNA, 2809 bp, Homo sapiens
agttagccctgagcccgagggggcgtgagtgaaaccaaagagcactttcgcgagtcagttacgccgtcacggttttttggtttcaaggtagctgaagacctagagagtttaagggtggccagagcaggtggcaggactccgcccaccaccacgcttcccttccttcagcccgcacgcttcactcccctcatggggtctcgcctctcaggcgcgcgcgaagagttgtcgcgcggtgcgtcctgggaattgtagtcccgacgcggagagtcgcctcaggagaaatgactctggcctacataccccacagtgccttgcggcgcaggccgctcccggatgtgtgcctggcgccggaagagaagacggcccccctctctcggcccggccatcttgtgggaagagctgaagcaggcgctcttggctcggcgcggcccgctgcaatccgtggaggaacgcgccgccgagccaccatcatgcctgggcacttacaggaaggcttcggctgcgtggtcaccaaccgattcgaccagttatttgacgacgaatcggaccccttcgaggtgctgaaggcagcagagaacaagaaaaaagaagccggcgggggcggcgttgggggccctggggccaagagcgcagctcaggccgcggcccagaccaactccaacgcggcaggcaaacagctgcgcaaggagtcccagaaagaccgcaagaacccgctgccccccagcgttggcgtggttgacaagaaagaggagacgcagccgcccgtggcgcttaagaaagaaggaataagacgagttggaagaagacctgatcaacaacttcagggtgaagggaaaataattgatagaagaccagaaaggcgaccacctcgtgaacgaagattcgaaaagccacttgaagaaaagggtgaaggaggcgaattttcagttgatagaccgattattgaccgacctattcgaggtcgtggtggtcttggaagaggtcgagggggccgtggacgtggaatgggccgaggagatggatttgattctcgtggcaaacgtgaatttgataggcatagtggaagtgatagatctggcctgaagcacgaggacaaacgtggaggtagcggatctcacaactggggaactgtcaaagacgaattaactgacttggatcaatcaaatgtgactgaggaaacacctgaaggtgaagaacatcatccagtggcagacactgaaaataaggagaatgaagttgaagaggtaaaagaggagggtccaaaagagatgactttggatgagtggaaggctattcaaaataaggaccgggcaaaagtagaatttaatatccgaaaaccaaatgaaggtgctgatgggcagtggaagaagggatttgttcttcataaatcaaagagtgaagaggctcatgctgaagattcggttatggaccatcatttccggaagccagcaaatgatataacgtctcagctggagatcaattttggagaccttggccgcccaggacgtggcggcaggggaggacgaggtggacgtgggcgtggtgggcgcccaaaccgtggcagcaggaccgacaagtcaagtgcttctgctcctgatgtggatgacccagaggcattcccagctctggcttaactggatgccataagacaaccctggttcctttgtgaacccttctgttcaaagcttttgcatgcttaaggattccaaacgactaagaaattaaaaaaaaaaagactgtcattcataccattcacacctaaagactgaattttatctgttttaaaaatgaacttctcccgctacacagaagtaacaaatatggtagtcagttttgtatttagaaatgtattggtagcagggatgttttcataattttcagagattatgcattcttcatgaatacttttgtattgctgcttgcaaatatgcatttccaaacttgaaatataggtgtgaacagtgtgtaccagtttaaagctttcacttcatttgtgttttttaattaaggatttagaagttcccccaattacaaactggttttaaatattggacatactggttttaatacctgctttgcatattcacacatggtcaactgggacatgttaaactttgatttgtcaaattttatgctgtgtggaatactaactatatgtattttaacttagttttaatattttcatttttggggaaaaatcttttttcacttctcatgatagctgttatatatatatgctaaatctttatatacagaaatatcagtacttgaacaaattcaaagcacatttggtttattaacccttgctccttgcatggctcattaggttcaaattataactgatttacattttcagctatatttactttttaaatgcttgagtttcccattttaaaatctaaactagacatcttaattggtgaaagttgtttaaactacttattgttggtaggcacatcgtgtcaagtgaagtagttttataggtatgggttttttctcccccttcaccagggtgggtggaataagttgatttggccaatgtgtaatatttaaactgttctgtaaaataagtgtctggccatttggtatgatttctgtgtgtgaaaggtcccaaaatcaaaatggtacatccataatcagccaccatttaacccttccttgttctaaaacaaaaaccaaagggcgctggttggtagggtgaggtgggggagtattttaatttttggaatttgggaagcagacagctttactttgtaaggttggaacagcagcactatacatgaaatataaaccaaaaacctttactgtt

SEQ ID NO: 336427 - DNA, 2705 bp, Homo sapiens
agttagccctgagcccgagggggcgtgagtgaaaccaaagagcactttcgcgagtcagttacgccgtcacggttttttggtttcaaggtagctgaagacctagagagtttaagggtggccagagcaggtggcaggactccgcccaccaccacgcttcccttccttcagcccgcacgcttcactcccctcatggggtctcgcctctcaggcgcgcgcgaagagttgtcgcgcggtgcgtcctgggaattgtagtcccgacgcggagagtcgcctcaggagaaatgactctggcctacataccccacagtgccttgcggcgcaggccgctcccggatgtgtgcctggcgccggaagagaagacggcccccctctctcggcccggccatcttgtgggaagagctgaagcaggcgctcttggctcggcgcggcccgctgcaatccgtggaggaacgcgccgccgagccaccatcatgcctgggcacttacaggaaggcttcggctgcgtggtcaccaaccgattcgaccagttatttgacgacgaatcggaccccttcgaggtgctgaaggcagcagagaacaagaaaaaagaagccggcgggggcggcgttgggggccctggggccaagagcgcagctcaggccgcggcccagaccaactccaacgcggcaggcaaacagctgcgcaaggagtcccagaaagaccgcaagaacccgctgccccccagcgttggcgtggttgacaagaaagaggagacgcagccgcccgtggcgcttaagaaagaaggaataagacgagttggaagaagacctgatcaacaacttcagggtgaagggaaaataattgatagaagaccagaaaggcgaccacctcgtgaacgaagattcgaaaagccacttgaagaaaagggtgaaggaggcgaattttcagttgatagaccgattattgaccgacctattcgaggtcgtggtggtcttggaagaggtcgagggggccgtggacgtggaatgggccgaggagatggatttgattctcgtggcaaacgtgaatttgataggcatagtggaagtgatagatctggcctgaagcacgaggacaaacgtggaggtagcggatctcacaactggggaactgtcaaagacgaattaactgacttggatcaatcaaatgtgactgaggaaacacctgaaggtgaagaacatcatccagtggcagacactgaaaataaggagaatgaagttgaagaggtaaaagaggagggtccaaaagagatgactttggatgagtggaaggctattcaaaataaggaccgggcaaaagtagaatttaatatccgaaaaccaaatgaaggtgctgatgggcagtggaagaagggatttgttcttcataaatcaaagagtgaagaggctcatgctgaagattcggttatggaccatcatttccggaagccagcaaatgatataacgtctcagctggagatcaattttggagaccttggccgcccaggacgtggcggcaggggaggacgaggtggacgtgggcgtggtgggcgcccaaaccgtggcagcaggaccgacaagtcaagtgcttctgctcctgatgtggatgacccagaggcattcccagctctggcttaactggatgccataagacaaccctggttcctttgtgaacccttctgttcaaagcttttgcatgcttaaggattccaaacgactaagaaattaaaaaaaaaaagactgtcattcataccattcacacctaaagactgaattttatctgttttaaaaatgaacttctcccgctacacagaagtaacaaatatggtagtcagttttgtatttagaaatgtattggtagcagggatgttttcataattttcagagattatgcattcttcatgaatacttttgtattgctgcttgcaaatatgcatttccaaacttgaaatataggtgtgaacagtgtgtaccagtttaaagctttcacttcatttgtgttttttaattaaggatttagaagttcccccaattacaaactggttttaaatattggacatactggttttaatacctgctttgcatattcacacatggtcaactgggacatgttaaactttgatttgtcaaattttatgctgtgtggaatactaactatatgtattttaacttagttttaatattttcatttttggggaaaaatcttttttcacttctcatgatagctgttatatatatatgctaaatctttatatacagaaatatcagtacttgaacaaattcaaagcacatttggtttattaacccttgctccttgcatggctcattaggttcaaattataactgatttacattttcagctatatttactttttaaatgcttgagtttcccattttaaaatctaaactagacatcttaattggtgaaagttgtttaaactacttattgttggtaggcacatcgtgtcaagtgaagtagttttataggtatgggttttttctcccccttcaccagggtgggtggaataagttgatttggccaatgtgtaatatttaaactgttctgtaaaataagtgtctggccatttggtatgatttctgtgtgtgaaaggtcccaaaatcaaaatggtacatccataatcagccaccagcgccctttggtttttgttttagaacaaggaagggttaaatggtggctggtcgacgcgg

SEQ ID NO: 336428 - DNA, 2018 bp, Homo sapiens
agttagccctgagcccgagggggcgtgagtgaaaccaaagagcactttcgcgagtcagttacgccgtcacggttttttggtttcaaggtagctgaagacctagagagtttaagggtggccagagcaggtggcaggactccgcccaccaccacgcttcccttccttcagcccgcacgcttcactcccctcatggggtctcgcctctcaggcgcgcgcgaagagttgtcgcgcggtgcgtcctgggaattgtagtcccgacgcggagagtcgcctcaggagaaatgactctggcctacataccccacagtgccttgcggcgcaggccgctcccggatgtgtgcctggcgccggaagagaagacggcccccctctctcggcccggccatcttgtgggaagagctgaagcaggcgctcttggctcggcgcggcccgctgcaatccgtggaggaacgcgccgccgagccaccatcatgcctgggcacttacaggaaggcttcggctgcgtggtcaccaaccgattcgaccagttatttgacgacgaatcggaccccttcgaggtgctgaaggcagcagagaacaagaaaaaagaagccggcgggggcggcgttgggggccctggggccaagagcgcagctcaggccgcggcccagaccaactccaacgcggcaggcaaacagctgcgcaaggagtcccagaaagaccgcaagaacccgctgccccccagcgttggcgtggttgacaagaaagaggagacgcagccgcccgtggcgcttaagaaagaaggaataagacgagttggaagaagacctgatcaacaacttcagggtgaagggaaaataattgatagaagaccagaaaggcgaccacctcgtgaacgaagattcgaaaagccacttgaagaaaagggtgaaggaggcgaattttcagttgatagaccgattattgaccgacctattcgaggtcgtggtggtcttggaagaggtcgagggggccgtggacgtggaatgggccgaggagatggatttgattctcgtggcaaacgtgaatttgataggcatagtggaagtgatagatctggcctgaagcacgaggacaaacgtggaggtagcggatctcacaactggggaactgtcaaagacgaattaacagagtcccccaaatacattcagaaacaaatatcttataattacagtgacttggatcaatcaaatgtgactgaggaaacacctgaaggtgaagaacatcatccagtggcagacactgaaaataaggagaatgaagttgaagaggtaaaagaggagggtccaaaagagatgactttggatgagtggaaggctattcaaaataaggaccgggcaaaagtagaatttaatatccgaaaaccaaatgaaggtgctgatgggcagtggaagaagggatttgttcttcataaatcaaagagtgaagaggctcatgctgaagattcggttatggaccatcatttccggaagccagcaaatgatataacgtctcagctggagatcaattttggagaccttggccgcccaggacgtggcggcaggggaggacgaggtggacgtgggcgtggtgggcgcccaaaccgtggcagcaggaccgacaagtcaagtgcttctgctcctgatgtggatgacccagaggcattcccagctctggcttaactggatgccataagacaaccctggttcctttgtgaacccttctgttcaaagcttttgcatgcttaaggattccaaacgactaagaaattaaaaaaaaaaagactgtcattcataccattcacacctaaagactgaattttatctgttttaaaaatgaacttctcccgctacacagaagtaacaaatatggtagtcagttttgtatttagaaatgtattggtagcagggatgttttcataattttcagagattatgcattcttcatgaatacttttgtattgctgcttgcaaatatgcatttccaaacttgaaatataggtgtgaacagtgtgtaccagt

SEQ ID NO: 336429 - DNA, 1471 bp, Homo sapiens
  misc_feature (1404)..(1404): n is a, c, g, or t
agttagccctgagcccgagggggcgtgagtgaaaccaaagagcactttcgcgagtcagttacgccgtcacggttttttggtttcaaggtagctgaagacctagagagtttaagggtggccagagcaggtggcaggactccgcccaccaccacgcttcccttccttcagcccgcacgcttcactcccctcatggggtctcgcctctcaggcgcgcgcgaagagttgtcgcgcggtgcgtcctgggaattgtagtcccgacgcggagagtcgcctcaggagaaatgactctggcctacataccccacagtgccttgcggcgcaggccgctcccggatgtgtgcctggcgccggaagagaagacggcccccctctctcggcccggccatcttgtgggaagagctgaagcaggcgctcttggctcggcgcggcccgctgcaatccgtggaggaacgcgccgccgagccaccatcatgcctgggcacttacaggaaggcttcggctgcgtggtcaccaaccgattcgaccagttatttgacgacgaatcggaccccttcgaggtgctgaaggcagcagagaacaagaaaaaagaagccggcgggggcggcgttgggggccctggggccaagagcgcagctcaggccgcggcccagaccaactccaacgcggcaggcaaacagctgcgcaaggagtcccagaaagaccgcaagaacccgctgccccccagcgttggcgtggttgacaagaaagaggagacgcagccgcccgtggcgcttaagaaagaaggaataagacgagttggaagaagacctgatcaacaacttcagggtgaagggaaaataattgatagaagaccagaaaggcgaccacctcgtgaacgaagattcgaaaagccacttgaagaaaagggtgaaggaggcgaattttcagttgatagaccgattattgaccgacctattcgaggtcgtggtggtcttggaagaggtcgagggggccgtggacgtggaatgggccgaggagatggatttgattctcgtggcaaacgtgaatttgataggcatagtggaagtgatagatctggcctgaagcacgaggacaaacgtggaggtagcggatctcacaactggggaactgtcaaagacgaattaactgacttggatcaatcaaatgtgactgaggaaacacctgaaggtgaagaacatcatccagtggcagacactgaaaataaggagaatgaagttgaagaggtaaaagaggagggtccaaaagagatgactttggatgagtggaaggctattcaaaataaggaccgggcaaaagtagaatttaatatccgaaaaccaaatgaaggtgctgatgggcagtggaagaagggatttgttcttcataaatcaaagagtgaagagntcatgctgagatcgttatgcccatcatccgagcacatttaacgtcagctgagacattggcactgcca

SEQ ID NO: 336430 - DNA, 1489 bp, Homo sapiens
  misc_feature (1422)..(1422): n is a, c, g, or t
agttagccctgagcccgagggggcgtgagtgaaaccaaagagcactttcgcgagtcagttacgccgtcacggttttttggtttcaaggtagctgaagacctagagagtttaagggtggccagagcaggtggcaggactccgcccaccaccacgcttcccttccttcagcccgcacgcttcactcccctcatggggtctcgcctctcaggcgcgcgcgaagagttgtcgcgcggtgcgtcctgggaattgtagtcccgacgcggagagtcgcctcaggagaaatgactctggcctacataccccacagtgccttgcggcgcaggccgctcccggatgtgtgcctggcgccggaagagaagacggcccccctctctcggcccggccatcttgtgggaagagctgaagcaggcgctcttggctcggcgcggcccgctgcaatccgtggaggaacgcgccgccgagccaccatcatgcctgggcacttacaggaaggcttcggctgcgtggtcaccaaccgattcgaccagttatttgacgacgaatcggaccccttcgaggtgctgaaggcagcagagaacaagaaaaaagaagccggcgggggcggcgttgggggccctggggccaagagcgcagctcaggccgcggcccagaccaactccaacgcggcaggcaaacagctgcgcaaggagtcccagaaagaccgcaagaacccgctgccccccagcgttggcgtggttgacaagaaagaggagacgcagccgcccgtggcgcttaagaaagaaggaataagacgagttggaagaagacctgatcaacaacttcagggtgaagggaaaataattgatagaagaccagaaaggcgaccacctcgtgaacgaagattcgaaaagccacttgaagaaaagggtgaaggaggcgaattttcagttgatagaccgattattgaccgacctattcgaggtcgtggtggtcttggaagaggtcgagggggccgtggacgtggaatgggccgaggagatggatttgattctcgtggcaaacgtgaatttgataggcatagtggaagtgatagatcttctttttcacattacagtggcctgaagcacgaggacaaacgtggaggtagcggatctcacaactggggaactgtcaaagacgaattaactgacttggatcaatcaaatgtgactgaggaaacacctgaaggtgaagaacatcatccagtggcagacactgaaaataaggagaatgaagttgaagaggtaaaagaggagggtccaaaagagatgactttggatgagtggaaggctattcaaaataaggaccgggcaaaagtagaatttaatatccgaaaaccaaatgaaggtgctgatgggcagtggaagaagggatttgttcttcataaatcaaagagtgaagagntcatgctgagatcgttatgcccatcatccgagcacatttaacgtcagctgagacattggcactgcca

SEQ ID NO: 336431 - DNA, 3080 bp, Homo sapiens
ggggaactgtcaaagacgaattaactgacttggatcaatcaaatgtgactgaggaaacacctgaaggtgaagaacatcatccagtggcagacactgaaaataaggagaatgaagttgaagaggtaccagaaaggcgaccacctcgtgaacgaagattcgaaaagccacttgaagaaaagggtgaaggaggcgaattttcagttgatagaccgattattgaccgacctattcgaggtcgtggtggtcttggaagaggtcgagggggccgtggacgtggaatgggccgaggagatggatttgattctcgtggcaaacgtgaatttgataggcatagtggaagtgatagatcttctttttcacattacagtggcctgaagcacgaggacaaacgtggaggtagcggatctcacaactggggaactgtcaaagacgaattaactgacttggatcaatcaaatgtgactgaggaaacacctgaaggtgaagaacatcatccagtggcagacactgaaaataaggagaatgaagttgaagaggtaaaagaggagggtccaaaagagatgactttggatgagtggaaggctattcaaaataaggaccgggcaaaagtagaatttaatatccgaaaaccaaatgaaggtgctgatgggcagtggaagaagggatttgttcttcataaatcaaagagtgaagaggctcatgctgaagattcggttatggaccatcatttccggaagccagcaaatgatataacgtctcagctggagatcaattttggagaccttggccgcccaggacgtggcggcaggggaggacgaggtggacgtgggcgtggtgggcgcccaaaccgtggcagcaggaccgacaagtcaagtgcttctgctcctgatgtggatgacccagaggcattcccagctctggcttaactggatgccataagacaaccctggttcctttgtgaacccttctgttcaaagcttttgcatgcttaaggattccaaacgactaagaaattaaaaaaaaaaagactgtcattcataccattcacacctaaagactgaattttatctgttttaaaaatgaacttctcccgctacacagaagtaacaaatatggtagtcagttttgtatttagaaatgtattggtagcagggatgttttcataattttcagagattatgcattcttcatgaatacttttgtattgctgcttgcaaatatgcatttccaaacttgaaatataggtgtgaacagtgtgtaccagtttaaagctttcacttcatttgtgttttttaattaaggatttagaagttcccccaattacaaactggttttaaatattggacatactggttttaatacctgctttgcatattcacacatggtcaactgggacatgttaaactttgatttgtcaaattttatgctgtgtggaatactaactatatgtattttaacttagttttaatattttcatttttggggaaaaatcttttttcacttctcatgatagctgttatatatatatgctaaatctttatatacagaaatatcagtacttgaacaaattcaaagcacatttggtttattaacccttgctccttgcatggctcattaggttcaaattataactgatttacattttcagctatatttactttttaaatgcttgagtttcccattttaaaatctaaactagacatcttaattggtgaaagttgtttaaactacttattgttggtaggcacatcgtgtcaagtgaagtagttttataggtatgggttttttctcccccttcaccagggtgggtggaataagttgatttggccaatgtgtaatatttaaactgttctgtaaaataagtgtctggccatttggtatgatttctgtgtgtgaaaggtcccaaaatcaaaatggtacatccataatcagccaccatttaacccttccttgttctaaaacaaaaaccaaagggcgctggttggtagggtgaggtgggggagtattttaatttttggaatttgggaagcagacagctttactttgtaaggttggaacagcagcactatacatgaaatataaaccaaaaacctttactgtttctaaatttcctagattgctattatttggttgtaagttgagtattccacagaaagtggtaattatctcttctctcttcctccattagaaaattaggtaaataatggattcctataatgggagcatcaccacttattaaaacacacatagaatgatgaattaaaaaagttttctaggattgtcttttattctgccacatttattgataaacagtgaaggaatttttaaaaaatttttaagaattgtttgtcacgtcatttttagaaatgttctacctgtatatggtaatgtccagttttaaaaatattggacatcttcaatcttaaacatttctatttagctgattggttctcacatatacttctaaaagaaacttttatgttataagagttactttttggataagatttattaatctcagttacctactattctgacattttaggaaggaggtaattgtttttaatgatggataaacttgtgctggtgttttggatcttatgatgctgagcatgttctgcactggtgctaatgtctaatataattttatatttacacacatacgtgctacccagagattaatttagtccatatgaactattgacccattgttcattgagacagcaacatacgcactcctaaatcagtgtgtttagacttttcaagtatctaactcatttccaaacatgtaccatgttttataaacctcttgatttccagcaacatactatagaaaacacctgctactcaaaacacaacttctcagtgtcatccattgctgtcgtgagagacaacatagcaatatctggtatgttgcaagctttcaagatagcctgaacttaaaaagttggtgcattagttgtatctgatggatataaatttgcctcctagttcactttgtgtcaagagctaaaactgtgaacctaactttctcttattggtgggtaataactgaaaataaagatttattttcatgctca

SEQ ID NO: 336432 - DNA, 2896 bp, Homo sapiens
ataggctaggagcgaggccgcggtggtgatttcagttgatagaccgattattgaccgacctattcgaggtcgtggtggtcttggaagaggtcgagggggccgtggacgtggaatgggccgaggagatggatttgattctcgtggcaaacgtgaatttgataggcatagtggaagtgatagatctggcctgaagcacgaggacaaacgtggaggtagcggatctcacaactggggaactgtcaaagacgaattaactgacttggatcaatcaaatgtgactgaggaaacacctgaaggtgaagaacatcatccagtggcagacactgaaaataaggagaatgaagttgaagaggtaaaagaggagggtccaaaagagatgactttggatgagtggaaggctattcaaaataaggaccgggcaaaagtagaatttaatatccgaaaaccaaatgaaggtgctgatgggcagtggaagaagggatttgttcttcataaatcaaagagtgaagaggctcatgctgaagattcggttatggaccatcatttccggaagccagcaaatgatataacgtctcagctggagatcaattttggagaccttggccgcccaggacgtggcggcaggggaggacgaggtggacgtgggcgtggtgggcgcccaaaccgtggcagcaggaccgacaagtcaagtgcttctgctcctgatgtggatgacccagaggcattcccagctctggcttaactggatgccataagacaaccctggttcctttgtgaacccttctgttcaaagcttttgcatgcttaaggattccaaacgactaagaaattaaaaaaaaaaagactgtcattcataccattcacacctaaagactgaattttatctgttttaaaaatgaacttctcccgctacacagaagtaacaaatatggtagtcagttttgtatttagaaatgtattggtagcagggatgttttcataattttcagagattatgcattcttcatgaatacttttgtattgctgcttgcaaatatgcatttccaaacttgaaatataggtgtgaacagtgtgtaccagtttaaagctttcacttcatttgtgttttttaattaaggatttagaagttcccccaattacaaactggttttaaatattggacatactggttttaatacctgctttgcatattcacacatggtcaactgggacatgttaaactttgatttgtcaaattttatgctgtgtggaatactaactatatgtattttaacttagttttaatattttcatttttggggaaaaatcttttttcacttctcatgatagctgttatatatatatgctaaatctttatatacagaaatatcagtacttgaacaaattcaaagcacatttggtttattaacccttgctccttgcatggctcattaggttcaaattataactgatttacattttcagctatatttactttttaaatgcttgagtttcccattttaaaatctaaactagacatcttaattggtgaaagttgtttaaactacttattgttggtaggcacatcgtgtcaagtgaagtagttttataggtatgggttttttctcccccttcaccagggtgggtggaataagttgatttggccaatgtgtaatatttaaactgttctgtaaaataagtgtctggccatttggtatgatttctgtgtgtgaaaggtcccaaaatcaaaatggtacatccataatcagccaccatttaacccttccttgttctaaaacaaaaaccaaagggcgctggttggtagggtgaggtgggggagtattttaatttttggaatttgggaagcagacagctttactttgtaaggttggaacagcagcactatacatgaaatataaaccaaaaacctttactgtttctaaatttcctagattgctattatttggttgtaagttgagtattccacagaaagtggtaattatctcttctctcttcctccattagaaaattaggtaaataatggattcctataatgggagcatcaccacttattaaaacacacatagaatgatgaattaaaaaagttttctaggattgtcttttattctgccacatttattgataaacagtgaaggaatttttaaaaaatttttaagaattgtttgtcacgtcatttttagaaatgttctacctgtatatggtaatgtccagttttaaaaatattggacatcttcaatcttaaacatttctatttagctgattggttctcacatatacttctaaaagaaacttttatgttataagagttactttttggataagatttattaatctcagttacctactattctgacattttaggaaggaggtaattgtttttaatgatggataaacttgtgctggtgttttggatcttatgatgctgagcatgttctgcactggtgctaatgtctaatataattttatatttacacacatacgtgctacccagagattaatttagtccatatgaactattgacccattgttcattgagacagcaacatacgcactcctaaatcagtgtgtttagacttttcaagtatctaactcatttccaaacatgtaccatgttttataaacctcttgatttccagcaacatactatagaaaacacctgctactcaaaacacaacttctcagtgtcatccattgctgtcgtgagagacaacatagcaatatctggtatgttgcaagctttcaagatagcctgaacttaaaaagttggtgcattagttgtatctgatggatataaatttgcctcctagttcactttgtgtcaagagctaaaactgtgaacctaactttctcttattggtgggtaataactgaaaataaagatttattttcatgctca

SEQ ID NO: 336433 - DNA, 3272 bp, Homo sapiens
agcgcatggactgaggtgcggggaagccggcccctcaccgaagctttccgtagttacggaggagcttgggggtccatcgctgcttactgcgcagagctgctcctttgaggtgctgttgtttcaggctcctgtcctgccgtcttgtcccacgacggcgcggagtatccccgctgaaaagcagggggtcgttccaggccatcagacgtgtggagtaagctgcaggaataagacgagttggaagaagacctgatcaacaacttcagggtgaagggaaaataattgatagaagaccagaaaggcgaccacctcgtgaacgaagattcgaaaagccacttgaagaaaagggtgaaggaggcgaattttcagttgatagaccgattattgaccgacctattcgaggtcgtggtggtcttggaagaggtcgagggggccgtggacgtggaatgggccgaggagatggatttgattctcgtggcaaacgtgaatttgataggcatagtggaagtgatagatctggcctgaagcacgaggacaaacgtggaggtagcggatctcacaactggggaactgtcaaagacgaattaacagagtcccccaaatacattcagaaacaaatatcttataattacagtgacttggatcaatcaaatgtgactgaggaaacacctgaaggtgaagaacatcatccagtggcagacactgaaaataaggagaatgaagttgaagaggtaaaagaggagggtccaaaagagatgactttggatgagtggaaggctattcaaaataaggaccgggcaaaagtagaatttaatatccgaaaaccaaatgaaggtgctgatgggcagtggaagaagggatttgttcttcataaatcaaagagtgaagaggctcatgctgaagattcggttatggaccatcatttccggaagccagcaaatgatataacgtctcagctggagatcaattttggagaccttggccgcccaggacgtggcggcaggggaggacgaggtggacgtgggcgtggtgggcgcccaaaccgtggcagcaggaccgacaagtcaagtgcttctgctcctgatgtggatgacccagaggcattcccagctctggcttaactggatgccataagacaaccctggttcctttgtgaacccttctgttcaaagcttttgcatgcttaaggattccaaacgactaagaaattaaaaaaaaaaagactgtcattcataccattcacacctaaagactgaattttatctgttttaaaaatgaacttctcccgctacacagaagtaacaaatatggtagtcagttttgtatttagaaatgtattggtagcagggatgttttcataattttcagagattatgcattcttcatgaatacttttgtattgctgcttgcaaatatgcatttccaaacttgaaatataggtgtgaacagtgtgtaccagtttaaagctttcacttcatttgtgttttttaattaaggatttagaagttcccccaattacaaactggttttaaatattggacatactggttttaatacctgctttgcatattcacacatggtcaactgggacatgttaaactttgatttgtcaaattttatgctgtgtggaatactaactatatgtattttaacttagttttaatattttcatttttggggaaaaatcttttttcacttctcatgatagctgttatatatatatgctaaatctttatatacagaaatatcagtacttgaacaaattcaaagcacatttggtttattaacccttgctccttgcatggctcattaggttcaaattataactgatttacattttcagctatatttactttttaaatgcttgagtttcccattttaaaatctaaactagacatcttaattggtgaaagttgtttaaactacttattgttggtaggcacatcgtgtcaagtgaagtagttttataggtatgggttttttctcccccttcaccagggtgggtggaataagttgatttggccaatgtgtaatatttaaactgttctgtaaaataagtgtctggccatttggtatgatttctgtgtgtgaaaggtcccaaaatcaaaatggtacatccataatcagccaccatttaacccttccttgttctaaaacaaaaaccaaagggcgctggttggtagggtgaggtgggggagtattttaatttttggaatttgggaagcagacagctttactttgtaaggttggaacagcagcactatacatgaaatataaaccaaaaacctttactgtttctaaatttcctagattgctattatttggttgtaagttgagtattccacagaaagtggtaattatctcttctctcttcctccattagaaaattaggtaaataatggattcctataatgggagcatcaccacttattaaaacacacatagaatgatgaattaaaaaagttttctaggattgtcttttattctgccacatttattgataaacagtgaaggaatttttaaaaaatttttaagaattgtttgtcacgtcatttttagaaatgttctacctgtatatggtaatgtccagttttaaaaatattggacatcttcaatcttaaacatttctatttagctgattggttctcacatatacttctaaaagaaacttttatgttataagagttactttttggataagatttattaatctcagttacctactattctgacattttaggaaggaggtaattgtttttaatgatggataaacttgtgctggtgttttggatcttatgatgctgagcatgttctgcactggtgctaatgtctaatataattttatatttacacacatacgtgctacccagagattaatttagtccatatgaactattgacccattgttcattgagacagcaacatacgcactcctaaatcagtgtgtttagacttttcaagtatctaactcatttccaaacatgtaccatgttttataaacctcttgatttccagcaacatactatagaaaacacctgctactcaaaacacaacttctcagtgtcatccattgctgtcgtgagagacaacatagcaatatctggtatgttgcaagctttcaagatagcctgaacttaaaaagttggtgcattagttgtatctgatggatataaatttgcctcctagttcactttgtgtcaagagctaaaactgtgaacctaactttctcttattggtgggtaataactgaaaataaagatttattttcatgctca

SEQ ID NO: 336434 - DNA, 2821 bp, Homo sapiens
ctgacgtcgactggtttagtatttttagtaagaaaggagttagagaatgtgagagcttatggtatttttgtatgaagaacttttcagctacatgtaaatggacctagatgcctttctttttctttctttccttagagagtcccccaaatacattcagaaacaaatatcttataattacagtgacttggatcaatcaaatgtgactgaggaaacacctgaaggtgaagaacatcatccagtggcagacactgaaaataaggagaatgaagttgaagaggtaaaagaggagggtccaaaagagatgactttggatgagtggaaggctattcaaaataaggaccgggcaaaagtagaatttaatatccgaaaaccaaatgaaggtgctgatgggcagtggaagaagggatttgttcttcataaatcaaagagtgaagaggctcatgctgaagattcggttatggaccatcatttccggaagccagcaaatgatataacgtctcagctggagatcaattttggagaccttggccgcccaggacgtggcggcaggggaggacgaggtggacgtgggcgtggtgggcgcccaaaccgtggcagcaggaccgacaagtcaagtgcttctgctcctgatgtggatgacccagaggcattcccagctctggcttaactggatgccataagacaaccctggttcctttgtgaacccttctgttcaaagcttttgcatgcttaaggattccaaacgactaagaaattaaaaaaaaaaagactgtcattcataccattcacacctaaagactgaattttatctgttttaaaaatgaacttctcccgctacacagaagtaacaaatatggtagtcagttttgtatttagaaatgtattggtagcagggatgttttcataattttcagagattatgcattcttcatgaatacttttgtattgctgcttgcaaatatgcatttccaaacttgaaatataggtgtgaacagtgtgtaccagtttaaagctttcacttcatttgtgttttttaattaaggatttagaagttcccccaattacaaactggttttaaatattggacatactggttttaatacctgctttgcatattcacacatggtcaactgggacatgttaaactttgatttgtcaaattttatgctgtgtggaatactaactatatgtattttaacttagttttaatattttcatttttggggaaaaatcttttttcacttctcatgatagctgttatatatatatgctaaatctttatatacagaaatatcagtacttgaacaaattcaaagcacatttggtttattaacccttgctccttgcatggctcattaggttcaaattataactgatttacattttcagctatatttactttttaaatgcttgagtttcccattttaaaatctaaactagacatcttaattggtgaaagttgtttaaactacttattgttggtaggcacatcgtgtcaagtgaagtagttttataggtatgggttttttctcccccttcaccagggtgggtggaataagttgatttggccaatgtgtaatatttaaactgttctgtaaaataagtgtctggccatttggtatgatttctgtgtgtgaaaggtcccaaaatcaaaatggtacatccataatcagccaccatttaacccttccttgttctaaaacaaaaaccaaagggcgctggttggtagggtgaggtgggggagtattttaatttttggaatttgggaagcagacagctttactttgtaaggttggaacagcagcactatacatgaaatataaaccaaaaacctttactgtttctaaatttcctagattgctattatttggttgtaagttgagtattccacagaaagtggtaattatctcttctctcttcctccattagaaaattaggtaaataatggattcctataatgggagcatcaccacttattaaaacacacatagaatgatgaattaaaaaagttttctaggattgtcttttattctgccacatttattgataaacagtgaaggaatttttaaaaaatttttaagaattgtttgtcacgtcatttttagaaatgttctacctgtatatggtaatgtccagttttaaaaatattggacatcttcaatcttaaacatttctatttagctgattggttctcacatatacttctaaaagaaacttttatgttataagagttactttttggataagatttattaatctcagttacctactattctgacattttaggaaggaggtaattgtttttaatgatggataaacttgtgctggtgttttggatcttatgatgctgagcatgttctgcactggtgctaatgtctaatataattttatatttacacacatacgtgctacccagagattaatttagtccatatgaactattgacccattgttcattgagacagcaacatacgcactcctaaatcagtgtgtttagacttttcaagtatctaactcatttccaaacatgtaccatgttttataaacctcttgatttccagcaacatactatagaaaacacctgctactcaaaacacaacttctcagtgtcatccattgctgtcgtgagagacaacatagcaatatctggtatgttgcaagctttcaagatagcctgaacttaaaaagttggtgcattagttgtatctgatggatataaatttgcctcctagttcactttgtgtcaagagctaaaactgtgaacctaactttctcttattggtgggtaataactgaaaataaagatttattttcatgctca

SEQ ID NO: 336435 - DNA, 2997 bp, Homo sapiens
ctagaggattaccttcttgtatgttattaagagttacatattgtgggaattatggaaattaaaaatgtggtttaggagaagataggctgaggattttacataagagggtagtttttaaacaaggtagtgtttttaagaaatgtgtattttagtattcgtaaagccagttctagattgtattactgataaatgatcatttaagagttcataagtatgaattccatattccttacttgtctctaattagcaaacactgaattcctggtctctaccaagttgcttagttacataggaaactagggtaccctcatccttgaataatctttctctaaaagattacaaggttaattttctcaattaaaatcataaatttaaaatacttttatgtaatatcagctctctaccaggtataaaacttgaaaaccttttcacagggagaatgaagttgaagaggtaaaagaggagggtccaaaagagatgactttggatgagtggaaggctattcaaaataaggaccgggcaaaagtagaatttaatatccgaaaaccaaatgaaggtgctgatgggcagtggaagaagggatttgttcttcataaatcaaagagtgaagaggctcatgctgaagattcggttatggaccatcatttccggaagccagcaaatgatataacgtctcagctggagatcaattttggagaccttggccgcccaggacgtggcggcaggggaggacgaggtggacgtgggcgtggtgggcgcccaaaccgtggcagcaggaccgacaagtcaagtgcttctgctcctgatgtggatgacccagaggcattcccagctctggcttaactggatgccataagacaaccctggttcctttgtgaacccttctgttcaaagcttttgcatgcttaaggattccaaacgactaagaaattaaaaaaaaaaagactgtcattcataccattcacacctaaagactgaattttatctgttttaaaaatgaacttctcccgctacacagaagtaacaaatatggtagtcagttttgtatttagaaatgtattggtagcagggatgttttcataattttcagagattatgcattcttcatgaatacttttgtattgctgcttgcaaatatgcatttccaaacttgaaatataggtgtgaacagtgtgtaccagtttaaagctttcacttcatttgtgttttttaattaaggatttagaagttcccccaattacaaactggttttaaatattggacatactggttttaatacctgctttgcatattcacacatggtcaactgggacatgttaaactttgatttgtcaaattttatgctgtgtggaatactaactatatgtattttaacttagttttaatattttcatttttggggaaaaatcttttttcacttctcatgatagctgttatatatatatgctaaatctttatatacagaaatatcagtacttgaacaaattcaaagcacatttggtttattaacccttgctccttgcatggctcattaggttcaaattataactgatttacattttcagctatatttactttttaaatgcttgagtttcccattttaaaatctaaactagacatcttaattggtgaaagttgtttaaactacttattgttggtaggcacatcgtgtcaagtgaagtagttttataggtatgggttttttctcccccttcaccagggtgggtggaataagttgatttggccaatgtgtaatatttaaactgttctgtaaaataagtgtctggccatttggtatgatttctgtgtgtgaaaggtcccaaaatcaaaatggtacatccataatcagccaccatttaacccttccttgttctaaaacaaaaaccaaagggcgctggttggtagggtgaggtgggggagtattttaatttttggaatttgggaagcagacagctttactttgtaaggttggaacagcagcactatacatgaaatataaaccaaaaacctttactgtttctaaatttcctagattgctattatttggttgtaagttgagtattccacagaaagtggtaattatctcttctctcttcctccattagaaaattaggtaaataatggattcctataatgggagcatcaccacttattaaaacacacatagaatgatgaattaaaaaagttttctaggattgtcttttattctgccacatttattgataaacagtgaaggaatttttaaaaaatttttaagaattgtttgtcacgtcatttttagaaatgttctacctgtatatggtaatgtccagttttaaaaatattggacatcttcaatcttaaacatttctatttagctgattggttctcacatatacttctaaaagaaacttttatgttataagagttactttttggataagatttattaatctcagttacctactattctgacattttaggaaggaggtaattgtttttaatgatggataaacttgtgctggtgttttggatcttatgatgctgagcatgttctgcactggtgctaatgtctaatataattttatatttacacacatacgtgctacccagagattaatttagtccatatgaactattgacccattgttcattgagacagcaacatacgcactcctaaatcagtgtgtttagacttttcaagtatctaactcatttccaaacatgtaccatgttttataaacctcttgatttccagcaacatactatagaaaacacctgctactcaaaacacaacttctcagtgtcatccattgctgtcgtgagagacaacatagcaatatctggtatgttgcaagctttcaagatagcctgaacttaaaaagttggtgcattagttgtatctgatggatataaatttgcctcctagttcactttgtgtcaagagctaaaactgtgaacctaactttctcttattggtgggtaataactgaaaataaagatttattttcatgctca

SEQ ID NO: 336436 - DNA, 3028 bp, Homo sapiens
gcagctcagctcagctcagctcagctcagctcagctcagtcagctcagctcagctcagctcagctcagctcagctcagcagctcagctcagctcagctcagctcagctcagctcagtcagctcagctcagctcagctcagctcagctcagctcagcagctcagctcagctcagctcagctcagctcagctcagtcagctcagctcagctcagctcagctcagctcagctcagcagctcagctcagctcagctcagctcagctcagctcagtcagctcagctcagctcagctcagctcagctcagctcagcagctcagctcagctcagctcagctcagctcagctcagtcagctcagctcagctcagctcagctcagctcagctcagcagctcagctcagctcagctcagctcagctcagctcagtcagctcagctcagctcagctcagctcagctcagctcagcagctcagctcagctcagctcagctcagctcagctcagtcagctcagctcagctcagctcagctcagctcagctcagcagctcagctcagctcagctcagctcagctcagctcagtcagctcagctcagctcagctcagctcagctcagctcagcagctcagctcagctcagctcagctcagctcagctcagcagctcagctcagctcagctcagctcagctcagctcacagtcagtcagtctcagctggagatcaattttggagaccttggccgcccaggacgtggcggcaggggaggacgaggtggacgtgggcgtggtgggcgcccaaaccgtggcagcaggaccgacaagtcaagtgcttctgctcctgatgtggatgacccagaggcattcccagctctggcttaactggatgccataagacaaccctggttcctttgtgaacccttctgttcaaagcttttgcatgcttaaggattccaaacgactaagaaattaaaaaaaaaaagactgtcattcataccattcacacctaaagactgaattttatctgttttaaaaatgaacttctcccgctacacagaagtaacaaatatggtagtcagttttgtatttagaaatgtattggtagcagggatgttttcataattttcagagattatgcattcttcatgaatacttttgtattgctgcttgcaaatatgcatttccaaacttgaaatataggtgtgaacagtgtgtaccagtttaaagctttcacttcatttgtgttttttaattaaggatttagaagttcccccaattacaaactggttttaaatattggacatactggttttaatacctgctttgcatattcacacatggtcaactgggacatgttaaactttgatttgtcaaattttatgctgtgtggaatactaactatatgtattttaacttagttttaatattttcatttttggggaaaaatcttttttcacttctcatgatagctgttatatatatatgctaaatctttatatacagaaatatcagtacttgaacaaattcaaagcacatttggtttattaacccttgctccttgcatggctcattaggttcaaattataactgatttacattttcagctatatttactttttaaatgcttgagtttcccattttaaaatctaaactagacatcttaattggtgaaagttgtttaaactacttattgttggtaggcacatcgtgtcaagtgaagtagttttataggtatgggttttttctcccccttcaccagggtgggtggaataagttgatttggccaatgtgtaatatttaaactgttctgtaaaataagtgtctggccatttggtatgatttctgtgtgtgaaaggtcccaaaatcaaaatggtacatccataatcagccaccatttaacccttccttgttctaaaacaaaaaccaaagggcgctggttggtagggtgaggtgggggagtattttaatttttggaatttgggaagcagacagctttactttgtaaggttggaacagcagcactatacatgaaatataaaccaaaaacctttactgtttctaaatttcctagattgctattatttggttgtaagttgagtattccacagaaagtggtaattatctcttctctcttcctccattagaaaattaggtaaataatggattcctataatgggagcatcaccacttattaaaacacacatagaatgatgaattaaaaaagttttctaggattgtcttttattctgccacatttattgataaacagtgaaggaatttttaaaaaatttttaagaattgtttgtcacgtcatttttagaaatgttctacctgtatatggtaatgtccagttttaaaaatattggacatcttcaatcttaaacatttctatttagctgattggttctcacatatacttctaaaagaaacttttatgttataagagttactttttggataagatttattaatctcagttacctactattctgacattttaggaaggaggtaattgtttttaatgatggataaacttgtgctggtgttttggatcttatgatgctgagcatgttctgcactggtgctaatgtctaatataattttatatttacacacatacgtgctacccagagattaatttagtccatatgaactattgacccattgttcattgagacagcaacatacgcactcctaaatcagtgtgtttagacttttcaagtatctaactcatttccaaacatgtaccatgttttataaacctcttgatttccagcaacatactatagaaaacacctgctactcaaaacacaacttctcagtgtcatccattgctgtcgtgagagacaacatagcaatatctggtatgttgcaagctttcaagatagcctgaacttaaaaagttggtgcattagttgtatctgatggatataaatttgcctcctagttcactttgtgtcaagagctaaaactgtgaacctaactttctcttattggtgggtaataactgaaaataaagatttattttcatgctca

SEQ ID NO: 336437 - DNA, 229 bp, Homo sapiens
aatggtgactgctttcaagtcttagttgctcagtaatcacaatttcagcaccaatgagtgatgccctgttgatgaatgacacccagtgcctcaggtctgaaatagtttctgacactaataagatattttgactgcaaatgtaaagcttaaggagttgaagttcaaagatagagtaatctatcaattagattgatcactaatcattcccccacatcagttgtaattcaag

SEQ ID NO: 336438 - DNA, 409 bp, Homo sapiens
agcaataactaataacctaaatatatgatggtgccaacaccatggatttgttgtgaaaattcaaaagtgttaataagtataaagtacctagaacaacacctgaacatagtgggtgctcattaaagtgacctattgcttttgttgctattcatgacactttctgaatctactcctctcaacggcattggtctcttgacaccacacccatctggttatcctctttgtttttttgttttgttttgagacagaatctcattgtgtcgcccaggcctgagcgcagtgatgcaatcatagctcactgcagcctcaaactcctgggctcaagcaatcctcctgcctcagcctcccagaatgctgaaattacaggcatgggccaccacgcccagacaccactgtgctattgaaactt

SEQ ID NO: 336439 - DNA, 234 bp, Homo sapiens
ctggccggatgtttatttttattgtgccaagctggggatgcaacaatgaacaggacaaagatcctgaccttgggatctcagagctcatgagaaaggcagacaccttattctgggcttttaattcaggtgggatggggacacctaaggggcctgttggaggaacaccccacccaggagttaaagaaggaaagcttcctggaggaggtagcatcccagctgggctatgaaagagaa

SEQ ID NO: 336440 - DNA, 280 bp, Homo sapiens
agctcatcaaaatactcattctactttatagaatgaggtgtgcctgattttagaattataaacaaaagccaataagatctttacactaaatttgtggtaattttaccttttcacaatagtaagcctgaagctagtggttatgcaatgataagaacataataatggctaatgtttattgaacaatcaatttgtcccatgcactgtagcctttacatatactatcacatttaattaccaaaatgcctttctggtatatcattgcacaaaaatacacggtggg

SEQ ID NO: 336441 - DNA, 195 bp, Homo sapiens
cacaggggatgggaaggttggagaggactataactgactcactcttatttcagaaccaaaagcaatgggggaagtcagagcagagaagatttcagctcaacctgaaatggaacttcctatcaatgagaatgtgacaattacaggaggggcttccttgtgaggtagtgaactctccctgttatacaaagtcattga

SEQ ID NO: 336442 - DNA, 650 bp, Homo sapiens
ggaaaagtataaagcataacatagccaacacccatgtacccaccaccaactttaaaaaaccttatgactttactgtaattttcttaaaattgtaggttatttttagtgagcaggaaccacagtcaaccgtaagttttagagtccaggaggctcaaacctggccacacattagaataccctggggataccctggggagctttaaaaaagtccttgtacctctgggagggtgcaggaagcccccacctctatcatcagaattttaaaaagctccccaaggcgaggattctatcatgcagtcagggtaagagacctgctgtttggagggttgtgtttggtttttcttcactgggttctcagatgcctggtaccaagccatgtgtggtactcctggactttatatttcattttcttaaagcattttttaatgtggttctactttcaagattctggagggtaatgtcctggggagttcctctccttagactcttccctcttcagcaccttatgaggcaagctgcggatatatttacatattcattacaaagcataagcatcaggaacttagagagtaggagtgaggcattcgagaggggactaagaaattcagaagtattgggagctactgtctgttgaaagtgtttgagatgag

SEQ ID NO: 336443 - DNA, 296 bp, Homo sapiens
agcttcagaggttgttggttccaactgtggaagggctcaggaaggatttgatgggatggggtggctcaggggacccagggaggaaagtgagcagcaaagcatggaggccagagaagcattttaagggagaaagctgacagtggcccttgaaatgaatgaaggaaggaagactcatcagtgaatgagaacaggaagtacaggagtgaggtgatggagtgaagccacggaacggacaggaggggctgggtggttaaataacccctcctgccctcctccgcctcccttcagacttccaa

SEQ ID NO: 336444 - DNA, 570 bp, Homo sapiens
gaggctgtgcacccccgcaaaggctcctgcccagcgtccagcctatccgcggggactccacgtgcaccccctcctcattgtccttgtctagggcctcggcaagctcctcgctcccatggcgtgacttcaggggcgcaggagcctgggctgagcaggtggagtagggtgagcaccgccaagaacccagtgagagtggcgccccagggcggcacaggaggccgcatttaacgtgtcaatcatctcaaagatattatggcatcttcttttttttgacatcttataatatctataatgtctattatatcttgtgatagaattattaacaccacttcattgtgattattatgattatttttataccaacacatcttcaattattaatattcccagttgctagagaaaaatgaaacgactagttttgaaagccttacttctgccaatggaagcacattccagcatgtcgccaacgcaatccattttccaccactttcacaagaaaagttacggcacaattatactatcctacccttatatactttttgtgcatgtgtacttgtatgtatgtatgtt

SEQ ID NO: 336445 - DNA, 483 bp, Homo sapiens
agtgcagtgaatagaagacacttctctgcaccccaaaagctccatgctgattgcgagaaggaaatgctggatggaggggttcctggaactactgtgagggaaatggtaacagaactttggatgtggaacgtgcagtaggagttacacgaagtgcgggtctgcacttggggtggtcagcacggcggatgcccagcaaaggcactgcctggtccacatcccggagtggtctctacgccccagtcggcatcgcagctgatggtgaaacttttggtgtggcagaagagtgtccacaaactttggaagttgctagagaaaaatgaaacgactagttttgaaagccttacttctgccaatggaagcacattccagcatgtcgccaacgcaatccattttccaccactttcacaagaaaagttacggcacaattatactatcctacccttatatactttttgtgcatgtgtacttgtatgtatgtatgtt

SEQ ID NO: 336446 - DNA, 101 bp, Homo sapiens
attttttttctttttgcacacggtgggagatcttttttgttttgcattgatctgtgttggtggcgctgtagtgctcctcaacaatttatgtcagtttcact

SEQ ID NO: 336447 - DNA, 258 bp, Homo sapiens
gtgggaaggccagagcagacaggttttcctcctgtgggttccctccggctaggccccaggagttgtctgaatcgactcactaacattaaccagcttgtggccatctgtactctaccaattatacatccggaagatgaaccagacagagccctggggcatcccactacagaccttcttacaggttgattccttggatcaacttttcccttttgttcccttgaggggctctcagtctttaagagacagagtgagacacag

SEQ ID NO: 336448 - DNA, 421 bp, Homo sapiens
agcctaaatgagattctaggtactatctgataaggaaaagtgaccatgcagccattttgagaaggattaaatttaggggcagcatcaaggtctttctaggtctactataaatgggccacaaactcttaggactggaacaagaattatgtgtctctgaaaataggaagatgtggccgggcacgatggctcacacctgttatcccagcactttgggaggctgaggctggcagatcacctgaggtcaggagttcaagaccagcctgaccaacatggagaaactttgtctctactaaaaatacaaaaaatagccaggtagcacgcctgtagtcccagctactgtggaggctgaggcagttggaggctgagacaggagatcttggcagtaagccaagatcgtgccactgcactccagctctgtctc

SEQ ID NO: 336449 - DNA, 113 bp, Homo sapiens
cctccccgtcttccttcccctccccatgtggcctggccagaacctcttaaatccaggcccttagacctaagggaaggctttctgctcttcaacagtagaacagtttctgtcac

SEQ ID NO: 336450 - DNA, 302 bp, Homo sapiens
ggtgcaaggtgagagtgaggttaaaggtcagagaggaggggctgaggaggccatctcccaccaggagcagacagctggtggcttgagactggggtggagctgcgtgggggatgggaggggactgagcatggggcttcatcttcactgcccactcctcccctctccctggctgtgcccgccttctgggattgtaggattccagcagctggcgccccaggtgctgctgcggctgaggaaggcaatcccagtcagctgccttctcgattccagggtggctgtagccagaagcaggaccagataag

SEQ ID NO: 336451 - DNA, 87 bp, Homo sapiens
atgattaaatttattaaaaccttaatttgtatgcaaggtttcaggatcatttagatcactttagaagaggttataaactgtagagta

SEQ ID NO: 336452 - DNA, 438 bp, Homo sapiens
aaacaggctgaggtttaaggcatttaaataactgtgttcaaggacctggaaccagaatccaatcccaggtttgacgggccccaatgtctgtacctctaactgccctccagagaagcagggctccatggcaaagacagaacttgaccaaagttgtgtccaagcccatgggagcagtatctgatgtatttaattcccaggcttcctatgcagtagcacgtctttattgattctgcagggtctgggtgcctggcagaagataagtggaatccacatccttccacttcagccacaacatgagacatacctcatcacctcttttcttagatacttatagtccctaaaattaagccattgggttgacgagacatacaaggataaaacaggagacaaaaataaccctcatgaagtggaggtcagtgctgttgatggagctgtgta

SEQ ID NO: 336453 - DNA, 986 bp, Homo sapiens
cagtgtgaatccctggaaggcaagatcgccattctggtctcttgtggatatcaatgctgatctcagcttctgatgcacggcagtcaattaataaatgattgttgcctgaaaaactgagccccaaaacaatattacaagtttaatatcagtaaaggatttaatgctttctaacatgaagataccagaagttgctgatttttgtataacccagagatggatttaaatgcagagtgtatgaacttcttcattcctgagggaggacttatgatttcatgagaaatgccctaggaaaggggccggggagactgatggagaagaagagtttgggagggaagccccaaggaccatctgccccatcagagtcacatgcagagggtcctgctcctgccgttggaagttggcttcctgagctgctgaacgtgccagtcctgctgacccactctcagatatcacaggcacccgctgtgtctgacagagacctttctgcaagtacacgtgcaggtctgctctgcaaaggcgttatcatctgcagattattgcacagagtggctacgagctgtggtgtgatcctgtcacagagagagcctggtcacgttttcagaacagcaggaaacaggtacacctgtaagcttatacttatcagatttaaaaataaaacaaaaaatccatgctattccatgaaaatcggactcaaataaacttagtcactgatctgtgaagtaaataatctgatggtaacgcatcagttgacacttgggcctgggtttttaggcactaatgaaagccaggggcaaaataatttttaatctaccattatttcccttgatggttcgacaaaagttcttgtactagaaagttttataaaactactttctgagtgtcctgtgacatttctctgatgatataaaaagtcaatatttgatagcttaaatatcaatattgacagaaatatgattatttaaataaaaacacaaatagtaaaataa

SEQ ID NO: 336454 - DNA, 537 bp, Homo sapiens
  misc_feature (435)..(435): n is a, c, g, or t
  misc_feature (487)..(487): n is a, c, g, or t
tgaatttatttaaaaatacatgtgattgttttacataatatgacttgctagaaaattttaagtttatataaataatgataaagtacacttgaaatatattttaattgattctatctctagcaaataccagataatattttttatttatgcggggtttttctaacatatatattaaaaaaacatatatttctgtaagtcatattcttttctctttttctaagccatacatactctcccaccatttatgtactttatagatttgtagatttttagtagtagaactaaaatggaatttaattgctgagcatttgcgggcaaagaccagtggttcagttccttcctgctgcaggtggaaaaccattcctcctggcaccgtctgtttgtggacccgttaagccgcgccatgtacagctctgacggcccggattttgagtntgtgcagcagaagcgtaaagaggggctgagtattcatgaagcagtgtggcanctggcgtgaaaaagtcaagggccggaatggcttccttgaacctggctggc

SEQ ID NO: 336455 - DNA, 502 bp, Homo sapiens
ccaacaggaatcctgatggtcccacagaggcccctgaggtactgaccagcgtcaccccatttctgcatggagcaatttgcataaacatctggcaaatggagtgggagagagatgacacccaacaagtatataatctgtgccaagtcctttgtcatgtacttagcctgtgacactctatttaccctccatatcaacgccagaaagtagactttgctcccattctataggcaaggccacagaggctgagcgatgtgcctgatgtcaccggcttgtcaagaggcatgcagaaatgtgaactctgaactctgaagctcaagctcatttaaaggtgccctggggagtgcttgcactaccaaagccaaggactcccaaagccccatctgggccagcaatgctccgtcttatcctcactgtcctgcttcccatcctcagcctctcggagctgctcccaaacaaacgactgaagaggagaatgggagggtttcccatgtcctcctgccca

SEQ ID NO: 336456 - DNA, 299 bp, Homo sapiens
tttctgtattcatttatcccggacttgggagtaattatgtcaggatctttttcccaaggactctaggaaagcaaagcaactttccacccaattctctttcatgaaaggctttgctttcttcgaatgcgtgtttgctgtttatttcagcctcccaggcagccaagggaccgttcaggacaagtttctcatcagcaacaggtgtcttattactacagtggctcatcgttagtggaacccccagcttctggctgcaggaagtacaggaaaaatttgcaaaggaggttactctagcctttctg

SEQ ID NO: 336457 - DNA, 552 bp, Homo sapiens
gagttccagaccagcctggggaacatagtgagaccccagctctacaaaaaaaatttttttaattagccaggcatggtagtgtgtgcctgtagtcccaagtactcaggagggtgaggcaggaggattgcttgagcccaggggttggaggctgcagtgagccatgatcacaccgctgcactccagcctgagtgacagagtgagaccctaaaaaaaaaagagagagaaagaagaaaagtctggatggagaggagtgtgaaaagaggttagggagggcagccaggacagatctgaaggacacagggtttgggtttgttttaagagtggtgggggctgggcacagtgactcaagtttgtaatcccagctctttgggaggctgaggcgggaggatcacttgaggttaggagaccagcctggccaacatgatgaaaccctgtctctactaaaaatacaaaaattagctgtaatcccagctactcgagaggctgaggcaggagaattgcttgaacccgggaggcggagtttgcagtgaactgagattgcgccactgcact

SEQ ID NO: 336458 - DNA, 227 bp, Homo sapiens
ctgtaatgtgattctattacttttataatttaaaaattagcttttgaagcattataaaaattaatttacaaaatgtacatcaaaaaataaataagacatcttaaagaccctgtcttagtaattcgcaagatgagatactaagagagttaggatcaggagcttcctagttcaggagtcagtaaggccattttctccaacaccaccactccgccaaatggaggcagcct

SEQ ID NO: 336459 - DNA, 324 bp, Homo sapiens
ggaaggtcatcctcataccttaactgtcagagtctgagaattttgtattcattggtagtttgaccagcctgtcaacttattcttgaagaaatcctcaagataaagtattaacattttttttctacctgatgatttttaggtaaagcagcagctttctctttttgctataataattccatgtaatgtatagtttttccccgactccccagctttttgagacatttgaaacagagaagctgaaaaaaaaactataatgaacttttgtatacccatacttatatatttttcctgaattatgtgaaaattatagatatcatggcagtt

SEQ ID NO: 336460 - DNA, 164 bp, Homo sapiens
ttttgttgttgttacaaaatcagtatgtcccatttagcagtcatagcttcgcatttaaaaaattgtcctctactctcatccagaccttttgtctggaagggatatattaaagcgggacaaaagttttcacagaatttttttttttttttttttttttttttttt

SEQ ID NO: 336461 - DNA, 240 bp, Homo sapiens
  misc_feature (215)..(215): n is a, c, g, or t
  misc_feature (217)..(217): n is a, c, g, or t
tgtccagccagccctcatgaagcaggctgtggctgtggagggcatggaggccctagggtgctgttcctggaaggttttagcaggagagtcctgaggcaatggagggtctctagggaacagcaggtattccctgagcctcagctaagtttcaggtgcctattgaaaaccttattccatagagtgtgagttagggggaagtgggggtgcaggagcangngcggtgatgggctgcctagaagg

SEQ ID NO: 336462 - DNA, 321 bp, Homo sapiens
cattaacgagatgtcttcctgttggccccgagaaatagcgaactgccatgttgtggagagggctacagagaaaggccctaagatcaacctctcagagctgagaggggtccctggccagcagccagtgggaaatagggggaagagggatctgggttgtgtaatcacaagaaatgaattctacaacaacctgagtgaatgtggaagagggctctgaatttcaaatgaggacccagctgactgacaccttgatttcacccctcacagacacccagctaaaaggtgctagactcctgatccatagaaactgtggagacagctaaa

SEQ ID NO: 336463 - DNA, 781 bp, Homo sapiens
ttaggattcagccctgatggaggctgaggaggcccagcgtggagcctctcctcccatctctgccatagaggaattcagcattatccctgaggctcccatgaggagcagccaggtctctgccttggggcttgaagctcaagaagatgaggacccatcctataagtggagagaggaacacagactctcagcaactcagcagagtgagttaagggatgtgtgtgactatgcgattgagacgatgccctcttttcccaaggaaggttctgcagatgtggagcccaatcaggaaagccttgtggctgaggcctgtgacactccggaacactgggaggcagtaccccagagcctagcaggccgacaagcaaggactctagctcccccagagctctgggcctgccccattcagagtgagcatctagacatggccccattttccagtgacctgggaagcgaagaagaggaggtggaattttggccaggacttacttctttgacattgggatctggacaggcagaagaagaagaggaaacctcttcagataactctggtcagaccagatattattctccctgcgaagagcatcctgcagagaccaaccagaatgaaggctctgaaagtgggactatcaggcagggggaagagctgccacctgaggagctgcaggaaagtcaagggctcttgcatccccaggaggtccaagttctggaggagcagggacagcaggaagcaggatttcggggggaaggaactctgagggaggatgtttgtgccgatgggcta

SEQ ID NO: 336464 - DNA, 156 bp, Homo sapiens
gcccggcttactgtcattgttttacagcacgtagtatcttcccgataaaggtttctcactcgtttttaaaatgctccacaaggtgacacatggtgttctcccagttctccgaagaaagctgcaggggcaaacttcgagggccttcaggaagccaca

SEQ ID NO: 336465 - DNA, 439 bp, Homo sapiens
ggtatggacacggagtcatctttgctgctaatgttggttttcaaacctagtaccagcatgttcgaggagcacgtggcttcctcctaacacgtggagtagtgtttcctccctggctcacagcctccactccccggagcctctctcgccctgcacgacccaggctctcagagctgctctcgtgctggcccccggtgctcgcagctggcatttatcgagggctcctctgtccacagcactgtggaaccaccctccatgcacgagtgagcgtgcacctcacaactatcctggcatgtgcattttacagccagaaaaccaaaagtccggacgaccagctgaccccagccctacgcctcaccacaaccccgcacatcacccacacgagcacaacgtccttcattcactctgcacatcccacacctcactacacccctgcacgcac

SEQ ID NO: 336466 - DNA, 238 bp, Homo sapiens
gtcccttctggcccgcacatgctatgactttatcaggcaaaactctcctggaatgtggcaggatgtggaaaccagtaccgagatcctgacctcctaaccttcctttctggctctcccatcatttgtttaccagagatctgggttttaggaaacgaaagcagcctcctgattcaaggttcagatcgtcccctcatccagccactgggacaggactttttatccaggcaagcacaggccg

SEQ ID NO: 336467 - DNA, 371 bp, Homo sapiens
atgcctcacaatgctgccaattccaccttgcacccctgactgatcaccagctagctgttctgcatatggagctgaaatctctctccagtggcttctccccactggtcctggttcccccgctcaaggatacgagaaattcgtttgatttctcatccccaggacaagctgctcactatcggaagttgatgtgcgcggagctttctctcatccaggcccagattccttccaccatcccatccccacatccaacaaagcagggggctatggtagcaagactggaaatggcgctgctctggatggggtggtcagggcagacttctaggaggaggtgacttctgagctgagactctaatgaagagaaggagctaggc

SEQ ID NO: 336468 - DNA, 283 bp, Homo sapiens
aataatagacttgtgatatgttaatataaacatttttatgaaaaataacttttccaaaacaaaaaaagtgagaagtgtggcattatctgacatttgtgtaaatcccattagtgtctggcttctcatagctggattctcataccctcttttttccattcagtctattgatactgcatatcatgtagcctctggacctcagccacatgcttaggagggaatgacagtaaacaggcaaatggtgacttggcatagtataaaaatagtcttgaccttgcagacccct

SEQ ID NO: 336469 - DNA, 349 bp, Homo sapiens
tcttgctctgtcgcctaggctggagtgcagtgggtgtgatcttggctcactgcaacctccacctcctgagttcaagcaattctcctgcctcagcctcccgagtagctgagattactgatgcacacacaccatacctggctaatttttgtatttttagtagagatggggtttcaccatgttggtcaggctgatctcgaactgctgacctcaggtgatccacccatctcagcctcccaaagtgctgcgattacaggcatgagctactgtgcccggcccagtatcatccattttttgccatgaggatacttccccgccccatccccaccaccaccccgtctgaggcaggaaa

SEQ ID NO: 336470 - DNA, 461 bp, Homo sapiens
aaatggaaatgatgacaatagcaccctgctcctaggtaagatgaggactaaatgagataagcagtttatgagtgttagtcatgtgtagtaagaagtttataaacactagggatgattgttcatttaaatatggctagaaaaggacattggacagacttgagaagaggctttgagtgtgaggctatattatctagtacgcaggaggaagccactggaaaaaaaacaagaaacagcaccttggccaagcagtgtttcagaaagtcatgacttctaacaggctctggcatccccagatgccatcaaccagcaaattataaatctgttactttgtggtttacgaattccatctttgtatatctacgtctttgataagcacagtcaagctgtacagtaggcagatgttgttaacccattttagaggtgaggaagcagaggccagggaactgggtgatttgcacaaa

SEQ ID NO: 336471 - DNA, 546 bp, Homo sapiens
ctgaatcctgccccagaacgtggctgtcactcaccataggattctcagcatagaatttttaattctgtaaacaccagccagtgccaaggagagcatgaggggagagaaagaaaacaagaaagcacaggtgttcacaatgccaagaagaaagatcaatgagatgaccaaacaagaggcactgtcttttctggctacctagtagggaggacaatgtagagtctctgaatagacagtggtcctacccacaggcacactcagtgactataagcttcctgagagcagggctgttctgaagagatttgagttttctcctggccatggagagtgtaattaagtagccctgggcccttgaagacttatagtgcaggttgactgaaagaactaaatcagccagtctttgcggagaggttgtcatgcaaacgaagtgctaagggtcttgcatgcatcccttcattttatcctcacaataggctgtgaagtaggcaccgtcatccctgttgtgcattgtgcaggcaagaacaccaccaaagcaaatgggaccaagac

SEQ ID NO: 336472 - DNA, 329 bp, Homo sapiens
tgctctctgaccctgatccagttccctctcctcctgctgctttagaagtgagggctcagtctcctgctcttgcttgttaggtcaaaagcttttagagacagccactgtcttctctatgggctctgagatgcttcttattctcttttggagaaaagacccccacagtcaagaagctttggctgagccatccttacttacagagcttgtgctgggcaagtcttggagggtcagcctgtgttctctaggggcttgctaacagaaaggaaacggcttttcctcgaaccacagagcacagcaactcttcagacacgctcggtcagcctgcaggg

SEQ ID NO: 336473 - DNA, 519 bp, Homo sapiens
tgttgctgtccctctctgcctcaaactaaatagtttcaccaaagcctaaaggctataagccaaatttatgaacatgactctctccttctccagctttatcatctctgggcattctccctcactccctcagatgaagaacggctggactgtatatatatgtacacagtatgtgtgtgtatttataccctttttttgtatttatgtttcacacacaaaaaaattattttggccgggcacggtggctcatgcctgtaatcccagcactttgggaggccaaggtgggtggatcatgaggtcaggaatttgagaccagcctggccaacatggtgaaaccccgtctctactaaaaatacaaaaattagctgggcgtggtggagcacgtctgtagtcccagctactcaggaggctgaggcaggagaatcgcttaaacccgggaggcggagcttgcagtgagccaaggtcgcgccactgcactccagcctgggcgacagaacaagactctgtctcaaaaaaaaaaaa

SEQ ID NO: 336474 - DNA, 337 bp, Homo sapiens
accagggagcttgctctctctttctccccttgtatgcacaaagaacaggtcatgtgagcatgcagggaaatggtgtcccttcccaatcagtccccactggggatcttcagtggcatcccagagctgtttgctatggtggcagtagctggagagctactgttaattaatttgagcaacagtgcagctgataaatttgatctagcagggaggtctgggactgccatcctgaactcaaggttctcaaatcctgtagctcttgggtcatattgataggggctatatttttaaaaagggatagttgggcagctggttggaaggaaatggcaatgagttcatc

SEQ ID NO: 336475 - DNA, 159 bp, Homo sapiens
atttatatataaatatgtgtatatatacacacatatacacacatataaaatttgcagatagaattatgtataatttgagaaaaatactttttatatgtctaaagttcaaaaacagaattatttcatgttaaacaatttattaggaagtgggaggatgca

SEQ ID NO: 336476 - DNA, 330 bp, Homo sapiens
tggcatgggcatgctgaataaattagtggcaatggattagtggatgggtcagaagctagatatgggtctgaaagggcagtgatatgtgaacaatggcaaaaaataacaaggaggtgaggtgagggaaaaccgacaaaaaataggaaaccatagacagagagagaaaagaatgaatgaagtgaagaatgcaattcagagaaaggggaactcttctacaagttgaatgttcaggggaggtagtaaaggcagacagaaaaggcggaagaagagggaaaggtggagaaggagcagcatatttttaaaaaggagagtgcaagagagaagcctcag

SEQ ID NO: 336477 - DNA, 322 bp, Homo sapiens
agatgaccagataaaatatcagtcaagcacatgtaacaaacacctttcattaaatacaaaatgactttgtagaggtcagctatcactgtcaccaaatgccatcaaatcttttggtcctaaaaacaatcacacagaaaagctaagatttcatcctttacaaaagcagggtcatcaccacactccttaaattctagctatccacaatgccaaacaacactggctcctttatcttcgcattcgaagtcaaggggtctaaggggctggcagaaattgctcagtcatgactgtaacaaaccatatctgttgtactttcctctaacag

SEQ ID NO: 336478 - DNA, 214 bp, Homo sapiens
tgggtcttgaaggcctttagagtctccaggagacctctgggtgggctgttgcctgacattgagcaatgtgtaccagagaaatggtgctgggcttgcctgggcagtggtatgggcaggagatctgggttccgagctggctttgtgagctgggttcacacgtagttgtgtgatctctggttgccctgcacttcctggagcggcctctgtggaaggg

SEQ ID NO: 336479 - DNA, 269 bp, Homo sapiens
agagtagcttcttacctgccagtgctagcttatgggcttaaaggagatggttcaaagaatttctggtaacagaaagataataggagcttgaaatacccctgttgacatcttgcgaataaacattgtgaaaaggtctttgatctctttgtcgttaagtcacttggaacatgcttttcttgtaaaaggttagttccagtgtccaaaacaaattttagctcatctgattaccttctgctgatgtaaatcccgtctagcatagcctgtatcct

SEQ ID NO: 336480 - DNA, 663 bp, Homo sapiens
aggaggattgctcgagcctaggagtttgagaccagcttgggcaacatagcgagaccccatctctattaaaaaaataaataataatttttaaatagatgttagccagtcttcagtcatcttaaggctttactggggctggaggatcctcttccaagatggtgtactcaaatggctggcaagttggtgttggttgttggtgggaggcctcaattcctcctctatgtgggactcttcacagggttgagtgtccttatgacatggcagctgcactccccagatcgagcgatgcaagaaaacaagacagaagcttcagtgccctttttgaccacgccttggaaatcatcccccatcactctcgccatgttctgttccttagacacaagccagtaaattccgcccacattcaagggaaggggagctaggtttcaccttttaaaaagaggtgtgtcagagaatctgggaacagattttacaaccaccacactgtcctaaagaggagtgatggtgtaattttgaaaaggaaaaaaagtctgggatccagacaaagattaatctggtagtaatgtcaaagatgaatggaagaaagggagaaacagaggtggatcgtagtgctgcgatctagcagtcaagtgatggatttagttggggcagtgagagggcaga

SEQ ID NO: 336481 - DNA, 539 bp, Homo sapiens
tacagaaagtaaggttcagagaagtagggacgtttgcttggggtggcacagctgttaagtggcagagccagacttgagcacaggtgtggtctccggtgagtctgcactgtgcaactcctcggattggccaacgtgagctttggattcatgctccagctctggcttgccggtggccctgggcaggttattcaaacttcctaggccttgggttcttcaccaatgatagtgacagtatcagctcccacccttagagttgtgagaattaaatacaatgctgtacttgagacactttgcgctgtgcctggcacatagtaggtgctcagcatgtcatggcctcagacacacagacagatgagaggcctggaagggtcacatgggcatcccaggaacaggggcacaatgccgggctgcgctatttgtgtcttagctcctggcctctctgggcgtctggctgttggctgaaggaaggagtgttagggcctggcttgccctgaagaggcaggcacaggggcatgggccttccaggagaatccaacctc

SEQ ID NO: 336482 - DNA, 179 bp, Homo sapiens
gtgaggtcatgctaagtcaaaaaggatcaggaaacagaaccatgaaaaggagcaaagatgaggttgtgcgagattgggcataaggggatgaatctaggggggcttagcagtcatcagtattcctacagcttatcatcatttacatgtttcttgatttttgttttgtttttgtttttttt
